United States Patent Application Publication US 2011/0183924 A1 - sequence listing, part 47

SEQ ID NO: 123508 - DNA, 480 bp, Homo sapiens
ccataactctaaactgatgtaagcctgcaacagctgtaaagtcatcagggattcatcaggtaacaccaccaaagttaaggttgcaatattttacaaactcacaggctgaaaaattccttaaaaaccatctggctgggcatggtagctcacacctgtaatcccagcacttcgggaggccaaggcagtttgtttgcttgagctcaggagttcaagaccagcctgggcaacatggcaaaaccccaactctaccaaaatatacaaaaattacccaggcgtggtggcatgtgcctgtagtcccagctacttagcaggctgaggtgggaggatcacttgaacccaggaagcggaggttgcagagagctgagatcagcgccactgcactctagcctgagtgacagagtgagaccctaccttaaaaaaaaaaaaatcatctaatgcagtagtttgcaagctttaagtagctatggaattctaccccat

SEQ ID NO: 123509 - DNA, 177 bp, Homo sapiens
gcattcaacagctttccacacacccccaagcacctctaaactaggggcagctacaagccgcagtggaaaggcagggattgggcagaagcagcacacacgctagacacacagaggggcttctgtggggaggctgccctgcacagggaccctccgcccggcacggggacccttcgccca

SEQ ID NO: 123510 - DNA, 318 bp, Homo sapiens
cttcagagtaagcaaaattatcaggcagaaagaggggcattacataatgataagggggtcaattctgcaagaagacataatccttgctgtgttgcacctaataacagagcatcaaaaatacatgaggcaaaaattgttacaattgcaaggagaaatgatgaatccactattagagatggagacttcaacatccttcttccagaaatggacagatccagcaggcagaaaatcattaaggatgtagttgaaatcagcaacaccataaataactggatataatgaacatctgtagactgcttcactcagcaatgcattctt

SEQ ID NO: 123511 - DNA, 282 bp, Homo sapiens
ggagtgagactctgtctcaaaaaataaaattaaaaacaaaaacaaaaacaaaaaacaaacacacaaccatgactgcaccaagtctctgttttagagcctgacttgtttgcacaatggtcccttgtttgtatactgcttttcagctgatctttaacagtactggggctgggtgcagtggctcacacctgtaatcccagcactctgggaggctgaggcgggtggatcacctgaggtcaggagttcaagaccagcctggccaacatggtgaaaccccgtctctat

SEQ ID NO: 123512 - DNA, 551 bp, Homo sapiens
gacttggcaaaacttgaataggtctgttggttggatggtagaaatatagtaatgttgatttcctgatttttgctagctatattacaattttattggattcagtccttgtttacagaagacacacagtatgtaggggttataagaagtcagctcaggaactttcaaatcatttagcaaaacaaaagttcttcgtactttaattccaagacttctataaatttgagattatttttaaaatacttaaaaaaaaactcctttaaagtctctcaacatgctgtcctattaataatagatttctaaattttttatttttatcaacgttttgtgtgcccatagtttgaagtattaaattgtttttatttattaaaacattttttaatgtcactccattcagaggtaatgaagtgttaattttttttgtttgtttttgcttttttttttttttttttgagacagtctcgctctgtcacccaggcagaggttgcagtgagctgagatcacgccgctgcactccagcctgggcgacagagcaagactccatctcaaaaaaa

SEQ ID NO: 123513 - DNA, 394 bp, Homo sapiens
ggtaaataaagctagctgagctcttccttacagtttaagatgaaaaagaaaaattcaaactttactgttcaaacccagcaaattcacaggtttctcattagcttctctacagtcactggtaaaatgttttgaagagtagtttcagaacttcacacaattatcagaatctccaaagcctgggaagtatcatgatgaatgagaagagatcattactgccaaatttctgagggaggtgaagatcaatagctaatatcactaccaaacacagaaatagtatttacgtgggtaatccttgctaccaagggctgccagccttgggtcaggaaacttcccaacaccagtacaagggaatgctagctgaggcagtggggctccaggaatcatgcaagctcca

SEQ ID NO: 123514 - DNA, 317 bp, Homo sapiens
cttctttcacctctaactagactattcaccaaaaatttttaaatatataactttcaaaaggtattttattacatcatttccatcctttatgtttgggttcaagccctcattaactttaacatggattcttggagtaccctccttactgattttgttacacgtgtccctcttttagtcagtactaccatgataataccatggataataattttttcatttttatttttagtcttgcactccagcctgggggacagagcgagactctatctatctcaaaaaaaacatgtcagggtagcagcttgtgggggtgaagcacg

SEQ ID NO: 123515 - DNA, 606 bp, Homo sapiens
atttgccagtgattgcatttctttattaaattactgtgagtggatcaaggttccttataattctctaagatttacctgcagtctatacacaatcaaattagaactctagacacacagctctaccacacaacttatcttgatgaggtttgccacattttcctggaggggtggtacaacagggagtggtgggagtcagactttgctgtacatgattgagtcagtctcacctcatcagggaactgaggaacatcagaacacatatgtaggaactcatttcacttttcttcctcttgacatgatgctatttttgttcataaaattactagttgttcattacaaattcactcactcattattcattcaaatagttactgaataactactacaagccaggcactgttataggcatttgaggacacagaagtgaaccaagattcctgtctttgtggagcttacaatctagtggggcaaacagacatgatacacctattaaagtaagcatccatctataaggtgtgttagaaagtgagatgggctacaagaaatagaaaacactgaaaaggctgggtgctgtggctcacatctgtaatcccagcacttggggag

SEQ ID NO: 123516 - DNA, 794 bp, Homo sapiens
tgagtagtggtattcaaagtagcaggtcaatgaactgtttgtacctatatactatgagaaaaggaacctatactggacttgttttaaggaagaaactataaattttttttaccccatgaatttttaaagaactattctaaacatttgttgaaagaaactaacaagagatctgagaataaaatacctgggaataaatttaaccaagaggtgaaagacctggacactgaaaactacaaaaaattgctggcagaagttaaagaggaacgaattaaatgaactttgttacttcacttcactaatgtgtcaaattgaagaactccttttatcgtgtcttgtaaaacaggtctggtgttgacaaaaatccctcagctcttttttgtttcggaaagtctttatttcttcttcatgtttgaatgataattttgctgaacatattctagactccttcagaaatgcaacacagaggactctagcccaacgcataatctacactccaaactgaagtttctccttcaaactttgtctgctttaccatcctgatgagcttgccttcacattaactcaatgacccatgttgccctgttcaccgaaatcctgaaaccaacactgaggtagtcctggagcctggctgtggctctgcccaactttcctgagccacctccactccttgctactactggtcacagtggagagatacacagaggacaacaggcaaggaaaaaagagagctgaagattatcattatttcctcactcttttcatcaaagatattatctcctggtcctgaaatagta

SEQ ID NO: 123517 - DNA, 260 bp, Homo sapiens
cattattgaagcattcactagtatcaactttggggttacctggccacatcctctgacctacctataagggtatcacagctaacggagcctctgtttctcagaatttaggcagaagcagttcaatttatcacaaactactctatatccagcataagtgcccaaataaaacaattgctaaagttctttaggcatttactgtttgttagttagatatttagtcctcactacaaatctgtgatacaggtattatttttattaac

SEQ ID NO: 123518 - DNA, 466 bp, Homo sapiens
aagacggagtccagcttgcccacacctcaccaggcaagcctgcccagcaccacgtgtccagccatgacaggagagcagctcagcaagtgctgtcggttgcctcgaatgctgctgacaggtccaagggggtggggacagaaagaggctgctggaggtggcaataaggacttggctggggacctgcaaagaacagtttctgtgaggcaatcaggatgggagccagcctggaatggactggaacatggatgggaacagaggaatagaagacagcttgtgcagaagctgctctccagaagcttggctgtgaagggaactggagaaggcgtgatcattggaacaggatgtggcatcaggggaggacatctttttgaatagttgggaaaatctgctgggactgcatatgctgacaagaattatgcatcagagagggaaaaaggtgacaatgttaactgccagatgagaagac

SEQ ID NO: 123519 - DNA, 221 bp, Homo sapiens
tcgtcccgatcaccgtcgcctctcctctggcggagagcaccagcattcccactggtctctgcttttcctcaaacgcatctctgtgtaaatctcccctcaggatcactctgtggcccccactgctctgggtggaaccttctttccagtggtgtttcagtcccctgggtctgcctcactcctcaccaccgtcttgtgcttctgcactgagctccagccagacc

SEQ ID NO: 123520 - DNA, 662 bp, Homo sapiens
gaagggcctggacactgaggccgggctgtctagttgaagtcctggccccattgctcaccagttttgaccttgagcaagttctttaactctgtgcctcaagtaagtgagagtaataatagtagcccaccttatggcattgtagagaggattaaatgagttcatacacataaagcacttagaaccatgcttgcctggcagttgtatgtccagtgaatgttagttatcattaatggttttatattaattgtaacaatctagagttacccatcgggtaacttaaatgcttgttaaataaatttgaagttttaaagacttgcgtcccatcattagaccattgtgctcgttgtctttagattagaattcacttttatagtaagaaataatctattgttatatgtcaaaaagaaataatatttttctcccctctgtgtgtatatatagttactgattgtgctactctgtaggagaaatacaaaggacaaaagaatgtattcctgctatcctacttttctgctgtcacactaaaattgtgtgggaggcttaagtgagttgaaagactggattatggtagttgagggaatgggttttttgttagtttaccattttttaaaatacttagctagaaagcattctgaattattgaataaattacgtcatttatt

SEQ ID NO: 123521 - DNA, 270 bp, Homo sapiens
cagagatagacctagagtagatgtggttagtactgccttctagctctgtgaccttgggcagatcactttaacctctctgagccttgagtcctcttgtgtaaaatagtgatgatgctatctacctcaaaagattaagaagcagaaagccaggccggatgcggtggttcacacctgtaatcccagcattttaggaggccgaggcgggcagatcacgaggtcaggagttcgagaccagcctgactaacatggtgaaaccccgtctctactaaa

SEQ ID NO: 123522 - DNA, 294 bp, Homo sapiens
cttctttaaaggtagtgtaaccagaatatggatgaaagcctaagtcagcttgacctccagtaatgaacgtgggctgtaacacagaagctcagaggttgttgcccagtttggtgtaacgtgagatgttggattagaagcaggtgacacacctaaatgagattagggggagaagaggtagtgtaggaccagttaatgcaggaagagagtagccacatgttcctccatagtccctgaggaatcacactgcattgaattaccatgtagcacagagcagcaatgatcacccttaaccat

SEQ ID NO: 123523 - DNA, 341 bp, Homo sapiens
taactgaatcataggggtagtttttcctatactcttctggtggtagtgaataagtctcatgagatctgacggtttgataaggggaaacccgtttcacttgattctcattctctttcttgcctgctgcgatttaagacttgtctttcaccttccaccatgacagtgaggcctccccaaccacatggaactgtgagtcgaattaaacctctttcttttgtaaattacccagtcttgggcatatctttttgtgtgtgtgggggggacagagtttcactcttattgctcatgctggagtgcaacggcatgatcttggctcactgcaacctccacttcctgggttc

SEQ ID NO: 123524 - DNA, 170 bp, Homo sapiens
catcacacatagtattgtgtctatattaaaagcacctagatttttccttacttagttgcgtgggcttgggattatcttgggaaatgacctatttgtcatttactattgagtgtaaattgttttagaacatactttaaaaccactaacattaaaacctaattttaattacc

SEQ ID NO: 123525 - DNA, 421 bp, Homo sapiens
tattaaatataatgtttaaaaggtgaactgttaaaagcaaggattacatagtgtttatcttctggaggggtgctcataattttcttttttttacaatccagaggtcttctattttattttttttaacaccgattatgccatgaatcaatccatagggaagaggttccagcagctcaagctccttcccatttgttctcacacagtgcgcttctctgggcagagcagactggcacttctgctgaatccagattcacatatacgtgaccaaagggaacaactccatgcttcctaaaaggcctagaagacatctaccaggagcctctcctctttccctttgtgtttgtcattttgtcgaattactggaagacggtggttctggccaaaagggccataataaacttttattttcttgtttctgtgt

SEQ ID NO: 123526 - DNA, 320 bp, Homo sapiens
gtaaaaagcctgtcctttcccattgaaatccatggcacctctgttggcatttactggctacctatattgtgaatctgtttctaggcactattctgttccattgatctatatgtctgttcctgatacaacgattgattgatttctgtagttttatggggcatctcgaaattaggaaatatgcctaccttttggaacttgttttgggccaggcgtagtgactcacacctgtaatcccagcactttgggaagccaaggcgggaagattgcttgaactcaggcgttcgagaccatcctaggcaacacagcaagacctcgtttct

SEQ ID NO: 123527 - DNA, 470 bp, Homo sapiens
atggagccagatggaggatggaaacagaattttatttgtgtgctcttttgtttctagggaaaaacaaaagcaacacaggtcactggactctaaacatatgaagtttgactatttacagaggaagctcttggattcatttctagatctcttccttcccagccctgatttccttccctttctggggagaggcagctgtgaagagctgccaagtctctctgcccactcaccctggtggcactgccagctctcctctgttcccactgtcatctttgggtcctggccctcagcccccatcgcctagaccctgcactagtcccccagctgctcccctccaagggctgcttccctcccatccagagggaccacattgtttcccaagtagtctcccaagagcacgctgaggtcctgggcacagctttgctcaggtgcgtggagtggccccactttgtatgcagaaaagtctaggctca

SEQ ID NO: 123528 - DNA, 335 bp, Homo sapiens
ctcactgcagcctcaacttctgggcttaagcaatcctcccacctgcctcatgagtggctggggctacaggcacacaccaccatgcccagctagtttttgtatttttactacagatggagttttgccatgttgcccgggcttgcattcttatttttaagtaagtctttgaaatccagtgtgtattttacacttatagcacatctcatttaggactagccacatttccaatgctcagtagccaaaagtggatattagctaccatattagacaatgcatctctaaggggtgagattatcgaaactttcactttgtattttacatattattttgttttc

SEQ ID NO: 123529 - DNA, 304 bp, Homo sapiens
gggcctgcttccttctgagggcaggggcagcactttcctttgatattaacaatcgtcctaacagcagatgtggagtggatattagatacagagtgcacatatatgggctttaacccccagacattgttagtcctcatcacagatctatggtcctggcattcatacctccatttacaccagtacttagcacggggatgctaagtggcagaggagggtaggagtccaggagtctgtctctctggaaagcctatgccccctgaccatgttctcactggctgactctcatgttctcactggctgactc

SEQ ID NO: 123530 - DNA, 232 bp, Homo sapiens
cctttctgctaaattgaagaaattaacataatttactcttctgtaaatagggggatggtctgcattgtgctcatttaatcattggagttcaaattaatgatttgctggggtcctgtggtgaatcttgagtgattaagagggagaactcagtccttggttcagaaaagttagcattggaatggatcctcaacaggccctgaaggtaggaagtgttctgatttagagagctctt

SEQ ID NO: 123531 - DNA, 1265 bp, Homo sapiens
atttttggggggagtcagatattacatttgattagtttactacaaattgtaataaaatgcttaagtcatttgaataataaacatcatctacatcataaactctgtacaacagatgcttttatgaaatgaagccagttgtttttcatgttttattgtaatatactaggcatttatgtattaccgtgcatttctttttaaatgtgtaagtcttatgtaaatggatataaatatgattttttaaaaaataaaatatatggttcatggagtctcgagtgcaaacatttgacaattccaagtactgtttgtattttaccattccaccatttttacagtttttggattgttaatagtcaaatcaatatgtttccttgaagcatgtttcatgcttcaacgtgtttctccttcaagtctgtcaatacttaaagctgaacaacctgcctctgatcatgtaaaaaagaatgatttaacctggaaccggagccaaaaatagagctttaaaggcaatcagggatgtcctatatctttagaaatagcactgtgatggcttgatctccttttcaatacaaaacaaagccaagctgtttacaagggtcaaaagcaattatttaaaaatttatattaaaaaaccataatcttctcttgttacctgtggaccaagaaaaaaaaaaagataaaaaaacttctttactaagaaccacatgttcattcaaatatcttgaaatgccagccagtactggacagtgaatgtcaaccaccgcagagtctgaggctcatttccactagagaaaacgaaacccaagatacctttcccttttgtcaatgtaacagggcattagccagactcatgtctaatgttataagcttttagccgagatggccttgttgcgacttccctgaagtcagttttatcagaggaaataaatgaaagacagaatgattaacatatatagtgtataaaagtatagaagagtaatctcttccctgtggctttatttggtggtgttactgttgtttattctttgtttatatgggagattcaaagtaaagcctatttaataataccatttatctaactgctgattttctgctgcttgatcttattaagcgcaagacctgtcattagtaatttcttttctgtattttaatttgctatgtttgcacgtacattacatttgttttgatgtctatttttatttaacagattcagtcaaaaggtaatgataacagaaaccctttccattgtcaataaaaaaaataataattcc

SEQ ID NO: 123532 - DNA, 1557 bp, Homo sapiens
atttttggggggagtcagatattacatttgattagtttactacaaattgtaataaaatgcttaagtcatttgaataataaacatcatctacatcataaactctgtacaacagatgcttttatgaaatgaagccagttgtttttcatgttttattgtaatatactaggcatttatgtattaccgtgcatttctttttaaatgtgtaagtcttatgtaaatggatataaatatgattttttaaaaaataaaatatatggttcatggagtctcgagtgcaaacatttgacaattccaagtactgtttgtattttaccattccaccatttttacagtttttggattgttaatagtcaaatcaatatgtttccttgaagcatgtttcatgcttcaacgtgtttctccttcaagtctgtcaatacttaaagctgaacaacctgcctctgatcatgtaaaaaagaatgatttaacctggaaccggagccaaaaatagagctttaaaggcaatcagggatgtcctatatctttagaaatagcactgtgatggcttgatctccttttcaatacaaaacaaagccaagctgtttacaagggtcaaaagcaattatttaaaaatttatattaaaaaaccataatcttctcttgttacctgtggaccaagaaaaaaaaaaagataaaaaaacttctttactaagaaccacatgttcattcaaatatcttgaaatgccagccagtactggacagtgaatgtcaaccaccgcagagtctgaggctcatttccactagagaaaacgaaacccaagatacctttcccttttgtcaatgtaacagggcattagccagactcatgtctaatgttataagcttttagccgagatggccttgttgcgacttccctgaagtcagttttatcagaggaaataaatgaaagacagaatgattaacatatatagtgtataaaagtatagaagagtaatctcttccctgtggctttatttggtggtgttactgttgtttattctttgtttatatgggagattcaaagtaaagcctatttaataataccatttatctaactgctgattttctgctgcttgatcttattaagcgcaagacctgtcattagtaatttcttttctgtattttaatttgctatgtttgcacgtacattacatttgttttgatgtctatttttatttaacagattcagtcaaaaggtaatgataacagaaaccctttccattgtcaataaaaaaaataataattccagttctctgtttaagctttgttttctagtcacataaggctcgacaatttacttaaactatcaggaaatgtgttctttgggtgacccaaatatttagcttcaaaattgagtctgccacaagagggagatctaaacttgcttatgggagtgatcttaaaatttttttctaaaaatgtggcctgagtaggaacaatgagaagtagctttctaagctcatctaaacatgggcatcttgattcatagaaatgaaatagaatataggaactacgacattataatgccataactagatt

SEQ ID NO: 123533 - DNA, 727 bp, Homo sapiens
ataaaatatactaacactaatgatagctgatgaactttttaaaatagcagaaaaatctcacagtgtttcaagaaagtttatgaatttgtgttgggctgcattcagagctgtcctgggatgcatgctttataacaatgcaaaacagactaacacagtggctgaatggataaagaaacatgaccctactatatgctaccttcaagaaacccatttcacctacaaagtcacacacagactgaaacggaaggggtggaaaaatatataacatgcaagtggaaaccagaaaaggctaggtgtagttgtaattatatcaggtaaaatagactacaaatcaaagactgtaaaaaaaaagacaaagaaggttactatataataataaaggggtcaattcttcaggagcatatcacaattataaatcgctatgcacctaacattggaactcccaagtaaagcaaatgttaataaatctaaagggagaaatagactgcaatacaataatggtaagagactttaacaccccactctcagtaacagataggttatccagacagaaaaccaacaaaaaaagtagtagagttaggccaggcacggtggctcacacctgtaatcccagcactctgggagccccaggtgggcaatcacctgaggtcaggagttcaagactaacctggccaacatggtgaaaccccatctctactgaaaatacaaaaaaaattagccaggcgtg

SEQ ID NO: 123534 - DNA, 115 bp, Homo sapiens
tggagtagtggagagctgcttggctccagcaggggtcaagaaccactaaagggattcctcagcttctcatccagttttcctactccttatgctcctgtttggtgactggaaagaa

SEQ ID NO: 123535 - DNA, 413 bp, Homo sapiens
atctgtagtataaacaaagcagacagtattaaatgcagttgacctagccaggaccattcacacaatattatctgatatgcatatttttgttagagttactttcgagttagcctggggaatcattgccacctatcattgctatcatattttacattttaaatgtagtctttggtagaatgacaggtaaaacatctggaaagcttaaatgcactgtcagaatgattcctaagagtaaatagaccaggaatgccaatgcaagatctgtaagctatagaaatgtaatttttaaaataaaaacaggtttattcttacatatgccatggctagatgtttaagctttttttaaaaactcattcttttttctccttcattttgcccaggaaacattctgttatattctaattgttcttact

SEQ ID NO: 123536 - DNA, 160 bp, Homo sapiens
tgtgacctcgtttcctacctttgcccttccttcattctgctcttctcagaacacacttagccagttttctcacctacgtcaggcatttttgctcaaatgccaccttctcagtcaggccttctataatgaccccacttaatccctcctccctatcctatct

SEQ ID NO: 123537 - DNA, 436 bp, Homo sapiens
tttacctggggaagaagggggagatagcagggagagaggtgtggctcagaaatccaggctgcctcttcaaaggccaattgtttccccgtgtaaaccaggaggtgaaatctcaagttcagaagaggagacaggcatttgtgagtgaggccagggcggggagcagaggggtgggatcctgggaatcgtttctctggttgcagggaactcccggtactgtagccacaggccagggttttccgccctgtgctatttgcagaggcaaaacccggacctcctgagggaggggtgaggacttgtttggaaggagcattttaaaagacaagtcattctcagaagagtttgcttggtagcattgttaatgatagaacaaactagaaacaatcaaataacagtagagtaggtagataaaccgaggtatagtcctacagtgcctagc

SEQ ID NO: 123538 - DNA, 171 bp, Homo sapiens
agtagagtaacatcatgtagtatacacctaaattaaaatatattttcttattctgaattcatgttttttgacaatgaaataatttttcttttatttctaaaggaacaccccaacctaagccctccctaaacaaaaaataacatcaaaggtttgaagtgaaaaataatttct

SEQ ID NO: 123539 - DNA, 291 bp, Homo sapiens
ttcagggggtgtaaggacccaaagactcagtcactatgggcatgatgggtgtcagacacagagcaacaccaccaattctagcccccattcatggtggccagggagctcctaatgggctgcctactctagtcagaggaccttggtgattatggctaaatctggttgggaaatcagaggctacaagtagaggactcctatattataaggatattaaaaatcaggaagaaatgtatctaaactgcctagtacatagcaggtgcaaaataaacttttttttctcattcgttctcc

SEQ ID NO: 123540 - DNA, 348 bp, Homo sapiens
tgaaacctcatctatactaaaaatacaaaaattagctgggcgtggtggcatgtgcctattatcccagctactcaaggcaggagagttgcttgaacccgggctgagatagcaccactgcactccagcctgggtgacagggcaagactccgtctcaaacaaaaaaaaaaaaaaaaaaaaaaaagggcccctccgtgggttaaaaaggccttttccagggggagggtgtctcagaatttagtgcgcaactatccacctttgagtaggtgctgaccgcttcacccaagagtctttgtttcctcaaagcctaaatcccgtgccgggacacacagacgtgttatttggagaaac

SEQ ID NO: 123541 - DNA, 238 bp, Homo sapiens
cagatttttgtgatttcccttgtgattttctatagataagatcatgtcatttgtaaacagatagtttaacttctttctcaacttgaatgccatttaacgtacttgactaattgccctggccagacaatgctgaatataaatgagagtaaatatacttattttgttcctgatcttagggagaaggcattcagtctttcaccattaaattatgttagctttggatattctgtagatggca

SEQ ID NO: 123542 - DNA, 294 bp, Homo sapiens
attggaagaagttttattggtcagacatcctgttccatgtcagcctctccctctaggatcttttgcttcctgcaaggagtggggcctggtactaactcaatctcagccggtcacggtggttcacgcctctaatcccaacactttgcgaggtggagacgggtagatcgcttgaggtcaggagttcaagaccagtctggccaacatggcaaaaccccatctctaccaaaaacacaaaaattagtggggtgtggtgccccatgtctatagtcccacctacttgggaagctgaggtgg

SEQ ID NO: 123543 - DNA, 256 bp, Homo sapiens
gcatctggaccacccaggcctgcagtggtcagggagcctgaatgtggcagtgcccgctccgggggactctgaggagggtgtatggacacatttcctgcacacccaaccctgctgtgctccacaggaccaggacacagatgctgtgacctcagcgggctccacccccaccgcaggaggatctgcacgcaatcaggagaactccagccgacaaccagggctttctggggtgtggggtggggaaagactgatgtttcag

SEQ ID NO: 123544 - DNA, 285 bp, Homo sapiens
aggcacagcctggcagctcagctcctctcacaaatcgttctctctgttctcacgagattagcatttctaataggatcaggaattctttctaattcattgattattaatcctgatgtttgcaaataatctctcctgatttgcgcagaaccaagaacttaatgctctttcagggtttaaatttatttattattattttgttgttattcagtggaaaggtccaattttattccaccagaaattgtctggatggctctcctgctagataattaaagctaatggagccca

SEQ ID NO: 123545 - DNA, 609 bp, Homo sapiens
tgtaaaattccctcttagaactgcttttgctatatcccatagattttcatatgttgtgtttccatttttacttatttcaataatttattgaaaatttctttattttttattgacacattgatcaggagaatgttgcttaatttccatgtgtttgtagtgtttaaataatttctcttgatattgaattctggttttattccattttgattaaaaaatatattgatatgattttttctcctcctcctccaaatttttgaatttctgagacttgtttagtggcctaacatgagtatatgcactattctggagaatgtttcatagctatttcttctctcttttggtttccagatgcatggaatatactttttttcatcccttcacttgcagtctatgtgtgtctttataggttaagctggtttcttgtaagcagcatatagttgagtctttgtggttgcttttaatccattcagcaaatctgtgtctttaaatcatagaacttaatctgtttacattcattgttattattgatagataaggacttactgctgccatcttaatacatgttctctagttgttttgtaacttatttcttccttttatcccttctta

SEQ ID NO: 123546 - DNA, 733 bp, Homo sapiens
caaatgttggcaaggatgtggaagaactggaattgttatacactttcagagggaatgtaaaatagtgttgctgctgtagaaaacagtttgacagtttctcaaaaagttaaacatacggctgggtgcagtggctcactcctgtaatcccagcactttgggatgcttgaggccaagagttcaagaccagcctggccaacatggcaaaaccctatctctactaaaaatacaaaaattagcctggcatggttgtgcaccttagtcccagctacttggaaggctgaggcatgagaatcgcttgaaacccgggggtggagattgcagtgagcctagatgatgcctttgcactcttgcctgggcgacagagtgagactgtatctcagaaaaaataaaaaatatataaatagttaaacacagaattagcatatgacccagcactttcactcctaggtgtataccaggaagagttgaaagcagggactcaaacagatacttacacaccagtgttcgtggcagcattattccaaactgaaaagatggaaaaatcccaaatgtacatcaacacttgaagaagtaaacagaatggtatttatatgcaatggaatatttttcagctttaaaaaggaaggaaattttgatatattttgcaatacggatgaaccttaaaaatactgtgagtgaaataagccagaaacaagaggacaaatattgttatgattctacttatgtgagatac

SEQ ID NO: 123547 - DNA, 368 bp, Homo sapiens
tacttcacagtagtggcagagtttggactcttcacaagtactgatgccataaagcaccaaaaacatttagtggctccttcctcctccacaatattcaaaatcatgtccactctgtagcaagcactgaaggacaaccaattgagcttttcaatcaactgccgattttctcccttttatgttaaccacagaccatctgttgattctcaagaatgtctagcccttctctgcctaaatcttaaagatgaaaagcttatacattatttaagatctagctcaaacattttggcttccacaaaatcttttcagcatgcctaatcaaaattcactgttttctcatttgcattctcattggaattgtacgtaattct

SEQ ID NO: 123548 - DNA, 338 bp, Homo sapiens
ttctgggagtctggacccagcactgttgaaaggaaatcacccagggcagatggtccagggtttcaaggccaaacttgcccctgtatcttttggttaggttggaactgagattttccaccttcccaaatggggacctccaggatccctgtgaaaggcaagtgtcactggaggctggtggttgcctgctccctcaaagcactgaccttaccgcttgattctgtcaccttcccacacatctttttgtctctgggcaccaggaggcacctgcccgatgccatcctcctggggttccttggcttctaggcgcttgactgccctctcactcccctttggctggc

SEQ ID NO: 123549 - DNA, 141 bp, Homo sapiens
ctatttggttttgttggattccccaacaagaggagaccatccttgacctgggaaggtgggaagaggtgagggcaaagtgcattaatccacaggcattttattagcatcagcacagcactttctactccgtgggaattggtt

SEQ ID NO: 123550 - DNA, 209 bp, Homo sapiens
tttttccaatagcagttttaccaaatgttactttaaaaacttactacatattatccatactagaaaatatatgtaatatgtgcaagttatgaagtctaacaacaaaatgaacacatgcaaacccagtatccaaattaaaatgaaagcattgccctaacatcccatctgcttctgtgtaccttccttatctaaagtgctctgttcaccct

SEQ ID NO: 123551 - DNA, 503 bp, Homo sapiens
acccatgtcacaacaactcggaggagcagcagtttgcaaaatacacacaggcacttctagcattctgtgattttaaaactcggaggaatagagcttgatagatttttagaaatatactagatgatacttctgcttaaaatctgaactggaataatgtcagtcagaaagagatggaaatgtctttgctatggatattaaaagcccggaagtaagcaatcaatcatttcaacacaatgacaagcaggaaaaacagaagcagatcatatggcaggaacttgcagtatgaaaagatgacatctggaccagtgtggcacggtgccagtcatcatggtcagcactaaatgaaaaacaaaagttaaatgaatgaacagactttctcttggccttaccaaactaatgatttatttctcttgtagtgaagaaggattgcaagtcaataccagatacaattattcaattcaacaatatgtattaagccaggaactgatcgaggccctgggaat

SEQ ID NO: 123552 - DNA, 193 bp, Homo sapiens
cttccccagaaaaggatatgatactcataacttgattcagaagctttctttattatactgtttgtgtttagcctccaggtagtttgttttagcttaactcttaacaaatgttgaatggcttgtttcctactcatttcagatggaataatcaccctttctatattgtaagttcataaaggttttgttgctcagt

SEQ ID NO: 123553 - DNA, 155 bp, Homo sapiens
tctcagtttatgttgattttgttcccttttgtgtgtatgtcctttttattttaagtgtgaccttttaacattggctgtaatctgagatttttttttcttaacatattacttattgccaacattggtagggagtgccatctccactatgcttttag

SEQ ID NO: 123554 - DNA, 596 bp, Homo sapiens
gtatatagttcagtgtcattaaataggattaaataggattacagctgggcatggtggctcacgctcgtaatcccagtaatctggaggccagagcaaagggattgctcaagtccaggagttcgagaccagccctggcacagtgagaccctatcaaaaaaatttttttaattagccagatatgagtggctgggactacaggcacatgctaccacgcccagctacctttttgtattttagtggaggcggggttttatcatgttgcccaggctgatctcaaactcctgagcccaggcaatccatctgcctcagcctcccaaagtgctaggattacaggcgcgagccaccgccacgtaggtcttggggatcaaatttcaacctgagatttgaggagacaaaacatccaaccacagcaccctcccatcctgctctgaggcctcagctgttggccttctctgactgataggcacagccttttctccttactgagaccataaaaaatgagatattttctttatcttcctacttttttttactccatctctctttttttttttttttttttttttgagacggagttttgctcttgttgcccaggc

SEQ ID NO: 123555 - DNA, 470 bp, Homo sapiens
ttgtgtaggcatctcagggtctggcggaaggatgattgattccatcctgcctttgttctatatctgatacacaagtttacaaccagtacctgttagtaaaatatttaacaaactccagttacaaatgcacaaagggtcagccttagttaataggccatggttttattacccatatgtccaaactgcagccatcttggctcacttttctcttttcttctgacactatcatcaatcatctatctgtctatctacaatatgttttcttaaggtccctgaaatagaaaaaaaaaatcatttcaagatgtttttcaagatttgaggggttacagttaaaacatgcctatttatgggaggttctaacactgatctaactgacatagctgcctttgcacgtacacattcttcagccagaacaaatatttagaagaggctgtgtcaacccatttttccttgtatttccacattttccc

SEQ ID NO: 123556 - DNA, 783 bp, Homo sapiens
gattgtcttgagtttgttgatactaaggtgttatttataatgtgccttttgtttctcaagaatatgttcgcagaaatcaccagtagtgttatccatgtgtatggaaggccagactgtatccccttatgtactaacagactgtatggcaagaagggagccaggttgtcaatgtgagagctaatgttgatatcaacacaggcatcagaaagtcaattactctgtttccctagtttactaaatggtgcttttgcaatagggaccatgttgcctaatgggctgtgaactttaatttgttcataacagtgccaatgagtaaatggatctacctgtggactttagagtgtacttctaacattttaggactgcaagaaagtagtgtgttttatcctctgatacattcatattctctattggagcatacctatccaagcccaatatcctacatcagttttaataaagagaaattacatttaattgtgtctctatcctttcatattaatccattatgaatattttattccacaatgttagaaaaattacattaacttattagtgaagaacattcttttataagaagtgctttatacttcagaacctcataacttactttaaatatttcaggcacaataactggtaagagatgaaaaataagcctgaactcatagggtaaggaccatttagaagtcttttgtcttcagcttgtgattgttcagttaaacttatttgatgtgtgctcagcaggttgtaaaattcctatctttctggagtgatccataagagatt

SEQ ID NO: 123557 - DNA, 598 bp, Homo sapiens
tgcacggcgctgcctgtcctgaatgcctcgctgtccccgggtggacataggaattcatcacagtcctcctcgaagcccgggttgctctagaagatgaaactcaattgctgtccttgatctgctgctcactagaggccctgggttgggaatcggaatgtaaatgtgtcacccatcctagagaagaaagtcctgcagtgtgacatggcttcattttcaacagctgagaccctctgccacaacaactctcacagccccctcatccccacccgccgtggaaaccaaataaaagcagaaagctctggtggaagccgagctgggggcgatggggcagattgtagcccgtttctccttcccgtccccctccccactttggcccctgggacctgctcagaaccccagggtgaaggagacatctcaagtgtgacccattggctgcttctgctgcgggagagggagagacggggtggcccatgtgaaagctatgcctcctgcagccccgcaaagcctgcaaaagctcagccaggatttgatgggattgtttctgctgggaccccctctctgctgcgtctcgtgcaaacgttgctgtgaagggatgcca

SEQ ID NO: 123558 - DNA, 401 bp, Homo sapiens
acagatgaatgtcatcattatataaatgacagttgaagccatgaagtggatggaccaatcagggagagtatacagagggagaagttaaaactctgaggaatatccgtcagcacttaaggcttggagaaaacattgaaggagcaggcagaggtaccaaaggagctaagaaaggcaagtagggccgggcacagtggctcatgcctataataccagcactttgggaggccaaggcaggcagatcactaggtcaggagttcgagatcagcctggccaatatggcgaaatcccgtctctactaaaaagtacaaaaaattagcagggcatggtggcacacacctgtagttccagctactggggaggctgaggcaggagaattgaacccgggaggcagaggttacagt

SEQ ID NO: 123559 - DNA, 590 bp, Homo sapiens
gaggcattgctctaggggtcaggcaccatgccccacagtggcatcactgcttgagagcacccagaacaatgaaaggcagcctgtgagccaggggagggtccactcaaaccaagggtgtatggagcaaactgcgtaagcattgaggccccaggagagatttgcacaggagatgcaggtgcccagtatgatcaatccctctccccagacctccagccatcatttgcaataaccgaagttaacattacctgatgctttgcttctggggaaccagtgtgcacaacctccttaaaaaaaataagggtttggctgggcttggtggctcacacccataatcccagcactttgggaggccaaggcaggtgaatcacctgaggtaaggagttcgagaccagcctggccaacatggcaaaacctcatctctacaaaaaatacaaaaatcagccaggtgtggtgctgcacacctgtaatcccagctactcgggaggctgaggcaggagaattgcttgaaactgggagatggaggttgcagtgagccgagattatgccaatgcactctagcctgggcaacaagagtgaaactgcgtctccaa

SEQ ID NO: 123560 - DNA, 463 bp, Homo sapiens
cccacctaggggtcaaggagctatcgtcaaacaggattcctgggttcaaatcccaatctccacctcctactggctgtgtgaccttggtcaagttacttaacctctctgagtatcagtcacccattaggtaaatggaggggctagactgtaaacattaaatgtggggatgtatgaaaaagcctcagcagtgcctacaatgactattctcattcatccattcactcgaaccattatattcacccagctcctaatctgcaaagctaaacggtattatagctgaggatagggtgaaggtgaggtagaaaggacagcaaagagctatcacaacaacagggtcatggtagtgagcaactaccggaaatggaaggaaaacagtatcccttctccatactctcaaccacgactttagttgccggacagtcagcccatgctgggcactgtgcaactaaacccatttgttgca

SEQ ID NO: 123561 - DNA, 328 bp, Homo sapiens
ttcagtttgagaagatgaaaaggttctggagctagatggtagtcatagttgcatagcaatgtgaatgtacttagttcctttgaacttaaaaatggtcaaaatggtaaattgttatgtaaattctaccacaataaagttcagaaaagttaatttgtaaaataagcataatggttcagcaaacaaaacccaaaatatcttccaaagacctgattgacagtattaccactaatgaaagaacgttccacatcaagagatactggtcagcaaagaaaatttaagaggagaaaggatgggctgggcgtggtggctcacgcctgtaatcccagca

SEQ ID NO: 123562 - DNA, 943 bp, Homo sapiens
caacctccgcctcccaggttcaagtgattctcctgcctcaacctcttgagtagctgggactacaggcatgcatcaccacgcccagctaatttttgtatttttagtagaaacggggtttcaccatgttggccaggatggtctcgatctcttgaccttgtgatctgcccacctcagcctcctaaagtgctgggattacaggtgtgagccactgcacccagccttatttatctgatttcttaaggtagctttgtaataagtaaaaacaaaacaaaacaaaaaaaaccacacatacaaacctagatattttctgtaaacatttttaatagatttcttattttaaaggacttttctttttggggaaaatttcttccaaagtaggaataactttctacaattattcagtgcttttattgtaattgtataagttaagaagcagggaagcttatgcctgtttgcttgtttgttttgatttacatttatctcttcctacttgtctttttattgttttattgaaagttgaaaccactattaaatgattcagacatataagaatgtataatgtatatgtacagtttaaagattaaatataaaatgaacatctgtgtactgaacacctgtgtacctttctctcagctttaaattttttcttttaaaataaaatacgtatgagataatattttaagagtacgtgtaagatataaagacataatgaacagccttgtatctaatacccagtttgagaacataatcctttttatttctttatgtcccttcccacactctaaccactacctttcttacctttgcttttcttttagttttgccagatctagttgtatccctattttgttgttttgttggtttttgaactctaaatggaatccttctgtatgagtttatttgtaacttcctgtttcccctcaaccttgttatcaggatattc

SEQ ID NO: 123563 - DNA, 349 bp, Homo sapiens
tgtcaaagagaatcttgacttacacctaaggtcatgaaaatattctcctgttgtattctagaagctttgttagtttacctttcacgtttagatttataatccatctggaactaatatgaggtaagagtcaaatttttccccatgagtatccaattaatctattttttctttaaaaaaagccctttttctattgtcctagaatactcttttttgcataaatcaagtgtcctttatgtgtaggtctgtttatggattctctgttctattcagttggtctatttgtctattcttgtaccaattgagcactgtattaattacaggagctttatatcttaataactgggagaat

SEQ ID NO: 123564 - DNA, 721 bp, Homo sapiens
atcgggactgaacggtcacatactcatggatacgtaggttgattccggacagcactatctttgctggggagcgcatatttcaacccataacaggggccaaagagggaagcatttcctatatatcaatccagatatttgcaagatctattgtctatacagtgggaaaccattgaaaactttgagcaggatgaatctaacactttagagaaggctccgtgaggatacagtaagatggtggccatctgcaggccaaggagagaggtctcataggaaaccaaacttgctgacactttcatcttggacttctagcctgtacagctgtgagaaaataaatttctgttgttgaacccaccgagtctgtgatacttttatggcagccctaccaaatgaatatagacatttaagaaggcttggtgcattgcagcatttggtaaattattatgcatttcgttgtattgtgcatgtagtgccattactgagaatagcaggatggatgggaagcatcgagacaaagtaaaatacgagctggccactaacatatggtatgattttgtggtaggtgaaaaaaggattccagaagtagagtgcttatgaaagaaaagctcagtagtgtaagaattttacaccatcatattggattaggggcccacagtactccagaatgacctcatctttatttaactaattacatcttcaacgaccctatttccaaataaggtca

SEQ ID NO: 123565 - DNA, 673 bp, Homo sapiens
gagtaacagaacaagaccctgtctcaaagaaaggaaaaaaaaattttaagtagttgattaaaagaggtctttagggtgggctctaatttgatgtgactggtgtccttgtaagaaaaggaaatttgtacacgcagacatcagaaacaaatacacagaggaatgaccaggtgaggatacagtaagatggtggccatctgcaggccaaggagagaggtctcataggaaaccaaacttgctgacactttcatcttggacttctagcctgtacagctgtgagaaaataaatttctgttgttgaacccaccgagtctgtgatacttttatggcagccctaccaaatgaatatagacatttaagaaggcttggtgcattgcagcatttggtaaattattatgcatttcgttgtattgtgcatgtagtgccattactgagaatagcaggatggatgggaagcatcgagacaaagtaaaatacgagctggccactaacatatggtatgattttgtggtaggtgaaaaaaggattccagaagtagagtgcttatgaaagaaaagctcagtagtgtaagaattttacaccatcatattggattaggggcccacagtactccagaatgacctcatctttatttaactaattacatcttcaacgaccctatttccaaataaggtca

SEQ ID NO: 123566 - DNA, 347 bp, Homo sapiens
accacaaagcgaatatactttcataatcaccacccaggtcaagaaataaattgttacctgtggccctaaaatccctccaggcactccaccatctttatccactcactcctctccctcaaaaccactagactactaacatcatagacaaagctagcatgcctttgaactttatataaatctaatgatgtaggattttgtgtgtatgtgtatttggcttctttcatcagcattgtatttgtgagatttatccagattgttgcaagtagttgtagttgtgcttttttacacagatttaatttttatatttttcttatatgttcgaacagttaacctgcttatctattatt

SEQ ID NO: 123567 - DNA, 515 bp, Homo sapiens
gagtatacatagaaagggtagaggtataaattggagcaatattttagaaaacaggttggtatgattcagtaaagctgaagacaggaaaactctatgatctagtcattctttcagaggcatttgaacaagagtaactccatcttgaataggggctgggtaaaatgagaatgagacctgctgggctgcattccctggaggttaagcattcttaatcacaggattagataagaggttggcaggattggtatcacaagatacaagtcatagtaactctgctgataaaacaggatgtggtaaagcagccagccaaaacccaccaaaatcaagatggcaacaacagtgacctctggtcatcctcactgctcattatatgctacttataatgcattagcatgctaaaagacacttccaccagcaccaggacagtttataaatgccatggcaatgtccagaagttgctctgtatggtctaaaagggggaggaacccacagttccaggccatccctcccacttt

SEQ ID NO: 123568 - DNA, 336 bp, Homo sapiens
tttgagtttctttgttctgtttttttgagtgctggtggtggcctggtacattaatttcacaactcattaggttgtgatccactgtctgaaaaacagtaatttagggcatcacttttcctgatattggcatgctaaatattacttcatactcagtttggttccacaagtaagcacacactgtatataaagaactgcttggcttgtatgagtcacagggtctctgcatccctgcctttgagaagcttacactgcagtagggaaggtaaacaatttgctgtgtgtaaagctaaacgaggtaatagagataaatgaaaagcacaatcgaagtatagaggc

SEQ ID NO: 123569 - DNA, 331 bp, Homo sapiens
tgtattgaaattgcacactggatcatggatgatttttattttcttcattatgttcgttattttacaaattttcaatagtgagcataaacttttttctcttttgagaacagtcttgaaaatagatccaagtacaaaagatgatacaagagtaatgacaaatattttctcacatttcaagttttttaataacagaaataaaacattatgaatacaattattcccattccaccttcctagctttctaaatataagcatagggattctttctaaacataaacattataaataaaagtagtgtggccgggcgtggtggctcatgcctgtaatctca

SEQ ID NO: 123570 - DNA, 239 bp, Homo sapiens
ggatgatgagtaagccgagtataatagctactgctttcaagatttctcagaatccattagagtttctattgttttaatgactgtgatgagttcagtaagtcatttctgagttaggcaccacttatctttgtgtactgaatattcttaaagccacagttacttccttgctggggttataaagcaattctgaagaccaaatcatgttgcctttgtacatatccattgaggtttctctctct

SEQ ID NO: 123571 - DNA, 417 bp, Homo sapiens
tagtgaataagtctcacaagatctgaagggtttatcaggggtttccgcttttgcttcttcctcattttctcttgctgccaaaatgtaagaagtgcctttcacctcctgccatgattttgaggcctccccagccatgtggaactgtaggtccaattaaacctctttttcttcccagtcttgggtatgccactgcccagcagtgtcaaaacggactaattcacaagaaatggtaccaaaagatgggattggagagtttgtttccactttctatattctccttcccagaagccctcacctcaacttcctctaactttgacacttttaaaagcaataggtatgtttctcttccacagattagggtgtgcttttgaccttgtataatgtcaatgaccttatatattttttgtaaaaatgaaa

SEQ ID NO: 123572 - DNA, 388 bp, Homo sapiens
gaggctgtggtgagtggatcacttgaggtcaggagttcgagaccaacctggccaacaaggcaaaaccccgtctctactaaaaatacaaaaattagctgggcatggtggcacaaacctgtaatcccagctactctggagactgaggcaagagaatcgcttgagcccaggaggcggaggctgcagtgagctgagttaaggggtagcaccagagctgagaggccaaagaagagaccctgagccagcagacgagatatggggtttatttaggggaacttacgtacagggatggtccagtgattgtaggctggacaggagaactgccaccacttgtaaaaagcatgtagttcatgtagcattttcacttaacatcctttccctaacaaccccc

SEQ ID NO: 123573 - DNA, 301 bp, Homo sapiens
cttgcattatataacttttgaataatgaaatcaggattgaaattcaggtttctaaatttcatatcccagtacagtctaggttgatttgtgggaacgcctccttcaattatctctggttctttttttgcacctggttgcatgaatattgcaaaactccagtatgaagtatctatccatatgataaattagatcctcagatcaaatcccccaggttacaagtttataattttaggtgttaaacatgtaataggtttcttctagcttatctgagtgttaacatgaaaaactaacaactttattt

SEQ ID NO: 123574 - DNA, 189 bp, Homo sapiens
ctaaaaattggggaaggtatgcttcctagctgaggcagggattgtgaaatgcaacaacttgctgggcatggtggcacaagcctgtagtcccacctactcaggaggctgaggtaggaagatcaattaaggctgcaatgcatgggagtaaccatgcacttcagcctgggcaataaagaaagacccccatct

SEQ ID NO: 123575 - DNA, 781 bp, Homo sapiens
tactcctcaaactcctcctcctcagccgtggcatcctgatattgctgatattcagacaccaggtcgttcatgttgctctcggcctcggtgaattccatctcttccatgccctcgcccgtgtaccaatggaggaaggccttgcgcctgaacattgctgtaaactgctctgagacacgcttgaagagttcctggatggccgtattattcccaatgaaggaacacgcaagaggaccttgtgcatgaataatcttgtttccatattaccacgagtgggtaactaagcagaattagtaaaagacaattctgcttcacttcaataacagcctcctccaactcattttttctcaacaaacttatttttccagcagaagaatcccagacttcttagagaacccagtgactttttgcaccttaaatctgtgaaatcctcatgttttcttctgccgtatccatagttcaaacaaagatgaggcaaagctagacgcattcctgaaggaacccaagaaattcctctctttctctctctggaatgaacactgaattctctagaccaccagttctaaccttcaaaaagccaaacctgtttgtgagctgtccttcaaatactactgtagaccccagtgtttattcattaaattttttaaatatttgttttatttggaatcaaagtatttgtaattttagtattcccacttaatatcagggagaaatgtttaaatctgtctatgccatatgtgcctctggcttattgcccaatatacgtaccgggcaggctaacttt

SEQ ID NO: 123576 - DNA, 419 bp, Homo sapiens
tctctccctggcccctcttctctctgtggtaggtaggttcaaattacagcctaacctcagccatctctgttctctttgctcaagcatatgggtcactgctttgggttcctacaccagtcagacatccacaggctcccagatacagacatgagcctaggatgaggtaatatacccgattaggctctgagcctaaaacacgttccatgaaattacctgagccttccttgcacagtactgtgatctaagatctaacacataatcaagtcatgcactttgtttcttatttgctattgttacatgtgtacagtgtccttaggagtctacagggaagagggataattggcagagattggcattggcagaatcctgggttctctaataaccacctttcacccccagcagtactctctagagtaaga

SEQ ID NO: 123577 - DNA, 385 bp, Homo sapiens
aggacaactttccccaaactgaccgacgtcaatcttcagatcgaaaaggcacacaccggctggacgcagtggctcacacccgtaatcccagcattttgggagcccgtggcgggtggatcacctgaggtctggaatttgagaccagcctttcttacctcatccctggcttctagactctgcccagtctcctatcgccagcctcctgtgtgcactgtctacaaagaaaggccctgtggtcgctcacacctataatcccagcacttcggaaggccgaggtgggcagatcaggagttcgagaccagcctggtcaacatggtgaaaccctgcctctattaaaaacaaaaaaagtagccgggagtgttggcaggcgcctgtagtcccagct

SEQ ID NO: 123578 - DNA, 713 bp, Homo sapiens
cgcggcgttttgcccccgccgccacggctttttgccgctgtcgccgccgctttttgcccccgccgccgcggctttttgctgccgcgactttttgccccggtcgccgccgctttttgtcaccgcgactttttgcccccgccaccgaggatttttgtccccgccgccacggctctgagggcaggagcggcagactcggctgccagctctactggcgtcctggcaagggcagcgccgaggggtgctcctggtccagctctcctggctcagggattctttgcctaggcgccggcgccccgggctccttgcctaggcccctgtggcctgcatagagtggcgctgcctgtggaggcggtgggagagaagaaggagggcggtggtgggggtgatgcggcggccacggagggtggcacaggggctgcggccagccgggcgctgcagcagtgcgggcagctccagaagctcatcgtcatcttcattggcagcctgtgcgggctgtgcaccaagtgcgctgtgtctaacgacctcacccagcaggagatacagaccctggagctaggtgatgatattctgatctatgagatgcaagaagatgtgatgtgtgggacatccatgaaaactgattaatgagacctgacacaaattagagatcaagcccactacgaccaccaccatttttctcttctatcctatttttttgtgacctctagcatgac

SEQ ID NO: 123579 - DNA, 351 bp, Homo sapiens
cattatccaataaacattcaaatattttcacacacacacacaaaatcttccttcacctcttgctacacctcagctcgtgttcattttcttccctctttttattaaatctctcaaatgaatactcaatattatttgatattactttcctcctttccatctcaagaaatttctcaaagaaactgaaaacatttcctgattttctttttagactttgaagccacacccccgtggcttgaaatcttcactttatcacttcttcaaaaggaataatcactcattatttcaattttctcatttgtaaagaggggatagtaatagtacctaaacatcccagtgtttgagggaagagta

SEQ ID NO: 123580 - DNA, 789 bp, Homo sapiens
cagagcccggccaccaacagaactgcggcctttcgcaaccaggaagctccctaacaagatgggaagctactgcttttgtcccaaactccagaaccatgacacccctgctatatctcagaagccaccgtggtcaggaagttactgcaactgctacaaccagaaccacccctgtgcccactagaatccacacaaattaaatggcttccccaacactgcctttcaacacacacacaaagctactgattagacacagggaaactatctccgactaggcttgcccgcaaaaacaatagaaaatgtaggctgtgtctcactgccaccttctgaatcccacatgagtgtatctgaatggccgaactacgctcacatccagaaccctcagtgcaagggcatttgggaagcacagttttaattgtccagcctctgcagtacacaaaacattctagaaggcagttgcattggccgggcaccctggctacgcctgtaatcccagcactttgggaggccaacgcgggcggatcagctgaggttgggagttcgagaccagcctgaccaagatggagaaacccccgtctctactaaaaatacaaaattagccaggcgtggtggcacatgcctgtaatcccagctactcaggaagactgaggcaggagaatcgcttgaacccaggaggcggaggttggggtgagccaagatcgcgctgttgcccaccagtctgagcaacaagagcaaaactctgtctcaaaaaaaaagcagttgcattaaatgttgagcatcgatacactgtat

SEQ ID NO: 123581 - DNA, 436 bp, Homo sapiens
cctaacttaagaaatacttttgtatcgattcattaaataagaaaatgtctgtgctgtttctaatattacaagctgtacctggataaattcctctgggaaagctgaaacccatatacacaaaacaaaacagctcatagggttacagcaggtctcttctaattccctatggtgatttaacttattcaatttgttttctttaagcctagattcacaactcaaagccattatgcaaactgacattgtcatattaagtttaccttttattttccctttctaaactttgaatctgggccaggcacagtggctcatgcctataatcccacctttgggaggccaaggcggacggatcacttgaggtcaggagttcaagaccagcctggccaacgtggcaaaaccccgtctctactgaaaatataaaaattagttgggagtggtg

SEQ ID NO: 123582 - DNA, 315 bp, Homo sapiens
agtcaggaaccccatcatctggggctgtctctgctgcaagccctgcctgggcctgggcccctggggctgtggccggtgcagtggcctgtgctgtttctcggcacctctcacttccctgggaggcccccaccgcctcctccaaaaataacacctggggcggggcagggagcacctcgcaggcctggcctgggaacctcgggttgtgactgtctcttcctgtgggcagggcccagggctttcttcctggtgcctggagcctggcacaaagtaggaccagacacaagattgaggaatgaatgaatgaaggatgaatgg

SEQ ID NO: 123583 - DNA, 437 bp, Homo sapiens
tgggccctggtccccttctctgtccatccttacttccttagggatctcatccagtgtgtcggctttaagcagcatctaggcaaaggctcctaaatttataggtccagtccagatctctctttcaaactccaaactcaagatatatttgcctagtctgcatctctatttagacgtctaatggtacttcaaatccaatatggctgaagctggactcttgctgtccccactgtagccttctccataaaccataaagccatcctgtagccttctccataaactgtaaagccatccagactcacccctttctgttgtactctacacccaattcatcaggaaatcttgttggctctacttactaaacagatccaaaatctggccacttctcacacctccactgtcactatccaggtcctaccaccttcatgtctcatctggag

SEQ ID NO: 123584 - DNA, 220 bp, Homo sapiens
aaccacacctgagcttatgttaatgagatgatttttgcaaagtccctagataaccacaggactggtggccaattgccaggggaatcaaccctgtgctcatacagttagaactcaaaaccccaccctcaacctccagggaaaggagaggggctgaaggttgcactgataaccaatggccaatgacttaatcaatcatgcttacctaatgaagcctccataa

SEQ ID NO: 123585 - DNA, 157 bp, Homo sapiens
ctgggctatttggtaaggaatgaagttggagatagtcttctgtcccttacaaccaaaggaattctaactaatagtttgccaagttttatgtttataataaaaaatgacatgctttttcttttggatttttaatgcttttgaattaaaaatgctagaa

SEQ ID NO: 123586 - DNA, 551 bp, Homo sapiens
  misc_feature (515)..(515): n is a, c, g, or t
  misc_feature (534)..(534): n is a, c, g, or t
aagaggtttaattggctcacggttctgcagggtggacaggaagcacagggcttctgcttctgggaggcctcagaaatctttcaatctttgtgcaaggcaaagaaagagtcagttgtctcacacggcaagaggaaaacatgcagagtagggaggtgacatagagttttcaatgaccaggtgtcatgagaagtcactcatgattgtgaggacagtagcaaggggatggtgctgaaccattcatgagaaatttgccttcaggattcaatcaccttagaccaggatccaccttcaacgttaggaaatataattcaacatgagatttggtgaggacacatattcaaattgcatcatcaatctttgaatataaagacatccacagcaggctttatccagccaaccgtggactagtactagtccacggtgggctactagtccacggttggctatgtggacagcaagagtcgttttcgcggaagcggagtggcagccaggcctgtcgggccccccgaggccgncccatttcccttccagcanactcaactagccaaccg

SEQ ID NO: 123587 - DNA, 407 bp, Homo sapiens
ggctgcaacagcgcgcggcggcggcggcagaggctgaagcagaagccgcggcggagccggggaagcgggggcgccgccgcgagccgggagccgcgatggcccggtggcccgcacctcctccgcctccgcctccgcctccacctctggccgcgccgccgccgcccggcgcctctgctaaggggccgccggcgcgcaagctgctttttatgtgcaccttgtccctgtctgtcacctacctgtgctacagcctcctgggcggctcgggctccctgcaattccctctggcgctgcaggagtcgccgggcgccgccgccgagcccccgccgagcccgccgccaccctctctgctgcctacccccgtgcgcctcggcgccccctcgcagccgcccgcgccgccgccgctggac

SEQ ID NO: 123588 - DNA, 252 bp, Homo sapiens
catcttcttgccatagcaggactgcagtaaatctcctcaccatgcacggcacagtggtactgtacagattcttcttagcctccctgtgcagcagtctttcctccaggatatagggttttgaaatgagggtcttatagcaatcaaacaaggaaagccagataattttttatggccagctccaagatagaaaggcaggagaagattcctgccttggggagagaaaggagcaggagaaaggggaggaggagatgg

SEQ ID NO: 123589 - DNA, 257 bp, Homo sapiens
catctgactttatctgtatgatcttaggcaactcattcaatctccaaagtctcaagcgtctcgcctgaaaatggcaattatcaccaccagaggataacatgatgatcaaatgagatcacatatcagaaagtgctttattttattttatttttgagacagagtctctgtaacccaggttggagtgcagtggtgcaatcttggttcactgcaacctttgcctcccctctcctcccaggatcaagaggtcctcccacctc

SEQ ID NO: 123590 - DNA, 162 bp, Homo sapiens
tatcaaagtctttcttcactttatagtatattccggggaaattttaacatttgcaaaaatatcgttatttgttaaatgaagtatgcctttccatatgaatctgactggcaaagtaccaggtgtcaatagctacattcaaggagtagcttttcttattaagga

SEQ ID NO: 123591 - DNA, 295 bp, Homo sapiens
gttgaatattttacttgacaacatagcagttaccagggagatagttcacttccttctttctcagaatgtctgatgataaactgtgcacattccaaaatcatgaattctgtctaccttcctcacctcccagtatttgattgtgctagtcttgtctccatggtttgtgttctttgtcttctgtgaaatgcctggcagagcgtcagcacattctgtttctttcgacattcgtgttcagtattctcccatacctggatttcagtggatccatcttccattcaaatgatcattgtccttt

SEQ ID NO: 123592 - DNA, 301 bp, Homo sapiens
gaatgttactgaatagtggcagaaaatggaaactgtggttaaatagcagttcagtgtctgagcagaaatgtagaacatgatgattagatgcccaacaccattcagaattctggccatcccagacttactgagatgtgtattattataattaatgcgcacacctcaaatagaaattagctcaaatagctgccctgtggttggtaaaatccacgtggctctctgagcgtgtcacttgaatccctatgcttggcctgctcagccctgggtaaagcatctaagcatccctctaactcatgtcttt

SEQ ID NO: 123593 - DNA, 420 bp, Homo sapiens
ctcagttgagtaggcctctgaggtttcccagcaagatatctggagggcggccaccaccagaggaccctcctccacacctgacgggctcagggctgtgcttcagctcctgggaaagatcctgggagggaggtggcactggctcccatcctgtcctataaatgaggagactctccttgtccaggcacaggcagatatggggtctgtgaatcagcacctggctctttaaacctagaaagctttcaaaatcaggcaacctgggactaactcaggcctcagactccgcatctcctgggcgtggagttgggaatctgggtggaagctccagctggagcctcggggcagtaacactgccaggtgagtgttctctttgcttctctctttcctggagaccttggcctgagtgcttgtcaggtcagaatt

SEQ ID NO: 123594 - DNA, 325 bp, Homo sapiens
acagccacacaaggaaagcaagtctgaaaaagccacatcgtatgtggatccaaccatatgacattctggaaaaggcaaatgctgagacaataaaaatgtcagtgactgccagggatgtgaaggtggcaggtggggaaagatgaacaggacaaaccccagggatttgtgaggcagtaaaactattctgcatggcactagcatggtgaatacatgacattatacatttgtcagaaggcacagaacgtacaacacacagagtacagcttaatgtaaatcgcggcctttagttaacagcaaattcctcacactgttgcaagatgttcat

SEQ ID NO: 123595 - DNA, 245 bp, Homo sapiens
aaagtgagggaaattttcaaaagtcagaaatggcggcaactaaaatcctaaaatagtaatactttaaggctgtctgggacaagatgagatggtggttattgctgttgtgtaatagttttgaggtttgatacaatttaagaatagaagatgaggcctgaggtttgccttgaagcagttagatggagctaagagccttggaaggctatccttttagaaaaatggggcattttcaaaaataaaaaaat

SEQ ID NO: 123596 - DNA, 191 bp, Homo sapiens
aaattatcacaacataaatttattctgtcacagttgtgaaggtcacaagcctgaaatcaaggtatcagtggggctgcactccctctgaaggctgtaagggaaaaattatttcttgactcttccagctttggatggccccaggtgttcttcactttgagcctgcataactccagtctctgccttcttcacat

SEQ ID NO: 123597 - DNA, 397 bp, Homo sapiens
agtgacagatacaaatagaacacagcaaagtaacactagcgaaaataaaagcttcgatcagaaaggaattatactcatagcacaccatgtggatcagctgtgactaatattttacagtcatgacaatgtaaagactgaatggccaagactactcttcccagcctgttagagtggccaccctgcaggctgcaaccctttatgagaaataaagctctcctttccaagttaaaacaacaacaacaaccaaccaacactgaatgaataatactgtaacccaacattggcatctaacaatacagggggaagtacatacagagagaggatggctataagatagcaaatcctcattttccatagtaagaaattaataagcatcttaaactgggggtgaggggtg

SEQ ID NO: 123598 - DNA, 367 bp, Homo sapiens
caattggtctgaatttcattcttgtttctgccctactgttgctgccagggcatgtcaaatgaagatcagaaatgcccccaccccagggcttaaaggaacctatctttttctttttttagacggagttttgctcttgttgcccaggctggagtgcaatggcatgatctcggcttactgcaacttccacctcccaggttcaagcgattctcctgccttagccttgcaagtagctgggagtgcaggtgcctgccaccatgcctggctaatttttgtatttttttagtagagacagggtttcaccatgttggccatactggtctgaaactcctgaccttgggtgatccacccatctcggtctcccaaagtg

SEQ ID NO: 123599 - DNA, 583 bp, Homo sapiens
attatctcccaccaggtccctcacacaatatgtgggaattgtgggagtacaatttaagatgagatttgggtggggacatacagccaaaccatatcattccacccctggcccctccaagtcttatgtcttcacatttcaaaacaaatcataccttcccaacagtcctccaaagtcttaactcacttcagcattaacccaaaagtccacagtccaaagtttcatctgagacaaggcaagtcccttccacctgtgagtccgtaaaaacaaaagcaagctagttagtttctagatacaatcggggtgcaggtattaggtaaatatagccattccaaatgggagaaattggccaaaacaaaggggttacagggcccgtgcaagtccaaaatccagcagggcggaaatccttacagatatgtggacataagcatatgtttccctgctctgtcagctgagaagtccttgaagcagtgatatcccagcagcaatgagcatacctagaggagcccagatcatagtttctagtatcattttccaataaaggacccagaaatgactgattccagaactgggtgagaagtaatat

SEQ ID NO: 123600 - DNA, 739 bp, Homo sapiens
  misc_feature (205)..(205): n is a, c, g, or t
  misc_feature (304)..(304): n is a, c, g, or t
  misc_feature (353)..(353): n is a, c, g, or t
  misc_feature (379)..(379): n is a, c, g, or t
  misc_feature (412)..(412): n is a, c, g, or t
  misc_feature (433)..(433): n is a, c, g, or t
  misc_feature (444)..(444): n is a, c, g, or t
  misc_feature (453)..(453): n is a, c, g, or t
  misc_feature (456)..(456): n is a, c, g, or t
  misc_feature (559)..(559): n is a, c, g, or t
  misc_feature (587)..(587): n is a, c, g, or t
  misc_feature (594)..(594): n is a, c, g, or t
  misc_feature (602)..(602): n is a, c, g, or t
  misc_feature (676)..(676): n is a, c, g, or t
gaaccaggctggtctcgaactcctgacctcaagtgatctacccgcctcggcctctgaaagtgctgggattacaggcatgagccaccgcacctggctactttacctttattttaaagtcttcattttagaatactgtatgccatagctttcaaaaataatgcattttattatcaaagactataggaaaacataaaaaagaaaattntgaagattttgcagccatggagctggcttgttccaagacaaaaaccagggtttcctagagttgcctttgttcctgacaaattttttggtgttggtgctnggtccaaaatgttcttataatcaactcccttattataggcaataactcnaggaaaggactgtgtttatacatcanaaaaccacaataacaacaacaacaacaaaactnagttagatatactgtagcacntgaggtgatangtgctatangtngtgtctaattagtgatgattgatgagtgctttactttccaataaaatgtgatttttagctactggcgctcaagataatgtctttcactatgtcattgtacttnaaatctaaccctagcaactccctctttnccaaagnccattaangttttttcttttttttaccctagaacttaaagtataataataataaaaaagaaataacatacttttacattatntgtcctactgtgatacttatttctaagtatgtggaccatatactctgatcaccctatcatatt

SEQ ID NO: 123601 - DNA, 230 bp, Homo sapiens
ctgaagccagagaattgcttgaacccgggaggtggaggttgcagtgagctaacgcagcagaggttgcagtgagctaacgcagcagaggttgcagtgagccaacggggtggaggttgcagtgagccaagattgcaccaccacactctagcctgtgtgacagagcaagactctgtctcaaaaataaataaataaaaatacagtgtaggccaggtatagtggctcatgcctat

SEQ ID NO: 123602 - DNA, 303 bp, Homo sapiens
tggtcgcctccattgtaggccgctccctgctcagtcagctcctggcactgagcctcctgcttttcctcccactctgtgcctcctccacccaactctaagcatcaggggctggtctcggcccccttcctctccatttgcaatctgcctaggcctaggccatcgcttaccttagataccatccccagcaccttgactcccaaagtctctctccggcacagacttccattcagctcaagactcatacctgactgcctacttgacctcaccacttgaaagcctccaggaccttaaaacagagcctca

SEQ ID NO: 123603 - DNA, 242 bp, Homo sapiens
cacggctctgcctccagtttccatcctctcctctgtggcctcagatatccaggctatacaggatgtctatctgattctcccctagcccagcacagagcacagcctagatcatggtcgctatacccaggtgttgagcatctatccccgggaactgactaattcattacagaacaggagttcagtgtctgcaaaggccttttacagttagctgtatctgaaggttatcaactcatctatgttaa

SEQ ID NO: 123604 - DNA, 806 bp, Homo sapiens
agcgtggtagcaacactaaaaacacactaattccatttctacatagaataaactaaagagaaaagagaaaacaatttgtggagaaaagtgaagataattagataggttgggattgaggggaagggttaaaggttaaaaaaagaaaaattgtgcttctccattctggaaagtccccagctttttctttgttttgttttatgtccaaactgtgtacatattggattctttcctactccttagtctatcagtcaatcatcagttgagacttgagtacactacaccctaaagtcatgagttacttaatgggtagttggaattcagtacctttagtgtgttttattctctaactcacctacccgaataatttgattcaaaatagactaaaaagtcttatttttattggatgatatgagcaggcactaaatacagtacagtattaaactttgggctgacacagtacagaaccagtcaagatagggctctagcctgttaggagattgcttttactcttccaagtcagcgttctcactgggcacggtggctcatgtctgtaatctcaaccctttgggaggctgaggaagggggattacttcaagtcaggagttcaaggccagcctgggaaacatagcaagatcttgtaggctgggcgtagtggctcacgcctgtaatcccagcactttgggaggccgaagcaggcggatcacttgaggtcaagagtccgagagctgcctgggcaacatggtgaaactccttctctactaaaatgcaaaaattagctgggcgtggtggcttgcacctgtagtccc

SEQ ID NO: 123605 - DNA, 860 bp, Homo sapiens
gtcatcacgcccgaccagtgttagtttttcgtgtatactttcagtgggtctttgtgcacatgaaaaattcaagaagtatatgcaaatgagctttttctaatgtactaaaatatacacccttccatcctttggtttattacatgaagaatgtagtaagaaacaagagtttctaggtgaatgaatatatttctgtggattttcaatggtagtatctgtatttttaaaataaaaataaaaacaatcacacctagacacatcatattgaaactgcagtaaattcaaaataaagagaaaattttgaaggcggccaaaggcaggggatgggtgaggagacacaatacatacaaagaatcaaagatgagaattacaggacatgtctcattagaaactatgcaaaccagaatacaaagagtatagaaagaaaaaaacaacaacacataattccatacccagcaaatacatccctcgaaaatgaagatataatgaaaactttttaagacaaaaactgaaaaaattcagtagcagccaaccagcagtacaagaaacattaaagaaagttcttcaaacagaaaggatgctatataaaatttggtaaacttgcaaagtaatgacgatttccagaagcagttaagaatttaacttttaattgctctgaaagacacttgactcctaaagcaaaaataatagcaatgtactgtggctttatagcatatgccaacgacaaatgcttgacaattggacaaaagtttgaaggaaggaattgggagtgtacagttgtataagtaaagagtatatattcaaaatctcattaaccaaacaccacctgtttcccaaaaacctagtgaaataaaataaataaa

SEQ ID NO: 123606 - DNA, 418 bp, Homo sapiens
gttatgatcactgtcatgtgccctgtactaagtcctttacaggtaactaccacatttcatcccagaaacaaccctgtgatttcagtactgctgtcatccccatttcagattcagaaactgaagtttacaagggttaggtcacttgtccagagccacacactaagaggaggctgcaatttgagtctggacggtctgaggacagatcccatgttctcaataaccatgaaatagttttgaatgcagcttagcaaaagctgaatgccgtggcgctcacattggaatcacctcagaagctttaaaaaatgaggatacccaggccagacgcggtggctcatgcctgtaatcccagcactttgggaggccaaggcggggggaatcacctgaggtcgggagttcgggaccagcctgaacaacatgg

SEQ ID NO: 123607 - DNA, 539 bp, Homo sapiens
agagaaaggggtctgaacttaccaatgaatccactccatgataacgacattaatccattctggaggacagagccctcacagcccaatcaccactcaaaggtctcctctccctataccattataatggcaatcagatctcactgtgagtctgggaagaggcaaacattcaaaccatggctgctactaagaggcatgcgttgcagccagtttatcttggaagactcacccagaatttaatttcttaaaattcaatatccttatgagggcaattggtaacacctgctgtgaatattttccaggctacaattatacaacaacactccatgccaaaaattgttaaggaccttgatcaagcatttgtccttatgttcaagcagctcagaactgttttctgtggaaaaccttggccctgcccatctctgcaagataggcaaccatccaggctttaggcattcaggtggaagatactgaatttcataagacaatgtttgtttgattcctctgtgcttccagtttcacatcatacctgaaaaatggaa

SEQ ID NO: 123608 - DNA, 443 bp, Homo sapiens
aacaacaaaaatttttgtcttgtttgtaaaatatgaaatgttttaatatattacataaaaattagtatgcatatacatgtctaaataatagagctatatgtagtaaagaggtgactttgacacagtttcagtggagtggcaaaaagcgtgactggagggttaggagtgagggggagaaggcataaaggagagggttgtgaggagagagttggaagaaggaactgaaatgagaaaagccacctctgaagaggcttgagcatgtttacagcgtgctagaaggtatttaacaataataatagtataataataattcttatttatataccaggcattcagtgaaggtccattttgcactgtctcatttaagatcccatgttcttcactgtatgttaaccagggataggataactgacagataggataactgacagagcgaagcctcc

SEQ ID NO: 123609 - DNA, 349 bp, Homo sapiens
accctgtgatcatttcccaccaccctcatattctctgaactttaggctgcagcatgattactgcaaaaccatccagtaggtgtcatcaaagatgtaacccttaacagtaagacctcaaacactccagactgtgtagtttctgagcaattctgattgtgggctcaacttggttcccatcaaaatagtaggttacaagaccaaaccatgaatgctgcatctagaaagtggattaatgacgcagttctcaaactgtgtgctgaggcaccctggggcattgctggatatttatttattccctttgcccctctgtgtgtgtgtgtatttaacagatgggggtctcactatgttg

SEQ ID NO: 123610 - DNA, 348 bp, Homo sapiens
tccagttctggggccgggccctgctctgccacttggcagctaggagccctggggcaggccactgccctcttgggggcctcagtttccttacctgcaggaggggaggattagaagggggttcgtgaggctttgctgtgctccatgcctggcacacagtgagcacttactgagtgacagtgacagtcgtgacaccaggaaagctgttccatattctcccatgcctcgtcccaccccacgctgggcatggatcctcatggctgccttctgagcagtccccacgatgcccacaggcatcagctgacgtgtccccccaaataacaaatccctaactttcctataatgtaacgg

SEQ ID NO: 123611 - DNA, 516 bp, Homo sapiens
tccctgactactacagcatagttttctctgtttgttcatttcctccttctccattcttttactgtacataaaagtaactggtatatgtgcacaagcacactgcattttttttttaacagccaacggtatgttttgattgacatcaagtggagacgggatggggaaaaacactgattctgtgaaaacacccccactctccattagtggcatgctcatcctgctcttcatattccagtaagttattttgctctgttttaacaacaacaaacaaacaaacaaaaaacccataaaaatccttgcataccttgttcaactggagaattttcatgtttttaattgatcactgtaaaaccaaggacaattttataacttttttgtatgtagctgttatatgtagggcaatctgtctttatctagggataaactactctaaaaaaaaaacaaacaaaaaggaaaattaagcgcgaaccggggcctcaacggggagaagtaggaatggttggaaatttcggccaa

SEQ ID NO: 123612 - DNA, 311 bp, Homo sapiens
tagacaggcaggtacataattcttaggcagcatttagaataactccaggcagtatctgctaataatcccaatgcctgtatccttacatgtatatatatatagaaatacttggtgttctatttatcatccaagataacttcgcaataaacatttgtgtattacggtataaactgttcctttaggtaaatatatcaatagtcattatttagccatttccatattaatgattgtattagtccattttaacactgctgataaagacatacccatgactggacaacttacaaaagaaaaaggtttattggacatac

SEQ ID NO: 123613 - DNA, 248 bp, Homo sapiens
ttaataggtaggaatataatttagagcagctattaataacctccttagccatataaccatgggattcagaaaggctaagggtttttgcacaaggaaagaggcaggaatgaggcatagcattggcaggagcaaaagaaagagaggactagggaaggggaaagataaaagaaccttcaagtgcctctgaacctccccagaaaccaaaatatgataaagcagttatatcaaaggcatttaatgataaggtg

SEQ ID NO: 123614 - DNA, 714 bp, Homo sapiens
gtgtcccaggtgactggatacagtggagtgaattagaaatttgaaattattgccctgaggggacctacattcttcttgttggagtgcgtctgtgtgggataaggtagacaaataatataggaaattcaaaaaattgtttcagaccatagtaagttctatgccagaaatgaatagtccatatgataagaggaacagacattgtgagatgttggatctataggaaaagaggaacagacgccatgttcaggccatggtgcatgtacaaaagacctttttctgaaatcagtgcaggcagtgagtggccaggtgtattaggatcttttagatgtagtttaatgaagagtttatggcttaaagtgagacagtattacttcagagctcagcttctctccttggattttctctcagcaaatgggagaagtaacgtctgcccttcggagttgttacaaggagacaagataaacacagggtccaagtgcttggtaaatggtaagtgctgttattagagtcaggtgttctagtcacaggtcctcaacagatacagctttggcagtaggaggtgcagctgacctgagctgtttttaaattaaaattaaagccacctaggtttcattagtcagctagcagagaggaggtctgggggaccatgcttaaccagagtcagatgcttggaggtcattggactctacagggattctgcacagtcactgggac

SEQ ID NO: 123615 - DNA, 511 bp, Homo sapiens
tatttgccagggattactaatatcttcagaaaacctttctggtgtgtcgacttcattttaagactcggaagaaaaataacgtagtttgtaataagaatatttttactttaaagcaaacaatattctgcaagcttttgtgataaaatatacaagattttatgtgtttttatgcttgggcagaaatcttcatgttctacctcagagcctgaggagaacaagtttattttctaagttaagggcatgtgagtagaaacatttgacaaacagtggtctggcttctaaccagttctaatccacaaagttaaacaataagagataagaaaaacagaacaaaaagaaacaaataacagtggcaaatacttatgctgttcctgaaagactactccataggtaataaaaactataaaaatggtcagtagtcaaaacagtctgactaagccaggtctgctcttcacgtggaacatgggctattaaaccttgctctgagatatagctcggatttctctattcc

SEQ ID NO: 123616 - DNA, 262 bp, Homo sapiens
tcctcggggcagggagtttgtggacgcacaactgctgtgggcccaaacttgattctgggcccaagaggttccagtcacacagattcattcagcagacattcactgaacactgagctgtgccaggcctgggctgacagattcacagttgagctggggacacagatattactcagataagactatgattgtaaactgtgataaatacaacagagaaaaacaccctgggaagatagaattgagaggcttcccaaggaggcaatat

SEQ ID NO: 123617 - DNA, 293 bp, Homo sapiens
aatcctttagcaagttctgtcttctctatcttcaaaaacactccaaaatttatacccttctctccatctccactaccagcaccctggtccaagccatatgatctctcacctagactatttgcagtagcctcctaactagtcttgtttgtttctactggtatccacaccatcataccctccattatagagactagaaaaaaattttaaaaatgttaattggtttgtgtcacatttcttaaaagcctctacgtggccttacattgaactcagaatgaaatccaaactccttgccc

SEQ ID NO: 123618 - DNA, 123 bp, Homo sapiens
acagccttgttgtgaggggcttcctgggatggaccccaccatctctgcaccttcgccactgcaagatgctggcctcggtgggccagccagcccctctactgagcccacccccatcctgggcat

SEQ ID NO: 123619 - DNA, 406 bp, Homo sapiens
caagcagtccaacatgattccagctagagggaaggaacgtcagtgtggaagggaatgttgggtcagggtggagggttcccatggaggacatttcccatttgcactggaagccttcattgtatttggcagaactctgtaagcatttagaaatcttggcaggttcatttttaattgctcacctagttcttttacttttctttgtctcacatcgcacctctaggcatggcagggtgggggccctctccaggcagcctgtgggttcaccatggggattcccagcagatagtccccaaggtctggtgtgcagatctccaactccctgcccaggcaggtcaggggagagctgatgccctgagggctttctgggcagcaaatcaaaggccatgccatccccagggaagcaaag

SEQ ID NO: 123620 - DNA, 168 bp, Homo sapiens
tcaaattgaggatgaggcaccgtaacttatgaaaagccattctatctctagaacatacccaaatcctcccaccagagccactctagtccacacaaccattagcacccacctgaactaccgcaatgatccccctgctgggatttctgcttcttccccctgctttgcatc

SEQ ID NO: 123621 - DNA, 453 bp, Homo sapiens
taaatataaaagctatttttaaatggctgaaattattctcttcccccttgttctcagagctgcatatacttatagcagttattgaatgaaaacttaaaatacatggaattaaaaattatattattaacatagaatatgtggaaataaatataacactgtgattcacagaactggctgtactatcttatgaatctgcaacaaattgtctgtatcaaaatttcttagtctgtaagggactaattgcttatatgtgtctctcacgaagtttggagataatgctctcctctgatcacacagttgttacttactacctatgtgacctttggtaaagtatttcacttgggtgttaatttccttatctgcaaaatgggaataatcatgtatctagtttttgtggttgtgaagagcaaatgaattatgcatttatattaataaaatattaagcacctgtgt

SEQ ID NO: 123622 - DNA, 411 bp, Homo sapiens
ccaggattttatttaggatttggctttggaaaggcaaaatatcaaaagttatcagaaatgtcaaaagatttgagtacttgattaaccaacattacaggtcactgtgaaacaattcttagttatttatttaacctatatgacactaagagatttcaaaagtaaatatagggagcaacacaattgtaagaaacaaaaagagaaacaaaacttagctcttttaatatttagaagacttggttctcttaaatagtctaggacatgataaagacaaaaagcacaggaaggccaggagtagtggctcatgcctgtaatcccagcactttgggagaccgaggttggagaatcacttgagcccaagagtttgagatcagcctgggcaacctagggagaccttgtctctacaaaaaataa

SEQ ID NO: 123623 - DNA, 457 bp, Homo sapiens
agaggatccccactatcatgtggtctacaaaaggatattgcatggaggaaatagagcagttgttctcatctccactgaacagagaaccagagaaaacatacagaatttgagccagcaaatccttaatttaagtttctctgtatacataaaaaaaaaaatctcttttcaaaggtaggggctattattcaattacttagtcaggggcattccagcctgtttccctaggtggtttgagtgtaagacccagcatccatctgtctgatttaggctgatgcaagagaaatggggagccaaataaacacttcttgctggctagatgttctgacttctctttcaggtccctgattgatgggttacagttataaagagtaaaaatataaaggcactgtggtgtgacaggtatttaaggattgctgtatcagataagactgagattctgcttttcatagaccacaat

SEQ ID NO: 123624 - DNA, 327 bp, Homo sapiens
ttttgtagagacaaggtttcactatattgcccaggctggtcttcaactcctgggctcaagcgatcctcccacctcagcctagaaattgttttatacacacacatacaatggaatactcttcagcctttaaaaagaagaaaataacatcacttgcaatggcatggatgaacttggaggacattatgctaagtgaaataagcagatacagaagaaaaattctgcatgatctcatatgtggaatctaagaaagtggtagttatgaggggcaggagggcaggagaaatggggacgtgtttatcaaagggtatgaagtttcagtaatacagg

SEQ ID NO: 123625 - DNA, 768 bp, Homo sapiens
gtagaaaccaaaagaaaggacacattttacctcttaaagtacaaagtaatcatgaagaaaccctaaggttttcttagatacagttttctagatatagagcaatttcctcctatgagagttcttgtttaattgagtagtaaaaacaaaatatttacaggagtcaaggaacgatgtgggctgatgacagagagtagttggactttgaaataattataggatttggattagagggtggaagggtgggaacagcacaaataaaacaagtatcaatacttgtcaatggtggctaaggggatggtgaaactaaaatatagaacaaaacactcctagatgatattcaacattttgttaatattactgtcatgaaatcagctataggcagctcttagctcttgtaggaactgagattcagatacaatagtccatgagaacttaattttccaaataggctcctgctttttcagaaggacattttgaatcaggagtcagcaatttttttttttctgtgaaaagttaagcaataactattttagaatttgtgggctgttcagtttctgttatagctactcaattctgctgttttagcttgaaggcaaccaaagctgattcatgaatatgccctgaacaattttagttcattctatggctatgttccaataaaactttatttgaatttcatgccattttcacgtgtcatgaaataccacttttcattttttcccatcgcttaaaaaaaatgtgagaatcattattggcccactggctaga

SEQ ID NO: 123626 - DNA, 343 bp, Homo sapiens
ttacaggaaaaccgttatactcctgtgagcgagataccccttggaatcatttacatagcatgtacattatatcgggtattataaacaatctagagatgatttaaagtacaggatgatgtacacaggtcatatgcaaacactatgccattttatgtaagggacttgagcatccacagactctggtatcctcgggaggtcttggaaccaattccctgtggataccaagggctgactctatctccatgattcattaggagaaaggtctcttggaacgaagtaaaggtctgaatcattgactatgcctaaataaatacagttccaagttctaagtacatagcagagt

SEQ ID NO: 123627 - DNA, 528 bp, Homo sapiens
gggaacaggggtgggggcgcactggccacctcaacccgggtctttgcgggggccaggagtgctgactttttactttggaccaaggtgagagagagccagcccctgggctgcctcaaatgctgtccatgagggccacctgcaggggtgagagatttcagcaggaggaggctggagggagcgaaggatgactgggctgaggaagggggtcctgagcatctgaacagaaccatgttcgccacccaaagggaacagcgaatgaaagacttttgggcagttggacagggtctcccaaatacctacagaagtgcctcaggagagaagccagagggcattcaatgcctccagaatcttccactggcaaagaacccaagagatatcatttgtgtctctgtctccacacagagaatgcctgtgcaaccccaccaggcaagaaagaatgttctggaatgttccccctttcttcccttcctaaccctaaatatgtaagtcaggaaaacagaaagaagacttactgagcctccccaccac

SEQ ID NO: 123628 - DNA, 606 bp, Homo sapiens
cagtgctaaatagttaataagtggtgaaactggaatttgaatccaatctgcctgccttcagatcatctgctgttccagagaaagcactaaggatacatttattgaatatttagatctaaataaattgctttgtttttattggggttctgacacttagaaatgggaaggagtaattagaagaaatgaggcagattggactgatattctttagtgggagtggctgatgatttaggagctatgggaacagggaatatcacctttgttgggccatgtctaattttacatatgaatgcggggcttgagtttttctccagtaggcatatgactccagcacttcccatttggatcagtcatgattagacttttatattttcccctcacaaatggaaataaaagagaacaaatgtaattttcctgaggtgactagggagtcttaacgagaagaggaaaagcaggaaaaaatagagttgaggccaggcgcggtggctcactcctgtaatcctagcactttgggaggccaagatgggcgaatcacctgaggtcaggagttcgagaccagcctggtctatatggtgaaaccccatctcaactaaaaatacaaaaatt

SEQ ID NO: 123629 - DNA, 325 bp, Homo sapiens
gggcctctggaaagtgcagccccgcacccttttctccaaaggattgttctcctcacaaaggaggaaacttcccaccttatcagatatccggcctcttactgaagcacagacggtgatgaaaatttatcccagaaatatcagtgctgggaggttatggtgaggtcacggcaaccatcccccaagacccagacaagacactgcctgagaaatgcacctgtggctgcctgacagccttaagccacaaggccccatgctgccctccacacacgctccctgttaatattgttttctgcccagaaaaggaacacagcgggcactctcattc

SEQ ID NO: 123630 - DNA, 245 bp, Homo sapiens
gtgtaagctgctacagaccacaaatccgttttccattcagtttcagtttgttcttaatcagcctagggagatgaagagcggacattatcttcattatcataatcggcattcccgttgggcaggtaggctcacaaagaaatgagcttagaagtccctcagcagatactatcaggtttcccagctatcctgcgaagtgcctagtatcagcatccacacatggaggttaagggactgtcggaagcctc

SEQ ID NO: 123631 - DNA, 272 bp, Homo sapiens
atctcaagcacttgttaggaaagatcattagaaagtattttataaaaatctaaattctacagcagacatactcaatccttgctgtgttaaagaatcaatcacttaacaagctctttaaaaatactgctgtccagaccccaacccggattaactaaactccagtccttggtggtgggcccatatgttaatgtgcttttaaatcttcccaggtgattctaatatatgtttagggctaagaactattgctctagtggttcttaatgttagctgcc

SEQ ID NO: 123632 - DNA, 305 bp, Homo sapiens
ctgtgtgcggccggcgcggcgcgagagggatgcagccggaaggcgcgggccctaatccggccttccctccctaaaccccggcggaaaagaggccgcgctttgtcccaccgctgcctgagaggcggaagcgggggcagccgtccggcggggtgcggctttggggagtgtcccttgctgcgctttgcgcctaccgtgaacaccgcgagggcgcctaaggtcgcggggtctcccttcgcccgacgccccgcacccacgggcatgcctgctaacacccccgctgcaatttgcatttttagtcacccgcc

SEQ ID NO: 123633 - DNA, 828 bp, Homo sapiens
agggtttatattttaaggttttgtagtccaacccaatctgatgtttgaaacttgacttttattaaaacaaacagaacaaccttcttcaaaatattagatttaaacttgtgttcagaataacattttaatctattttatctttcaagaattgagttttctttctttccatttttttcttttactattagactgctggtgattggattatcattattttagaatactgacttagatatgaaacagggcaacgatacatatatttctaactctttgataagacctaggacttctgatagatacaaactataggaagatcataactttatcttctattgtatcttaatctttatcaaattgataacatgctttataacaacagattctctattaagtaaattgagttgctaattttcctagttgacctagttattattttttaaatccagaggtttttgttgcctttctctgtataagctcttactagtcacatccgggaactctgagaggtagtgggaaggagaatctggtctagaagagagggcctaataaggagttccttaaaaaaataaaaacactacactctaaagctgtgaacggcttttcttaattcttgcttagggggagagagttaagggcatgagctgtatgttaagatttgaatacgtacttttctgcagtgagctaagtgatttttgtcatgctcttcatgtttggccaaaaggtacagggaaactaactttatctgttggtgttgtgtagcatatttttgtgttttacaaatttagagactaaaaaatcaacccaagggggagcttcttggtgatggag

SEQ ID NO: 123634 - DNA, 604 bp, Homo sapiens
aaagagtaggaggaggaagaggaagaataaccagaaagagaacaagaacagaaagtgggaggtccatgccactgtagctgtcctgaaggatctagttaaggaagacctcagtgtgtggtgacatacacaatgagtgacaaggagccccaggtcacctcccgtttaaaggacatacaaacgagaagcttcttgtcgatgggatctttcctgagtgggatcaaaactttgatccacaaattggcctgcagaactacagagtacacaagtgtaggctgaaccttaccctgaggatgtcatcagctgactgcaaggggccaccaagcccaaagtctacaaaaccaaggcagtgaagaaccacccaaaagaaaaagatgaaaaacggggaggaatcggacaccagggaaaagaggtaatcagccacccatggcaatatggagacacggcagaaagaataaggaaatgccaacttctcctcgcagggttcagctggagtccttctaatttccttagaaacagtaagcctgttttccttaaccatgtccccgtgcataactgaccctgccttcttggctgattgtgacctccataaacagaagcggacgaa

SEQ ID NO: 123635 - DNA, 867 bp, Homo sapiens
ccaagtgtttggatgcggtgggccccactggtttgggcctaacctcaagcggctgctaatggttccatgacacttttcccgctaacacttcacagagatgtctgactgatgtccactgctcagctgcaccgctgagctggtgagcattcaggcagagcacccacctctacttttctcaccccgaaaatcagagactggttctcagctggtgcagccaccgccccagcgtgccggatgcaggactttccctgcgaacactggacagtcccagcaaagcagacggtgggtcgctctgtatctctgaagaacagctgggcctgcgtgtgtcattctcaggcatctggcgcagggcttctcctccaggaaggtggctgctcagctccgggcactgccaggggccacggaccccgcatcctttccaggctgttccgcagcatctgccctcatactcacagccaccgctgcgtgtgtcccagggattctcagaatagaattctgtgcctctctcgcctctggaagtgaccgcgctctgtaggaaaatatcacagcacgccggcctcgaaaggccacgacgtggccctaaactgttctaagtatgtcagttacttagaacaatcagaaaggggcagaacaagctggggtgtggagtcaggggtcagggcacagacagcatctcttgtcttgcagagagaatgctagcaatttgcaagttacttgaaaaggtttgtgattttccaacgccctgagtaattctagccaaaatgcgtgactcgcctcacactagatgcttgctgtaattgtgtctctgtattaaactgaccgttctttggagcttcagaatggaccaggaggaaaaggtaaatacca

SEQ ID NO: 123636 - DNA, 710 bp, Homo sapiens
gtagaggcagggtttcaccatgttggcgaggctagtctagaactcctaacctcaagtgatccacctgcctcagcctcccaaagtgctgggattacaggcctaagccaccacacctggccatttagtgttattttaacaaatacctaatattaatggtggcttaagcaagatgatgttttattgctttttcatttaaaagtcaggggcagttttccagagctgataggatggttttataaacaaggggccctgtttccttctttttgcaccaacattttcaacgcataacctgcatctcctgggccgtagtggctgcttcagcttccaccatcacatctgcgttgcagccagctggaacagaagaggaaaggtagagcctgtcccagcccactaagggcataacctggaagttgcccacatttcttctgctcacatcctcattggccagaacttggtcatgtggtcagtcctcactgcaaaggaagctgggaaacgtagtttttatgctgaaggctacattctagggaacactgtggctcttaccataagagaaagaaaaggaacctgggtacagcaaggtagctcgcagtctctgatgtgtgtttgtgtgcagtacctgaggaatttggctccgatgtggggacttgatgaggagcctggtcattgagggagtaacaaattgccagtggggactgggggcccttatctga

SEQ ID NO: 123637 - DNA, 456 bp, Homo sapiens
gactgtcattagccggaaatgtttctgttctaaatcttcaaatgattggggagaaatgacttgacaggttcctctcaggggtgtaacagccccaaattcagacgttctaggctttgcagagggatccacatgccttggtcctgccctcagacctgccgaatacacagggctaaagattgtcactgactttcacaggcatgaccaaggcccagcccatctccgtcaataaagaaaggctggagtgtgtgcccctcactggttatgaaagctaagagaagtgcaagtcggagagacattcaacagtaagttgaaggtagtgtggggggaaggttgcaaggttcccactgcgcaggatcttacttggtctcacaacagttgtcaacaactcccaggggatgggaaatgtgattccagaggtttgcagggtaaatgcaattaaacaatttttgaagaaag

SEQ ID NO: 123638 - DNA, 666 bp, Homo sapiens
ctgcccccatgattccattaccctccactgggtccctcccacaacacacgggaattcaagatgagatttgggtggggacacagccaaactataccaccatgactgtagtctcttgtgtgggctcctttcactcatcataatgtttctgagctccattctccttgtcatgtgtatctgtaatctctcctgctttaatgttgggtagtgttccattctgcagcaatatcacaatttgcttatccattctactgtctggggtttttccccagtttgaggctactaaaattgttataaatatttgtttataagtccttgtgaacacaggtgtttttattcctcttgaataaataaatacctaggagaggaatttctgtttttttttttatttttatgggcacatagtaggtgtatatatttatggagtacatgaggtgttttgatacaggcatgcaatgcgtaataatcacatcagggtaaacaaggtatccatcacctcaagcatttatcatttctttgtgatacaaaaattccaattatacacgtttacttatttttaaatatactaaaaattatcgttgactggccaacctgttgtgctatcaaatactgcatcttattcattgtatttaactctacttttgtacccattaaccatctccatttccc

SEQ ID NO: 123639 - DNA, 587 bp, Homo sapiens
cattctgccaccacagcatctagaaggggttatactgatggcctcccatctctcacctgcccccgcttttggattttgcttctgtggcattgccaacaccaccatctggtaatctagaacctcagaaagacttgtccatagagatgagattgtatgtagtttagaatacctttaactttcgtatatataatgcttgctctgatgatcaatatattgaaagcgaatttgcttcataagccactgttcactccctgtctttgaaatcaacaacgtaagttttaaaccccgcaaggatttaaggagatagtagacagtatcaatgcctggcatctgaattaagaatatatttagtggagaagttttaatacaaacctcaatgaaaaagcatcaatatcatattcagcctaataaaatgttttaatgaaaattgtcatggcgtttgacaacatctctttattaattggtcttttccattattattttcttagtagcaaacacactctggttttagctctcattagttatagtcctcattggattcacattttgcgacttcagctgtgtttatcttctcattggtctcagtt

SEQ ID NO: 123640 - DNA, 155 bp, Homo sapiens
cggcgtgactagaggatccccgcactgtagatcgattattgatcagtttggggggaacatttttttaaaagctaattagtctttgccgagtggaattactaatgccgttttacacttagcacttagcggtgcttttcatcttcaaagtgctttga

SEQ ID NO: 123641 - DNA, 491 bp, Homo sapiens
atgagaaaaaccgaagctcagggaacatttccaagaccaagagctgagaacgctgcggagctgaaatttaaatccagtttgtcagacccccccaatccgacattgtcccctcgtcctgccatggcccatatcccaggaggacctgtcaccatcctccaccttggtatatttatgcctcccgttggtctactgtctggtgccttaatcactgaaggctagcgtcatgggcatgcattccttgctttgcgtgtgcgcatttgtccatgtaaggtataggaacgttgtgtggtcatagcaactccccgacccaatagctcgcactgccctccgtatggggaaaaactcgcagaccggccagaggctttgcctgtatttgggcgcactgaggcctttgcttttactggcaggtatagaaggcgactctgagattcagccagcttgctcagccgtcagagtaaaaggatgatgtgagttctttgcccctgctacag

SEQ ID NO: 123642 - DNA, 420 bp, Homo sapiens
tctacgggtattacttaggaggagaagacggagtgctttcaggtccctgcctgtagtttccttctgtggtgggaggctttgagcccagagactgagaaggactggggtggggactttatggtaaagttggttggtttcaggcagtgggtcctaattatgttttcctagattacttacagaactgactaagattgcaaaattattcagggtgtgattttgaaacaggtgctgaatgagtaggaaagacctagaaggctgcttgacttacttaagccagacccttttgttctctagagaagcataatttttctcatgcagaatgatgggagagggttttaagatttacgaggcttcacagggagtctggctgtgttgttcactgtccactgtgtatgtgtagagtccttactggaatgcctc

SEQ ID NO: 123643 - DNA, 165 bp, Homo sapiens
catgggaccacaggaaaatgaatggacagagttgaaatgttaggattcctggacaacatcaagggcccaacttgagggccgtgggcgtgactgttgagggtgattgtgatgtttccccagccacattgagctgtaggagtgcaggtgaagaggaggcagagaatt

SEQ ID NO: 123644 - DNA, 276 bp, Homo sapiens
aggtcctggggatgcagcagtgcacaacaccaaaccaaaaaaatctttgattttatgtcttcaaggtggggaagagagccaataaacgagccaataaacaagccaaccgtgaaaatgatgtcaaatgctaaggagaaaaataagccagggaaaggggttaggaagtctatgtgcatgtgtatagtggggagagggggtgaagagtggcaatatagatagggtggccagagaaggacggactgaggtgagagagtgaacacatgcctctccggagga

SEQ ID NO: 123645 - DNA, 509 bp, Homo sapiens
aaaaagctgggaaaatactcataaaaatgtcacaagaaaggctaacatccctaactcgtaaagagttctactggttaatttaaaagtgagagaatcccagtggagtaatagatgaagggtgtgataggagtagccatttggcaaaaaagggactacacctagctcattaaagtgtgaaaaaggtttatcctcccaatttattaaaatgtgtattatctacatgattctgttggaattgagagtgaatgaggttgtacaaactaagtcactctgatggagatggagtttagagacggagtctcagggaaggttagtgcggccggtcagtgactgctctttctggcacagtgcatacgtccttggtaggacctacattttaaaacttatttttttattgacttttcttatggaaaatttcaaacctattcagaagtgaagagaatagtttaatgaacccccatgtgtcaataccaggcactccaaaacagtatacttttatctatatccca

SEQ ID NO: 123646 - DNA, 660 bp, Homo sapiens
tccctttctcactggggcattgaggacacacatgaaagaggcgagggggcgagaaacaatgctggcatctccatcctgggaagaggctgggaagagtgactcagtcacaaaaaataaacaacaccagcttttgtcttagaaattcaccctgtttgacttcatggattcccatcggtctgcaaggacccgggttagcctgggatcctcttctgtggctttggtgagcagatccccactccgcctcctcttaggacgcctagtcctgccgtgattggccttgggggcccgggggtgacctcaagtgtccccagccaggccgcccaccccaatctcaagaagaaacagggtgggaggaagcagggcaatctcagcacccatggcagaggaggccacggtggaggaggccacgcctggctcagcctggagttggggacgtgaggaggggctgagacggtcaccccaagacccccacttcaggccagctcagagggtccagggtgggggtacttgggagaaggcttgtgagggggtccctgtggccttcagggaatcccaccccatttggatgttacctccaggctggtcctaggggctgggcacccacaggccagaggccaaggaaccaggaagtgccccccgacatgcgcttggggagcccca

SEQ ID NO: 123647 - DNA, 222 bp, Homo sapiens
gagacttctcaaaaattaaaaaaattaaagagaccaagatttgggcaatggatgtgtaaactgctaccgggtagtattgtttctaggccgtcccatctggtagagcaaggaaatatttgtttatggttatttttcttatagctaacatgtactgtatttactataatggaaaaaaaacattttccttttgaaacatgcaaatgatccactgtccacagagac

SEQ ID NO: 123648 - DNA, 502 bp, Homo sapiens
cactctcatgaagggcagcatttaggtgctattaaagcacaaagcaggactttgaatatttcacactggagcccacatggcttatgttcctaattcaaatttccagagggtctaaaatcaactgaacctcaaagagattgtttctctggaaccatccaacttcttagaggttcattttccaaatttaatcatgtgacattgctgaagatttaagaataatagcacttttgtctggtcatcggtatttctaaatagcttgaaatttcactccttctttgaatattctatagctacagactttccaagttgaccaaaatttatctctctctctgttcccaccctactcctctacgccctacaagggagatgggtactatatgacatttctagccttacctttgcagtagtaagctaaaaccaaaggttctcattttttttcattccattcgttaatccactcactcatttaatggatggttcatgacctcacattagctacagt

SEQ ID NO: 123649 - DNA, 421 bp, Homo sapiens
tggaggcccattcctcctgaggccaagttcctccctggctgtgggccagcataagcgaacaaggcgtgtacttccggaatgctatggactgagtgtgtgtctccccagaatccatgatgttgaagccctaaccctccagtgtgatggtgtttggagacgaagcctttgacaggtagttagagtcatggcggtagttagttagagtcatggcggtagttagttagggtcacggtggtagttaggatcatggtggtacttaaggtcatggtggtagttaggggttatatcagtagttagggctatggctgtagttagggtgacggtggtagttaaggtcacagcagtaattagggtcatggtggtggttagggtcgtggtggtagttagggtcacggctgtagttagggtcatggtggtagtt

SEQ ID NO: 123650 - DNA, 453 bp, Homo sapiens
tggaggcccattcctcctgaggccaagttcctccctggctgtgggccagcataagcgaacaaggcgtgtacttccggaatgctatggactgagtgtgtgtctccccagaatccatgatgttgaagccctaaccctccagtgtgatggtgtttggagacgaagcctttgacaggtagttagagtcatggcggtagttagttagagtcatggcggtagttagttagggtcacggtggtagttaggatcatggtggtacttaaggtcatggtggtagttagggttatggtagttagggtcatggcagtagttagggttatatcagtagttagggctatggctgtagttagggtgacggtggtagttaaggtcacagcagtaattagggtcatggtggtggttagggtcgtggtggtagttagggtcacggctgtagttagggtcatggtggtagtt

SEQ ID NO: 123651 - DNA, 260 bp, Homo sapiens
tcgagccggtaccgacgctctctctgtggggtgtgtcagactgtaaggggatgaatggaaatgctgctattttaagcacagtttttctggccagaacaagctaattctaaagcatgaggaacaattttctgccacaaagagttaatctgtaatactcagcagctcatttccaccttgcagaaagcatcggagtgtagagtcctgctgtttcatcattcacggactcgaaattcgttaccaggaaagcaaagcatttatta

SEQ ID NO: 123652 - DNA, 374 bp, Homo sapiens
atttgtttcgtccctgctaatgaaggtgttaaataaacttggatgctgttattgaagcttaaaaaataaatggaagctgggtgcgatggctcaagcctggaatcccagcactttgagagaccgagatgggaggattgcttgagctcaggagttcaagaccagcctagacaacatggcaacaccctgtctctacaaaaaattacaaaaagtagccaggcgtggtgatgtgcacctgtagctatgtgtacctgtagtcccacacagtcgggaggctgaggtgggagcctcccttgagcctggcaggtcaaggctgtgatgagccacgatcatgccactgcactccagcctgggtgtgacagtgagatcccttctta

SEQ ID NO: 123653 - DNA, 440 bp, Homo sapiens
caggctgcagtgcagtggtacagtcattacttattgtagcctctagctgctgggctcaagcgatcctcctgcctcagcctcctgagtacctgggactataggcgtgcaccatgcctggctaatttttaaaattttgtagagacagaatttcgctgtgttgcccaggctggtctggaattcctgggctcaagtgatctgccggtgagccaccgcgcccagcctgtctttaaaaattttaaaaagaacatcccactcagaccagcgttaacaataacatactttaggtggtcaaaaataataaattttgttgggtatatttcatcacaatttttaaaaagacaaatggagcatgccccgccctcccccccaaaaaagatgaatagcaacacaaacaggatacgggaaaataacattttggggtctatactcaaggtttttgg

SEQ ID NO: 123654 - DNA, 329 bp, Homo sapiens
gctaggtttataggtgtgagccaccacacccagcctacatgtaactttgtagtagccagattttaaaaagcaaaaagtaatgggttaaatgaattacaataatatattttacccagtatatccaaaatattgtcgtttcaacttataagcaatattgaaaatttactaataagctattttgtatctcatagtcttcaaaatactttatacttaaaacacatctcaagtcagatagtaaattttcatcagaaatacttgatctgtattctgactttctgaaactgatagttgaaaaagttaggttcacatacccaagctgttccattttc

SEQ ID NO: 123655 - DNA, 646 bp, Homo sapiens
atgcagtctcggctcactgcaagctccacctcccaggttcaagcgattctcctgcctcagcttcctgagtagctgggattacagtgggattacaggcatgcgccaccatgcctggctaatttttgtatttttagtagagacgaggtttcactgtgttggtcaggctggtcttgaactcctgaccttgtgattcgcccgcctccgtctcccaaagagctgggattacaggcatgaaccactacgcctggcctctttatggcttttaaaaagttatctgccagttcaagctcctttctctttttcattcattcattcattcattcatttatatcttttcatgtgaccagtagggtataaacagcccttaaagggcatatgtctggcctttgaaataattgtttggccactattaggtcttagggcctctggactattgagaagttacgtagcttcaacctgagtcacacattgtatatttgcttttgctagtctttccacattttatctgaaggtctgtttttacagaagccttgagatatgaagatccctgtgcccctgacccctccccattaggagtgttttttgtatttagaaattggtctcctgagttaggaagctccagcgttcccctcaggcggtctgagaa

SEQ ID NO: 123656 - DNA, 917 bp, Homo sapiens
tactatgcttatttttaaaattgaagaagtagtataagcaaagctattaggtaaaaaatggtagatatttttggatgtgtcaaatatgggaccctagggtaaatcaatagaaatgcaaagttgattagcagtcacctaggcttcggagggtttcatggatgacagataaagcctatgggttttctttgggggatgagaaaaatgttctcaaattcattctggttatagttacacaacatgaatatactaaaatccactgaatgctatactttaaatgggcaaaatctgtggtatgcaaataaaaaataaagctgtgataagaaaaaaaagtggaaccacaggaaaaagcagtataaaactattgtttcccttgatgcatcactttagcttaacgatggtgtgtagtcctggtgttgttattccacgggagggaattttagagtgtgcctctttatcgctgctcttctctgtctagtacttcatcacttctgaattcatgacttgctctcagatgttccaactagcattttgtatgaatttaaacttggctgcatctgagctgtttctgtcttaaaacattggcttcttggaattcccaagcaaccggaaaatttcccaatattggaaaagaaaagatcatgaaaaatcctaataaaaacggtcagaaatgctgataaactaaacaaagtaagtcttgaagacaagggtaaaatgcctttaggaagtgtgtccaaaactgttcactgcattgatgagtctgaaattttccatatcatcaagctaatttattttcttcaatttgattgacttttagaatatcaacctccaggcacaggcagtatatacctaaatgcagtgtactcactgaaactgtaatggtagacataagactctggaatttaaaattccagatgacc

SEQ ID NO: 123657 - DNA, 599 bp, Homo sapiens
tctttacttgacaaagggcagttttgtcaagagtagaaccaaaagtgatagcaacttcagggtgatccccagcttctctgtgcctaagagtgacagagctttccagtgttcagtgtaagaggctatagcatttaagttggatgaaatgctcccctttctatctttctcccatggaaaaagccaggtcagggttaaatctaattttcctctggctccaagactctgctgcaaatcgtattactgaactttgcttgggaatatagcaaaccccagtaagtggtctcactataaatagctggccatgcatctcaaggtgaccctctccagcaaccctgctgtatttcttcaatacatttgcttcctaataccccaagatggtcacttaattatcttttcctttttcctttcctcctcaccattcatgttcacattctgatgaaatttttcaaactgtaaaaggaaactggaagcattcagaggagaagcccatcatcatctcaccatcactgaattcctaaacctaagtgcatctgtactcgaatattccccctttgattaaaatgaaagaaaatctcttgcacttcatctgcttgcaaatt

SEQ ID NO: 123658 - DNA, 544 bp, Homo sapiens
acccaggaggcggaggttgcagttagccgagatcgtgccactgcattccagcctgggtgacagagcaagactccatctcaaaaaaaacaccaaaaaacaaaaaagaagctatactatgagatcttctaccccaaccatgtgctcctgcactgtccctctccctccacagtccacaaaagaagagcagagataagaggggaaatcttggattccctgacctactataatgtgctgtattttggggtggtcctctccctaccccacggtgggctccaagatcatcagttacagagactaggggtaccaaaaaagaaaaaagaaaagaaaaggtttggggtaataacttttaaaaagtgtaatgtcttgtgaatatctgatcaggcagtcgacttacagatttggcctgcaccaatctggacagaggaaggagaaactgagcaagaaggagcagcactgctgttaccccactgtttggcacagatatgtcttccctgggtcatacagtccatagaaattgctggtcttaagccctcttgccagttcc

SEQ ID NO: 123659 - DNA, 365 bp, Homo sapiens
agtctccagacttcttttcatcctgtaaatctaaaactctatacccattaaatgataactcttcatccctcccttgccttagcacctgtcagccaccattccactctttgtctctatggatttgactaatctgtttatctcatataagtgaaatcatatgatatttgtcatttaattttattgtattgtagagatggatctcactctgttgcccagactggagttcagtggcatggtcatagccccctgcagccttgacctcctgggctcaagcaattctcttgcctcagcctcccaagtagctggaactacaggcatgcattaccttgcatggctaattaattttttttgtagagacaggatct

SEQ ID NO: 123660 - DNA, 407 bp, Homo sapiens
ggactacaggcatgtgccactgtgactggctaattttttatatttttagtagagacaggatttcaccatgttggccaggctgctctcgaactcctgacctcgtgatccgcccgcctggatctcccaaagtgctgggattacagttgtgagccaccgcacccggccaaggtagcaacttttatttgagaaagcttggaatcctgacctaagctccctgagttcccactgtggcttgtggccacctattgtgatactcactctctacccttggttttctgatctctaaaatgagactgtctacttcacgtggctgttaaatgcatcataatttccttccttacctcccttctttaaaggaaacttggaattttcaaagctactaaatggagtttttttgtgtttttttt

SEQ ID NO: 123661 - DNA, 518 bp, Homo sapiens
tcctgagagtcgggccgagccccgtgtgtttctgaagactctgggggtgggacacggcggggaggtggtgccccgcggaccccggggtgccaggcacggaaggcgggactctgggagaagcgtgcggaggaccgtggcgtcggcgtcccggatgtgtcggtcgtgcccggggaggccgggttcccctcgctgcgggccaggcttggctcctgattccctctctggtccctgtattggtcaacacttgagcgtacaatatcttgaacatgcttcttccaatgggttttgtttcccatttcctgcccctttcgccactcacggaccttgaggccagttgacggcccttctccccacgcctgtttcttttgaaagcaagtgtagacaccttcgagggcagagatcgggagatttaagatgttacagcatatttttttttcttgttttacagtattcaattttgtgttgattcagctaaattatgaaaaataaagaaaaactcctttgataaaaaaaaattt

SEQ ID NO: 123662 - DNA, 1041 bp, Homo sapiens
tcctgagagtcgggccgagccccgtgtgtttctgaagactctgggggtgggacacggcggggaggtggtgccccgcggaccccggggtgccaggcacggaaggcgggactctgggagaagcgtgcggaggaccgtggcgtcggcgtcccggatgtgtcggtcgtgcccggggaggccgggttcccctcgctgcgggccaggcttggctcctgattccctctctggtccctgtattggtcaacacttgagcgtacaatatcttgaacatgcttcttccaatgggttttgtttcccatttcctgcccctttcgccactcacggaccttgaggccagttgacggcccttctccccacgcctgtgtccccgcgttctgagaagtcctctgtcttcgtgtcactaggtccagaaagtcgcgccgggcagaggcgcaggcggggccggcagggccgaggaataagcgacaattctggtttttctcccctggccgtcgttcgccagcctccttcattttcctgagttcccgctgaagtatatactacctatgagtccaattaacatgagtattatgctagttctatcctactaaaaaaaacgtaaaaaaataactatatagaagctgttccagcaaccatagactgaagatacgaaagaaaatccatttatttaagacctgttccggtatccatgaggacataatttacctttcagtcaccacaaatttataggcatttgtatcctggactaaaagaaggggctgaggttgggtttgtcatcacagagggggtgggcctggaaagggtccttcccaagctgccccggctccggcggcccgggccggcagcctctgccagccagcgtcctcacggcctccccctcgcctgtttcttttgaaagcaagtgtagacaccttcgagggcagagatcgggagatttaagatgttacagcatatttttttttcttgttttacagtattcaattttgtgttgattcagctaaattatgaaaaataaagaaaaactcctttgataaaaaaaaattt

SEQ ID NO: 123663 - DNA, 326 bp, Homo sapiens
aactcctgacctcaagtgatccgcctgcctcagcctccgaaagtactgggattacaggtgtgagccaccgtgcctggcctgatgatggatgtttgactcctgcataccacggtgttcccatagcacggctcacccctcataaagatgtttatctaacctccccagtggtcacaggtttcacaagaaagtctgaggcaccactagctgcacattttcccaaaaaagcttgctatataaaggatattttctggaagacaagtgtggtgattcgctgtctctaggccagcagggacatcacttctgtttgtaagtccctattaaatgcc

SEQ ID NO: 123664 - DNA, 3665 bp, Homo sapiens
  misc_feature (1404)..(1404): n is a, c, g, or t
  misc_feature (1531)..(1531): n is a, c, g, or t
  misc_feature (1539)..(1539): n is a, c, g, or t
  misc_feature (2440)..(2440): n is a, c, g, or t
tgcagatgatctgcagcctctgcgggtccaggtcctgcttgccgccaggcctcctcctcctgcatgtgggggaagtagacctccgtgaagttgcagatgatctgcagcctctgcgggtccagctcctgcttgccgccgtccccgtagcagctgtcctgctcgcccagcttgcggtagtggaagagctcagggaagagccagtggaggaggaagacggcaaactcgcctgtgaagaggcttcatgcaggaactaagtgagggcctacatgtccaccacgtggtctgaggcgatggtgctgctccagtccagagacaggccctcctcctcgtctttgtggtccaggaagtggccggggtccactgctcagcctcaagctggcagcctggccaccgggctggctgttctccatctcccgctgggcccagaagtggctgaagaacttattcagctggggcaagcactcggcctgtcacacagccctctccttcaccgaggggtagtagacctccatgtagttgtggatgagctgcaggtgcagtgactccagcttaagcttggcctcaaagctgcaggcactgcagcctcgggagaagttgactgtggctgaagagcttggggaagagctgcaccagcgggcagcaggccaggaccccgcctgacaggctctggtccaagatctgcttaagctccatgcccgtgagctgctacggggtggtgggggtcggctggaatttggccaccatctcagtggggttcaccttcagggagagcaggtccactttgctgtgtagctgggacctgttggacgtgagggtgttgagcatgtagaacatctcctggatcaggaagtagatgttagggtcactgttggtggctgccccagtgctgccacagtcccacttctatggctcattcaggagcctaagcagcgaggggctgttgctggaatttgccttctggaagagctcatacgtgtttagcaggtcccccgagggagggttcttcttctccatgaccttgtgggagatgccatacagaggcttcttgtagtaaggggtggtggcatggttgcggggctcctccttgcctggccacacagagcccgagctcctgccttgccggcctgctctccattgccttggcagggcgagctgttctcgggttccacatgcctgctaggagcgcctctgggatcagctacctcctctccacgctggggatggagtctggctggccattgctgaccagctgagtcctggagggcagtaaagacgctgtccagaaggtgcttctcagaagtcctggaattcacggagcagcctagagcagcatctttggcctctgtctccactctcacttcttagaagttcttctacatcaattttttttggagatggttctgnctctgtcacccaggctggagtgcagcagttgctcagagctcactgcatccttgacctcccagactcaaaagagcctagctacttaggagtagctaggactacaggccacggccaccatgcctggctnatcttttnaattttttgtagaggcagaggtctctcattgtgttgcccagacaagtctcaaattctcgggctcaagtgttcctcccaaagtgctgggattaatggcgtgagccactgtacctggccatattttttttttcaaaaaattcatttgtagagtttaaaaagtatcttttgatcaagagttcttattgtatttatgtttgcaaatttcatttcccattctgttgcttgccttttcactctcagtgagttattttatgattacaaatccttattttttatgttattttattactatttattaacttatttatcttatttattagccttcaatcgttactttttgagtcttttttaaaatcttaaggtcatagaagtgtcctctgtattactttttaaaaactgtactgttttatgttacacattggcttctatatgaaataatttttgtgtatgttgtgaggttggatgttaatattcatttttatctgtaccgatgtatgaaagacagcacaatttattgaaaatgaatcttttcctcattgtactgaagcactatttttttcacaaatcagctaaatatattgtgtggttctctttacgagctctctattctgtttcattgaaatatctatacttgcaccttttccataatgtcataattaatatacatttataaaaactttatatctaatagtgtaagtcttcacattatattttttcttcaaagttatctatacactgcatttttatttgcattttatagtcagtttttcagttgccaccaaatataatgcagacaaattatgctattactaatcacagtattgtgattttcagtgtattacaaatatagatttatttaaaatactgaatctttcttctaataccaggaatgacataggancacagtacacctttatttctgttgaatatctttaatttctctcagtaaaatttcacaattttcagtaaagggattgcatatgatatgttacattttatattaggaattcaatgtttcttcctggaaacatttcagatttttaatattttatttgatttagactcactacatttggaaagctttaattgtaattttatttttaatagatatagagctattaggatttgctatttattcttgtgtcactattaatgattttctagaaatgtatctatttcatcaaattatttcaaaatttttgacttaaagttacttattacattctctttttctctcccatgactatagaatctataatgatttccttgttattattcatgatatttagaatttgtggatactcttttttttaaatttcatgcataatcatggtatatttttatcagtcttttcaaagtaactttggcttttgctgatttcatttattttatgattgtttccttttctcatgcttcttatgtatcttctcttttctaattctttggatttaatttgacatcacattttaaatttttgaaattgacaattagattattaattttcaagctttaattttttaaacatatttatgtaagcatatgcatttatctccaagctgaggtttgcctaagcctcccatcttttaacaagcagtatttttactttcgtttttattaaattcaaaatatattttaatattcactgtaattactttttcgatccatgaataacttagaaatgtgatgcttaatttctaaacatttggtcactttcaaagtcttgctatagatttgcagcttaataacattgttgtacaaaaaacactgtcaaggatttcaaatttttggtatttattgattcttgttttgggcctaacctcagcctatatctgtctatctaacctatctatctatctatctatctatctatctatctatctatctacctacctacctatctattatctatctacctagatagacagagatatctatagatagctatggtaaattttgaaacacgttccaaatacattataataaattgtgtgttttgctatttttgggtgcagtttttatatcaaagtatttaatcctactgctttaaatttttctattattattgatattttgtatcctttttgctatcagttattgaaaaaggtatattaaagtctttatgattg

SEQ ID NO: 123665 - DNA, 3901 bp, Homo sapiens
  misc_feature (1404)..(1404): n is a, c, g, or t
  misc_feature (1531)..(1531): n is a, c, g, or t
  misc_feature (1539)..(1539): n is a, c, g, or t
  misc_feature (2440)..(2440): n is a, c, g, or t
tgcagatgatctgcagcctctgcgggtccaggtcctgcttgccgccaggcctcctcctcctgcatgtgggggaagtagacctccgtgaagttgcagatgatctgcagcctctgcgggtccagctcctgcttgccgccgtccccgtagcagctgtcctgctcgcccagcttgcggtagtggaagagctcagggaagagccagtggaggaggaagacggcaaactcgcctgtgaagaggcttcatgcaggaactaagtgagggcctacatgtccaccacgtggtctgaggcgatggtgctgctccagtccagagacaggccctcctcctcgtctttgtggtccaggaagtggccggggtccactgctcagcctcaagctggcagcctggccaccgggctggctgttctccatctcccgctgggcccagaagtggctgaagaacttattcagctggggcaagcactcggcctgtcacacagccctctccttcaccgaggggtagtagacctccatgtagttgtggatgagctgcaggtgcagtgactccagcttaagcttggcctcaaagctgcaggcactgcagcctcgggagaagttgactgtggctgaagagcttggggaagagctgcaccagcgggcagcaggccaggaccccgcctgacaggctctggtccaagatctgcttaagctccatgcccgtgagctgctacggggtggtgggggtcggctggaatttggccaccatctcagtggggttcaccttcagggagagcaggtccactttgctgtgtagctgggacctgttggacgtgagggtgttgagcatgtagaacatctcctggatcaggaagtagatgttagggtcactgttggtggctgccccagtgctgccacagtcccacttctatggctcattcaggagcctaagcagcgaggggctgttgctggaatttgccttctggaagagctcatacgtgtttagcaggtcccccgagggagggttcttcttctccatgaccttgtgggagatgccatacagaggcttcttgtagtaaggggtggtggcatggttgcggggctcctccttgcctggccacacagagcccgagctcctgccttgccggcctgctctccattgccttggcagggcgagctgttctcgggttccacatgcctgctaggagcgcctctgggatcagctacctcctctccacgctggggatggagtctggctggccattgctgaccagctgagtcctggagggcagtaaagacgctgtccagaaggtgcttctcagaagtcctggaattcacggagcagcctagagcagcatctttggcctctgtctccactctcacttcttagaagttcttctacatcaattttttttggagatggttctgnctctgtcacccaggctggagtgcagcagttgctcagagctcactgcatccttgacctcccagactcaaaagagcctagctacttaggagtagctaggactacaggccacggccaccatgcctggctnatcttttnaattttttgtagaggcagaggtctctcattgtgttgcccagacaagtctcaaattctcgggctcaagtgttcctcccaaagtgctgggattaatggcgtgagccactgtacctggccatattttttttttcaaaaaattcatttgtagagtttaaaaagtatcttttgatcaagagttcttattgtatttatgtttgcaaatttcatttcccattctgttgcttgccttttcactctcagtgagttattttatgattacaaatccttattttttatgttattttattactatttattaacttatttatcttatttattagccttcaatcgttactttttgagtcttttttaaaatcttaaggtcatagaagtgtcctctgtattactttttaaaaactgtactgttttatgttacacattggcttctatatgaaataatttttgtgtatgttgtgaggttggatgttaatattcatttttatctgtaccgatgtatgaaagacagcacaatttattgaaaatgaatcttttcctcattgtactgaagcactatttttttcacaaatcagctaaatatattgtgtggttctctttacgagctctctattctgtttcattgaaatatctatacttgcaccttttccataatgtcataattaatatacatttataaaaactttatatctaatagtgtaagtcttcacattatattttttcttcaaagttatctatacactgcatttttatttgcattttatagtcagtttttcagttgccaccaaatataatgcagacaaattatgctattactaatcacagtattgtgattttcagtgtattacaaatatagatttatttaaaatactgaatctttcttctaataccaggaatgacataggancacagtacacctttatttctgttgaatatctttaatttctctcagtaaaatttcacaattttcagtaaagggattgcatatgatatgttacattttatattaggaattcaatgtttcttcctggaaacatttcagatttttaatattttatttgatttagactcactacatttggaaagctttaattgtaattttatttttaatagatatagagctattaggatttgctatttattcttgtgtcactattaatgattttctagaaatgtatctatttcatcaaattatttcaaaatttttgacttaaagttacttattacattctctttttctctcccatgactatagaatctataatgatttccttgttattattcatgatatttagaatttgtggatactcttttttttaaatttcatgcataatcatggtatatttttatcagtcttttcaaagtaactttggcttttgctgatttcatttattttatgattgtttccttttctcatgcttcttatgtatcttctcttttctaattctttggatttaatttgacatcacattttaaatttttgaaattgacaattagattattaattttcaagctttaattttttaaacatatttatgtaagcatatgcatttatctccaagctgaggtttgcctaagcctcccatcttttaacaagcagtatttttactttcgtttttattaaattcaaaatatattttaatattcactgtaattactttttcgatccatgaataacttagaaatgtgatgcttaatttctaaacatttggtcactttcaaagtcttgctatagatttgcagcttaataacattgttgtacaaaaaacactgtcaaggatttcaaatttttggtatttattgattcttgttttgggcctaacctcagcctatatctgtctatctaacctatctatctatctatctatctatctatctatctatctatctacctacctacctatctattatctatctacctagatagacagagatatctatagatagctatggtaaattttgaaacacgttccaaatacattataataaattgtgtgttttgctatttttgggtgcagtttttatatcaaagtatttaatcctactgctttaaatttttctattattattgatattttgtatcctttttgctatcagttattgaaaaaggtatattaaagtctttatgattgaagacgcggctattgctccttttagttctataaaaattgtaaatgtgtgttaactgtgtgtgagtgaatatacatacacaagtttgacaacttcctcaatagttgattcttttatatgggatgatgggatacatcttcctttcaagtaataatttctgccttaaaatctcttttgtctggatattaacatagctaaacaaattttcatttgggcttgtgtttggattaccctttta

SEQ ID NO: 123666 - DNA, 282 bp, Homo sapiens
gttaatttacactttttaaaaaatgtatagctgtgaagcctgacctggttgaaatatgttgggtaatttattaacaaaagctgtgtgtgaactatttaggagttccatttgaatttcctaaacagttggggaattagcttcatggagggcacaggtatgtatggtaaaaactggcaggcaagtggacattaattgactgaaaagagagcttcagtcatactggcttctgtacaagtaaaacaatcagttttgagtgatgaattatatctaaccctgtgctaa

SEQ ID NO: 123667 - DNA, 460 bp, Homo sapiens
taagagtagtttcgtgtaattctttacttaatgtcttaatttaactgccatataaaaaaaaagtgagcaaccttcaaatcacttatttgcagtatagtataatataagcaggctgaatctgtggataacattattgactgatttggaatacacttcataaaggtttatacacctttgtgctaaccacttttaagaatgttaataggtcaccttcttaaaaattgattcagtctatctcaacagagcaaagcttccttaaattggctttagaatttaagaatttggaaggaatatttaatgatagcaatacacagtgtatttttttatgattttcaggataactgcagtgagtaaaaggagtaataaaaccaatatttataatcatctggataaatatatggttgcaacataatttctcctgttgagaataaaaatggttggagaaatccactcttgtctc

SEQ ID NO: 123668 - DNA, 545 bp, Homo sapiens
tcctgtctcagcctcccaaagtgctgggattacaggcatgagccatggtgcccagcctcatgtgaggtttaagtctgtgttgctgggcccagctggaagtcactagtggctctttgccttcgcgggggtttgctggggaactcagagggcagtgaggcccaggctgtgcccacagggagctcccaaacagcttgcctttggcctgcgaggatatggaccgaggaagctcctgttaaccaggtttcaaaaactccatcgtatatacattggctcccctgggaggagacgtaggacatggagaatgtcagcgctggaaaggaccttagctatttctgacctagtcctttgttatgtcatggagaaactgaggcacacatctgggaaggccagacttggctcgccctggccaagccagtatgtcactgatgactccctggagggatagggaatttcccatggtttctcaactgcaggaagctgaaaatgtctcagcgtgcatggaatttgatgagcgttttgtccctgtgatgcgggggcagccgaga

SEQ ID NO: 123669 - DNA, 439 bp, Homo sapiens
gacgaagggtggcgcggagatgaggctgggggcctcggggttgggtgttagccaaagacacaggctgggtaggtgaagacaggtcaaggcctaggtatgaccgtatgtttggaggaaaagagactggaagggatgagaagagagtgatggcggatttgtgggtagaaactaaagaaggtgtggagggagacgacaggagcatgtgtataattcagggactaagaatgaagaggaacactaggagatggttctcaattgtccccaaaagacacaacaaaaacttgtcagggactatcagtacctctgaatgagagtccttccacttccagttacagggcaagaccaagttactcccaaaagagcaaggccaggctctggtcagctaggaacagcgtctgctcactaaatacctactgcttggctccaggtgaggtcgact

SEQ ID NO: 123670 - DNA, 545 bp, Homo sapiens
ccaaagctggagataagtgggtgggagggaaggatacagagagggtgacaggctgagggttcaaaaggaatgaggggtgatggaagaaaccaggaggtgcatgtgtgtgggtgccagagctgggaagggaagggatggggcaggttgcagaggaccaagacgaacatggggcagggtaggtgaagacaggtcaaggcctaggtatgaccgtatgtttggaggaaaagagactggaagggatgagaagagagtgatggcggatttgtgggtagaaactaaagaaggtgtggagggagacgacaggagcatgtgtataattcagggactaagaatgaagaggaacactaggagatggttctcaattgtccccaaaagacacaacaaaaacttgtcagggactatcagtacctctgaatgagagtccttccacttccagttacagggcaagaccaagttactcccaaaagagcaaggccaggctctggtcagctaggaacagcgtctgctcactaaatacctactgcttggctccaggtgaggtcgac

SEQ ID NO: 123671 - DNA, 524 bp, Homo sapiens
tgggctcagttccctcaagtctataaaatgggcatgatattattatgcctcctcatcagggagatgtaaagactgaatgagagaataaatgggtagaactcagcacagtgaatacaagcagcaggtgcttgctaatatcactgagaagcaagaaatgcctttttcttgatgctcagatcacctgtgtcacagcaatggtccaacagggagaagggaatggaccagggaggaggcgcagagcggaacacaaatcatcctctcccttccttgaacctgcattttttttttttttgagactgaatctgtctctgtcacccacgctggagtgcagtggcatgatctcagctcactgcaacctccgccaccagggttcaagcaattctcctgcctctcgagtagctgggattacaggtgtgcaccaccaggcccagttgatttttgcatttttagtagagacagggtctcaccatgttggccaggctggtctcgaactcctggcctcaggtgatcgcctgcctcggctt

SEQ ID NO: 123672 - DNA, 714 bp, Homo sapiens
ctttgttaccaaccctatctttctacttcgtatggctacaaagagtttctttctttttgagaatattcaagcttaattttgatgtggtttattctcatttgtttgcagggctgaagtataaacatctttatcttggtagttcttcctagcataccagtttaaaccaagaaaccttttaatattcgatttccacgcttttgatttgttttgtcatttttactctccgaaaaaatttctgaaaagctagtaaacttattaaactctgtgtgataatgtcttttccatcaaagacttaaaaaaatctttaaagccaaaagtttaaagactattcatttattatgtcaggagttagatatttaatttttaaaatcaaaatagtggataaccacttattttcctgggaaaaattattttttgaacctgaaaatgactttattttactcatcacaggaatacaagattggtaagggtttggctgggttcaaaataatcttctcctcacaaaatttgaagatattgctataaaggcttctaagtatccaatgttgtccaacctaccaccctcccttctacaaacctccaaaaatgcctcatgacccagtgagaatatcaatgagctgagatcttcaattcttcaactgaagtttttcctgctacttcttggctagctcactttccattttctagtaatttccacaaaaactgattatactt

SEQ ID NO: 123673 - DNA, 628 bp, Homo sapiens
ctctactactactacttcatgaatgaaagagatgaacttctcagcccacctataatctactgatcgtatgaggtttactgcccgctggctcagttggcacttcttagaggtcattagcatttcctaactcagtaaatgcaggtttttcctatcacagccttgctcacagcacttacagcctgtgccattcctgaaaatggtgtgcctgctccatatttcactactttgatcctaccaataagtcaacgattgagtaagactatttatcatagtcttggctatctggttaattcatcaggtcaacaatgatgctataatcagaaactgaagctgtcaaaatgtaattttaaatgatgcttctaggcagggagtggtggctcatgcctgtaatcctagtactttgggatgccaaggtgggcggatcatttgaggccaggagtttgagatcagctaggccaacacggcaaaaccctgtttctacgaaaaatacaaaaattagacaggcgtggtggcatgtgcctgcaatcccagccactcggaaggcgaggcgggagaattgcttgaacctgggaggcggaggctgcagtgatccaagatcatgccaccgtactccagcctgggtgacgga

SEQ ID NO: 123674 - DNA, 513 bp, Homo sapiens
agatgcagtacggatgtgggcctgtagcaatgtctaggtgaggcagggtatggacctatagcaaggtctaggtgaggcgggatgtggacctgtagcaaggtcaaggtgaggcgggatgtaagcctgtagcaaggtctaggtgaggtgggatgtggacctgtagcaaggtctaggtgaagtaggatgtgggcctgcagcaacgtctaggtgaggcggggtgtgagcctgtagcaatcagtgtttggagcgagttattaaagaggagatgggatttgtcaatagtgagtggggattccttggcccttctgggtttcctatccagaatgttccctgttggctaatggcatcatcatgggatcatttcctcaggctgggatctcccacccatctctcacactccacactcctgctttacagaacatttcctggagtctcatttcctagaatgaaacataagaagggcatctctgcacctgctccctgctgactgccctccactgcacatccgtactg

SEQ ID NO: 123675 - DNA, 503 bp, Homo sapiens
accccatctctacaaaaaatacaaaaattagccaggcacggtggctcacagacttgtgggcccagctactcgggaggctgaggtagaggattgctcaaacccaggagggagaggctgcagtaagccttgatcacgccactgcaccccagcctgggtgacagagtgagaccctgtctcaaaaaaaaatcaaattacaggctgaggctgttcactgggccagcaccaggagttggggccagatgagtgcagagagcaggccccgggctccctccaggtggtggctatactctgccccagcgggagctcacagagagtctgtggggctctgacctcacacagacaggtagcctctcccggggccacagccgttgccggggtcagcacaagcctgggatggctggttggctccctcctgcagcagccagttacatgtgtgcagcgtgcagtgtctataactcgtgtgctgtgtgcagtgtctgtgtgttgtgtgctgtgtgcagcgt

SEQ ID NO: 123676 - DNA, 291 bp, Homo sapiens
ccagctgtgctggtgtggtctcacagaaaggatggaggacaggaacaagatttccagatggctcttgttcagggagtttaagagggtagcttcaagaaaggagggagctggactcaaaaaatataaaacataatactttaaagtacaactttaaatgacaccgcagaattaaggaaacaatcaaagcagcagatctgcttccctatcagataggagaagctcattttgtagagagtgtgggccacaagtactgggaagcaaatgcacaaagaataataggtccagccaaca

SEQ ID NO: 123677 - DNA, 421 bp, Homo sapiens
tctacctggctccgggctggcattgggggttgtctgcacagagtcctgtgatgtgaactgtctatgggtctctcaggtggggataccagcacttattccagtggaggtggtgaagggtgcaatggactctgtgagggtttttagctttggtggtttaacgctctatttttgtgctggttggcctcctgccaggaagtggcaatttccagaaagcatcagttgtagtagtgtgctgagggaactgtgatgggtggggcctaagaactcccaagagtatatgccctttgtcttctgctaccagggtggatagggaaggaccatcaggtgggggtatggctaggcacgtctgagctcagactctccttgggtgggtcttgctgtggctgctgtggggggtggggtcgagattcccagttcactg

SEQ ID NO: 123678 - DNA, 752 bp, Homo sapiens
actcagtactagaagaaaactaccaagaactgcagcttcaaatcagtgccaatgtggatttcgcttcataccattgccaagcaagagatgtgcgctttaaggaaaccttggtttaccagacccgagtgtttgacataatgtcatgtgcatgaagcaaaggggtatttaaagcagatcaagagagtcaaggaaggcttcctggacaaggtagttccccagctgaactttagaggacagataggaggtaaccaagtaaagaagtgagaacaaagtgagagtgaaagaagtgagaatggggatagccaagtgaagaagcgagaatgaagggctctctctaggcagagagagcaacatctgcaacacgtacaaggacaaaaatgttcgatgtgattaattcaggacgtgtccagctggaattcagctggctctcagaagatacctcaaaggcagtcagctttgcaaaaccagatcaccaaggttcagctcaaaaagatcagcttagtcagggcacgatgcacacaggcagcaccctggacagcaccatggaccactgggccgagggttccccacagcccttctctgtggagccctcttcgggaatcatgccggtggggaagatcagaagttcaaagtaaaattctccccgttggacattggagacttcgagagcaaccttttctgccagattcccaacctgccacctggagagcaaggtccggtcctggtagcaaaagggcggagcaccttgccca

SEQ ID NO: 123679 - DNA, 214 bp, Homo sapiens
ccaggggtttcttttctgtgaggcaagattaggtgactctgaagcccaccccgctgcctttgactctcctccgatcgacggcccttctacaggacccgctgtgtgttcctcagctctcctgaggctccgttctgcatgcgtaaaatgaggtgacagttccccactcacagggtgtcatgagcgttcatcagatcttccgagtccagagagagcc

SEQ ID NO: 123680 - DNA, 193 bp, Homo sapiens
ctttcgaaaagcacaaaagggagctgttcgggataaaagaattattctaagacacaattatgatagtggctgtaaaacttaacaaatttactataaatcacttataataaatgaatttttcttttttaatttttttgagatagagtctcactctgtcacccaggctggagtccagtggcacgatcttggctca

SEQ ID NO: 123681 - DNA, 457 bp, Homo sapiens
aggaaattctatgttccccgtcatttatgcagactccagctaaacgtatgctagttgaactcatgccagctctgtggaagtgagggacagatacaagaaacatgggaactttccaagaaatgaagcttctttgctgccatgtcgatgatgcttgtttctgagaaactcaaatgtatggaagtgtagagtagagcttcccaaacagggtgccgtagttcacagatttgcacacaggggtgccagcataatgatctctgcagctcttggcacaccttggtatgtctggagtatgagatggacttaacatatgaatatacatataaatatatataatgtatctgtacatcttagggactagacaaacaaggtgttaaatgtgttcctctctggatggtaggtttatggaatcctttaatcattttacttatttgcttatttaaacttctgaatctgtaac

SEQ ID NO: 123682 - DNA, 676 bp, Homo sapiens
gggtcacgaattcagggggcatttggatgggtggttcaggcttgaggtttctcataaagtactaagcagacagtagctagagctagaacaaggagggtctgaagcagctcaagctggccagatacagctgtcatcctctctcctgtatccttttcttcccttttccctctttctctgcatactcccagggcctcgccatttggtctctctgtattagcaagtttgggcttcctcacagcatggtggcctcagggcagcaaaaggttttaggagtgaatgttctagaaactaaagtagacactgcattgccttttcatgacttaatctcagaagtcatagagccttacttttaccttatctattggttaaaatggtcacaatagccctctcagtttcagtgggggaggaggtagaccctgcctctccatgggaggggcatcaaagtctcattgtaggaaaagcacgtggcatagaaggtgttatgtagctatctttggaagagacagttgggcacatatggctccctggtgtccccgccattgggcagctccttgaatgctcctagttcttccctcctcctggctgttgcctctcgcctcctgcctgcttgtgagtctcctctgagtgttcccacagcaggccacatgcatttctatggaggtgacctgtcttttct

SEQ ID NO: 123683 - DNA, 344 bp, Homo sapiens
caacttctttgtctaagactaaagaacagggcagtcctcagttgatactcctcagtcagtgttaggtggaaatcaagagaaacctacatataaaatggaagctctgggtacatctcctactctttgataacacggatcactcagtggagacgctaaatgagacgaatgggacagaaaatgtaaaagattcacagatagcacacacacatttcatcctgctgtatatatccaggctagctgctaggaagagcttccaggctgtggcacctaggaagagaagcagctctgtagtactaaatatggccacagggtgtggagcttttccacccagccaatgactgcgc

SEQ ID NO: 123684 - DNA, 359 bp, Homo sapiens
ggagagcaaagtctgagtgggcacagggccttgcctaccgtgtctttctaggccatggatgatctggagagcacagatggcacggggcccttgacacatgaaccacagagccactaatgagtgtcacggtggtaggagaccaaaagaggggaaagaagacattacagaggctgggaagagctggagccaggaaggttccaggacaggggaacactgttaggtagaccccagtagacaagtaggcacagagttgacagtccagggtggcctggttgacatcttgcccccagcatcctggggactcagccaggaagatgggatttgggtgacaggtgggagagaagggcatgggagatttg

SEQ ID NO: 123685 - DNA, 535 bp, Homo sapiens
aggaggttgaggctgcagtgagccatgattgtgccactgcacttcagcctgggtgatacagcaagaccctgtctcaaaataaaataataaaataaaataaaataaaataaaagtccatgcttcccaaagtgatatagaaagtaaatgcaagccctatccaaaccccaatggcatttattattaaactagacaaaaataattacagatttacttggaaccaaaagagaccttaaacagtcaaagcagtattgagcaagatgaacaaagctgacgatattatactctctgatttcaaaacattagaaagcaatgccatcaaaacaagatagtactggcataaaaacagacataaagaacaatggaacagaatggagagtcccagaataaatctaatatatgcatacaatcaactgatcttcaacaagggtgccaaaaatacacaacagagaaatgagagtcttttaagtaaatagtgctggaaaaattggatctctatatgcaaaaggataaatgtggactcttacttcataccata

SEQ ID NO: 123686 - DNA, 817 bp, Homo sapiens
agcctggtgaattcaacattgattgggaatgaggtaaccacaaacaccgctgtctcaaatgaaaagggattcaagatctgacccagaaaacaagcatcgtaaccaccagataaaattttaatgataaacacaagatgctctacatacaagcaagactgaagtctctcatgctaagccatcaacgtaaggttttcttagaaagaggagccaccaggagcctctcgacccacagatcaagtttcatcctatcgatccacagaacgtggccatcgtgctctgtgctggcataatctgtaatgttgaacagaccccgagggaacagagaggcagagagagaaggactggcatctggactcgtagggggcctgcccttcgggagctccagagaagaaattcataattggctttgagagtcaaggctctcctttatttttaagttcttttgcgactctttcagtccagtctcagccttctgtcctcaagtgtcttctgacactctaggcagagatccctttaagctggaatgatctaagtaccttccggagttcacaccaaactgtagcatccgtgggtagaaaggagctgcatatcagttgatcgcaggcccacattttagcaacgagcatcgataacttaatggacagaatcgcaagtatctggaccatcaacctttctaaaactagttctgcagcactcccaagaagggctttcacctctaaatcatagccagtgaaacagaaactgaagaaaagcctgcctcctgggtacatcttgtttaaagcagaaatactttttttcataggcactgcatgccaca

SEQ ID NO: 123687 - DNA, 444 bp, Homo sapiens
acttgtaacccaagattttgtattactattaggataaatgtgtatctttcattagactttaattaatggtctatgtgtgttctctagccacatagtctagaaaagtcgtctctagcttctttttattgtacaccctgtccaaaaaaaatgtgcatactcccaatatctggatatttatgtatgaatagtaagtgtgcttaatatattacacattataaaacaaaattctttattaacaattaatactttacactgtttcaatttgtcttcccaatttcttagggtggaaccacccttcaagctctaacacaactgaaatagggtttatacgtctgtgaccaggagaaaaagagaaagcttggtcttgctgtacataaattttctcttcaaggagaagtacatatttcatgagaataaatagtttcagaatgatgctacagcaca

SEQ ID NO: 123688 - DNA, 301 bp, Homo sapiens
agactagaagtcatgctcatttcttccagaataaacagtaagctgttggatgattctataccatgtcagtggtgccattttggtagatgatggtagggtctatacaggggtcaaattcaggtttccattttattttctggagaaaagcatcccattgttgtgtcatctgcccatttccaagtactccctttctgtttgtttctcttgcctgtctttgcaccaactagtccctctgcaaaaatcctacctctcccccatctttattcacccacttcacttctcattctttttttcttatgct

SEQ ID NO: 123689 - DNA, 124 bp, Homo sapiens
ctgactcatcgggaggggctcctggcgtcatcgtggtggactggctgagcctgagctgggtcatcttgggagggaggatagagcatgggaggaggacaacgggagtaggcagcgagtgtgtctg

SEQ ID NO: 123690 - DNA, 222 bp, Homo sapiens
gcagaggatcccctctttacgagagaggtcagtagatttttagaagtgaagccaggtggtttaaattcaaaaggcaaatctgcccagaagactttgaactgcctaattccacacccatctcatatttgccaaatgaaaaatagtgaaaaccagaagccctaaaaacttaaaattctgggataggcaacaggccttattctcaatctgtattaaaaatgccta

SEQ ID NO: 123691 - DNA, 274 bp, Homo sapiens
tgatctcaaactcctggcttcaggtgatccaccagtctcagcctcccaaagtgctggggttacaggtgtgagccatcgcaccacgcctaaatatataaacctaatcagaagttgttataagtcttgtgaaggaaaagtacacaggtgttaaaaaggggaggctttcctgtggttagttcatcaggaaaagtttctctggcagttaaggggagacctaaaggaagagaaggagtagtcaaagaatactcaattaataacaaatgctttgaattgt

SEQ ID NO: 123692 - DNA, 348 bp, Homo sapiens
gatatagtcctacccacgacgacaacttactacagtgaaaggataccaagcacaatcagcaaagggaaagggtgcacagggagaagtgcaggagaccagacacaagtttccagagtcatctcatctcccagtagggtcacatagaacgcacttaattccctcacaacaaggtgtgaccacacatgtaaaatgctgccaaccagcggagctcagtaaaacctcatcacccatgagttgaacttggcactggtcacataagcagttctgcctggcatgaaccaaaattccagactcccaggaggaaagcagtgtgcagctttttgtttgcataagcagcttgggtatagt

SEQ ID NO: 123693 - DNA, 439 bp, Homo sapiens
  misc_feature (23)..(23): n is a, c, g, or t
  misc_feature (29)..(29): n is a, c, g, or t
  misc_feature (73)..(73): n is a, c, g, or t
  misc_feature (400)..(400): n is a, c, g, or t
  misc_feature (429)..(429): n is a, c, g, or t
cacccaattagcttgacacaggnacatgnctctgtactgaggcagctttagttctctcataaagcccagatgngttcacggccacttccatgtgtcaaacacactgggaaaaagccgcttgactttatgtcctggggcttctacttaggtcggtctggaaaaatgcaagcagttcagtgttcttttacatatatgagctctttatatagctcagaatgtgtactctttcaataaaccaaaaaaattagtccataaaatgttaggaatctagccagaaggccacaagcagccactgttggacagtcctggccactggcacaatccacacccaactttcaaacccgagtggctgggaacgtagatacgcgctaccacgcctggctcatgtgttttattttgnaaaagtcatttttggaaaactaaccttangagtctgata

SEQ ID NO: 123694 - DNA, 466 bp, Homo sapiens
ccttgctttatccacaactgttttggtaaattccgtgacactggccccagctagttgcatccgtgacacctactggctctgacttaaaaatacacccagaatccaactacttatactgcctccattataatcatctcttacttggattactgaaatagctacctaacaggtgtctcatctctcactctgtttgttgaatagccacctaattgatctccctacagactattctcagcagagaagccagagagagcatttcaaaacagaagtcacatcacaccccttctctgctcaaaacctgaccaatgtctccccatctcatttagagcaaaagttaatggctgtaccatgtcccaccttgataactccctgactcttcccttcactgacactgagcagggcaggtcctcaagctggactgccgggcacgtgaaagccccatgtcccctgcacgcacagctccctc

SEQ ID NO: 123695 - DNA, 488 bp, Homo sapiens
tgtttggcagatgtgaggttatggtcggtcagcgatgtctgtccacacataggcacgcctctggactcactgaatcagacaccctgggacccggctctgcgatctccgtcttccaagccgtgcaggtgatgctggaccacacttcagttgagaatgaagggatggaaattattttaaattgaaaactcctgaacagtcagcagccgcagaaagaaactacctccacttaagcagctgccccaggaagcagagctgctttgacccctctgggggcatttcctgcttggaggaagactaaacccccccacaccgagcagtgcagtacaggccgggcatggtggctcacgcctgtcatcccagagcttggggaggctgacgatcatctgaggtctactcgagaccagcctggccaacatggtgaaaccccatctttactaaaaatacaaaaattagccgggtgtggtggcgcactcctgtaatcccagcta

SEQ ID NO: 123696 - DNA, 302 bp, Homo sapiens
ttaaaaatcgagttatggcctagcatattgttacggtggattctgagttaaagtgaaagtacgagtcatgcttgctgtgttgtttatgcagacaaggaagtgtgtacagtggtctgaacattgtccaccttttatgtgtctgtcaccactgttggctacttcatcccctcaccaggctggataactgatgctttactactgactacccatctcattttcatgatttcatgctttagacatacaaagagaatctggaatcagatcctgtagtaaatcagtagctgtagtaaatcagtagccac

SEQ ID NO: 123697 - DNA, 505 bp, Homo sapiens
ggcctggtccagaaagctccccagcaggcatcaccttcatggcaccgagctacccgcatgcattgtattacaagtttaacttagaaaagtaacagaagtatattgtagaaaattagaaaatatattcgacccccctcccaaaaaaaatagctgtaactcatacttttaagtttcttacctgctttaactgcatctttaattatattgataacatcactggtaagaattaacatttatacagtacttactatatgtcaagcagtatgttttgcattttacatatacatgtaataccatggaaggcaggtattacccccagtttacagattaggaaactgaggctcgaagaggttaaacagccttcccaaggtcacatggcaaataagaaagtcagaattaaaagcctctacgtccacaacccattttcctgtcttctacactatggttcctattcccttgagtcctaaatctgccactaataatgctgaagaaagggggaagagag

SEQ ID NO: 123698 - DNA, 408 bp, Homo sapiens
ttcatgaaatcgactgcatgggttccaatcccacctcttacacttctcagctgtgtgactttgaatttgagttcacttctctgggcctgttttctcatccgtaaaatagggtaataacatctgccacctgggattactgtgaacgttaaactaatattcatagagtaagcgtgagtcaggtgtttgccgttattattaagcctcacagcagattgttcttaccgtccagaattttttttttgagacagtctctcgctctttcacccaggctggagtgcagtggcatgatctcggctcactgcaaccttcgcctaccgggttcaagcaattctccctgcctcagccgcctgagtagctgggattacaggcatgagccacagtgcccggccccagaagtgcgcctgggtg

SEQ ID NO: 123699 - DNA, 111 bp, Homo sapiens
tcagggggtcttggatcgtgggtgaggtctggacagggagggcactcagggggtcttggatcgtgggcgaggtctggacagggagggtactcgggggtcttggattgtggg

SEQ ID NO: 123700 - DNA, 172 bp, Homo sapiens
aattttacaacggttcacttttccagagacccttaatcaattttcacagaggaagatgcttctgaaacactcttaggaatgatgcttccatgtgggttcagacgccaggaattggttctagttgatacttctgctatttcctattgtagcttagaatgagtcaccaagcaca

SEQ ID NO: 123701 - DNA, 538 bp, Homo sapiens
gacgtcatgtttgagtcgacttctgcaggacaagaagagccaccagaaagaaggctaggcattaaggaacagcaagtgcaaagttcctgagggaacaagcgtgagttcttggaggaaatgaaaagagccctcattgtcggggagagggtggttcggctgcccttcttggaggaggggagaaaggggtggtgctgctgtgatgaggtcggggaggagcccagttctctgggacttttaggccctggggaagggttttggtttcattctaagtgtgagggggagattctggttgaggagtgaaatgatctgatttgcagtttttgaaagtcctgggctgtcccttagagaacgggctccaggggtcaaaggtggaagctggggcctgggcacggtggctcacacctataatcccagcactttgggaggctgaggcaagtggatcgcctgaggtcaggagttcaagaccagcctggccaatatggtgaaaccccgtctctactaaaaatacaaaaattagctgggcttggtggcgcacacc

SEQ ID NO: 123702 - DNA, 334 bp, Homo sapiens
tccacctcctgggttcgggcaattcttgtgcctcagccttccgagtagctgggactacaggtatgtgccaccacacccagctaatttttgtatttttcgtagagatggggtttcactatgttggccagactgatcttggactcctgacctcagatgatctgcccgccttggcctcccaaagtgctgggattacaggcaccagccaccatgcccggcccagccatttacttgatgggatcttgagttcagtaattaacttctctgagttttagtttctccatattccacaaatgtactgcctactcctactctgacctcaacttcctccactttc

SEQ ID NO: 123703 - DNA, 414 bp, Homo sapiens
atccagattcacttacttaccctagctagtgtaccctgtgtcacatgccccaaactcttccctgcccctaccaaatgttcgtaaacgtgatacggtagtatgcagaattatgaatctttagttttttccaatatgacttgtagaatccaacagggtattatagcaactcatatttcactctaaatctggaactctctatgaggagaggtccagggctgaaaggacccctgttctgagagatcttgacaccctaggccctgaatcacagccctccactcctttccaatgtcactcccgctgtccttctccaccttcagcaaccaccccctggaacctacatcgacttggttctgtgttgattgtgattaactgtgcagatacactcacaggaactcagtgctcttgcagggcttg

SEQ ID NO: 123704 - DNA, 284 bp, Homo sapiens
tttgattgtctttgctcttcagggtagtagataacaaggcccttatacctccattgtttgagtgggaactgaatttagttgtcaaggtacttggataggctgttcatatatacatatatatacacatacacatatatacaaatacacataaacacacgtgtgtatttatatgtgtgtgtgtgtatatatatatttttttgagacagggtcaaaaaggtaggtttttataggcaacgtcctgtttttgttttttttttgttggggtaacagcaatcctcccatct

SEQ ID NO: 123705 - DNA, 657 bp, Homo sapiens
gatgagccctataagtcacctaggagtctgcatgtggtcagcctagactacagtcatctccttccaacccaggactctccccaaacaccagtctagggcaccccagcttcttaatccgttcaggccatagctgactctgaattgcacagctaattcttttttatttttttttgaggcagggtcttgctctggcacccaggctggagtgcagtggtacgatctcggctaggcagcctctgctttccaggctcaagccatcctcttgcttcagcctcccaagtagctgggactacaggtgtgtaccaccaggcctagctgttttttgtagagatcaggtcttgctatgttgcccaaggctggtcttgaactcctgggctcaaacaatcctcccatcttggcctcccaaagtgctgggattacaggcgtgagccatctgcctaaccttatttactgtttttaaacagtaaacagtaaaacagttttaaacagtaaaacaacacagggccaggcaccgtggctcatgcctgtaatcacagcactttgggagaccaaggtaggaggatagctagaagccaggagtttgaggccagcctgtgcaacatagcaagacctcatctctactaaaaataatttttttttctgagtagctgggattac

SEQ ID NO: 123706 - DNA, 460 bp, Homo sapiens
gctggggggtacccctggtcaagttcctcaagctttctgagcctcagttcctgtaaagtgggaacaggatgcaaagcttacaggtttttcgtgatgatgaaatgaaaacacaaatgaagcatgtagagcttatggacctgttgccaggtaggtgtcaggaaatggtcattattagcacctaaggttctcatttgttgaggacatttttttttgaggtagaatctcactctgtcacccagactggagtgcagtggcgctatctccgctgactgcacctctgcctccaaggttcaagcatttttcctgcctcagcctcccgaacagctgggactacaggtgtgtgccaccataccccgctaattattttcatatttttagtacagatggtgtttcaccatgttagctaggatactgtctcgttctgacctcatgatccacctgcctcggcctcccaaagtgc

SEQ ID NO: 123707 - DNA, 606 bp, Homo sapiens
gacaggatttcaattcatcgcccaggctggagtacagaggcaccatcacaacctgccccaccatgtccggctaattttttgtagaaatggaggtggtggtgggggcaggtgtctcaccaagttgcccaggctggtctcgaactcctgacctcaagagatctgcctgcctctgcctctcaaagtgctgggattacaggtgtgagctaccacgccctgtcgaaaaggcatataaacttctgaagggcaagtccttctaatttaaattttggtcagactgttacaagtgaggagatggttatcttaataaattttcaggctgggcgtgggggctcaccgttgtaatccccagcactttgggaggcggaggtgggtggatcatctgaggtcaggagttcaagacagcctggccaacatggtgaaaccctgtcgctactaaaaataaaaaaattagccagttgtagtggcaggtgcttgtaatcccaactacttgggaggcagaggcaggggaatcgcttgaacttgggaggcagaggttgcagtgagctgaaattgtgctactgcattccagcctgggcaacagagcaagactctgtctcaaacataaat

SEQ ID NO: 123708 - DNA, 456 bp, Homo sapiens
tggccgactctcgaggatccaccttatgttctgacccacccttatgttctgacccttcattcatatacacatatgcatttatttatgcatttgttgaaaaagattttttgagcacctacaatgtaatgttccaaactctatgctagaattagagatgcaggggtaaaagaataaaagaagatggaaaaccaaacatggtcctggaggttacagtgtagtgaggggcaaagacatggagccaatggttgagctgaaacctcatgtgaggagttaactggatggagaaaggagtcaagagagttctaggtagaggaggcagcatgtcaaaggcacagtaaagggaggaagaatggtccatttcagggatggaagaaggctggtagattggaacatagggaaggagggaatgtgtgatacaagctggagctagaaaggtaggtagggtccaaaccatac

SEQ ID NO: 123709 - DNA, 608 bp, Homo sapiens
cagctaatttttgtattttcagtagagatgcggtttcaccgtgttagccaggatggtcttgatctcctgaccttgtgatctgcatgcctcggcctcccaaagggctgggattacaggtgtgagccaccgcgcccggccccagtacactcttttctagactgcacagaattactagagcaggcttgattatcaaccttgttctttatatgaatgtcaactgtttcaaaaaatcaaatacttccaaaactgaaaaacaaaaaacaaacaaaaaaaaaactccaccaggtagaaggttctaaatgcaatggtaggaatttcaaaaatgcataaaaactaaggcaggatactggaatcagattcttgccactcaaaataagaattatactttaaaaatgtagatgaaagctggcttcacttctccccacagaataaccaaaataaatatacaccatcgagattatcaccagcaatctctcagaactcatgaaagagaatcggtcagttcctggcctctgagtctggcgggtagtagggcaggaagaggctctcagaggcgcagctcctcaggaaatacaagacaaagaatattcacatctgtctaatgtgca

SEQ ID NO: 123710 - DNA, 632 bp, Homo sapiens
gctgccgctactactaccacatggaggctgggcacagtggctcacacctgtaatcccagctactcaggaggctgagacgggataatcgcttgaacctgggaggcggagtttgcagtgagccgagatgatgccactgcaccccagtctgggcgacagagtgagaccttgtctcagaaaaaaaaagtttttaccactttttgctgcttaaacttacacatacgattgattgcatcttgtccttgtttggcttcctaaaataatggcaaatatgtttttgaagaaggtagactttgcctcacatccttctttttcacttgattctagctagcctctttcttttcctgggattcttttggatccacgtctcaaaacttttttgaccgcaataagaaatatattttacactaatcctgtacacacattgaaacatttcactaaacgtgcagagtactctgatattcttttgtctgcagtatactatttcattgtcttaagaaagcagtcaatttccattgaactgatttcacagctgtttatagacccagggttttgggggaaaaagactgctgatctgaagaataggtcccaaatcatgccaactttgattgctttctgagtcagttccttccatc

SEQ ID NO: 123711 - DNA, 211 bp, Homo sapiens
atctgtgactccccttgactaatttggctgtatactggaccaccctgaagatcactggctgaagggataaaatgcaaatctcttggtgaaacccaaacagacctctatgacgcagcagaatagactccacactgccaaagacagggagtcccaatcactgtcatctatgtgcatggagctgtgcactgaggcagccctgagcctccatcca

SEQ ID NO: 123712 - DNA, 493 bp, Homo sapiens
agaaaaatctagaggagatactgtgggaaaaagggaaaacattaaaatatgacagttttaaacagaaaaattgataagaaaataaaatagtaaacatttaatgagtctagttaaactatttttggtatgaaatgataatcattattttataatttatatattattaaatgttttatattattgtacaatttaaaatacaaaatatatcaataattataattataattatatgccattttgaaatttagaaaaaagaattacccccaaactgtataaaaatagaatgtaaatcaggaagagagtactcagacttaaatgttttatcatccttgaatttctgaggattatggcattgcttaaatatttactctacatttaaaatgcatggcaaaatttcaaggggacccatttaaataaaatagtcaaagttaagaaaaatggagtttgaaaaagcaaccctcaattcatcaaagcaaaagaagaaaagagaaaa

SEQ ID NO: 123713 - DNA, 405 bp, Homo sapiens
ctatctggccactgaagtaaaaatcagatgttataataaaacaagttagtcaccagcatctctgaaacaaaagtccaagagaattggacattttcccaatgagagttttcccaaggaaaaaacatcaacatacaatgggaaacaaccctctgacagaaattcactttattgtaaccactctcagaatcacatgatccattgtgatgagatgtaccctgaatataaggggctcagaaacagcggggatccacttcccccgctgttttcagcagagtggaaacagctgtcatacgacccaacatctgcatcctcaccagcacccagcccttatcactggagctcaggactcaccaaactcattttcctcctaaaagctaactagaaaacaactgtttctaggccctc

SEQ ID NO: 123714 - DNA, 284 bp, Homo sapiens
tagtaaattaagtttcagagggattgcataaaactgtgatatcattgaatgtaacatctagcctaagactattctctgttcacatgggcttaggcatgacttctgtcattgatttcattacttatgtgctggtatgcactgctcgtcaccatggacctgccagggcacctggcaatgaagtccatgtagtctgtgtcctccttggatcaactccagacacctatgaattccttacatcattttcatcagattcttgccacagtggtacatagtaacttgttggg

SEQ ID NO: 123715 - DNA, 423 bp, Homo sapiens
caaggattgggcgggcaacttcccactgcgtgcgatgtatcttaggaaagccatttaaaataggagacggttactttccatcaagtccctggtatggtccatggaagcagggttgtcagtctcatttcagcattttagaggcttctcagggtttggaaatggaagaagagaagcagcaatatgtatgcattgcagagacacaggcgagccccaatttaggaggttaggaggtcagtgctaagggccttgttttctttgcttagagcatgagttgccatcttctctggacagagagtatttggttgcctaaaggtaaaatctaaattttgctctgggacaaattccaaaaaaaattagctttaatcaaatttacttttactttatctttctgaaccttcaaggtccaaaagcattggttaataa

SEQ ID NO: 123716 - DNA, 359 bp, Homo sapiens
tcagggactttattcagtaggtacttttgagttaaatctgagaggtctgcattaaaatgtaatcacttctgcactgtctagagatagtaatagcctattttctgagagaaaagagcctgaaaataaggcttcactgctgatagatcaggtggggatgtcgactggaaaaagcagctctttacagcaggacactctttcttctgtttgctcctgttgttgatactagcaattttgatcacaacaaagagtttctatgaactgtaaatttagttagaaattgatccagacacacactttggttaatcacctgctgtgtgccgagcggtgagcttgttaccacgtggccaacagcataccga

SEQ ID NO: 123717 - DNA, 358 bp, Homo sapiens
gccaccgtgcccagccttgcgtctctaattttcacgtaagtcctgaaacaagtacttcatttcttcagccgtatcacatattcttcctttttctttggaacacacacagtgtgctctctgacagaagtttatgcagctgttcctgaacctaagtgggcattagactcgcctggagggggctttggaaataaagatccagggcccatttgagactactgagtctgagctcctgagacctcagggatccctgggcaacccctgtgaaaacccccagttcatgtggggagttgggtgtatttgagatatcagctttgaaggaccgccatggtttctcttttagtgcttgtgagtaaagttt

SEQ ID NO: 123718 - DNA, 466 bp, Homo sapiens
aactaagcttcttcatgtaattattcaagacttagaagtaataatatgcctaaattccaaaagatggtttgaaaggaatcttactagttcatttttacattaaccagtgggcatttgcttaaatgagggagtttccatttgaatggaggttaatgtctacgaaaactagggagaagcatttggagagataacttttatccctaaggttttcacaatcccacaacctcatttttccgaagtcattctatactacctattggctttggttggttaatccttttgtataaggcaggtaatgcggcctttcctatcaaaggtaatgaaaccattagtgatcagatctcttgactatcagcaccaagccacaagagtggctgacacttagagtcaagtgttaatgtcaagctggctgtgacaagcagaggcttcctcagttcactttagctgaggatacttgtggttgaat

SEQ ID NO: 123719 - DNA, 653 bp, Homo sapiens
aattttttgtatttttagtagagacaaggtttcgccaagttggccaggctgctcttaaactcctgacctcaggtgatccacccgcctcggcctcccaaagtgctgggattacaggcgtgagccaccgtgcctggctgctaattttttatttttagtagagacggggcttcaccatattggccaggctgtctcgaactcctgacctcaagtgatccgcctgcctcgggctcccaaagtgctgggattataggcatgaggcaccacatccggccataataccataaaaggcataccaaaattaacatgtccaaaataggattttttatacgatcctgatctcagtccatttcagtgcctgtcactgtgatttattcaaaattgaagagtccttacaatcagtggccatactgtccactccccaatacccgtgcatgctgttccctacagcccaagtcagatcacaggtctgctaaaaatcctcagaaagctgttttagaataaaacgcagatttcttactatggcctgcaagttctaataggattgggccaaattggctttggcaactttattgtcactcagcagtctactcaagccatgctggccaccctgtcttcctttttttccaaaaagctgacttctctttcagagattt

SEQ ID NO: 123720 - DNA, 445 bp, Homo sapiens
acccgcctcagcttcccacagtgctgggattatagccgtgagccactgtgcccagctcaaaacgcatttttgatgtacataagcattcccatattctagaccagatcctttctttactggtctcctttacccaaagaaaataaatctatcccctaatatttacaggacattgatgctttcttatgcattatctgagagataaaaggcaaaatcttctggttttgtaagtgtgtccaagttcaactagactcatatctgttaatgccagcaaagcaggaggggggagtgttttggggagaaacaactcatcttttaaaaatatccttagtcctcgcgtgccggactctgagcaacgcgtacacaatgaaaatcacgatgcgaatcatccacattgatctatgtggcgctgacgtgcccctctgtgggttgatgcataaaacagggc

SEQ ID NO: 123721 - DNA, 264 bp, Homo sapiens
attatattttgcatcaggacaacacaaaaaactgacagtcttatttgtgccagtgccgtcctcagaactttacatggattaactttttaatcctgtgagataagccctgttattatccccacttcattgatgggaaagctgaagtctagaagggctaactgcccaaggtcgtataggtagcatgggcagagctgcattcaacctgagtaaaggaggtccccagagtctatactctcaatgggtgttccatacgcccttccctta

SEQ ID NO: 123722 - DNA, 529 bp, Homo sapiens
ctatggtgggatataagtaacacaatagatatttacatatagatattaaagctgaaggagcgcaagtaaaatttgttatgtgagacgtaacttacagcccagaacagctcagaagttttaatgccatccttaatggtgtcttaatgaaggctttctgcaagtagaaagttggctggataataggccattagaccatgaacagagattttaaatttatatttccttttcatcttctttccattaagccttgatggataaaaaattatgtagcaattgactgcagcctacatcagaccattttctgtggagaaaatcatgataatggtagttggaccctaaaactgtttgaaagttattttcatagaaagagatcttttttttcttcataaatcagttgtgttttatgaaaacataaatggttcccctgttttggaatgctgctgcaaattctttttgcatctgacgtataacttttaagcttcaaagaaatactataaactagatgaaataaaatataattggatatagc

SEQ ID NO: 123723 - DNA, 108 bp, Homo sapiens
tcacaaacccagaagaagaaaagaaccaatatcagagtaaaactaaatgaaacaaaaaaatcacaaaagataaatgaaacaaaaagctgttttttttgaaaagataaa

SEQ ID NO: 123724 - DNA, 432 bp, Homo sapiens
tgttgcccagactggagtgcagtagcgtgatcttggctcaccgcaacctccgcctcctgggttcaagtgattctcctgcctcagactctcctgagtagctgggactacaggcacgcaccaccatgcctggctaatttttgtattttttgtagagacagggtttcaccatattggccaggctggtctcgaactgctgatcttgtgatccgcccaccttggcctcccaaagtgctgggattacaggcatgatccaccacacccagccaaggtctttttttttatatggagtgtggtatggtttgaagtttcttcttttgtatatggatacccctttgtttcaacaccattgtggaaaagactatgctttccatcttgggcaaaaatcacgtacgtaagtttgggcttatttgtgaaccatctattatatttcac

SEQ ID NO: 123725 - DNA, 223 bp, Homo sapiens
aggaggcgtgtatgcatatgtatgtctatactgtataaaataaaatgtgtaaaaataaaatatgtctttcaaagttgaataaaaatacaccaaaatgcccacggccgtttcctctgggcaatgagttaatggagaatttctaattctttttttgtactgctgtattttccacattttctacaataagcgagtgttcttttaaatcatgaaaagaagcaggcat

SEQ ID NO: 123726 - DNA, 356 bp, Homo sapiens
gcacatattttactgtgtaaagacagtaacattgttttcactgattcctttccatagaaacatttcttatcgggcttggaaactaagaattggttttaccatccttgctactgttgctggtactgttaccactgttactcagaagcaaaaagactcagacttttttgagttatttttacctgtcttagtataaatcataatgaataaaattaattaaaggaaaaacaacgagatcatgtcctctgcagcagcatggatggaggtggagaggccattcccctaagtggactcacatcacgcaccaaataccacatgttctcacttatatgtgggagctaaacactggctatacgctg

SEQ ID NO: 123727 - DNA, 717 bp, Homo sapiens
caccattgacatatctattccttacagaagctagcatagtgccgtgcacaacatagatgctcagtagatgcctgcagagtaagtgaataagctgtctttccattttgtttatctgcagatcacgcatcttctatcctcattttatctcggttgcctgttttcagcatagaaaagaagcaccaagttcacggtaagatatatttttctgtagactcagaaaatggagtgggtactaaaagcccttcatcaccactgtgcaatccacataggtaacgaaatgacacctgcaccccatacatttatacaaaccataaaacagcaggagtcatcacatggagctgattgatgttttagaagcaaagaggggctgggcacggtggctcatgcctgtaatcccgtcactttgggaggctgaggtgggtggatcacctgaggtcaggagtttgagaccagcctagccaacatagtgaaaccccatctctactaaaaatacaaaaattagccgggtgtggtggtggacgcctgtaaccccagctatgcgggaggctgaggcaggagaatcatttgaacctgggaggtggaggttgcagtgagccgagatcgcaccaccactgcactccagcctgggcaacagagcaagactccttaaaaaaaaaaaaaaaattcaaatgtataaagacttaaatctaagactcaaaatgaaaatactataagaaa

SEQ ID NO: 123728 - DNA, 622 bp, Homo sapiens
aacaaatgatatgttctttgtatttattgtacccaaactatcatctcaatttatctgcttgttcaacaaatatttaatgctagccaactagatgacggaaattccattcactggaaacagccatgaatgaggtccttccccatcagatgggagtgataaaacttagtgtggaaacatctggccttttatgtatttagaggatttttcaaaatcagtaaagctattctctagtattataaactgtcatggtgtggaacagatactctgagacagagttgaccaaaactgagttgttttttttcagaacacatagaagcaagcaaacccaaagagattttcacgtggaggaggaaatctgacagcttgctgtacacactgaaaaatggagtaattgggaaaggcaaggaagaacattcaaatctcatagaggtcaatgccttcaaaattaaagcatggagaggttaccaggagagcacctagaaagccagagatttagcagcaatggcacaagctggtagattggaaaacaaaaattagaagctattttcttttttcactattggggagtgggggagggaaaacatgcatctgattcacagattctgccatcaaatcctaacaa

SEQ ID NO: 123729 - DNA, 335 bp, Homo sapiens
ggcggcccaggaagaacccacaggccttggttctgtctggggttaaagagaggcagggagatgtggaatctgggcgttcgttcatccttagccctggtgcttcccgcaggggttgggcaggtcctgcaggcagctgcctgctggatcttcctgtgggcctcagggtggcccttgtggggcaggatgtggtgcctgccaaaggtgctttatgaatggagccggggaaggctgctgactcagcaggcagtaaggctttgaggccggaagcgtctggaaaggaagtggctgctcagggcttccccactgtagacagctgggagagaaggggggctggc

SEQ ID NO: 123730 - DNA, 388 bp, Homo sapiens
tttggggggattattttgtttgtttttcattcaatattcctcaagtttggtagaaaactataccaggttatgttttgactctattagtctgccttagtgacctgccaacaatcctgagtgctctggtttggagatcttgcagggtggaatcgccacacagagctccactgcagaagttgtctctgactctaagagagcccatgcatatatggtggcttagagtctaagaatttgggagaccctacagcaagtaccagtccagagcttctagataaagtgaaagctctgagactctatttggggcattgaatacagactcggaaattatcatgtttgacaacctattatgaatgtgctcaaattttttggagttacagaacctttagat

SEQ ID NO: 123731 - DNA, 424 bp, Homo sapiens
gctggtctcgaactcctgacctcaggtgatccgcccgcctcagcctcccaaagtgctgggattacaggcatgagctgccgcgcccagccaactgtataataatttgtttaatcagtctcctgttaaaagacatcatctcagtcttttgttaatatagataatactgcattggctatctatacatgtgtagacacatgtatacacacacatacatgtgcatgcaaatacatctataggatagatacctcagaatggaataggcagatggaaggataggtacattttatattttaaacaatattgccaaaatgctctccagtatagcacctccatcagctgtatattagggtagtggtaaaatggtaatatgttagaattgcagctgccttacagtcatccagtccacctctccacaacatgggtg

SEQ ID NO: 123732 - DNA, 265 bp, Homo sapiens
gcaaggcaggtccagggccatttcatggactcagtaggcctggggtcaggccagggcagggcaaaggcaaggccaggaagaaggcagggccggggccaaggcagtgccagggcagggcaggaccagtgcagggccaatgcagggtgagggcaaggccagggcatggaagggcagggcaggatcaaggaagggccaggagagggccacggcagggtcatggcgagaacaagggtatggctggggtcaggaatatggtaggatgagg

SEQ ID NO: 123733 - DNA, 366 bp, Homo sapiens
tcagaccccatgtcccaggactcaactccctgctcacactgcccagccacacagcctcacttgctgtgcctcaaacacaacaggcacactgctttatcaaggagtccatgcatgctgttttcctgccctggaatgttcctcccttagatggctgcacagcttacttcccaggtcttttctcaatgtttcccctgacaagagctttctttgagtgtcctgtttaaaacttcttccctctacctccaccttgggcctccccagccctcttgtctatttctcagcattgcacttatccacatttaacatactatatattttatgtataggtctggcttgtctgccttgccctaccagaatacatattcc

SEQ ID NO: 123734 - DNA, 178 bp, Homo sapiens
cattcctgtgaggtgaatgttattatagaattctccttttatggaagaggaaactaaggcagaaaggtctagtgacaactcccatccttacccccggctcacaaagctaataagtggcagctcaggggtccaaatgcatgtggctggctccagcaagtgccctaattgctgtgtgatg

SEQ ID NO: 123735 - DNA, 219 bp, Homo sapiens
ttgcaagctttcttgtgactatacccaagctagtaagcaaaattttcctaggagctgtttcatagacagaagagtattttgtagatctaggttacatgcagggctgcaagcccagtttcagcttcctacctctaacaggactgagacctgtctcctttaatagagggtaacagaaaacctcacagttgactttggcttaagttcagggtacatggagat

SEQ ID NO: 123736 - DNA, 536 bp, Homo sapiens
atctccaatgtttatgagcgctcaagggaccacatctccagtttcctaatgacaattaaaagaaaatcatatttggcttagtataatttattttgaagtattttgtaaaatggggcacatcattattaaaactaaccaactggggactggctagagggaggtggatgtgggtataaaagggcatcatgagggttcattgtgatgttagagctatggagtgtctttatggtggttattcatggacctatgtaagtaataaattgtggagagctaaacacacacacaaaggagcacacataaaactgaggaaatgtgaattagatgggtgattacgtagccaaagtcaggatcctggttgtgatagaatactatagttttataaggtgctatcattagggaaaactgggaagagcatataatggatgtttttctactttttataattatttgtgaatcaaaattgtctcagttgaattctgcctttaggaaaatgctcataagaattatataaacttccaattaaataaattatgtcg

SEQ ID NO: 123737 - DNA, 938 bp, Homo sapiens
gaacttaccaaaaaaaaattgttctttaaatcaccagaaaagtgcagataaaatcccagacagtttcattaatgacaatgaaaggtgacagcccttgaatctatgtcataagttgattaattactttccaaacattattaaagatattagacgaataacttagactggtatccaggatcaaggttccttcataatccctaaatgggttttaattttcagagttagatgatcattatatgtgatttatttctttaacatctttagactgttggctttattgaaaagagaggagagtatctgtttcaatgtgttttcttttccctgaagttattccttgcagaattcaataaaaccggttttgaaataaaaataattaaatgctggcattttctgttaataagggcccatagacctgatgaattatataaacattacaaggaatttaccactgagttcataattatgtaaccatttaatgcccaaacctgcctactgacagtgaagacgttcaatgagaatggacattgtgcattaggataaggatgacctggagtgaactttcattcttgttttggttctttcccattttgcccaattcatagcacctgattctcttaaccagcaagtctgtttgcatgtctccagtccaatttttcgccatgcccactgcagtgattccaaactctcaccatttcttaagctcttgcatcttttgggctctccttattctcagtataagatctttccttatagtttagagagtaaacacaagcccagttgtttccatgtcacccattattacctctttctgtctcaaaggatgaaacagtcttttctacctaagtcttgaccctgttgttccccacacctgtgagcacctcctccctctatcctacccaccttacaactcttcccgtgtttaaaatctccctcaccat

SEQ ID NO: 123738 - DNA, 607 bp, Homo sapiens
aacgtaataaagggttgtgttagactgctataccttgaaataatttcttataagtcattaataactgaagtaagcattaattgaacctttaaacagttaaacttacaataattattttgaagatcatcttgccttaaaaacttcaagatctttgaggggataatttgccatcttagtatttagaagaactgtgtttgtgtctatatgagggagatcagattataatagaaggtaaatgggtacagctacttgggaggctgaggcaggagaatggcgtgaacccgggaggcggagcttgcagtgagccgagatcccgccactgcactccagcctgggcgacagagcgagactccgtctcaaaaaaaaaaaaaaaaaaaaaagctttcctggaattttaaactattttctcttttgattaaaaaaaatagaggatgagatatgcactcattacaagaatattacatttcaggatttggtaaaatgaagagaaagttttgaatgggctaaacaggaattcaaggacttcttataatacattccagagctcagcaactctttttttatattgcctgctgtttgggattatattcatcattgctgccttcag

SEQ ID NO: 123739 - DNA, 378 bp, Homo sapiens
gagggatgggagcagaggagaaaagaggatgagctcaaaagatatcacacagaatcaacagacatgggggatcaagtcggtgactctgtaagaactaaaaggcaagacagaatctgaatcctcctgaagtgggtcatgcccaaaatatccctccacctggatatttattccacaaatactggctctttgggagcattttaattttctttttatttaggtttaaaatgtttggattattatgaaatactcaaatttaaaaaatgcagaaaactgtaacattcatcggcattaactatacagcgttttaaaatactaaccttttgggccaggcgtggtggctcatgcctgtaatcccagcactttgggaggccaagatgg

SEQ ID NO: 123740 - DNA, 316 bp, Homo sapiens
agaaaggtcataaatttcttgctgtagtaattgttccccgcttagatattgtaccccgctgtgtattgttccccgctaagtgattgttccctcgctaagtgattgttccccgctaagtgattgttccccgctaagtgattgttccccgcttagtgattgttccccgcttcttcccaaagccatgcctgtctttttctagctcgatatttttcaggagttaccggttgactctttgaaacaggtattctgctttcagtggctcttctgctttcttttttcttttttgtactttgaagagttcctactcttctttatt

SEQ ID NO: 123741 - DNA, 680 bp, Homo sapiens
aaaaccatgacctggcatttggcaacagattcttaaatgacaccgaaagcacgaccaaaagaaaacaatgggtaaatcaaaatttaagacttccagctgggcgtggtggctcacacctgtaatcccagcactttgagaggctgagaaggacagatcacttgaagtcaggagtttcaggtcagccttgccaacctggtgaaaccccaactctactaaaaaaaaatacaaaaattagtgggacatggtggcctatgcctatagtcctagctacttgggaggctgacgcagaagaatcgcttggacccaggaggcggaggctgcagtgagctgagatcgcactaccgcactccagcctgggctacagaccgagacccatctcaaaaaaaaaagaccaggggcggaggctcacgcctgtaatttcacactttgggaggccaaggcaggaggatcactgaaggtcaggagttcgagaccagcctggccaacatggtggaaccccatctctactaaaaatacaagtattagcccaggcgctgtggctcacgcctgtaatcctagcactttgggaggtcgaggcaggtggctcacttgacatcaggagtttgaaaccagcttggccatcaaggtgaaaccccgtctctactaaaaatacaaaaaaatagctgggcatggtggtgtgc

SEQ ID NO: 123742 - DNA, 680 bp, Homo sapiens
gtagtatatacctacccttatattgtcattgtatttttctactggaaagaagttaattatatatgttgagcatatgtctgtgaaactttggaaaatgtcttttaaaactgttaaacaaaactattgaagatagagaagaaaagaaggaaggcaagaaaaaagcaaacaacacccacatgagcaaaatccagtttagaagagcaataacaaaaaacaaattgaaaatatacaatttaatagtaaaattgctgcaccttatacaattcttaaaagaaccaaagatgagttaaattattattctctccatagtacaaccaaaatttcccataaaagttaacaaaattgaaagataccaatagaagatactactatcctactgctgtatatttgtatatacctttgactagcgttatgaaaattattaaaataagtgcttctgaatcttcatttcactgagaccatttatttactatcatggatggaaactttgttctgattataactcagtctatttccattaaagcaaaaccatgggaatcgatctttttaaatcttttgttatacagtcaggatagaataaaatagtaaaccaactgttcaatatatggtcagttctgttaagaaaatatctgcccatgttgcatattcatcagtgtaaaattgaatatctgtggatacag

SEQ ID NO: 123743 - DNA, 340 bp, Homo sapiens
ggacagtggttcagagaggttacgctacttgctcaaggtcacccagctcccaggcccctgctgtcttccaggccactgaggtcctaagcgtccttccaggcgagccactgctcacagcctgttcctcatgttctgcggcaggtttgtgtatctacatcttttccagttccctgtcgtcccccttcctacacctcgtcatccactatccctgtttgttttctctgttcctttctagttctctacctgctcctcttatttttatttgagacagggtctttctttgtcactgaggctggagtgcagtggcacaatcccagctcactggagcctcgacctccca

SEQ ID NO: 123744 - DNA, 682 bp, Homo sapiens
agcgggtctgtgatgagtttttcaaaggtcagagcagattgaacctttgtggtttcattttccctgattttgatttttcttatggggaacctgtgttgctgcattcaaggtgactcgaagaattcttccaaaaagcgtgtgaaaagggagccctactctactaccaaggtgacttcagggagcacattcaatgagaatacaagaagatatgctgtgcacaccaaccagtgtcggagacctcatggctccccggtaaagaagaagatgtacccacaagaagatgacttccatcatacaatcttcagcaaccttgaaagattggacaagcttcagcccactcttgaagcctctgaggagtctctagttcacaaggacagaggagatggagagaggccagtcaacgtgagggtggtgcaggtggcccctctgaggcgtgaatctagtaagctccccatggggacaccatccacgacatcacgaacgaggacgccgtccacgacaccaccgacgaggacgccgtccatggcaccgccgacgaggacgccgtccagggcatcgccgacgaggacgccgtccacggcatcgctgactgggacgccatccagggcctcgctgacagggacgccgtccacggcttcgctgatggggacgccgtcaagggcatcgctgacggggacgccac

SEQ ID NO: 123745 - DNA, 1152 bp, Homo sapiens
attatgcaaatggtactaatttagaaaaattggtttttcctcaaacaattttattcaaatacttcacatgcatcgtttacaactgggtctctatcatcactgaaacaacattgtgagtcctctaacagttccctcctagttatctaaggtagagcatgccttacattgagtagaatgctgtcagtggagattttactacatctcgagaaccacttgttaaacatcagggtttttttcctacatattcataatcaccataaataagtacttcttgtatttctctgttcaataattatttaaaagcctacttaatgatctccaatacttgttatccaaagtcataccctcaggaataattaatcaatatgtctttgccttttttcccctgattttgctaggtgacctttataagacagaaaattgccattacttgtgaccctttcacgacatattgtcttcctgaagagtattttgttcaaaaaggacaaagacaaaaacacaaggtgactctcttttctgaggaatgatatttttggaaaaattttgctttccattctgcatatatggtatatattactatttaatagcatctgtacccaccccctttttttgcatagagacggggtctcaccatgttggccaggctggtcttgaatttctggcctcaagcgatcctcccctccacctccacctcccaaagttttaggattgcaggtatgagccatcgcgcccagccagcatctgtacctagacccaacttgaattccccaaagaagttaaactggctccagtattttctcacaagatgctagaaggcaaattgtggcatacctataccttctggttggttagtgctgaaaaaagtacaggactacttttgagaagttgacgatgtggttatcattcaaagtttgcctataattgtaacttgggttttaatgggaagcagtgtagtactgattgttctgaagacaataatattgtcgaaatgccccatggctgcagaattactgtaagaatttcataaatcatgtatatgctgtgcattgtctggagactgaagaatgtttttcatatctatgacaatattttttggaagtttgtagatgctataatcgtgaataaaatacaaatttgtttagaagtattgaa

SEQ ID NO: 123746 - DNA, 526 bp, Homo sapiens
atttactgagcagccagtaagtgccaggaacaatataaaatccgataaacccctgttcccccttattcctttcattggttctgtgggtaaatattcccattttgccagcaaggaaactaaggctcagtgaggcgaagtaacttgccagagttaaagctctcacaagcagtagactgagtttcagctcaggtctggctaatttaacagcctctgctcttttgtgtgtcccagcacctgacgctgaggcagggacagtgatgagaagccctgacctatccccggagctctcttttacctggaagttgagtctactcataaagaaccctttctttccatttatatacctggcagcacatgaccgcctcatcacccccaactatctctccagagtagggcaattgcacagaacactgaagcctgacttgatttagggtctccaattgtgcatgaagttggaggaggcttcctgcacctcatctcagctcatgcactggtcacactaaaggtggctttcagaggtgagagc

SEQ ID NO: 123747 - DNA, 723 bp, Homo sapiens
agtgtgaaatagatgcaaaaatatagttggagattttaatacctcagtaatccatagagcaattgggtaaaaaaattaagaaagatatagaagattagagaaactctatgaactaaattcacctaatttagttataaaataaccaaaccaaaacaatacaactattctcaattgcacatggaaaatgtatcaagatagacaatactgggccacaaaacaagttgtaataaatttcagcgattaaaataatacagaatatatttctctgaccaccatagtattaagctagattaataacagtaaaatatctagagaatcttcaaatatttggaaaataaacaaatttttaagtaactcatggatcaaagaagaaatcacaagagaagtaaaaaaatatttagcaatgaaatggcaattagaatatagcatttgaaaatttgtggcatacatactaaagctgaacttagagattaatctatggctttaaatgcttatattagaaaaaagaaatatatacactaaatgatttatgctttcaatttaaggagctagaaaaatcagaacaaataaacacaatataagtaaaagaagtaatttgaaattagtaaagtagaaaatggacacaaacaaaaaaatgaactataaaaaattggttctttgaaaagattaatggacattacaaattatacagatgttaaagcacaaaaagggacattataaaca

SEQ ID NO: 123748 - DNA, 466 bp, Homo sapiens
ggcattgtctgatgagaggatttctagctttcaacagattctcacagaattcatgaccagaacaacatggggtaatgactgctttaggagccattaagtgggccattttagttccttgaagtcctctagactttggccactgtcagttcaggaaagatgccttctgaagattcctcacagagactgtacagctgtttgggatacataggattttatatttcatcttcagtgattcatgagcattacattgttccaaaacagagaaaggattatgtcattcccctgcataacaccttccatggctctccattccctacagtagccttgccaagtgtatgagatgctaattgaggtagactgtgggaggtgggtgtttccggtgcagaagaacccttgatatcaccttcacttcctgctatatggctgcgtatcaaaaggcaagttacttaacttcctgctatatggc

SEQ ID NO: 123749 - DNA, 665 bp, Homo sapiens
gaccctgccccaaaaacctccttcaccttcctgatggccactgtgtcctgagcagtgaaacgcccagctggatcaccagaagcagcacatggggcccgagggcagagagcaggtagcagtccccgatgttcttgtacagctcttgagtctggaccttggactcaaagatggagagcgtgtcgaccaccaggactttcctcccattccatgttcctgtctccacctggcatgtcctggttactgactgggcccccagcttgcactcaaacacaggctggccaaggatgctgttccctgtggtgcttttcccacagcctgttttgcccaccaggaggatcagcagcagcagtgatcctggagccaacctgccttctcctcagcctgtgagagcgggtgaagagtgagggtataaaaactgcattctgaggaggaggtgccaaaagacagaaggcaaaggcatccagaggcactggcaccctggcacaatgaagcatgcaggcctgggtgaaggaatacctcctgacaactccgggaatgatggctatgctaataatgggtatagtgcccgtgaagaagaaaatgagacactcactgaaaatctgagaagcaaagtaactgctataaaatctttttccattgaaataggccatgaagttaaaacccaa

SEQ ID NO: 123750 - DNA, 583 bp, Homo sapiens
attcctttgtcagatattttggtgttattttcttccagtctgtgatttcttttttccttttttacaacattatcttttgaaaagcaaaagccttgaattttgaggtagtccagtttatcagtatttgtcttaatgcttcatgctgtttgtcctatcttaaatttttgcctaaatcaaggttatgaagatattctcctatttttttcttccaaaaggtttgtagttttagctctcttactttagatttatgatctatttgttttttatatggtatgatatgtagtcaaagtttattttgtatataagtacccagtttttaaagatcatgttgaaaagaccatccttttcctccatagaatttcctctacatcttgaggtattttaaatgttgaaaatactctataagtatgggtctacttttagaatctatattctattttattgatttttatcaagggtcagcaaactaaggcctatatgctaaatctggctttatataaataaaactttattagcacatggccatgcccattcatgtaggtatcatctatgactgcaattgcagagacagatttcagtagtt

SEQ ID NO: 123751 - DNA, 472 bp, Homo sapiens
ccctcatcccatgtcacaataagctgtttttaaaaatgtatctttcttgggctgggcatggtggctcacgcctgtaatcccagcactttgggaggccaaggtgggtggattacttgaggccaggagttccagaccagcctggccatcacggtgaaaccctgtctctattaaaaatacaaaaattagccaggtgtggtggtgcgcccttgtaatcccagctacctgggaggctgaagcaagaggattggtttcaaggttcacctgggaggtcaaagctgcattcagccaagatcacaccattgtactccagcctaggtgacaaagtgataccctgtctcaaataaatacatagacaaaaagcaaacctatgagctatttaaaggaccttgaggagaaaaaaaataaatgaaatgggtgatctaaatttaaatagaatctgcagctctggttagcctttgacagtgttgttgta

SEQ ID NO: 123752 - DNA, 429 bp, Homo sapiens
gaggggaggaagggagtgaagagagggtagaaaggagggagggaggcaagactctggtgctgcacagttctacatctcagcaggtagagcaagaagtcctggggcccaggctgtcctctggaggagccctgtcatgtgggctaaggaggcctccacatccctgcctcttgcaggcactgggagcaccctgcaggaagtgtggcctccatgctcacgcagggaaggatttctgagcacggcaggaaatcccaaggatgttggtcgtttttgctccttgccgttggggacccaagaggtacatgttcatggccaccacagccagaacaaggcggatgaagagctcacctcagactaagtccagcggctggactgcaggctatgtcggtgggcaggaggtgcatcaggaagtggaccaagtccatcagcggg

SEQ ID NO: 123753 - DNA, 525 bp, Homo sapiens
agtgagaagtgtttccaaaaacagaagttttataaacaggaaaagcatgctttaacttggaagaaacaaaataaaaataaaaaatacttttcccttttagttgcctagcctggtgtctataagcccatggagatgagacgtctgtgtgtaacacacacatttgattttgctgacggtgactgtgggcctgtaactgggtgcccaaacaacctcctgggactgtgtgattctcacctttgtgaggagggggatatgtcctctgattaaaaaaaggaaccacaaaactccgctcatctttaatttatttattcaattagtgttgaagaaggataaccagactgagggcggggggggactaagttcactgcaacctctgcctccagggttcaagtgattctccatcctcagctactcggaaggctgaggcaggagaattgcttgaacctgggaggccgaggttgcagtgagccaagatcacgccattgcactccagcttgggcaacaagaatgaaactccatctcaaa

SEQ ID NO: 123754 - DNA, 440 bp, Homo sapiens
ctcagttctagttcttcctcatataaggggagaaaataattcactaacaatgaattattaaatttattctgcaggttggaaggcattctgtgcacatacttcctaaggcactgtttctgcactggggcaggcagccacagaaaacatggttaacacaagtatatacaatgtgcaaataagcaaaagaagggagcaggaactaaacctgtccctggcagaagtgagaaaacttccagaaaaattgatgtttaggctaaattttgcaagtaactttttaaaatgctattaaaaagatcacacggaaaaatgatggtaaactcttaaataagttagtgttcttccttactacctacagtatatcaacattagatgactctgtcttcagtattaacgcaacagaaatttttatttccatagatctgagatatacatactaagct

SEQ ID NO: 123755 - DNA, 394 bp, Homo sapiens
  misc_feature (21)..(21): n is a, c, g, or t
  misc_feature (29)..(29): n is a, c, g, or t
gggaaatagacactttattgnaacaattnacatttttggcaatatgcctaggttccagcaggcccagactagcatccccttgaaaaaatagcctgatggacacccaccttcaggataccggagatgaagcgtgagccaccaggcccagccaacagtagagcctttcattgttccatctttagagaggcatctcctgtgagcctttcattgttccatctttagagaggcatctcctgtgagactttccatcttggatgttttttttttcttagtaatatgttaaataatgacacatcttccaattgagggtgtatcttagatttgatgacatatgatattaatgccttcaagacatattgcagtaaagaaacttgttgaattcttccaaatatat

SEQ ID NO: 123756 - DNA, 237 bp, Homo sapiens
cagagttggaagccattggcctttacccacaaaaagggataacaccttctgggagctcaggtgcgtgtgtggcaccatagaccaggttgggctggtcgcttccatgcagggagggtgcaccattactcctggggagctgcaaaggtcacctgggaatcttgttaaattacagattctgctttggcaggtttggggtgggacctgggtttctgcatttctaatagatatcttagtgtt

SEQ ID NO: 123757 - DNA, 420 bp, Homo sapiens
gaggaaactgggccacagtaaggtgaggctgtctgcggtgaactatcggaagagctgcaaagaccacccaggcttcgcgactcagcctggcattatcgcaggagctccacaacccctctgggcacgccattggctggtgaccatttctgaagtaaggtctccattctccctgccgggctagtgtgccctcagggcaggagttactcacaggcagggaggccgtgcacctgggcacacatagccaggctgcagctgattgacgctccatgggtcaggagcggagccgcaggctgactccctagtgacaagctgaggagcagggcacgggggcaccacagaaggtgacaggagggtacaggctggacacccgaccccaaatctagccctcactctgaggtgctgttttcagtgtgcttactg

SEQ ID NO: 123758 - DNA, 784 bp, Homo sapiens
gtagtggacaaccaagttcagtctacacacattccacttggctgttgcttaaaaggtcttgtgatgtaacaacaaagtaaacttcagttgaagcacctttatgagaggcaatgacacatgaatcggaccccactgaaaccagtaatagggataaatggacatgctgttagggtataagacagccaaaaaattttctctcaggatagacattacagccctaataacacacttgattctttgctttagcctaataaggaaagcagatttccaatcagtgagaggagttcccctccgccagcgatttgggaaactgttgggagttgtggtggtagcagaacacaggagcaagccactcaggagctggacaagggtggtagcagtggggatgcagaaaggggacatactggagatgtgttttgtggtgagaagtagttcagattcagaacttgctcacagatttgcaagtaggagaaagtgaaatcaaggctaatagttcctaggtttttgtttataatttggttttctcttgtgattacattctttcacttcacagtttttattgagagcctgctaaatgccatgttacattcacggtgcctgattacagaggtggagaagataaggacctgctctcgcttgattaagagcacggatgctgaagctagtctgcttggattcaaatcccagctctgggctgaacatgctggctaatgcctataattccaacactatgggaggtaaaggtgagaggatcacttgagcccaggagttcaagagcaacctg

SEQ ID NO: 123759 - DNA, 172 bp, Homo sapiens
taccaataagggggtggtccatgagatggatgggtagaatagatatataacaaaaatcattccagggaagagaacacctgactatagccacaaagttgggaagggatggggcgtgtttagaaaagtgatagtttagaagcttaggctgcatataaggatgtgttctttttct

SEQ ID NO: 123760 - DNA, 410 bp, Homo sapiens
agctctgctctggggagctcagaggaagcccaacttttaagagagcaaaatgcacacagaccatgaactcccgcaatttttgcccctggtgcagggggacccttcacccatgtgggccctgagattagctgagggagctgcctggagactgcatgacagtattgctccagagagggagctcaggctggctcccacgcactctctgagtccgaagcagctacagtgcggcaccatttgtatgttccaaacacccgtagactgcatcctgctctgtagcccaatggcctcggcatctctatatccctagagccccactgacatctctgcctgcagccaccaccttggctggcagctgccaccaaggtctaggcataacccattgacagagaccccactgtccctagcagagt

SEQ ID NO: 123761 - DNA, 383 bp, Homo sapiens
tggatagaactggaggtcatcatggaagtgaaataagccaagcacagcagacaaataccccatattctcacatgtgggagctaaaaagtggatctcatgagcatagagtacagattgatggttactagaggccagaagggtaggaaggagacggagataaagagaggttgattaggctgagtgaggtggctcatgcctgtaatcccagcactttaggaggccaaggcgggcagatcaccctgattatgtgagatcaggagttcgagaccaacctgtccaatatggtaaaaccccgtctctactaaaactacaaaaattagccgggtgtggtggtgcaccccttaatcctagctactcgggaggctgaggcaggagaatcactt

SEQ ID NO: 123762 - DNA, 663 bp, Homo sapiens
cagagtagatatctaagtgaattgcccgtcactgagcagcttagcatatacagcctgtattcagataaaagcatcatggtttcgcttctttgaaaagttcttttcattaataaaatggtttttttggtttcttttggatgatttaaaaatgattctttcagagatgataaattatgtgcttggggaaattctgtaattctgatgggtttgtaatgactctttttgactttgcgaattgatccagtagagcataaacttcgggagtgccttaggccttaataggctatgttcttgttttaataattttgacagaattgttgtgggaatcataattagagtctctctctcagtgaatttgattaatttaaaaaattaataacatttctacgtaaacaaaaggtattaggatggtgcaaaagtaacttgcagttttgccattaaaagtaattacttaccacaattactttttcaataacctaaatgtaataaggaagagaggagagcctatccccgagcagatgtgcactttagggaaggagttgatgcttgtcctgtgttgtgaggctttgtgattgaatcagctgctcaggatatcaaagaatcttcaacctgaggaccagttacattagaatggtattgtctgcttggactcctctgttgaga

SEQ ID NO: 123763 - DNA, 485 bp, Homo sapiens
taacttatgagttcctctctccagggcacagctacagaggcaatagggcattttggaggtatttatgttacttccaattaggcattctaattaagatggactaagggaggagtaatatgagtgagaattgggcatacctgggtgagggtgtccttgggttattctgaatactgggggattcattgatactcttggaagtcagcactaagctcaggaagatcccatgaggttgaagcagccagaccagaccggagtggagcagccagggcagaacatcttcatctgggagccacactcttggattcaagcgattctcctgcctcagcctcccaagtagctgggattacaggcacccaccgccatgcccagctaatttttgtatctttagtagagatgacatttcaccatgttggccaggctggtctcaaactcctgatctcaggtcatccacccgccttggcctcccaaagtgctgggattacagg

SEQ ID NO: 123764 - DNA, 493 bp, Homo sapiens
tggctgtgtagtgatgcatgagggagcgggctatgggtgaggagattagaaattgatcacattatgaaataaggcactaaagtctgaagccagtaactacacaattctatggaggaagaaaataattatgcaaatacttctgattttaaattttttatataataaacatacaactgaagaaaataaaatgatgcattcaaatgagctgtttttaatacggagaaaattcaagctcatctaaatagaaatatgggtgggatgaaaaaagtaagtatgttggaggctgaaaactgttctccatataggagtgaaagagagaaaaaaaatttcaattacatatctgagattaaaagcaagaatgagaaattttccaaattcgataaatgcatgggggccagatgcaagcatacagaaaactgctggacataattcaacactagggaaccacagatcaaaagcacactgaactaccacctcacacctattaggacag

SEQ ID NO: 123765 - DNA, 509 bp, Homo sapiens
cgcatgtggtgctgtgtgtggggctttgcagctcctccctggcctgaagtcccttttggttaagcacaggcagtggaagttagtctctctggtgctgcaaagtcttgcctttggtaggaagacccctgagagatgctcagaccccactatcctcgagacaggtgggccttccacatttctgctgtacctgagacagaatctggttcactataaagacattgtttaaaatgtcccctttccttccctgccctgagaaacatatcaatcactgagttctaatgattctcactcctcaatattgggctgccacatcctgggtttcccctgggttatgtgctcatcatctctactggactccttccttgccgacctgcctctagtcttgcctgcctccaatccacataccatgtcattactagagtcagctgactctgaaagatctaaaacatattccatgtcttcgttgtgtcaacagtgtgaaactcaagtcctacgcaggacctaggtga

SEQ ID NO: 123766 - DNA, 478 bp, Homo sapiens
gatcttcctgcccatttgaaacacaatatatgtcaaatggaactcatctgtgctactttttttaactaatgacataattacccatccgtccccccaatcaaattcttattctctttgtcttctacttccagtgagctttccgatacccattttatctgtccctttactctcataccacagaaatgtctcaatgcaagcctgggtgcagtggctcacgcctataatcctagcattctgggaggctgaggtttgcggattacctgaggtcaggagtttgagaccagcctggccaacatggtgaaacccgtctctactaaaaatacaaaaatcagccgggcatggtggcaggtgcctgtaatcccacctactcaggaggctgaggcaggagaatcgcttgaacctgggaggccgagattgcggtgggccgagatcgtaccattacattccagcctgggcaacagagcaagactctgtctca

SEQ ID NO: 123767 - DNA, 309 bp, Homo sapiens
accaccatgtaagaagtgcctttcaccctccgccataattgtgaggccttccccagccaagtggaactgtaaatccaattaaacctctttcttttgtaaattgcccagtctcaactatgtctttatcagcagtgtaaaaatggactaatacaagtctccaataccatgttcatagacttcataaagtcacagatgtcttgaacgatttacaatttctgtttgccctgcttttttattttgttttgttttgtttgagacaggctctctgtcacccaggctggaatggagtggtgcaatcatagctcgctg

SEQ ID NO: 123768 - DNA, 517 bp, Homo sapiens
aggcttagccagcccaaccgtgatgttatatggacataacctaacgcatttaaaaaaaataaaggttatgcaccaaataatgtgaatgctacagcaatcaggggtgtgaagacagctgtgagcaggtatgtgtgtgcatgggatggaaggactctgctcccatttcaaccacttgatccaaccaagatctgttgcggtccaaaatctgtggaatgctaaaagctcctgggaatattcctccagagtactcccaaaagcatatttgctttcagactgagtttgcctccttaggtgcataggagctgcccaaataggtaattccaagtacttactcatgacagaataactgaatgaaggtaccactcaggaaacagttgtgaactctacagtagaaaattccatatatgcctatacctgaatcacgtacatttttaaagatggaattttagggttggtggttcatacctgcaatcccagcactttgggaggccaaggtgggcagatcacatgaggccag

SEQ ID NO: 123769 - DNA, 296 bp, Homo sapiens
ctacttttttccttttctcttttccttctacccttgcagggctctcataagtgcctttgcgtggtgtcacagttagataaaaattgcctgtattttttttaatgtctttgatctgggcatcccgagggtgcctctgtaagtgtgctgagacacaactgtgtagtggtaaccaaacctaattgcccagcagaattaactcgaaggagggtttttaaaaaaagttcaattgaaatataattcatataccatacgcttcacccatttaaagtgtacagttcagtggcttttagtatgtt

SEQ ID NO: 123770 - DNA, 424 bp, Homo sapiens
ttctgggaacagcccagagggtgttattggttctcacatccaggccaaacggtatcacccagaacaatacattcttaacaaaatgttacttctccctaccactctggtataatagcatttctgtgcacttttccccattcctcaaggagtggggctgaattccctattaggtaagagttgtagtaacaaacttcctggtgtgggcctgaatggacttaatctttaagggaaaggttgaagatcctggttctctatacccaatgtgaaaacctgtttgaggtatccgagggctaaaatttggcaacaaggaatgccaccttctctatttgaatatgattttgacataattatttctgtggccagaaagagcatcttgagctccgttttggagaagaggaaactatggcccagagatgaagaatgg

SEQ ID NO: 123771 - DNA, 356 bp, Homo sapiens
agttgtggttttggcctctcccagcaagaggcaccaatgtaatgtcagagccacgctgaactctggcatgggcgacgtttcttttttctttgagttgtgtgtgtttgttttgtgatatttccctaccaggccattaagaaaagttagatggcagcaagggtgtgagtggctcgatcccagataaagagggccaggcacagagacggcgggatcgctggaggaatttgagagtccctcaggtctcaccacccatttgcgggttggggagcaggggtacccctgtgggccgtgccttggagctcaagtgactggcctaaggtcacattgcggcggctcatcgaggacttcttattccg

SEQ ID NO: 123772 - DNA, 782 bp, Homo sapiens
gattgcatattgaaacgtgaagaaataagcagatgttctgttgctcagatctaggtttgaaataattactttgtctaattgcttgagttgtgtttctgtcaagtttactctcagagatttaaataaagcacactgcagtaaaggcatactagagtaagaatgcccaagtaataatggtcaaggactaatagaaagaaaaataattatgtcaggaaacctagcttacaaggtaattgctaaattggaattttaatttgttcactgagacatgtatgtatatacggttatttttatctcatgaagtctagatcccagtgtttctagacatagcaatgtaaaatagttcctttacttacaagctggtcatttagaaattgtattccaagcttctcaaaggacagattgggttttacagtgggtatagtttgatgattgagcttgtattgctgcgccctgttgattaagtgggttctgattggtatctgctggactcatactcttcattaagccacagagttaggagagtttatatccaacagatcttagaaacttagttattttagatatatttcagaaattgacagttatctgcagcaaaacaattagtcagaaaagaagggaatttttaaaccaaagataatttaattaaggaatttttgaagaccacatggttaaatacattgttgtagatcaattttcctttaagattttttggcctgttacatacctagtgtatttatatgtctcctaccaagtttcatggaaaggaagcctgaatatat

SEQ ID NO: 123773 - DNA, 635 bp, Homo sapiens
cacagtggctcatgcctgtaatcccagcactttgggaggccaagttaggcggatcacttgagctcaggagtttgagacccatccttggcaacatggcaaaaccatgtctctacagaaatacaaaaattagccaggcatggtggcgtgcacacctgtaaactgaggtgggagaattgcttgagccagggaaacggaggttgcagtgagtcgagatcccaccactgcactccagccgggtgacagagtgagaccctgtctcaaaaacaaaacgaacaaaagaaatacgcattaagaacaaaactataaacatataactaaacttttaaggaaggaaagaagaggaggaaaattcataggtatcagaaatcagagaaataaaatcagaacagtaagcgggagctagtgttgctgtatatagcacagggggcttttggtcctgcatatgttctaaggggtctggggttgaattttattgcacatatggggataggatatatggccttgggccttttcaaaatatatctgaaacaaagacccaggcatgtggcctagagcctgaaataacttccctaattacgcatagagattagaaaaagtgcccactagtcaaatgctcactcaagaacaaagtcaat

SEQ ID NO: 123774 - DNA, 154 bp, Homo sapiens
gacatgagggagagaggataggatggggaatggctttgaggcttttggctggggcagctaaatgaaaggcagtgccggctcttataagaaatggtattggccaggcgcggtggatcacagctgtaattccagtaccttgggaagccaaggcaag

SEQ ID NO: 123775 - DNA, 188 bp, Homo sapiens
tcaccactatctaattccataatgttttcatcactccaaaaagcaaccacttacctcttaattgtcactctcaattctcctctcccttcatccccctggcaactactttttgtgtggataaacttgcctgtttctggacatttcgtataaatagaatcatacagcacgtggctttttgtatctgcctt

SEQ ID NO: 123776 - DNA, 858 bp, Homo sapiens
agaggagtgatataagggaggatgggaaggtggaaaggattagactggggtcaataaactgtaaagggacagaaagtaaacattttgggctagggaagatacatagtctctgccacagctattcaactcttgtagcctaaatgcagctgtaacaatacacaagcaaatggacatggttgtgttctaataaagctttacttacaaaacaagcagcagaggatatggtccataggaccacagcttgctaaccactgaaatagatcatgcagagccttttggccagattaaatgttctggtctttatcttgagaacaaagtcaagtcatttaatgaattgggaacactcaagcagcaagataaaatttgcattaaaaaagttattgtttaggctgggcgagatggtaaatattttacactttatggaccaagagataaaaatcaagaacattatgtaggtacttatataatataaagataaatttctacaaatttttcactgatgcaaagcaaaactttagttataagcacagaagttggaatttcatatagtttccatgtgtcataaaacattagttttttttttaaccaaaaagtgtaaaaaacattattagctcataggccgtatttgccaacccttggtttagagaatgcagaagagggtaacaagttaattgtgtcctggactagggtggtggcagttaagatgaacagaaggtagatttttgaaatttaggaggtggaactgagaagacttggtaatccataaaatagggggactagggaagacggtgatattatcataggtttctggcatgggcaactgagtagacaaatgatggtatcactaaataaatgaga

SEQ ID NO: 123777 - DNA, 431 bp, Homo sapiens
cacaggtcctaggttctatctgaaagatgagaactgatgccctaagaattttcttttgtttttgtaggctgaaaattcaatctttatgatgattcaaaatagattgtgcatgtcctaccatatcaggatctaaagatatggaagaaaacagtggctcctcagtggactcaaaggaaacaccgaatcaaccaaaacaacaactcccacaaaacaaaaacccatcaccgtccacagagtacatgggctgttctactgataattcagtttttagcattttgttttgtttttctttttgagatggagtcttgctctgtcacccaggctggaatgcactggtgcaatcttggctctgcaatctctgccttccgggttcaagtgattttcctgcctcagcctccagagtagctaagattacaggcgtgtgccaccac

SEQ ID NO: 123778 - DNA, 377 bp, Homo sapiens
gctcagtgatcctccatatagtaagcacagatggtcttggttcagtctacggattcaaatgctgacctctttccaaattcttctgatagaccacagagcagtccttgtgggaaaatatagacctgaccaaacttgagtttacatagaaatgagaagttgctaagcttgtaggagcctatctcctgctccagcacctgcctgggactgaagatacaagaaagattcagtttaaaattatgaggtgggtgtatcacaaggtcaggagtttgagaccagcctggccgacatggtgaaaccccgtgtctactaaaaatacaaaaattagccgggcatggtgacacactcctgtaattccagctactcaggaggctgaggca

SEQ ID NO: 123779 - DNA, 576 bp, Homo sapiens
cgcaaatctgcattttccaaagctcctcctgacttcaacgtggagaatggactagagggggcagaactggaacaggaaggcgatgcaggaagtgacaggagtgatccagaagatgacagaggctgaagtcaaggtgaggctgtgggaaggaaaagcagtgttgtggatttcatagacactcaggaggtggaattggtgaaaactggcatcggacgagatgtaggggctgagcagaagcagggatgattcctgggtatttggcctgagaaatggagtggttggtggtcttgctcattgagatagaaaacagaagaaaagcagggctggagaagatcgtgagcctagttctagaaatcttggaattgctgcgagcaagttttgacagcacgatatttggttttcttccactgggattacagagaacttgtcttttgggtagtgagccacaggggaaattttcctgtttgggtggggggctgggtgcagacccacctctactgtgagtatcctaactgtgaagcagacacagtcccttggagtgactataaaaatattaaaaggctgggcacagtggct

SEQ ID NO: 123780 - DNA, 332 bp, Homo sapiens
tggagatacctgtgtaaataggagtgttcctctgtttggagacttgactcatattttagagcttttctcttagaatattaattactacagttggttcagtgtgtactgagtatcaagtgcttgcagagtacatgataagcactccataatgttaagctgcctcactgaatcctcatgcccctcatgagctagaaagtatcatgattcccattgtagacaggaagagactcaggctttctagaggctcacagaggtggtgatgtgatttgcccaagaattcaaggccaaattttctttctgccaagttccccacaccttccaggcccattgct

SEQ ID NO: 123781 - DNA, 258 bp, Homo sapiens
tccacgataaatggaatgaaagtcccgaaatcctcagagtatcagaaatgttctctgttgaccacaggtgacaatttatatcccaaagtgaacatgtggaactcacatatgcatgatagaaaagagggaaatttaaaagctaaatctatacaagttctagaagaaaagagagaagccgaaccagcctgggcaacatagtgagaccccatttctttctttctttctttcttttttttctgagttggagtctcgctctgt

SEQ ID NO: 123782 - DNA, 173 bp, Homo sapiens
actgccctctagcctgggttacagagccagaccctgtctcaaaaaaattttttcctcatctttcttcatgtgtataatcatttttcctagctttaggtattgagcaagccctcctttcttcgtcagcctgtcataccgtatcccacagttcaaatgtgtgggggtttctgttt

SEQ ID NO: 123783 - DNA, 797 bp, Homo sapiens
atctatatggcaggccaacacattgcagattctgtagctgaagctgataatgcagtctttcagtagaatttcttcttcagcgaaacctgagttttgctcttaaggcttttcaactgattggatgaggcctactcacattattgacgataatctccttaaagtcagctgattgtggatgttaaccacatttagataataccttcatggcaacacttccatctgtttgaataactgggtactatagtctagccaagttgacatgtccaactaaccgttacatggttcaatatatatttgtccaataaaaggaagaacaaatggctaaaatggttaatttaagcagaaaaatgtttatttggaggatgttgaataacagaatttaagtaaaaagtgagcacttaggcctcaagaagtcccaagaagaaccagagcagtttgcaggggtagggacctaggtaatagtaaggaacaatgccttcagtgtaccacagtcataaaaaatcagctctagccattttgcttcctcacatcactctaagattcagcttcccgggaaactcagcctgattggtgtaggctgagtttaggtcacatgtctcccttgcccagtgaaaggtgggtacaccttgattgacattctcaccacaactgcattcaggaagacaaggattgtttcccaataaagtgtcacaaggctgttaccaaaagaaggaggaatactagacatgcacaaataaaagatatccacttcgccaactcttgatatctcacatagatggtcagctggtaaaactaac

SEQ ID NO: 123784 - DNA, 788 bp, Homo sapiens
gcaagagataagaattaaccatattatgatgcaaacaaattgtttttttgttattgtgaacttccatgctaagtgctacattaaaaatcaaatgaaggtgacccagagtaagttaattagattttaattcatatctttaaggataaaagaagtttttattaaccattggtaactaggatgctttttacttaaatcagagtcaggaaaagcagttggtcttatatttcacgagataacatgttttcacttgatatgaaatcagttctttttttccctcatgaacagctcataattggattttatttttggacagaaaaactttttttattgttaggtgaattttacagttttattggaaatctcgtttggttatttaccaaaactatttaagctttttgggatgttggacattttcaatgcaacaggtcaacaaagaattcttttttgatgtgttgcattaagatgccatcaaaacagacactacgtcttttaatgagtaaataattaacctataatatgtgtaaactacttgttcatcatttttaattaaaatattttgtatttcaaaactgtttcaaatatgaaatctgggtttagaaaggatctgcatgcaggtcaacgtgataagcaatgatctatgtagctttatttttacgacaattggacagaggtaatttcttagcacctcttaggctgcttaatttagagttaatccaaaggaagaaacattccttcagaagactaggacatatcagatattaattattaaaaataggctgggcacggtg

SEQ ID NO: 123785 - DNA, 245 bp, Homo sapiens
ctgccacctcaagaacatcggctgcaagtgcaagtagggaacacaagttcccaagttccctaggaattcctgtgaccagaaagattcagagagattcagggtcaatctagccttctaggttccttatctaatgtttgtccaagtataactgatgacttgtgttaacaccatgcatgccttgtgtctggtctcatctttacccctaaacccaagtgcccaatctcagcctaagcagaaatccaaag

SEQ ID NO: 123786 - DNA, 262 bp, Homo sapiens
ctgacactaggacagtgtctagctaaaaacacataaatttcctgacttactgctttaaagaacttggttcaattcaagtcagcaggtatttactgagagtttacctactctgtgccttgttctagatagactctctgaggggtaataagcaaggagtaaaagacagtccctgcgttgaagtccccagtttttgttttgtttttttttttgagatggagtctcactgtcgcccaggctagagtgcagtggcgccatctcggct

SEQ ID NO: 123787 - DNA, 357 bp, Homo sapiens
ctcttgccaagctccctggtaaagtctcccccctcctctcaggcacctagaacctgcccatctccatcattccagctggcaggctgttgctcctggagaaagaggtctccactctcttacaggcagccacctcaaccctgtcgggaagtccttcttgtcttcacacctcagtctctcttgctgtagccaatgctcattctctctggaaacattcttggcaggctgtctcttcagcgcgttgggatgctttagcaatccctcggcctgctctcctctaagctgaatctttctttctttcatttttgagacggagtctcgctctgtcgcccaggctggagtgcagtggcacaatctcag

SEQ ID NO: 123788 - DNA, 180 bp, Homo sapiens
aaaactataaaataaaaacttttaagactgtacaatggggaatatttttcacattttgttagatttcatttgctgataaagtcataaaaatgttactagattttttgttgttaccatttagaggtactcttctaaaaagttaattttgtagcttttgtttgtttgtttgtttttgttttt

SEQ ID NO: 123789 - DNA, 440 bp, Homo sapiens
tcagagtaaggggaacagagaagaaatctgactggaggcttattgaatgaaattgctataatctgggcccttgagaaaaagaagaaatctaccaggctggaacttgtgtatgtgggatgggaaggaaaagataggaggatattgaaagtaaagcggaagagcatgtgcaaagacattaaaaaacacaacagtatgtaaatgtgggagtacagtttatatgttaaatgtattatgaaaaacattcagaggacctgaagccagctattatagaagctaagtgggaagctagagtacaaggatttggagttcttctgaagacacttttgactgtttttaagtaaaaggaaaactaacatgagtctgtcacattcctaagtgtcatagatgctacccagtttaattttcccaaatgtttccaaggcatccccctactgtttttc

SEQ ID NO: 123790 - DNA, 681 bp, Homo sapiens
aagaatatttagtattcttttaaggactatcatttttaactaggaaaatttgggggcagttctcaaccttgtttttggacaccaaccctaaattacaattgatgataaaactatattgaacataggtgctgtcagcagagtaataaattctgaagtgatacctcttttccctctgagaatgtaattttagtacttgaatgtaaagtatatgtcccctaatttcagaaattattaattatttggttcattatttttcataaaaccttattaatgggcatacaattgagctctactactttgctgaaagtttctactacctaaaaaagtaatgaattacttaccgagtgacagcaccaacatttcagtactttaatgtttcctaaatgaacatggttaccaaaatggatatttgatatgggaatgtatgagtatacaaagaagataagttatttataccattttgtcaagcttcaaatccataagggcacaggactcattcccagcaatgggacaaaagcgcacatccaaacaggtgtcctttccttctaagggtcaccttgctgctctacatttattcttaacagcttccattgccaaaaatgtttttgaatacctgttttcaaattgccttcagagtctttggcaccttcatttcaatagccgtgtggtaacaaatcttga

SEQ ID NO: 123791 - DNA, 758 bp, Homo sapiens
tcaactaaacaacccagaaccctatttaaaaaacgaaatatgaaaaaaaaatttaagccaagcgtttatcctagaagtgcagattataatgaaattaatgacataactttttgagtgtaacttgagtaagcaaaagtagcatacagtttattgaactgagatatatagagttccagacttggtattcacatttttccataataaaaacagattagaacctaagtagggaatctgatattctctaaaactgagcctcaccttgcatgagccctctcttctaaacaacttttcaaaacatcatttctcaagcccagttttactttcctgaatacatgctgttccccttccctggcaagcttttctctccttctaagtttgggaagcaagatttttccactaaaacccagcagaagctttccctccttgaaatctttcaactccactgtggactctcactttcatgatctaggctagtatttctctatctaagtgtgctaggcatcagtgggaataggaaaagaagagtttctgctgaaaatctttcttaaccccaagtccagttgtcacctttactggtagaagtatatttgcctggtggtaccatcctggcccacagcagtgattcccaaatactgatccactaagttgtgccaaactgttttcatcagtatcacctgggaagctttatataatacaaaatgccaggtcatgcctcctccaattcctctcccttctcagaatttatacccctgttctcc

SEQ ID NO: 123792 - DNA, 340 bp, Homo sapiens
tgaatgcagaaccagaaagcaggcagagtcatccacctccagaggaactggaattgaagagtttgtactggggcctgatgaggcggggcctttgctctgtagccaaccccccttaggcacagtttagtttgccctcctctcgggcgaattaatttcctttctgaagggcacattctttctttgtctctgtgaataacttcaagcctattagtcaagtcttgggacctagaagccattccatcctttaaggtaatttgcctacataatctgattccttttatgtttgttttgcaatttagctctctctgaaggcaatctcctttctgaagttcaaagccca

SEQ ID NO: 123793 - DNA, 409 bp, Homo sapiens
taggccgcagcacagagaaggggaagccaggccaaccctggaagtctctctgagtggaggtgaagctggaatctggagcccacagtggctaggattcacagagcaggcactggagaggagggtatgcacagagagctagctctgaatgtgtgtagaaggtcccctttgagtaacagcagagagttcccttcaattattcagctgagtagtaattagcacacttgtggaaggaaaacacctaaggctaaggctggggaaagaactaggattagagcgaataatccctggagagaaccaggagtaatgcctattcccaccaaccagggtagaaaccccccataattcgtgaatcattgatagagtattcagaaacattttttctcagtagtgagtaaatgcctttctggtc

SEQ ID NO: 123794 - DNA, 312 bp, Homo sapiens
atggttgaattcattttgctaatattttcttccagattttttgtattaatatttatcaaagatattggcctgtagttgttctttcaggtatttctttgcttttggtatcagagtaatactggtcttgtagaatgaatttgaaagtgttccttctccctgtattcttcaaaattttttgaggagggctgctattagtttctctttaaatatttagtacgggctggggatggtggctcaggtctataatccaagcaattttggaggctaagcaaagtagatcacttatggtgaggaatttgagtgcagcccaga

SEQ ID NO: 123795 - DNA, 271 bp, Homo sapiens
gttaatttgaaacatgtaccttgatcaagaaaatcacttctaaagattattctgggtgggcacagtggctcatgcctaatcccagcactttgggagaccaaggcaggaggatcacgtgaggtcaggaatttgagaccagcctggccaacatggtgaaaccccaactctattagaaatatgaaaaattagccaggtgtggtggtgggcacctgtaatcccagctactcaggaggctgaggcaggagaatcgcttgaacccaggaggtggagg

SEQ ID NO: 123796 - DNA, 381 bp, Homo sapiens
tctggtcctcatggaccatgtgtgtttgatggatatgagacaaatttgaagagaagttttgggaatattttctttcactggacattctactctctgattccatggattcgactactctagggacctcatgtaagtggattccagagtgaatatgagaagagactgctgtttgccaggagctgggagtggggagaatcagaagttgttcatgggtgtgcagtttcagttatgcaaggtggggaggttatagagattggctgtcgagcttgatacctatagttcacacagattgagtatttcttatgcataagacttaggacaaaaagtgttttggatttctgacattttttgattctgaaatatttgtcatatacttactgg

SEQ ID NO: 123797 - DNA, 277 bp, Homo sapiens
cattgaatagaagagggctattcccaacattatctttatcttgtagacataaataacaaacaactccggtaatcaaaatttactacaattgtaatagattttggcagagtttatgtattgtatgcaatgctaacataacgctgagtttcaaggatagaggccaggattcctagtttggctttgttaaatgggaaaaaaaaaatcactactgtattcgtagtgtttactacatttaagagattaattctcataaataaaattgtttataccagcttct

SEQ ID NO: 123798 - DNA, 210 bp, Homo sapiens
ccctcgaccccttcactgctgcacctctctgagtccaacccaggctttgccctaacttgaccttcctttgtccccagaagcaggggaacaactacccagaccaaagccactaccccaggagtgcacttgtgggtggtttgcattcttcacacaacatggatttatggagggcctggaatgtgtcggaagctgtggtgggaatagaaagag

SEQ ID NO: 123799 - DNA, 770 bp, Homo sapiens
agcctctcctgtttcttgtcaccacccctttcctgcccctgacacaaaccctacatctcagtctcacaaaacacacaagttcttcacactccgggcaggtttggtagcaaggaatagagcgtactccagtgacagcaatcagtaggaagtttgcatccggagacacgcagcctgtctgcccctgtcttgggccacccgtctagacatttgttctctaacaatcagccgggttccttcaaacgtgtgctgcttatacatgctcattgtgtactgctaatgtcacctacttcccccttcattccccacaatgaatggatccattttccccatgttcaagttcccaagagagaatcgactgccactgtaattttttttcctaatcactcataggttacaagtacctaccctggtccagtgaactgcgggattcatatgtggccacttaggctggtctcgttggtatggagctgtgggagggcagcacccagaaataggctttgttccaggcctggcacgtactcctcctgctcctactttctctacctgggaaatagccgctcaggacgaagctgctgctgtggtgtcgccacctctgagaagtctcccagaccctccgactgctctttaattgcctgttctctcctctggaagccttcccccaacacagaaaaattcaatcccatcatcaaaaagggctttaggttttccctccatctttacgtgttgatcaaagttgcagatctgctggaatccttattgaaaactcccca

SEQ ID NO: 123800 - DNA, 585 bp, Homo sapiens
agcctctcctgtttcttgtcaccacccctttcctgcccctgacacaaaccctacatctcagtctcacaaaacacacaagttcttcacactccgggcaggtttggtagcaaggaatagagcgtactccagtgacagcaatcagtaggaagtttgcatccggagacacgcagcctgtctgcccctgtcttgggccacccgtctagacatttgttctctaacaatcagccgggttccttcaaacgtgtgctgcttatacatgctcattgtgtactgctaatgtcacctacttcccccttcattccccacaatgaatggatccattttccccatgttcaagttcccaagagagaatcgactgccactgtaattttttttcctaatcactcataggttacaagtacctaccctggtccagtgaactgcgggattcatatgtggccagagttctggcttcatacctgagccaaaagccccaatccatgcttggccattgcctgagtattagctgccccagggggatcacggtccccatatatttgcttgccatggaccctgggcagcagggagagagtagagatttgtcaa

SEQ ID NO: 123801 - DNA, 517 bp, Homo sapiens
aaattgttccacttggaataagttgtagacatgatacttttcccccgaatacttgaatatgaatcttttaagatgggaatactcttctacacaaccacaataccattatcatacctgagacaattgacattaattagtgttaattagtattatacttcatatccacattttcctaattgttgacaaatgtttttatagtcttttttttttaacattaacaaaaaaactagtattctatcaaggttcatattatctttgcttattagtatctctttagtctcttctaactagtataaaactgctgtacttttttgttttttgttttctcttttccaaaaggtcagtccaattgtgttatagactgtctcacattctagattcatctgatctagattaaactatatacgttttagtagtttctttagataaaacatgaattgtgactataaaataatgagactacagtatggctttcagaaatggtaggttactcttgtctatagcactaaggcataac

SEQ ID NO: 123802 - DNA, 978 bp, Homo sapiens
cttggctcactacaacctggattcaagcgattctcctgcctcagcctcccgagtagctgggattacaggcatgtgccaccattcccggctaatttttttgtctttttagtagagacggtgtttccccatgttggtcaggctggtctcaaacgcctgactcagatgatccgcccgcctcggccacccaaagtgctgagattacaggcttgaaccaccgcgcctggccctgtgatgtagattttgatgctgccagccaggctgcctgccgggatcgcctgccctggagcaggagcatcagccgtgcgttccaggacgcaggcatggcatgaccggcaggaggcggagtgcccggcgtctcttgggatcggagcctcctgaattccacgctgggaccttaatttggttttaacacaaataaagatctcacataaagataaaaggggatgtgttggcttgtaatttttgttaaaagcaatggtatatgttgtataggatagtgtattgggatcaacaggtttttggggttttttttcagcccactgacattgaaagggataaacagttttttggttattagtgagcagttttctctcaggccatagtgtaggggtttgtggtcatgtagatgagagataggctgggattaaaatttgttatggcagtaataagagcaacagagctagactctgtcaaaaaaaaaaaaaaacatagttagtagaagaaaaaaatcataggattataggattagagcagaaaaaaataaaataaaacaaaaactacaaaagattaatgaaaatatttggccttttagaaaagttaaaaattggcaaaccttcagcagactaaacattttttttaaattcaaataaaaaaacgagttaaaaaaggagatattacaacagataacacacaaattcaaagattggtttgtggctactataagcaactgtatgccaatacattggaaaatctaaaaaa

SEQ ID NO: 123803 - DNA, 296 bp, Homo sapiens
aatctggctccaccacttagtaatgcaatcatgctcaagtgacaactgttctgagacttagttttctcatttgtaaactggggataacgactaccttgcaggtgtattgtgggtgtattgcagttatgtttgtaaaaggcactgaggacagtgtatgactctgagtgggttcccaagatattgcaacttaaaaattgttactacaggttgagcttttgaaaaattgaaatctgaaatgatccaaaatccaaaactttttgagtgcagatgtgacaccagaggtggaaaatatcaaa

SEQ ID NO: 123804 - DNA, 755 bp, Homo sapiens
ggttgaggctttgctgggctctgcctccagtttagggcccccctcataagacacattctgctcacaccggcagacaccctggtgtgaatccacaatctgctagcccctaagaaagggctctaaaaagtaagcagagacaacaggatcacaaacatacattatatattcagaagtatgtcatagacattatgtaagaaggggcaatagtcttgtgtttgtattggtggcataagaatttcttttagctgagttttactatatgagagaaaacaagggctgctaatttgacaagcggcaaataggttgctgctgggtatctatgctgcttctggagttttgatctcatggagtttgttcatctaaattccaggcagtggcacataccctagggacacagggattatctcactgccactctggctgagccacggagtaaattatacagggatgagggaacacccacccagcatactcactggtagattcacaccctgtcttatttcctttcttgccagccagggaaaccagccattgaactaagcatttagtgttgtactgcagagcagataagagcatgggctcaaattctgactctgtcacggatcatctgcgtagcctggagcatgctaatgagcctcccaaagctgccccagttcatctgtacatggggtagagatgacagtgctagtgaacacctcatagggctgtgtagaatacataaggtagtccatgtaacaagtttgcacagttcctgg

SEQ ID NO: 123805 - DNA, 697 bp, Homo sapiens
catctcctacatcctacatctcctacatctccatctcactacaacctcccacaacacgccggggttgtttttgtattttttgtagagacagggttttgccatattgtccaggctggtctttaactcctgggctcaagcgatctgcctgccctggcctcccacagtgttaggactacaggcatgagccactgcacccagccaagtatcagcttttaataaaactgcatctcactgttgaattgacgtaacaccgatcagaatacagatgcattaggaggcttcttttaaaccaagcccttctgctattaaccttctgatgatttttctcctactaccttgctgtttttacaggcccactaatttgcctgcttgactaaaataaggacgagttatgtgctgatgagagacatgtttgtaatgttattcgttgtgacacagttcaaaagaatttgcctttgattctcactaaaatgtaaagttttgcatattaagatcctttttcaacaactgagcaactctttataatgaagggcagaagacgccaaagggaagaaaatatttacctttgtgggcttttactttctttcctgggaatggtaggccatagctattggtatgtttttttttgttgttgttgttgttgttgttgttttttgagaaggagtctctctctgtcgcccaggctgtagtgtagtgg

SEQ ID NO: 123806 - DNA, 581 bp, Homo sapiens
gggaaatgaggaccaccgctccggggcgcgagtaggcgcgtggagtccgggggctcagccgccgcgcctcttcctcctgcagctggagactgcaacagcggcgggtgcaccggcagcagcgacgaccctgcgcgcaggtggcagtgtagaagccagaccgggagcttccagaagtggtttctgaaagagtcaaatgtacatgagtaagcaagcacaggaatctgaaaaaccacaggcccactaatttgcctgcttgactaaaataaggacgagttatgtgctgatgagagacatgtttgtaatgttattcgttgtgacacagttcaaaagaatttgcctttgattctcactaaaatgtaaagttttgcatattaagatcctttttcaacaactgagcaactctttataatgaagggcagaagacgccaaagggaagaaaatatttacctttgtgggcttttactttctttcctgggaatggtaggccatagctattggtatgtttttttttgttgttgttgttgttgttgttgttttttgagaaggagtctctctctgtcgcccaggctgtagtgtagtgg

SEQ ID NO: 123807 - DNA, 755 bp, Homo sapiens
gggaaatgaggaccaccgctccggggcgcgagtaggcgcgtggagtccgggggctcagccgccgcgcctcttcctcctgcagctggagactgcaacagcggcgggtgcaccggcagcagcgacgaccctgcgcgcaggtggcagtgtagaagccagaccgggagcttccagaagtggtttctgaaagagtcaaatgtacatgagtaagcaagcacaggaatctgaaaaaccacaggtatgtaggacaattaatccacctatctagctttataattattgcattccagtagtactaacccatttgctcttatgttcaatattttgacacttatataaatttctatgaagtgaaatgtattttgaggtaacctccgaggagaagcagggtctaatctatttctgacaatgtatttaaataaaaattctgcatgtcattatattacatgactttttactgttctaaaagagttgtttttccattgtgaccatgtggctttgcatttaaccagttgtttgatatctgcttttcaaaacacttttcctgaaactacataaaactcccaaagcgctgggattacaggcatgagccagcgcctaccaccgctattggtactttcacacggatgctaaagttattgtgctggccgtgttaagggtcaggcatcaaaatggccgctcaagagaatgaagctttctctttgtgcagatgcaacgggtgggatggggtgcacaattatcacagtgctggttgtggt

SEQ ID NO: 123808 - DNA, 599 bp, Homo sapiens
gggaaatgaggaccaccgctccggggcgcgagtaggcgcgtggagtccgggggctcagccgccgcgcctcttcctcctgcagctggagactgcaacagcggcgggtgcaccggcagcagcgacgaccctgcgcgcaggtggcagtgtagaagccagaccgggagcttccagaagtggtttctgaaagagtcaaatgtacatgagtaagcaagcacaggaatctgaaaaaccacaggtatgtaggacaattaatccacctatctagctttataattattgcattccagtagtactaacccatttgctcttatgttcaatattttgacacttatataaatttctatgaagtgaaatgtattttgaggtaacctccgaggagaagcagggtctaatctatttctgacaatgtatttaaataaaaattctgcatgtcattatattacatgactttttactgttctaaaagagttgtttttccattgtgaccatgtggctttgcatttaaccagttgtttgatatctgcttttcaaaacacttttcctgaaactacataaaactgccaattgttctgaataatttcatttgagataatgttaac

SEQ ID NO: 123809 - DNA, 676 bp, Homo sapiens
aggcttctaggggtggtagcgacacaagttatgggagggtgagtcagggaactgtatggtgaataaagtaaccttgttaggcagataaaaagtctgttgagtaatacaagttgcttctgagcagcccttgggagcggaggtgattgtctggactgggatcaacctccaagctccactcctgtgatcccagttaatcttcccatgttgagaagattcccagggagcagattcatgacaattgagtttgttttgcaggatccgtctttaggcggataaggaaggctttccctgcctgcatctgctgctccccaagtgccttcacttctaagtaatcagcacaccaaagtggcatattttggggtggcatttcctgaactccttcagtggacatgatttgcattaacacttggtagacagaggcatgggggctgggagaggggtgatattttattttctagtcagttaaagctagtcctttctggtttagatgtcacttctggactaggcctgttttggaaaactgccctctctcccagagttcctccctccttctccaggtcccttctcttcccctttctcagtctgttctcctgggtagctcagggtggaggaggaagcatacacagcgttttggtcctgaggaaagagggtgtgctccccattgttcttctctgct

SEQ ID NO: 123810 - DNA, 601 bp, Homo sapiens
atttccaaatacctgagcccgcgctgtgcagaaaatgtagccagttttaagaaacagcttgttttctccctctaagcccatgaagaagaatacatttatccctgacaaaatagcattgtccccatttggtggtaaatcgtcaagtctgtttagaatcagggtcagcttctcaaatgagcctttcccccatgtagccttcctgaatctgattaacactgtgtcaagggagttgtctgatgtctgaccttgagcagcatgcttccctctccccacctcctttttttgggaatcattcattttgtacagcctcgggccctgagattcctccccagcaggctggagtgcactcgcaggttccctttattggtatcggaagggtttcagacccagtgacctgtcatctgtcttctcacctgcttacatgctgattcactgatgagctggcatcgcaggccccgcctccctctgaatggtctgtgaggttgcaactgcttctggagaggggatgccgagccgaaccagagctgggttactacaagtgtgaaccggcagcctgtctgttgccacagaagaacttggtcaccacactgagaagccgtgt

SEQ ID NO: 123811 - DNA, 381 bp, Homo sapiens
tagatttcctgtcattgcaacttttcaagcatagactggatgacctaggctggaatgtagtaaaagaattgaaatattagattccaatgcttattttaggttttaagtaataatggaatctctttgaaagtgaagatctatcacagaattctccaaacatagtaaaaggactgagaaatggagaaaagcctgtatcaggaaggttggtgaaacctttgttggcataatcgtgggctgtgggcctgaaatggagttacattcaatgaagctgttggttgaaggacctgggaggcagggaaggacttgactagggtatcagatggctgcagggagtgtaattttggaactggcagcctggagtgggaaggtacacttgagaac

SEQ ID NO: 123812 - DNA, 312 bp, Homo sapiens
tgggctcatgttgatcctcgatgtcaggaacatgttaaaaatccttacaaaggcaaaaaactcaagaaacttccagaatcccccaacaagaaactcattacagaaaagctgcactttaagaaacaaagacgggggccgggcgcagtggctcacgcctgtaatcccagcactttgggaggccgagacgggcagatcacgaggtcaggagattgagaccatcctggctaacacggtgaaaccatggtggcaggcgcctgtagtcccggctactcaggaggctgaggcaggagaatggcgtgaacccgggaggcg

SEQ ID NO: 123813 - DNA, 543 bp, Homo sapiens
tgggggtgaggaggtggcaagcatcgccttttgaggacagagtcttggagaggtgttggctttctagggagggccctgtgattctcctgcaaccatgtgggccggggccaggaccaaagccatcgtgctgtcgctgtggatttggtggccgcttcccctgctcagatgttgtactgcaggcctgggccttggcttggggtctctgtgtctccatgttcaggacaggcttgtggctttgggtaccacgaggggccatccagcccagggggcttcagggagctgcccctcaagtgcatgtggggtgctggggtgcagccctgctgcccatggcccggaagtccaggcagcactgctctggttcgaagctgccccaagggtacgggaggcccgtccactagaactgaggcctggcaccatgttgtgtcggttttcatggcgagaaaacatcgtgggcgtctgctggggctggaggaggcgggaggccgaggcagcaaagctgacccgctggcgggtgggggccactgtggcgtccccttcctgcag

SEQ ID NO: 123814 - DNA, 340 bp, Homo sapiens
tttaaagtctctgtttctctattccattttgaaacacagttcactcatcttttcttcagtgtttaatctgccgttaatcccatccagtgttttcttcatctcagacattgtagtttttaatctctagaagtccgtttcggatctttcttagatcttccaggtctctgcttgtcttgtggaacataccaaatacagcgataaataacttttttgagtccttgtctgctaattctagcatctgtatgattattttctacttctaaagtgaggcctctcctagtcctctacccaagaccgtgaattgtgagtattttcggtctggctggtaaggacaggcact

SEQ ID NO: 123815 - DNA, 395 bp, Homo sapiens
agacctcactgagtcctcttaacttttcagggccctaaacttccttagctgttgccccaataatctctgaagttccttctaggattaaaattctgatttcaactttctacaagctccttaaactcaacacaatcaaaaccaaattcatcttcattctaaactcctaagagccattctccctcctgacttccctattcttttttttctttaatgtcccattcttccagccacccaaccataaaaaccacagcctcatctctgacttgagacatagaactcaagttctgtatacatagaaacccccacccccgtctctactaaaaatacaaaaattagccaggtgtggtgtcgggcacctgtaatcccagctactcgggaggctgaggcacgagaat

SEQ ID NO: 123816 - DNA, 552 bp, Homo sapiens
cctgtaaagatttatgtgcacctctttgattcaagccttcactttctaccttgtgttaacttatttatgcacatgtcttatctcctccaaccacttataaatcccttgaggacaggattcacgtctcatttacatgctcttagaaatttacagtgcgtacacagtaggcaatccatacatgcccattcagtacacatttactggcagtcttgggaatgaacatcaaattaggtattgatgaaattttggcccgatgataaagaatatcttaggctaaaagtaatgggaaaattaaattgtttgcaggatgtttcagcactactccctacttagctagatttatctcctctttcttctctgtgtgtcagtttgcaaacaagaactgcccttttctctttgaaaaaaaatgaacactaaaggcagagattttcatttggctgtctttgtattcccacaaccaagcatggtacgtggttcaagaaatggctgtttaatcacagcagtaactcccagtaggaaagattctcaaaggaattgttcttttaaaaaaaa

SEQ ID NO: 123817 - DNA, 190 bp, Homo sapiens
tctttccttgctgtctctgtctaccattccacccaagttaaagcgtttttctttcctttccaaatattgcaaattggacacataatgcttaaaagtaatattctagtaaaacaatttattaagacattcttacaggctgggtgcaatggctcctgcctgtaatctcagcactttgggaagccgaggcaaa

SEQ ID NO: 123818 - DNA, 206 bp, Homo sapiens
ggtgtccaagcaaggattactgacatacaaagaaacaggaacatgtgaccggtaatgaggagagtaaacaatgtaaatcaacccagaactcacccagatattagtattagcagaaaaggacattaaaacagttattataactatttcaaatgctcagacgttaactagagatgtgggaaatattaagaagacccaaattgaacttc

SEQ ID NO: 123819 - DNA, 618 bp, Homo sapiens
gtcacataacactcatgtggtgaatagtccagatttgcatgctaactttggtgcttatggtccctgaaacatatggattcctccgaggttctctctttattatccggttgtggttggagctggatcaacaatgcaacctggtttcagccagatagaagatggaggaattgctactctaggacaggagttcagcaagctttttctgtaaagggccagatggttaatatttaagtctttgtaggctacagggtctccattgcagctacttatctcaagcattatactgtgaaagtagtcatggacaagaaaataaataaacatggccatgttccagaaaaactcttttagtttgccaaccttgtggtgtttttttttattttatttatttatttatttatttattttatgagacagggtcttgctttgttacccaggttggagtatagtgatgcaatcatggcttactgcagcctcaacctcgcaggctcaggcagtcctcctgcctcagtctcccaagtagctgggaccgcaggtgggcaccaccacacctggttaatattaagttctgtttttgtggggatggggtctctctgtgttgccagggcggctaaaactccg

SEQ ID NO: 123820 - DNA, 160 bp, Homo sapiens
caatctttcctttctattcccacattaccccaaattatgcccctaattgcaaaaaatattaacactaagccagacaattaaaaagggtattttaacctcaaaattagaatctgaccccataccatacataataccaataaaaggcttggcagcacattct

SEQ ID NO: 123821 - DNA, 492 bp, Homo sapiens
cttacagtcttgcctggtaaaatgtacagaagcatgcatttttgaaacaagtaaaggaagaagacttaggcgctctccactccaaggccacctgcaccttgcctatgtagctttccccagcaacacgaagccagcattggtttcttaagttcccttcttgtctttatcatgtatgtacttagtatctgtattgtgctttgggctatttatttatatcagcatagcactttattgcatctttattgtaaataaccttcctgaacataggggcctccatgtctttgctgggtcctagctccatggtaggcactgatgggggctccaggattattgaagtaaatgagagccccttaaacctacaaggaaccttaatggtcatcagtggtctgaagggtcttcttgacctttcctgcctcccagcttcctcctgtctctgtcaggtcaagactctacctgcctggtaggttctgtacaaaccattgccaggcaatg

SEQ ID NO: 123822 - DNA, 141 bp, Homo sapiens
ctgtttgataataaaatggaacgaacgctgatagatgcaacaacatgaacgaatttcacaagtgttaagtggcaagacagacgcctgtaaagcatgtaaccacaaacaagcattaaatttctttttttttttttttttttt

SEQ ID NO: 123823 - DNA, 744 bp, Homo sapiens
gggtaagcagttctcctaggagtggcaatgttagagatatacttagaatttatagagattactatggctcctacaaaggagaataaggaagtagaaattttccactgccattctgtcctcatttccaattagttattgtaggattgagggaaagcccaaggcctttcttattaggaaatgagcatcctatacaccttttctccttgggtctgtttcctgcaggagacagacagtcctagtctcagtagagcaaacctcagatattcctgtagggttctaggagccttggaatagacaggactttttcttctactctgcagattggttttcaaggataggaatccaagctacccacaaattctctaacattgttgattactttgtaaacttagtttaggaataatttacaaataactcagccaagatttgttgaaagctatttttagttataggatctataactaaaagctacaaatttagttatagatcctataactaatattcaaaataggcaaatctgtagacacagaaagctatttttagttataggatctataactaaaattatagatcctatgtaaagttataggatcttgggttccctatttttagttataggatcatgcagacttctgtgttcctaacccagtaagaaaagcatcctagccactttggaaaatagtctggcagttcctccaaaagttaaaatagagttaccatatgacccagaaattcctgaaatga

SEQ ID NO: 123824 - DNA, 416 bp, Homo sapiens
tccgggggcaccccagggttagaggtaaatggcataggcattgaaatctccaactgctctgactccaggttggtgcacttcaatgccaagtactaaccaaacaataacaggatgccaccaaaaccttggtatggggctgctgcatcctaattaaaaaaaagtaatagatgttattttttagaacagttctaggtttacagaaaaatggagtagatagtacagagagttctcctaggctcccctgtcctccagcacacaatttcccctattagtatgttgtattagtgtggtccattcgttacaattgatgaaccactgttgatacatcattatcaactaaagtccatagtttacattagagttcattctttgagtttcacagattatgggttttggcaattacgtaatgtcctaaa

SEQ ID NO: 123825 - DNA, 206 bp, Homo sapiens
atacagcaacaagagaaaaattatttttgctatcagtttttcctataagtcaacttttggtctactttcgcaatattggaggttccaacaataaaacaaaagcaataaggtacagtaaggacgagttttattctactcagtttgcatgaagttaaatgactgatgacagggccaggcacggcagcttgtgcctattaattccagca

SEQ ID NO: 123826 - DNA, 122 bp, Homo sapiens
ttatacctaactggggaaaaaagattggaaataaataaataaaatcaccattatttgtaaatgagcctggaggtgacttcccagacaactgtccaattctgtggttaccaaacaaaaggggt

SEQ ID NO: 123827 - DNA, 417 bp, Homo sapiens
agttcattgtgtactgaattccctccaaacctatccaggcagaagccatcttctggtgaataatagcagaaaatgccatctgtttcccttctattcattataaatccttaatgccaccttaggcatgagactagtgcctgtgaataagtaaactgtgtgtttgtaatactctgtttttagttctttcattaattgaggaaaaggtataagcatttcacattctgaattcatatgtttattacttagtaccgtgaccataattaaggaaaggccctgtctctacctctaaagactgtgcttttaacttgggaacttcagggaatacaatgaagagctgggttctggcagctgtacgccaagtgtgtgagtgtgcacatgtgcatatgtgccagcttttgtaagtgattgttccccgct

SEQ ID NO: 123828 - DNA, 159 bp, Homo sapiens
tcggcccgtatccctgaagtcccaactctaaagactgtgcttttaacttgggaacttcagggaatacaatgaagagctgggttctggcagctgtacgccaagtgtgtgagtgtgcacatgtgcatatgtgccagcttttgtaagtgattgttccccgct

SEQ ID NO: 123829 - DNA, 291 bp, Homo sapiens
aatccttcttatatggtgctgacaaaatcaggctggacctacatttttacatcatagatttccagccattattatcatatccacatctttagtaagtacctatctgtgtagttttctgtgataaatgaactaaactaaaactaaagcaaaaatgttgaaaaaaaaattccgggtgtatctctgagtgttgggattgtaagattttattttttttttctcattttaaatactttctaaattttctgcaaagagaaccatataatctacgcgggaatggaatgggggtaccga

SEQ ID NO: 123830 - DNA, 317 bp, Homo sapiens
tccctatcttgctcaaactgctctcttgcaaatatcctaaactcccatatccctttacttcgttaaactcacttggcaagatcccaatttttatttacccaactagccactttctctatgcacatacaggatcctgaattactggtggaaaagtcacatcacttgactgttgggaaccactacataaactcatgggtactaacctcaacagggccctcaacctattctggaaaccttacatttctccaggcaaacttcctctcccagtcttcagagctattctttcaaacggttctctttccttcagcttccaaccc

SEQ ID NO: 123831 - DNA, 207 bp, Homo sapiens
ctctcctattgttggagttttagttccttcctcctcagcaaatttttgttactgtgaacagtacatatatggacattctcttccatgtttccttgtgtgcatgtgcaagaatttcccttggatatagacctaagaatggaatcagtggcttatgagatattcctaaacttgtttactctatctttccattttaacaggaaagttctt

SEQ ID NO: 123832 - DNA, 250 bp, Homo sapiens
tctggcttgcgattcttttgctaggtaagaataaagttagggaaaggcataaattagctgtgtttgtaagaatgaaaaacatgctgaatgtggagaagatggaatgtcattaggatgagaaggaaaggcagcatgttagtcatgaaacttatatatgatatgtttatgtttattatgcacataataactgtattcaaaaagacttccaggggtttgacattcctacttgatcttggtggataactctgta

SEQ ID NO: 123833 - DNA, 141 bp, Homo sapiens
tgctgggattatagacgtgagccactacacctggtcactacctaggaatttttgatttgcagttgacttgctgtgggttacgcttaggaattttgattctgctgtttctctttgtattttgcagtcagttcccttcctccc

SEQ ID NO: 123834 - DNA, 254 bp, Homo sapiens
tgtcatcataaaacctctacatcctcctcagcctcttctcggatgtccctccactctctcactctgctagaagtcggggtctcccctgaagatgctgtttctcctgcagctctctcaaggggtgtctgtttttgtctcccacaccctgccttctctgaggacctgcagctgacagagctcttctccctacttttccagaatattcctcccctctccttccgtaacaacccagcctctccaagagcatgcttagg

SEQ ID NO: 123835 - DNA, 223 bp, Homo sapiens
tgctgggattacaggcatgaaccaccgcacctggcctcttgtatggaattcttaaggtgcacctttttcctctttttctcttccacctcaagctaagacaaagaccaggaaatatatcttctgtgatcaatattttggtttgtttatttttttaaacctttatctactacagatttcaccccattaggaaaaaagacataactgaattgaacccatgggacaa

SEQ ID NO: 123836 - DNA, 477 bp, Homo sapiens
atgcctgctggagtcctgggttcactctgatatggagtctgtgtccaaacctggaccaggcactgtggctgggtgcatttggtgcccttattggccaagcctgggttacagggcacagagatggcagctggggagagatggttccccaaagacctgttgttaatgataaagatgtcttgtattgagctgggcatggtgatgcacgcctgtagtccccactgcttaggaagctgaggtggaaggattgcttgaacccaagagttcaagtacagcctgggcaacataaaaaaaaagtgataggccaggcgcagcagctcacgtctgtaattccagcactttaggaggccgaggtggacagatcacctgaggtcaggagttcaagatcagcctggtcaccatggtgaaagcctgtctctgataaagatacaaaaattagctgggcgtggtgatgtgcgcctgtagttccagctactcagg

SEQ ID NO: 123837 - DNA, 649 bp, Homo sapiens
cagcatccagtgtgcagcctccacaggtggaggaagaactaaaatccttttatttcatagctcggaggtgggtaccatggggcaagttctcaggtctgcttgcccactgcctggaaacagactcagtgctgttggtggggggcacagtgtgagtgagaccggccctttggattgtgtggaagctgggtaaggcctgtgattgctggctttcccccacttccctgacaacctgcgtgactcagcagaggcagccataattctcctaagtacacaactccattgacctgggaacctcacccctatcccccacagcagctgcaccaaggcccacccaaggaaagtctgagctcagacacaccaaaccctgcccctacctgatggtccttccctatccaccctggtagttgaagacaaagggcatactctcttgggagttctaggccccccgcccaccgtctgatcctccctatactaccacagctgatgctctctggaaagcgccacctcctggcaggacaaccagcacaaaaataaagcattaaaccatcaaagctaagaaccctcacagagtccatttcacccactgccacctccactggaataggtgctggtatccatggctgagagacccacagacggttcacatcac

SEQ ID NO: 123838 - DNA, 257 bp, Homo sapiens
gccacccaaaaccactagcactttctggaacatggcaggccttctttggctttctgctgtgtacttctgttccttccaccctagccccacccatcctctccccatccaagagcaaacagctctgaacagtctggagtagctggagacactcctcatcttggcactctccttgccacttgccatctagcagagctggatgcttcccttgagcgctctctgctcctcccccaggtatctaggctgcctcccatctcccc

SEQ ID NO: 123839 - DNA, 504 bp, Homo sapiens
tgtttcatcaagactgctggtggcctctgcctaaacctccagttgggccagtggaccaagccctccacaacctgcccctctacctttgggagcctttaaacctttcctcttaagctccctgcagaaccattccctctgtcccttcaatgtaggaggagacctcagctaacatctaacccagagctcactctgatgcagacccctgcacgccaggaccggcacatagcttgtgggcctcaaatgataatgcaagcccttgtttcaaaattattaagaatttaaaggtgttgacagcagagagtgaaaccccaggctaagataccagccccaaggagctggtcctgccgtctgctcccactacccacctcggccatggccctgaggtggcagctatttcctgggctgtgtttctaatagtaatgcattgcagcaagagagcacataatcttctcctcaaagcatgttctgcttctcaaaagcaaataaatatgtattaaatcaata

SEQ ID NO: 123840 - DNA, 563 bp, Homo sapiens
gaagaaagaagagcaagcagtggcgggggcagcagagggcagagaaacagatgagtgcagctttaccaatgccaaggttggcaggggcacaacagtatgtcagatgctgcagaatgggtggtctgggggaatgagacccgagagggctccactgaatttgatgattattgagccttaggggcactgcagacactcattttcttttcttttcttttttttttttttgagacggagtctcgtgctgtcgcccaggccggagtacagtggtgcgatctcagctcactgcaacctccacctcccgggttcaagcgattcttctgcctcagcctcccgagtagctgggattataggcacacaccactgcacctggctaattttttgtatttctagtaaagacggggtttcaccatgttggccaggctggtattgaactcttgacttcaggtaatccgcctgcctcggcctcccaagtgctaggattataggcatgagccaccacgcccggcccagacacttattttcaaagttgcagaaggggtcaaagccaaaatgcgtggaagaaa

SEQ ID NO: 123841 - DNA, 341 bp, Homo sapiens
  misc_feature (14)..(14): n is a, c, g, or t
  misc_feature (17)..(17): n is a, c, g, or t
actactaaattcgnggncgcgtcgacagaggcgggaagagatgcaggaaggcgggagagataagcgaggcaagaaagttggacagagaagaagacggcaaggcaggaagagggagacagagaccccaaggccaccaagagacacgcgcacataaaggatggggaaacaattgagattgagggaggcaggcagagcggagcgaaaacaggaggacagaaatagcgaagcaaggccaagatcgggacccccaccagggaggtgcccagtacaggcatgaaagtaaggcggggaaagcaagagtggaaaggaacgtcgacgcggccgcgaatttagtagtagta

SEQ ID NO: 123842 - DNA, 758 bp, Homo sapiens
tcccacctctgccccacctgtagccacatgaaaagagtggttctggaagtccctggtgtaactttggtgtagcacatgggctgtgggctctgtgtgcacactcgagacccagcgcaagtcaccactgccatggagtcacctgtggacccaggggctgggctagtcagagcagtagatgggatgaggatctgggggccttgagtggaggggcagctctcagtgagaagagggtgcctttggctgcatctgcccctggaagggagccaggaaccaacccctctacagtggagatgctgatgggtggcctcgtcctggagaaggggccaggatggaaaggacggacctccaggaacagccagcgccctggcttcctgacaggcagctcccaggtggggagaagggcttgtttgacacaggtgtgaggtttgcagatacagggtgatgaggtggggccagtattcagaatgcagaacctgaccctccaccatcacggaccatccgtttgtgagcagcacatgcagctgtggggccgtgttggagcacagggtgggtgtgagtgagcgtgtgagactgtgcgtgagtgtgagtgtgagaatgagtgtgagactgtgtgaggctgtctgtgagtgtacaagactgagactgaatgtgagtgtgacaatgtgtgtatcatgaaaaacactgtgagagactgcacgtgtgtgagtgccagtgagtatagtgtaagtatatgagaaagtgtgagagcatgagtgtgt

SEQ ID NO: 123843 - DNA, 559 bp, Homo sapiens
  misc_feature (417)..(417): n is a, c, g, or t
  misc_feature (517)..(517): n is a, c, g, or t
atgggggtagaactgtttcagcaagattttgtgagaatcactgcacaacgggctgcaacatgacaggcttgcaacaccctaagcgctttgagtagaggctgcatgagtgtggaggagagactcagcctcccccaggaaggtgacaatagagaagtgccttgaaggaggtttgggagacagagaaatccagtaagaacatgccatgaggagagcacagcacatgctaagtcaagggcttccaacagggctcatgagtgccaacgattcactgccccaacaccagaggtacaagggttgcctcagattcaagtccatctaatccattcaccatttgcctatcagaactatttagtaaaataaaatctgatcatgtgcctgtttctccagtccctgcttaaaagccttgaaggaggtttngggagacagagaaatccagttaaggaacatgccatgagggagagcacagcacatgctaagttcaaggggctttcaacagggctcattgagtgcccaacgntttcactgccccaacaccagaggtaccaagggtttgcttttt

SEQ ID NO: 123844 - DNA, 537 bp, Homo sapiens
ttttattatttattttctgtagagatgaggtctctctatgttgctcaggctggtgtcgaatcctggcctcaagcaatcctcctgacttggcttcacaaagcgatgggattacaggcatgcaccaccacacctggccttagagtgatttttcttaagtgcaaattcgtgctcttttttctaaggcctcagcttggaatgtcctcttgtattacccacctctcttctttcaggactcatctcttaggaaccttccctgtccaaggcagctgagtacccttcagtatactcatcctaccctctccctctcctgttgtggcagttagtaccatgttttgtaactacctgtttatttgggtctccccaactagactgaaaaaggcgcttgaaggcagggctgtttccgtccttgtgtcctgagtgctgagcacaatactgagtacagtttgtgacctatagaatttgtggagggaaggcattttggatggaggctgttggttaagtgacctgcaaaactgctccagtatcatgccaggatca

SEQ ID NO: 123845 - DNA, 419 bp, Homo sapiens
agtcataatgggttaagggcccaacctactccagtatgacttcattgtaatttacatcttaattaaatctacaaagactccatttccaaatagggccacaatcagaggtaccaggggttaagatttcaacagatcttctggtgagaaaaattaaatctataacacacaaatggtagtcaagatatggaattaacctgtgcatccatcaatggatgaatgaatggacaaagaaaatgtgtgtatgtatacacattgtatacatacacaacagaatattattcaaccttaaaaagaaggaaatggccgggcacgatggctcacgcttgtaaacccaacactttgggaggccatggtgggtggactgcttatgcccaggagttcaagaccaactgggcaacatggcaaaacctcaactctac

SEQ ID NO: 123846 - DNA, 267 bp, Homo sapiens
tctaagggtttcacaggtttagctcttacatttaggtctttgacccttttaattttgtatatgacataaggcaggggatctaacttcattctttcgcatgtggacatcaaatggtcccaataccatttgttgaaaagactactactgtttccaccaatgaatggtcttggtacccactgaaaatcaattgatcataataagcatgagggtttatttctgaactctcaacaatattccattgatcaatatgtctatcctcaggccagc

SEQ ID NO: 123847 - DNA, 831 bp, Homo sapiens
gtaaggagcagttttctttgattggtatattcaggtttctaaccagctgaaaaattcaaatacatgtcctttaaggattaagtttaaaccacactacagaaaggagagaaaagacttatatgatcatatgtaagcaatggaatcagcaatatgagcacttttcacaactatacaaatcaaatttaataatctccagaacattaaggaagttcagcccttaatgaaaatgaatgaaaagaaattattcgcccactgtcatatgccctggaaagagaatgtcctgccggactcaaaagggtatcacaatattactcagattttcagcaacgaaggccctctgaggatttaatgatgttaatattttcagtttatttccttcactgataaacattgttaatagataccattgcctctgttttcaccttaagtgatgttacttagcacaattcgtttctttagaatgccccctagtttggtggaaggaattttcttgctttattaatataggatattttctcatgaagcaaactggcatactctttcagtgaagtgaatagacaaattaggtctctaaaattttaaaggagtcactgccccaattatcttaggaacaataataatcacttatataaaattaaaataagaaaattaagccaggtatggtggctcatatctgcaatcccagcactttaggaggctgaggagggaggatcaattgaggttaggagttggataccagcctggcaatatagtgaaacccctgtctctacaaatttttaagtattagctaattttttaaagttggccaggcatgataatgcatgactgtaa

SEQ ID NO: 123848 - DNA, 272 bp, Homo sapiens
ggagggacaaaggctgagaaggggctgctgatcgggcagctcctgggataggacatgggtgttaagtcaaatctatcctaaaatgcctatctgatgccagtggtgctaacatcctaattttgtacatcttcaagttttcgattctatggtgcacagcactgtgtcctcgtgggaggcaggaacagccctcccactctatatagcaaacagcccattcccaaatccctagtggcacagatgacttgagagagagattatgcctgcctgggcta

SEQ ID NO: 123849 - DNA, 300 bp, Homo sapiens
atatccagagcagtttttctcaggtatggcatgtagaacaccaacaacagaatcttggtgagcaactgacttgcttatgtagtggactcgtggccctcattgaggtttatgcttaattattttatcctgataaacaaatagaaatatcctcatgattcttactctaacacacacaagtgatgcttactcattaggctttactagtggagacagtactacctgaaataaagtagtacctaaagtattccagttacttgagataaaaaaagcagaaagcattatattttttctggaccatct

SEQ ID NO: 123850 - DNA, 186 bp, Homo sapiens
tggaggtaagcctatggacaacactggaaatgtgcttgggtgtatcaattcctccacaccaactgtcagctggtctgcaggagggaaggcattaccacccaggaggagtattcacagaaagaataaacacaaataaaggaagtaagacaaaacaggcatgaaatcggagatgaaagaatgctgaca

SEQ ID NO: 123851 - DNA, 134 bp, Homo sapiens
tttcacagggtaatcggtgtcatgatcccagcctcacctaccttctgtgtgaccctgggcaaggtatttctctcctctcggactcaattacctcctcttaatattgctaatttggtaagtaaagtaaagatgat

SEQ ID NO: 123852 - DNA, 366 bp, Homo sapiens
gcagacccgagattggatttcctcttctgactttgcaagtgtggctttgctttaataatagccctcctctttttctgtattcctcttttctccttccagtgtggcaaatatgcatcaatcaaaatacaataacctgtggaaccattttttctaaaataggaaggtggtgccatgggctattgattgttgagggtagtctttagagcctgtcttataaatctataataattccccccaaattaatgtgctagttagaaccctagaattgcagcactgaaagtgaattttagaatcttttccaactttttaccaagctcagaaagcccttttattggacctttgtttgcctcatggtcatctggtttc

SEQ ID NO: 123853 - DNA, 411 bp, Homo sapiens
tcaatataaatatgctcagtagtggggggaggggtggggggtgaaaaaggaaatatgtttaatattaagactttggccttttagtgtaaactgatattcaaaaatttcttcatagaacatttgcttctttgcttgatcatttttctaattctgtacatctaaaatgcccagaatttgagttgctgttatagtctactaacatagaactttggagtaataagatgggaatttgtctctcttttgccaagacaagcattcgtaatctaacacagtattgttgccacgagtacgagtatgtgatagactgttgagaataaagaaagcaggcacagttggtcagtcctaagataaaggagatgtttttcttatatgtttgtgcattaaagaaaaaaaaatcttgaatctgaccaa

SEQ ID NO: 123854 - DNA, 550 bp, Homo sapiens
tagggtctctccacatggacgtgcatgaaactggagtcctcgcgcccaccagcccagagtgctctctagaggaaggttacagacccttcctggctcactcatccagacgttagctgtcttgctgaaactccttttttcacccttgaaaaccactggaagaatggccaagaacccagctatcctgagtaagttcacttaaagaagcaaaatctaacatgagtagcaaaatggacattggcaccaggagtgtgggtcagagtcctgccccttggaactacatcatcgcttgtacagtgtaccccccaggcaccaagagaccaggctgagacccttcagttgccctgggcctctggtcagtgtcttccagcctggcacacaggcaggccctcataaaacaatgagtgctgaaagttccagccttcttggtgggttctcagcaccccgtcgtgagccacaccctgccccagggaaatcagggtcgccctgctgctacccctaggccagtgccccttctgaagtgccccaggctggcacccctatacttagatct

SEQ ID NO: 123855 - DNA, 426 bp, Homo sapiens
gttctaattatttatgcataattagctctcgtctgtgcgtttttcccttagtatctagaactggactcttcacacaaggaactgtacaacttgtcaagtctaagcatggttatggatataatgaacttggaccatccttaaatgtcatttcgttggtatttgaacaaacaaaaataattgtatgacgggctgccggaggagggaggcaactttaaacttgggaaaatataagtttgacatggagagatttttaataatgtgtttagctcatttgatattgagtaaaatagtcctgtgaacatttgcaatttaacctgttttgtattaagtagagttgcttacataaaggtgcaggataatttttatctactctttgctataactctttgggggtgctatttttatctgctgcataattaaactggt

SEQ ID NO: 123856 - DNA, 797 bp, Homo sapiens
gattataggtgtgagccaccacatctggccagttttacctgttttaaaactttatgtaaatataataatgcgatatgtattttttcatttttttcagcattacctgtaactgcatgtattcatagttcatcagttttggcttcatagcactgtagaaatataacatgagccatatatgtaattttatactttcattaaaaataaaaagataattttttttttttaagacagagttttgctctttttgcccaggctggagtgcaatggcacggtctcggcttactgcaacctccacctcctgggttcaagtgattctcctgcctcagcctcccaatagctgggattacaggcgcatgccaccacgtctggctaatttttgtatttttagtagagatggggtttcaccatgttggccaggctggtcttgaacccctgacctcaagtgatccacccgccttggcctcccaaagtgctgggattacagacatgagccaccgtgcccagccggactagatacatttcaagtgtatgatagacccaagtggctagtggctgccacattggacagtatagctatggagtattccattgtatggatatattacagttacccattccactgtaggtaattggtacaatcactttggaaaacagtttgatactgtctagtgaagttgaagatataaaaatatgtgatccagaaattctcctggttatataccctagaaaaataagtactgttccgtaccagaatacacattcaaggatgtttatagttaaactgtttacaatacccc

SEQ ID NO: 123857 - DNA, 508 bp, Homo sapiens
cagaaaaatcaccaagtagccaaaaataacacaactgttaattccaagaaaaagagaaagttgcaagaaaggaaatttaactatagtacactacatagctcagctgtgaatagtatccatgaagtcgaaagaaccgcccatgagcggtgcagatgggaacgtagcatgaggcatgggggcaatctacggagccacacttcatctcccatgacaggaagcatgggggccatccaccgagccacacttcatctcccacgacaggaagcatgggggccatcctccgagccacacttcatctcccacgacaggaagcatgggggccatcctctgagccatacttcatctcccacgacaggaagcatgggggccatcctccgagccacacttcatctcccacgacaggaagcatgggggccatccaccgagccacacttcatctcccacaacaggaagcatgggggccatccaccgagccacactttatctcccacaacaggaagtcagtgtg

SEQ ID NO: 123858 - DNA, 426 bp, Homo sapiens
ggccatgtggctcctacattctgttaacagttcctccttgtcatcacccagccctaagcacatacagtacacagtttatggactatctgggatgatgtatttagatcagattgaagagatttcttctgtgttttacctttgtttgtcaagtttgggggtctattcaaagctcccgtatgaaaaattgaaattcaaagtaaatacttaccaatggaccgttagtgccaattgctgtagagtttgaaacactaatataacgactatttggtctatcggagtccacagttccctcccgcttgcctctcctcctgccttccagactgctccagcacaggctttttcagattcctttttatgtcccagcgcctcagcattctccaagtttctagttttgtctttctcttcttttctatgtgccctctagtc

SEQ ID NO: 123859 - DNA, 411 bp, Homo sapiens
tgggttggaggcaaagacactgattatctcttgggggtggcagtcccaccctcaagccagggagaccctttcttcttcttttttttttttagacagagtctcactttgctgtccaggttggagtgcagtggcgcgatcttggctcactgcaacctccatagggaggccctttctgtcgccacctcccccttcccaattcccccaccccaagccagccagctgcaaaaaagtcccctgatggcctctggcatcaaatagaacttagttcttaatctcagcgacttggaaggctgaggcgggtggttgcttgaggccaggagttcaagacaagcctaggcacgaagcgagaccctgtctctaaaaacaagttttaaaattagccaggccaggcgtggtggctcacacctgtaa

SEQ ID NO: 123860 - DNA, 235 bp, Homo sapiens
tattctggacatttcatataagtggaattctgtgtgtgttctgttgtgactggctgctttactcagcatgtaatgtaatcagggtctattcatgttgaagtatgtatcaatacttccttcctttttactgctaaatgatattccatcacatggatattgcacattttatttagtggtttatcgattgatggacccttacgttgctgccccttttgtctgtcacgaatgacgctac

SEQ ID NO: 123861 - DNA, 213 bp, Homo sapiens
ctcaggccagtttttataattttggttttcatccaaactagtcacatttcatacttttaaagtttttaggcttttctgctggagatcatcttcctcacactgtgattcttaaaggttatgtattttttttaccctgatcatacttacgtcttttgacaagagagaagacggacatccagctttgggtctgcagtgatccatcattcaacttcc

SEQ ID NO: 123862 - DNA, 799 bp, Homo sapiens
atataagaaactctgtgtgctggagctaaaccaaagttgatatgtgaaggaaatccttatgtattaggaatccgtgatacagacagtgctcaggaatttcagaaacagcttactaaagctaaaagaataatgatcttagggaacggtggtatcgcacttgagttagtgtatgaaattgaaggctgtgaagtgatttgggccattaaagataaagctatagggaatactttcttcgatgcaggagcagctgaattcttgacttcaaagctcattgctgaaaaatcagaggctaaaattgcatataaaagaaccagatatacaactgaaggaaggaaaaaggaagctagaagcaaatctaaatcagataatgtaggcagtgcgttgggaccagattggcatgaaggcttgaatcttaaaggaacaaaagagttttctcataagattcaccttgaagctatgtgtgaagtaaagaaaatctaccttcaggatgagtttagaattttgaagaaaaagtccttcacttttccaagagaccatacgtcagttacaactaatacagagatgtggcctgtctatgtggaattgaccaatgaaaagatatatggctgcgatttcattgtcagtgctacaggagttacaccgaatatagaaccttttctccatggtaacagttttgatctaggagaagatggtggcctgaaagtggatgatcatatgcacacatcccttcctgatatctatgctgccggtgacatctgtactacatcctggcagctgagcccagtctggcagcagatga

SEQ ID NO: 123863 - DNA, 370 bp, Homo sapiens
ggcatgagaattgcttgaagcgggaggtggaggtttcagtgagccaagatcatgccactgcactccagcctgggctacagagcgaaactccatcacaaaataataataataaaagaaaggtgttagatctatttcggaggtagaatagaacaatctagataactggttagagtgggaaaggagaaaaagagaccgactggccgggcacggtggctcagacctgtaatcccagcactctgggaggctgaggcaggcagattacctagggtcaggagttcgagagcagcctggccaacatggcgaaatcccatctctattaaaaatacaaaaattagctgggcgtggtggtgtgcgcctatgatcccagcta

SEQ ID NO: 123864 - DNA, 4060 bp, Homo sapiens
gattccgggaggcaagtgaggagagaagatgctgtagcgtcctcaccggctgccagcagggaaatggtccaggagtgctgggtgtgagcctcccttctcctcaagccggagactgcggttgtcattgatcaattgaagaagcaaggacccgaaatcacagacattagcaatgatgtgtgaagtgatgcccacgattaatgaggacaccccaatgagccaaagggggtcccaaagcagtggctcggactcagactcccattttgagcagctgatggtgaatatgctagatgaaagggatcgtcttctagacacccttcgggagacccaggaaagcctctcacttgcccagcaaagacttcaggatgtcatctatgaccgagactcactccagagacagctcaattcagccctgccacaggatatcgaatccctaacaggagggctggctggttctaagggggctgatccaccggaatttgctgcactgacaaaagaattaaatgcctgcagggaacaacttctagaaaaggaagaagaaatctctgaacttaaagctgaaagaaacaacacaagactattactggagcatttggagtgccttgtgtcacgacatgaaagatcactaagaatgacggtggtaaaacggcaagcccagtctccctcaggagtatccagtgaagttgaagttctcaaggcactgaaatctttgtttgagcaccacaaggccttggatgaaaaggtaagggagcgactgagggtttctttagaaagagtctctgcactggaagaagaactagctgctgctaatcaggagattgttgccttgcgtgaacaaaatgttcatatacaaagaaaaatggcatcaagcgagggatccacagagtcagaacatcttgaagggatggaacctggacagaaagtccatgagaagcgtttgtccaatggttctatagactcaaccgatgaaactagtcaaatagttgaactacaagaattgcttgaaaagcaaaactatgaaatggcccagatgaaagaacgtttagcagccctttcttcccgagtgggagaggtggaacaggaagcagagacagcaagaaaggatctcattaaaacagaagaaatgaacaccaagtatcaaagggacattagggaggccatggcacaaaaggaagatatggaagaaagaattacaacccttgaaaagcgttacctcagtgctcagagagaatctacctccatacatgacatgaatgataaactagaaaatgagttagcaaataaagaagctatcctacggcagatggaagagaaaaacagacagttacaagaacgtcttgagctagctgaagaaaagttgcagcagaccatgagaaaggctgaaaccttgcctgaagtagaggctgaactggctcagagaattgcagccctaaccaaggctgaagagacacatggaaatattgaagaacgtatgagacatttagagggtcaacttgaagagaagaatcaagaacttcaaagagctaggcaaagagagaaaatgaatgaggagcataacaagagattatcggatacggttgatagacttctgactgaatccaatgaacgcctacaactacacttaaaggaaagaatggctgctctagaagaaaagaatgttttaattcaagaatcagaaactttcagaaagaatcttgaagaatctttacatgataaggaaagcttagcagaagaaattgaaaagctgagatctgaacttgaccaattgaaaatgagaactggctctttaattgaacccacaataccaagaactcatctagacacctcagctgagttgcggtactcagtgggatccctagtggacagccagtctgattacagaacaactaaagtaataagaagaccaaggagaggccgcatgggtgtgcgaagagatgagccaaaggtgaaatctcttggggatcacgagtggaatagaactcaacagattggagtactaagcagccacccttttgaaagtgacactgaaatgtctgatattgatgatgatgacagagaaacaatttttagctcaatggatcttctctctccaagtggtcattccgatgcccagacgctagccatgatgcttcaggaacaattggatgccatcaacaaagaaatcaggctaattcaggaagaaaaagaatctacagagttgcgtgctgaagaaattgaaaatagagtggctagtgtgagcctcgaaggcctgaatttggcaatggtccacccaggtacctccattactgcctctgttacagcttcatcgctggccagttcatctccccccagtggacactcaactccaaagctcacccctcgaagccctgccagggaaatggatcggatgggagtcatgacactgccaagtgatctgaggaaacatcggagaaagattgcagttgtggaagaagatggtcgagaggacaaagcaacaattaaatgtgaaacttctcctcctcctacccctagagccctcagaatgactcacactctcccttcttcctaccacaatgatgctcgaagtagtttatctgtctctcttgagccagaaagcctcgggcttggtagtgccaacagcagccaagactctcttcacaaagcccccaagaagaaaggaatcaagtcttcaataggacgtttgtttggtaaaaaagaaaaagctcgacttgggcagctccgaggctttatggagactgaagctgcagctcaggagtccctggggttaggcaaactcggaactcaagctgagaaggatcgaagactaaagaaaaagcatgaacttcttgaagaagctcggagaaagggattaccttttgcccagtgggatgggccaactgtggtcgcatggctagagctttggttgggaatgcctgcgtggtacgtggcagcctgccgagccaacgtgaagagtggtgccatcatgtctgctttatctgacactgagatccagagagaaattggaatcagcaatccactgcatcgcttaaaacttcgattagcaatccaggagatggtttccctaacaagtccttcagctcctccaacatctcgaactccttcaggcaacgtttgggtgactcatgaagaaatggaaaatcttgcagctccagcaaaaacgaaagaatctgaggaaggaagctgggcccagtgtccggtttttctacagaccctggcttatggagatatgaatcatgagtggattggaaatgaatggcttcccagcttggggttacctcagtacagaagttactttatggaatgcttggtagatgcaagaatgttagatcacctaacaaaaaaagatctccgtgtccatttaaaaatggtggatagtttccatcgaacaagtttacaatatggaattatgtgcttaaagaggttgaattatgacagaaaagaactagaaagaagacgggaagcaagccaacatgaaataaaagacgtgttggtgtggagcaatgaccgagttattcgctggatacaagcaattggacttcgagaatatgcaaataatatacttgagagcggtgtgcatggctcacttatagccctggatgaaaactttgactacagcagcttagctttattattacagattccaacacagaacacccaggcaaggcagattcttgaaagagaatacaataacctcttggccctgggaactgaaaggcgactggatgaaagtgatgacaagaacttcagacgtggatcaacctggagaaggcagtttcctcctcgtgaagtacatggaatcagcatgatgcctgggtcctcagaaacattaccagctggatttaggttaaccacaacctctgggcagtcaagaaaaatgacaacagatgttgcttcatcaagactgcagaggttagacaactccactgttcgcacatactcatgttgaccagccactcaaaggaggcagcactgacctgctatggcgtcttttcagtctactctacctaaagtgcactaccatctaagaagacgagcagtgaaaacctttgtgaaaactgaattc

SEQ ID NO: 123865 - DNA, 376 bp, Homo sapiens
tgactacccctcaggcaaagtttcttgggacagtacctctgttgtgctagagtagaaccctcccttcggtctgagggactcaggaaagcctccccagaggagatggtgcctagactgagtttcaaaggatgaattacattcacccacaaggatatcgaatccctaacaggagggctggctggttctaagggggctgatccaccgtgcttgcccatagaattcaacttacatcagaaaagtagatctactaccttcaaaatacttccctcaactgttcactgattcctggaagaattctacagttagagattagttggtttcaaaggatttgtctcttgttcaaagcaaaataaaatatctgtcttctgctaagtac

SEQ ID NO: 123866 - DNA, 352 bp, Homo sapiens
tactactactaaattcgcggccgcgtcgacctccaatactgaaggatttggctgcaaatgtaatttattaacttgttgccctaagaagcagtgcatagtgttgactatggctaatcacaaaactttctccacctgctaaggtagactcactgtgtttttttttttttaataaaaaaaaaagaacaagtttacaatatggaattatgtgcttaaagaggttgaattatgacagaaaagaactagaaagaagacgggaagcaagccaacatgaaataaaaggtaatatatctttctttcatatgaaatgcctttattctggggtttttagctttcacttttactaacctaaaat

SEQ ID NO: 123867 - DNA, 1815 bp, Homo sapiens
gattccgggaggcaagtgaggagagaagatgctgtagcgtcctcaccggctgccagcagggaaatggtccaggagtgctgggtgtgagcctcccttctcctcaagccggagactgcggttgtcattgatcaattgaagaagcaaggacccgaaatcacagacattagcaatgatgtgtgaagtgatgcccacgattaatgaggacaccccaatgagccaaagggggtcccaaagcagtggctcggactcagactcccattttgagcagctgatggtgaatatgctagatgaaagggatcgtcttctagacacccttcgggagacccaggaaagcctctcacttgcccagcaaagacttcaggatgtcatctatgaccgagactcactccagagacagctcaattcagccctgccacaggatatcgaatccctaacaggagggctggctggttctaagggggctgatccaccggaatttgctgcactgacaaaagaattaaatgcctgcagggaacaacttctagaaaaggaagaagaaatctctgaacttaaagctgaaagaaacaacacaagactattactggagcatttggagtgccttgtgtcacgacatgaaagatcactaagaatgacggtggtaaaacggcaagcccagtctccctcaggagtatccagtgaagttgaagttctcaaggcactgaaatctttgtttgagcaccacaaggccttggatgaaaaggtaagggagcgactgagggtttctttagaaagagtctctgcactggaagaagaactagctgctgctaatcaggagattgttgccttgcgtgaacaaaatgttcatatacaaagaaaaatggcatcaagcgagggatccacagagtcagaacatcttgaagggatggaacctggacagaaagtccatgagaagcgtttgtccaatggttctatagactcaaccgatgaaactagtcaaatagttgaactacaagaattgcttgaaaagcaaaactatgaaatggcccagatgaaagaacgtttagcagccctttcttcccgagtgggagaggtggaacaggaagcagagacagcaagaaaggatctcattaaaacagaagaaatgaacaccaagtatcaaagggacattagggaggccatggcacaaaaggaagatatggaagaaagaattacaacccttgaaaagcgttacctcagtgctcagagagaatctacctccatacatgacatgaatgataaactagaaaatgagttagcaaataaagaagctatcctacggcagatggaagagaaaaacagacagttacaagaacgtcttgagctagctgaagaaaagttgcagcagaccatgagaaaggctgaaaccttgcctgaagtagaggctgaactggctcagagaattgcagccctaaccaaggctgaagagacacatggaaatattgaagaacgtatgagacatttagagggtcaacttgaagagaagaatcaagaacttcaaagagctaggcaaagagagaaaatgaatgaggagcataacaagagattatcggatacggttgatagacttctgactgaatccaatgaacgcctacaactacacttaaaggaaagaatggctgctctagaagaaaagaatgttttaattcaagaatcagaaactttcagaaagaatcttgaagaatctttacatgataaggtataatggaaacttatgttttgggcccattttctatttttattttctattccactgatgaatgttttgttgtaaaataaatttgaaaaaataattttagt

SEQ ID NO: 123868 - DNA, 706 bp, Homo sapiens
tgcactaaactgttcctcttggtaccatggaaaagctccaagcacccaagacatggaggcagccatggcttctttctctgccagaccacgtagcactggctggttctgtatttgagaatgtagaggtcaaggcagatgtcggtaagtttgaccaaatatcttttctctttttgactctccctttctgctaacatgtggatcagctcctgccctcataccgcagacacacccactctgaacacacccctccagagcttgcccacaccttcccaactagactctgtgtgtgtattcaggaaaaatgaaaataaatttttaaaaattgggagtggaatgggcagattagggggaacaaagtcattttggtcatggaacatccatttgcttaaccaaggagacttgcttctatctgaggaatttcccacttagtagaaagaaacactcttccctgggaatgtttgtttctgtctctctcaatgctactctctttcatattctcatttgctcaccctttcacttagagccaccgttttctcatcccattctatgaacttatttccaaattctcctaactattcctgagttttgaagtatttgttttgtaccctctctgcttccggttttttgtttggttggcttttttggagatagggtcttgtggatgttgcccacactggtctcgagccccggggctcaagtgatcctc

SEQ ID NO: 123869 - DNA, 186 bp, Homo sapiens
gtcagtaatgagcccttttcagacaagtgcttcaaagggccaataaaataaacactaaatatcagtctttattagatatcaatattcaaagacataaattttattaaaaatatagtcattcaggtctgttgaattaaaatctgtgtaaatttagaaacctcacaaaaagcaaatctatctttctac

SEQ ID NO: 123870 - DNA, 429 bp, Homo sapiens
gagctcggtaccgacgctctctctgtggggtttgaggaagcacaaactcacccactgctgataaattcattacaaaagatccactgagaaagtatggaaggtaggtgaagaatgtgcagacgctctctctgccgggtgatttagcacaaaaatacaattgatagtgaaggtataaagtgtaatcatcaggtaaacctctcctctctcatagcgtccctgcttcaggactgcaatggaaaaggaaattcttactgtgtagaatttcattaagatggctgggtagatgtttgtgtggcacccttgaactagccgttatgattttattctttgttgagttaattagaataaagtgattttcctcaaaaaacaaacaaacaaatatgtgcccttgtcagactgttccatcgtgatacccccacgataaaccat

SEQ ID NO: 123871 - DNA, 446 bp, Homo sapiens
tcttggagcccactttctgttcttgtcagccaattccctttcaggtgctcaggtttccctccctcctgtcaccgggcctttgcacatgctctacccaccctgcctagtggagagctatctttggcccctggacttcattcacttcggaccttctttgggtcacatttcagtcatgcctcactagacacctggaatctctgcctcactagacacactagcactcactcttttgggtcttctggctgtatgtaattgttatcagggcagtaattttgcatttatacaggtgctgaggtcagtgtctggcctttggctacttgccttgtgagccacctttgctttccagtgtacccctagctcctggcccagtgtccagcttcccagcatccattcatgttttccctggagaccattctgtgcccagcagccagagacatcattgcaac

SEQ ID NO: 123872 - DNA, 407 bp, Homo sapiens
ttctaccctagtattggcttcagtggcaggattccgctcctggccttctgctctggtaagctgtgcttcactgtattaccctgctctctaattctgggggcagtggtttgcccatgacatcaattgtctgatggatccaaaaagaattgttgattttccgtttgttcagttttttttcttgtgaggatgagagtgacgacttctgggctcctttcatgccaaactaaactggttcaggagttgggcagagacatcctgagtttttatacccagggttctttttaagggttttaagggttccacttatctgttatctttcctttcagttcctcctcttgtacaccttatcttctggtggccctggttcctctggccaggaagaggactgatttttgtcttaaatcaga

SEQ ID NO: 123873 - DNA, 429 bp, Homo sapiens
tggtagctttgagccaccatggaagaactctgatgactctaaattggccaagttagagagattacatgcaggctctctgggacgtggtccccgtcaggtccagccttctagttgtctctgcgactctgccaaagtgccagacaatgaacggagctgttgtggattccctcgacttgcccagctgtcagttggacatctcagtcaacaccacatggaacagaagagttgcgcagctgagccctgtccaagtttctgacccacagaatgtgagataaagaaaacggtggtggccaggcgtggtggctcatgcctgtaattccagctctcagggaggcagaggcaggaggatagcttgagcccaggagttcgagatctgcctgggcaatatagcgagacctcgttctccacaaaaaggaaaaaaaaaagacc

SEQ ID NO: 123874 - DNA, 759 bp, Homo sapiens
gtgctaaatctacctttttcattttccttctttctctgtgttacctgaccagagggtcttgaaattagcaataattactctccactgatagggaatacatttacatctgatataagatgtaaatacaatacatccgatataagattgataggttatcaagtaattgtgttgatcataataccttattttattgctcagtatattagggtatatattgggcttttgtatcaaagagtctccccaaatctagttgttcaaataaggtgaaagtttctttctctcttacaaaacccaccaaagagttttctagagaagaagtgtagctcaattgccataattaagcttaccagataaaatacaggatgatgcccagttacatttgcaaataaataattcttttttttagcataactatatcccatatatcccatataatatttgtgactagtacaagtgtgtctcatgcaatatttgtggttggtataaccatgtcctatgtgatatttgagacatactttatcctaaaaaatagttgtttatctgcaattcaaatttaactgagtgtcatttatatttacttgttaaatctggcaaccctagttataaggccatccatgtttccaggtttattcacatggttagagttagaccaccaccactatgtcctcacctcaactcgggagaagagggaagacgaggcaagcaaattccatttaaagatgagacatgggccaggcgtggaggctcactccgtaatcc

SEQ ID NO: 123875 - DNA, 320 bp, Homo sapiens
cacaaaacactgacagtagccagagctgttatgagcaaaaagaaccaaactggaagaatcacattacctgacttcctttagcatttcttgtagaacacgtctggtgtggataaaatcactcagcttttgtttgtctgggaaagttgttatttctctctcctttgtgtttgaagaatattttcaccagatatagtattctagggtaaaaggatttttaccatcaacactttaaatatatcatgccactctcccctggcctgcaaggtttcaactgaaaagtgtcctgccagaagtattggagctccatcgtatattatttg

SEQ ID NO: 123876 - DNA, 534 bp, Homo sapiens
catatagaattgtaccaaacaaggtaacatacctaaaacacttagcaccagcataaaatgctcaataaacatgaatgattattatgtcgcacttttgtttctttacagtgactgaagagcatcttgcctaggtgacagacctgaatgtgatttccagctccttctagttaggcgggcctaggttagttactgaacctcagtttcctcattcccagcaagaatgacgacacatataacgcatattcagtatctaatgcagtatccggcacccagtgactgctcagtacataggaggccagctccccttcccatagcttctacttttcccctcaaagttaccggttctgggcaggtagttggcctgcaacttggcaaattgggtggaaacagaccccggggtgagaatttccccaatttgcattcgcatccatctcccaatgctccagcctctactaggacgtctcgcagggactgtggcctcctagggagccgggtcagttcaactgctccaatagtttaaatgcgtgaccagcc

SEQ ID NO: 123877 - DNA, 881 bp, Homo sapiens
gatcgaaatttttattgcagcaaaatggacataacataaaacttaccgtcttcaccatttttaagtgcccagtttagcaacattagatatattcacgctgtgtagtcgtcaccaccatccatctccagatgtccttgtcttcccaaactgcaacttggtacccatgaaacaattactcctattccttcctccccaggctcctggtagccggcatcttacttagaatcacagagtatttatctttgtgcaactggcttttttcacttcgcgcaatatactgaatttatctttttgccactggcttttttcacttagcgtaatatactcttactcagcgtaattcacgcatgttgtagcgtgcgtcagaacttccttcctttttcaggctgtgcgttattccactgcttgcacgtactccgtgctgtttatccattcatccgtcaatgcacgtttgccttgcttccaccccttggctgttgtgaataaagctcttaggaacatgggtgtgcaaatatgtttgagtccctgccttccattcatttgggtatctatgcagaagtggaattgatggatgggacttgtgcttttcttcctgggcaaaccctcagtggagagaagcctgaagggttggttgcctgtgtcatcctctgggggcatagtccaggggtgaccgtgttccatcaaacctgtgtccatgactgtgggagccatggttttgatatcacatcctgccagggaatttgagtgcctctctgctggcttcccccagcccctagtaggcctctgcccaggggacacgggcatgggtggaagtggaggcagcggcagcattcacggagcccgttggccccttcggcgtgcactttatgaagagcgtgcct

SEQ ID NO: 123878 - DNA, 335 bp, Homo sapiens
ctggggtggggtgctcctggtgtgataatgattgtctgccttcagcccagagacagacacctctaattggaagattctgaggagggatggatctagaaggggtctgggtgagggggtggatactttggcctggcaagagaagaatagggttagaagggatcaagctactgcctccacataaggaatgggggaagatgagccagagtccagtgccctggggccacctcagatccagatgccttgagggactaagataggctgtctctccaccctgtacttatctccagacccactggacctggcccctgcctcctaagcctggacaactctgggct

SEQ ID NO: 123879 - DNA, 617 bp, Homo sapiens
gcaaaacaaacagattacaaaccagaaaaatatacttgaactttatgttatgtattaaggattaacttccctaatacaaaaagaactcctatgaaccaataaggaaaagaacaggaactctgtaagaaaatgattgaaagacataaacaatttgtataaaagaaaatagtggtgccgggcatggtggctcaagcctgtaatcccagcactttgggaggccgaggctgatctcgaactcctgacctcaggtgatcctcccacctcagtctcctttcaaagtgctgggattacaggtgtgagccgccacgcctggcccaagaacctgaatttctgacaggtaacaaataccattttctttttaaaaaagttattcctttttaatcttgttagactgaaatggcttgtctgtcaatatattttcaaagggtagtccattcttgtaaaggacataatgtgcctactgttcaatttttttttttgagatggagtctcactctgttgcccaggctggagtgcagtggtggtatctcagctcactgcaacctctgcctccattcaaacgattctcctgcctcagcctcccgagtagctgggattacaggcgtgtgtcaccatgc

SEQ ID NO: 123880 - DNA, 781 bp, Homo sapiens
gtggatgttcttttagataaattctctggaagcgatttgcaatttgagtcatattttctacatgccaggagcaccagctattttaaaacatttgtatgctcaagatcataatgagccaaacagatttccccgatgtcctgtttgttcaggctctatagaggaaggtgcttcttaaggtgaggcacacctgtattatgtccagtaccagaagtgtgcctggttcctcattcatcaccgaagaggccacttggtggcacccacagaaaattctgatacaacttgaaagcccttctagaaattttacacagatgaaattttacaaaggtattgttcactgagtttctttcacacttaatttctttgcatatgaaatagttatttaaagcatattttaataacttgcagtttaaagacaatctataaagaataaactttaaaggataaaatatgtctggttattgagaggtacataaaaggtgaaattacattttagcaattatctttttactcaagagttttttttttttttcctggtatctactaactagtattaaagatgttttgctaaacttattttaagtaattctgtattgttaagaaaccatagaacacaattcaccattaatggccaaagacagtttttgtttccttccgtctttgctgttttggttcaatactaaagctattttcaggtgaggaaacaagcttacataggaaagccacagagtaaatacaggggaaaacaaagactcacaccctcatctgtttcactttaaaacca

SEQ ID NO: 123881 - DNA, 158 bp, Homo sapiens
gcctgacagctcagcggcatttgttcctgttgacatgccacctttcaagacctctttcatcgacctatttctgcaacctccctcccttctgacctccaggttgctacatagaagtgtccatttgacatttccatggcattccacaggtaccatgacac

SEQ ID NO: 123882 - DNA, 160 bp, Homo sapiens
tttagcacttttgttcccgtatgaaaacatccacattaataatacttgcattaatggtttcttactagattgatccttggtgaagctaaaaaaaaaaagccttttcatttattatggtaggtacaaagactgtgcaaataaaaatttagtatcttcttta

SEQ ID NO: 123883 - DNA, 410 bp, Homo sapiens
ctagggggactgttaatggctttctgactttctgtattgttctctcagggattcgtaagtcctttggatagtgagagtagcctgggggcaaaagactgttttcttgtctaaatcagtcaaccaagatgtattcattgtttgaggatcaaataggtgctcagcatgatgctgcaagaggtacagagaggtccctgccctcatatggtttgcagtctagttggaaacacatttagagaatggtgtgtttcatgaaccatgtgatttagctgaaagagtctagggaaggaagaaatcattatggtttgggattttcagagcagatatcatatgttggtgctggaaggcagagaactgaccttgaactagcccttgaaggtttgctagggttgttacatagggagaaggggtaa

SEQ ID NO: 123884 - DNA, 300 bp, Homo sapiens
ctcctctctccccacccttggcaaacatttgtcaccaggatggatgctgttagaaaaacgtctccctgtgacatgttgtcttttcaaaaggacaagaaggaaaggaggaaacaggttttcattgcttaaggcacattaaaactggctggttctctctagcacatttcttagacaaacacccgttttcctttagactcagagctgatatgttattgtaacagttaagtttgcctttacatttttattcatgctgccttgcaggtagatggttccttttgacttttttacgtagatgggcac

SEQ ID NO: 123885 - DNA, 152 bp, Homo sapiens
ctatcagagctgggactaagtgtccactgaagaaatcttgattcaccggagagaagttgtttccttggattccatcatctctgctctagctaccagccaggtctccacaaccttcccagaatccttcattccagcaccagttcatgttcttt

SEQ ID NO: 123886 - DNA, 109 bp, Homo sapiens
atttgtgtttctctcacaattaatgatgttgagcatttttttatatgccccttgggccatttatgtgtcttcttttgagaaatgtgtgttgagatcttttgcccatttt

SEQ ID NO: 123887 - DNA, 324 bp, Homo sapiens
ggctctggtggcaatttaaactgtagatgaggtgacttggaccaaagagcagcagtagagacaaggaaagtggtcagaaatcaagattcaaggcctggtgtggtggctcacgcctgtaatcccagcactctgggatgccaaggcaggtggatcatctgaggtcaggagtttgagaccagcctggccaacatggtgaaaatccatctctactaaaaatacaaaaaattagccgggcatggtggtggatgcctgtaatcccagctactcgggaggctgaggcaggagaattgcttgaacccaggaggcagaggttgcagtgagccg

SEQ ID NO: 123888 - DNA, 829 bp, Homo sapiens
  misc_feature (763)..(763): n is a, c, g, or t
gaaatcattcaagccaaaagtgcctgccgcataatagatgctcaatgtatgtttcttgagcagatacatgtaacttatggcactttacaagggatttctctcacaaacacattttgatcctccaacaacatttgtcatggtccctgctctcagtctagtaatgtaaaatattactgacccccatcacacattgcaagcagcactcacttcttggaaagctgagctctgcatgcaacatgctgcccaagaaggaaaggaagcagcactggagacctgtgtttcatagctaaccaagataagggcatttttttccaaatgtctgtggagggggtcacaccattttaactatttactgctgtaaccccatttttaaagtgtagtctgtgagccatctgaatcaaagtctcttgcaaaatcccggccaaaatccagacatactgaatcagagggtcaggtcccagaataggcattttgaacaaactcaggttcataaagcttgaaaagttttggggctgttgtgcctgtgttctcttagtctgggacactcttgtcccagattgacaaagggttggttcattcagatctgcttaaatgtctgtcctcagaaaggtctttcctgactactcaatctaatagagtagcctctatcaacttcatccccttatgtgcttgattttcatcaaagtgttacacccgaaaaaaaaaaaaaaaaaaaaaattggggggtggccggaaattttaaacattgtgggggggcaggaanaaaggagggcaggaaggggaggggttccaaaagcgggggggggaaacaggggggttgttaagggaa

SEQ ID NO: 123889 - DNA, 374 bp, Homo sapiens
catataggagtgcaactacccatttacttttaaagcataactacttattttgaatttaatacaagttcttaatttggatgcctcatttttatttggtgaagataacagtcttcctaattcttgctacacttctgattcaacacattagacttcactagtgcaatgttacccgcctactcaaaatacaactgctatatgtgtttaatgttggaaaaagcatttactagattttggaagaacttgaggggtgtgtgttgtgtgtaaataaaaaggtgcacttattgccgccttatcataaccactcacttgaaggcatatattttttttttcactgtagggaaaataaagaagtccactttaagtggacaaacatg

SEQ ID NO: 123890 - DNA, 474 bp, Homo sapiens
tgctgtactaaaatgatctgaaaacccaagctcagcctaacaggatcactgcctgcattcttctgtctgcagcaagccgcaaaggaagttccttaaaaaaaaaaaaggaggctcaggtcatgaggagacaagataggattcttgtgttctgtcttttgacacaatcagaactcagcaatattttgagcctgctcatgcaggctaggtttggcttcagattagtaaagtgtaacagaaaaaggcaccgttatcacatgaggtcccaaagattatgcaacatacaaagaaggtgggacagatggctccggcaaacgccaggctggtagcttctggggaaccaaaggcactggcatcaactttctctaccccaccatcaccaataagtatttctcagctgggctccttcagtgaacttcagtcaatgtataaattgtaaaaataaacaaggattttcttcctttaaatcttttctcc

SEQ ID NO: 123891 - DNA, 221 bp, Homo sapiens
cgactctagacgatcgttaacctgatgcgtgggccaccttatgctgggcacacagtgatggtacagaaaatgctagctattctctgtcctcacagagaaagagatgcagaagctgggaataacaaagctatttttctaaggttgaatcacctcccctgggagctgccagacaggagggcataggaccacctccttccaactccaggtcggggatacttgat

SEQ ID NO: 123892 - DNA, 914 bp, Homo sapiens
gccaggctagagtgcagtggcatgatcttggctcactgcaaactctgacgcccggattcaagcgattcttctgcctcagctactaggtaggctgaggcaggagaatcacttgaacccaggaggcggaggttgcagtgagccgagatcgcaccactgcactccagactgggtgacagagcaagactctgtcttggaaggcgggggaagatacaaaaaaaaaaaaaaaaaatcgggggaatcttcaaatttgttaagtggtagacacttccatattttattaatacagaactcttgttatatgtgggattacatggcttttttcacttctatattagagatgagatggggaaagtatgtcttgaacagttacttcagcataaatactttcgtaccttcattttttccgtttggaaggtaagagggttggatatttacagaattgctcattgaggaccagtctttgatatttacttgctctaatgttagttggccaatcagaattatttgcatttaactaaaaccatcagcataaagcaagcttacataacctacatttatttcatagcttagtgattacattacacagtcagtcagaatcctgattctgctatttactagctaagtggccacaaataagttatttaaatcctctaagcctgcttctgtagttgtaaaatgagagttatagcagcacctaccacctaagattttgaggtttgaatgagaaaatgcatgtaaagctttgggcattgtgcatgatgtaaacactcaaatgttactgaagtcaataaatgttaactattttttagcacacttcagtgggcttatatcaccagtcaaaatgatacacagtattttatttaatggctttatgtaaattatattttactagctattaataaattaactcttgg

SEQ ID NO: 123893 - DNA, 630 bp, Homo sapiens
gggacaggaaggctcagagggtctctttactgatagttaagatacaaaaaaaactaggccaggcgcagtggctcacgcctgtgatcccagcactttgggaggccaaggcgggcggattatgaggtcgggagtttgagagcagcctggccaacatggtgaaaccccatctctactaaaaatagaaaaattagccgggcatggtggcaggcacctgtaatcccagctactaggtaggctgaggcaggagaatcacttgaacccaggaggcggaggttgcagtgagccgagatcgcaccactgcactccagactgggtgacagagcaagactctgtcttggaaggcgggggaagatacaaaaaaaaaaaaaaaaaatcgggggaatcttcaaatttgttaagtggtagacacttccatattttattaatacagaactcttgttatatgtgggattacatggcttttttcacttctatattagagatgagatggggaaagtatgtcttgaacagttacttcagcataaatactttcgtaccttcattttttccgtttggaaggtaagagggttggatatttacagaattgctcattgaggaccagtctttgatatttacttgctctaatgttag

SEQ ID NO: 123894 - DNA, 415 bp, Homo sapiens
  misc_feature (40)..(40): n is a, c, g, or t
  misc_feature (47)..(48): n is a, c, g, or t
gaggtgctgccggagcttatgtctcattcctcaatagtangtagctnntaaagaacaggtctgtcagccaggcgcggtggctcacacctgtaatcccagcactttgggaggcaaggtgggcggatcacctgaggtcaaaagttcaagaccatcctggccagcatggcaaaatcccatctctactaaaaatacaacaattagctcggtgtggtagcatgcgcctgtagtcccagctacttgggaggctgagacagaagaatcacttgaacccaggaggtagaggttgtagtatgctatgattatgcctgtgaatagccactgtactgcagcccggtcaacataatgagaccccacttttaaaatgaaataaaataaaacaaaatggccttaatgggtagttaggatttttatagga

SEQ ID NO: 123895 - DNA, 458 bp, Homo sapiens
aggatacccttccagcttctcctctacctgtcctgcttagctcctctgcttcatggtgaaacttctggaaaggctgcctaggcctcctgtcaacttcctcacctcccattcaccccttagcccatcactctatccaaagttctcttgttaaggtcaccagtgtcctccatggtgctaaatccaatggacggtttccactctttatcttgtgtgctatcccagaagctttcaacactggtggccactccttgaaagcagggatgaaaatcaagtttaacaactgatgtggcatgggcactaaccactatcacagtgcatgcaccgacaagtcagaatggtcactgggcatccgtggccagtctcactgtgcctgcgcatacaggctgaatgcaagtcttgcttgaagcccttgcttccctttgcttccacaacacaacaatctcctgtttttaatcctg

SEQ ID NO: 123896 - DNA, 198 bp, Homo sapiens
agacaagtgatatggatgatcacatagaaagcatttcagaatgatagactattgacttcattttagtagtacagacaaaaataaaaagttcataaaaatattcttaaatatcaaaatcacaaacagctggctgagtttagagccccttggaaatctgtggatttgagaaagacttaattttggtcctttgttgtaatg

SEQ ID NO: 123897 - DNA, 533 bp, Homo sapiens
taaggtatataaggagggctctgtagggagggttctatttgttgctaggccatgaagattaagtcattcgaataaaagcaagtgaatacatgagcctatgttttaacaacaggtggtggtgatgtattgatatggggaggcccaggatgccacaagcacttggggaccccatagactatcctcagggacagcattagtctcaggaaaagaaacgttgggttagggttctgatttgtgcattgtccagaaagagatggaagtgaagtgggtagattaatacatgggaaaaacagtgacttctggacttttcccttcccagattacctctatctcacctagccaacattctactataaaggagaaggtaaaattctgagagattctaacaggaatccatacattttacctattagtgctaaattttcgttctttcaggcaatgccctccatctcgatatgaagaagaggatatctggtgatcagagagaagagtttgatctccacagttgcctaaagcctcacatgagtgtcctt

SEQ ID NO: 123898 - DNA, 240 bp, Homo sapiens
aaaaaaagagaaaaaggaaggtaatttgtcactagcagaactattctaaaaaaatagctaaaggaatttctttaaacagaaaggaaataataaactgaagaaaattggaacattgggaaggaagaaataacacagtaagcaaaaatatgtaaaaatataataggctttcctcctctttttaaaatcttcccttccttccttcctccctttcttccttccttctttccttctttcctccct

SEQ ID NO: 123899 - DNA, 222 bp, Homo sapiens
ctgggctaccttacttatgcttagaacacttacatcagcctacagttgggccaaatcatctaacacaaaatctattttacaataaagtgtagaataatctcatgcaatttattgaacaccgtactgaaagtgagaaacagaaaggttgtatgggtacttgtagtttttaatgaaagctgtttctcatacattgtttcagatgtttcagaatatcagatgtat

SEQ ID NO: 123900 - DNA, 396 bp, Homo sapiens
tttttcctttttatatgcctgtcccataataccaagtggcttatttggctcttgaagagctaagattgaaagtgtttaacaggtgactccctactatctgtgggtccctgcactgtgcccttgcctgagaggtctcatctctctggcaggctcagaagaccactagaaaattctctctaaacagagtctctcacttacatttcttatttaaatgacggggtcccttacagtggatactaagatcagcctttttatgactactatcaaatgatgtgtgttaattgcattacaaaagttctataattaacagttaatggaaatgtactaattgggaaagaggaggtcaaagaacaaagtccagtttgctcatttcatgtacgtgtacacagtcatctg

SEQ ID NO: 123901 - DNA, 1009 bp, Homo sapiens
ctcccagttgcgagggcaagcaaacccgtcatgagcaactcccttccccatctctgctcaccatgtggacgctgaaatcgtccctggtcctgcttctgtgcctcacctgcagctatgcctttatgttctcttctctgagacagaaaactagcgaaccccaggggaaggtgcaatacggagagcactttcggattcggcagaatctaccagagcacacccaaggctggcttgggagcaaatggctctggcttctttttgttgttgtgccgtttgtgatactgcagtgtcaaagagacagtgagaagaataaggagcagagtcctcctggccttcgaggcggccaacttcactctccattaaagaaaaaaagaaatgcttcccccaacaaagactgtgcattcaataccttaatggaactcgaggtggagcttatgaaatttgtgtccaaagtgcggaatcttaaacgtgccatggcaacaggtagtggcagtaacctcaggcttcgaaagtcagagatgcctgcagatccataccatgtcacgatctgtgaaatatggggagaagaaagctctagctgaatggatttgtgtgtcaggagagaaaaaagttgagtgttgacaaactgtatgcaaactaataaaactattctgaagaaaagaaaaaaaaaaataaaaaaaagaagaaaagaaggaaagggaagaacaaaaaaaaaggagagcgggggcggcagccggcgagatacgccacaagagggaccaaagagaggagcaccaccatggttctagagaagggcgcccacagagggcagatagagacgagcggggcccgctaagaagacggcgggagagaaaacaaccgacggggagctatgcaggcgcacaccgccaaggagaggagcacaaaaagaacaaaaccaccagagtagagccgcgcggggacacaacagaggcgagagacgcggaacacacacgtatcgggcagcgaaagcgccgggggaaagagcataaac

SEQ ID NO: 123902 - DNA, 240 bp, Homo sapiens
agggcttgatttagattaggacttagagaaaagggaaaagtaaatgcagagaaattataaatatagtattttattgaaaacagagttgggaagaaaatggccttgggatcactgtccagtttagtcaggttggttgaaaggaataccagtgaaactcaattgcctctcgggctcagctacacagatcttgaaaggaacagattcagctctgtgctgtactgtgtgacttttctcctcctg

SEQ ID NO: 123903 - DNA, 1017 bp, Homo sapiens
tcacagttccacatggctggggaggcctcaggaaacttacaatcatggtggaaggggaagcaaacacatccttcacgtggcagcaggagagagaagtgcagaagaggggaaagtccccttataaaaccatcagatctcgtgggaactcactcagtatcacgagaacagcatgtgggaaccactcccatgatgtaatgccctctcacaaggcccctcccccaacacgtggggattacagttcaaaatgacatttgggtgcagacacagagccacaccatattacagagccagaagagctgagcagtgggcgctaagtaaatgttcattaaaccaaacccctgcacaaggctggcttcatagaggtgccacctgtgcagtggcaaaagccccactgtcagaggggacctgaacttggtttagtgctatgttgtcactgccttcaaattcttaacaatttttgaacagactccacattttcagttagcaccgggtcctgcaaattatgtacccagtcctgtccctgaaacaaagataaggtttgttcatgaagggactcactcgacccctccctgcccatctcactccaagatgccctaagtaaaggggaacacagagctaggagaaggcagtatttgaggatgatcttggaggtcccacctgatcatggctggtgatgcatgtgtgtgggtgggagaatttggctgctctcttctggcaccttccatcccatgtacaaggcctgcactttgcctgtctgtcccaagtcctcctacctgactcagaccaggagtgtggatgggggtggggggtggtggcgggcactggggcccagtactcctggtcccagctggagttccctgttgactggggagatttggcccctctgactactcctaccccatccccactaggacaggagttggtgaaggggacagggtgggaggcttaactagtagccaggggcaggcggcaggcagtggggcgaagatcaggctgaattttcctgctactgatctg

SEQ ID NO: 123904 - DNA, 240 bp, Homo sapiens
taaggtgggcccatgggccacatctggcctgccacttgtttttgtgaataaagttttattggcacatagccaggcccattcatttatgtatcatccacagctgtgttcacgctacaagggcagggctgaacattcaagatggggaatgcacggcctgtaaagctgcaaacagtcactatcaggtcctttacaataagtttgggctggctcaaatggtggctcacacctgtaatcccagca

SEQ ID NO: 123905 - DNA, 763 bp, Homo sapiens
gacactgtcttagtccatgtgtgctcctagaacaatatatcatacacaggtagtttataaacaacaggaacatattcctcacagttctggaggctggcagtccaatatcaaggcaggctgggtgtttgatgaagctccccttcctcgtagatggcgctttctctcttgagtcctcacaggggcccaccttccccacagatggcgctttctcactgagtcctcacacgaggcccaccttcctcacagatggcgctttctcactgagtcctcacgtggggcccgccttcctcatagatggcgctttctcactgagtcctcacacaaggcccgccttcctcatagatggcgctttctcactgagtcctcacacgaggcccgccttcctcatagatggcactttctcactgagtcctcacgtggtggagggtgcaaggggactctctggggtcccttttctaaggacaataatcacattcatgaggctccatcctcaggaccccatcacctcccaaaggccccacctcctgacaccatcactcttgggatcaggtttcggcacaagcactttggagagacacagacgctgagaccacagcagacaggcagcaccagtgtaaggcagaccagttactggccccgggagaaacgggaggcaggggtgcccaaccgtttggcttccctgggccacactggaagaagaagaagacagacatttttttcatgcctactaagacaacgtccactctgcagtccatggatcaag

SEQ ID NO: 123906 - DNA, 1140 bp, Homo sapiens
ggagccatcaaggcgtctattctcttcttgccaaaaatgaagcggagaaagaaagaagacaattattgttgatgtattaggtaaatactttcaatttgtctgtgcaactttttaaaccaacattcttattatatttacacaaagctatgctgtatgctgtgtaacaaacattttggaaaataagaaaaatcacccataatcatgttgaacattattagaatttttaaaaatttcctccttacttttttattctatgtgtattctgtatggtgggtgtaagtttacaaattatataattgagaaaacagatgctaacaagaagacatgcatccatgtttccagtgaacctaaagagtgcatgtacacaattctcaaattgctagaaggccatgaatatgtattctgaatcatggcccagaataaatatggcttttttatagaacttgcccccatagtgtctattatgttgttatatagttttcatagaagcaactttccttaaactgtacatgaatgtttaacaatctgcaactttccttaaactgtacatgaatgtttaacaatttgccagtgctgaccatttcacatcatgagactctacccctatcgctaaattatcataataatgcaaaaacctgtttgaagggtttcagtattctaattgaagagaagcatcatagttggttatcaatattgcatttctagtcactgaatatagagttgaactctatgaggctttttcatggctctcactggaggctttagtccagtgatttgctcagaacacgaagcctttccactcagggctctttctaagcatgtctctaggcacaacaatactccagccacagtttttatgtgaaaattgccagttctatgttgaatataattaatataagaatggcataaggaaaaatatttcattaagcagtagccccacaaactttcaggttagtttcaagcacctaaagctcttttgcctaatggttattactttaatttgagaactggtacatttccacgttaattatttgcaacctcctcaaagtcattctgaaatttggggcctcctatgctgcttgttgatccactggtcatccagaaataaaccatctctctctccgtttcccctgcagagga

SEQ ID NO: 123907 - DNA, 434 bp, Homo sapiens
gggatagctaagaaattaatattgtgctacgagtagttggtgaaaagtatataatatttttatattggccttgcaaatagtcatttatttgtggtgaatagagacttattctggaaccctgcagtgggtagaattacatgtaaggctggttagttttccatttgacataaggggacctaattatagtggtaccagaaggacttcatctgaggttattttaccagttagctagtcttgcagtatggtatcatcacctgagaacaattttatggggccagaccagataaatagaaaataaactcatttgatttaccttacagaatattttccacctggagcagtggaatctatccctccatcttcctgttgatttgatagatatttttaagtctgtgtgtttagagtgctgtgtgcagggaactttaggaggatac

SEQ ID NO: 123908 - DNA, 189 bp, Homo sapiens
agccggcctgattttaattttctactgtaaatttttctgtgttttcaagggggaaaaaaattactaaaaacagaccccttccctttccccctaacaactacaaagccaaacttaaatgtactatgatttttaactgcagcagtaggattctgagtgagtcaatccaccagattaatatttttttaaatc

SEQ ID NO: 123909 - DNA, 442 bp, Homo sapiens
gcttcaacgagcatctccttgatgttatgtcagcactcaaagtgttctggatttgggggtatttggatttcagaattttggattacggatgctcaacctgtataaaaacagaaggactagtgagatattttgtgttgtttctgtgcttctgttaaaatatctaccaagtgtaagttctaaagcaagccatatcaggatcctaatgaagagctggcaggttttatgggattagaattaggaatcaaatatatgtcccagttatgagttgaaatggtcataattttaacactgttgctctcagatctactttttttaaaaaaaaattgtttgctttgttacatttataaaaatgtctatgtacaaaccccactaaatttcaaaatatatttcaactgtatgccttttgattacattaattaaatatatttcaattatttaggat

SEQ ID NO: 123910 - DNA, 158 bp, Homo sapiens
ggtagtccctgctctactgactgtggcctcatctgtgcccttggggagaggctcagccaggccgctgatccaaggaagccccacagtcagctgagggagacacaggaaccagacctggtcccacttctcaggggtcagagtctggttggggagacaga

SEQ ID NO: 123911 - DNA, 197 bp, Homo sapiens
tgagctgctgtggtttaccccaactctagcactccctcctgtctccagtactctccacagcaataacctcttttgtgagactgggcatatgctgaagcaactggaagtgagttgtctcaagtttacttggctttaactcccaagaccccagcaaatgtccttctttcctccttttgtgtcctttcaccatccctctt

SEQ ID NO: 123912 - DNA, 415 bp, Homo sapiens
tctctattttgtcctaactagactgatcattatatctacgatgaatatcaacaaaatggtaataaaaaatagtgtagtgcctggaaaatcctttgacagaattatttggagcaagttttttttttttttaaatttggaaacaaaacaaaaaatttaaacaaaacttcaagaaataagcacatagcatttaccatgatggtacaatagcagtggatgaagaaataccagaagagctgcctgcaaccaaactcatatggaaccgtgagtcaaaggtcaaaccagtaactatctaagacagtcattacttgagaacgaaacggtcttcatttttcaacttagcactatgtagaatatggttatcacaatttattctattcccaagacaacatttcaagcaataaagtttatattccag

SEQ ID NO: 123913 - DNA, 215 bp, Homo sapiens
gaacatacctcaaaataataagagctgtctatgacaaacccacagtcaacatcatattgaacgggcaaaagctggcaaaagcattccccttaagaataggaataagacaaggatgtacactctcaccacacaaaaaaattacctaggaatacatctaacccaggagatgacgcatctccacaaggagaaacactcctgaaagaaattggctggat

SEQ ID NO: 123914 - DNA, 545 bp, Homo sapiens
acaggtggtcaagtccgttatataaaatggcacttgcatataacctatgcatatcctcctatatacttctttctttttctctctctctctttctttctttctttaagagatgggctcttgctatgctgctcaggctggtcttgaactcctggactcaagtgatcctcccgtctcagacttctgaatagctgagattatagaggtgaaccaccacacccagctttacttttttctttttttcccttcagtatatttaaaagtaatctgtagattacttacaatacctaatacaatgtaaatgctatgtaaatagttgttatactttattgtttaggaaataatggcaagaaaaaagtctgtacacattcagtacagatacaaccattttttccaaatgctttccatccacagttggttgaatccacatatgtggaacctacaaatatggagggctactatattagtcatttgagtggatccgaataaaggattgagaaaagtcatctagtcatataatcttcaggctgcctgaaaccagctattta

SEQ ID NO: 123915 - DNA, 246 bp, Homo sapiens
cgtagtgaaaccccgtctctgctaaaaacacaaaaattagctgggtgtagtggtgcacacctgtaaccctagctacttgggtggctgaggcatgagaattgcttgaaccagggcatcagaggctgcagttagcctagattgcctcactgtactccagcctgggtgaccaaattgagactgtcttcaataaaaaagactgttctagaccttattttcacaaaattatggctcagtctctcaaatgtc

SEQ ID NO: 123916 - DNA, 403 bp, Homo sapiens
taaatgcatatttttattgcaggtagatatgatggggtgatccatatatatatttctttaggctcataaagtgaagcagtgggggtggacaaggaagaaagaaatctgtaactggtttgtcatcgattagttgtatacaccattgcacttggaccagctttgtaataaattttgaagcaaaaatttataatcattagagtaaaattaagggaagtaaatgaaaatataaattataggaagaaaaaaatgtaaatttccaactgttaaaaaagtatattcacatttgttttaaaggaatgatggtgatagtgggtatcaaattactaatggtatttagagtcactgggtagattttaaaaacaccctaacagtctcccttttttttttttttttttttttttga

SEQ ID NO: 123917 - DNA, 263 bp, Homo sapiens
ctcaagttcagcgtggaagataagcctgtaaacaaaagaaatgattgtatgtgcttccaataagtgccataatagaagtgtgtacagaggtaggagaggtgaattccacctgggggaactggggcagacctcccagagtaggtgaccagaagtaggtgatcagctgacaaggcagggagaggcactgacatcacaaaggcctgatgccaggaacagcaaacaactttgcagtaaagccctgccatttagtgaagaaaccatgg

SEQ ID NO: 123918 - DNA, 229 bp, Homo sapiens
gacaccgggacaggtctgggggctctggagagggggcgagtacacatctgccaccaccctaccgatgcaacagggtgcaagaggggtcctgatgaggcagctcccgctctgagggccacaggtgtcctgggggcacaggcagtgacgtccactgtccttgctcacctcagcagtcctggtcccacggggcatgcacaagctcagggtgggtgagtgctgaaaggccact

SEQ ID NO: 123919 - DNA, 367 bp, Homo sapiens
  misc_feature (336)..(336): n is a, c, g, or t
tgttaactccggtgacgatacatgctctggaattcctaagttctgtgctttacagtttccctatcaataaaatggtggtgatgattattatgtgctgttggaagagtaaatgagattctacatataaagcatacagcacaatgtctggcacatacaaaagctccatagatgtgatttaacttagttttggcgtgactaagctacaaaattagaaggaattagaagccttatgcattgttgatgggaatataaaatggtgtgacaatcatggaaaacagtatggagggtcctcaaaacattacaaatagaattacaataggatccaacaattccacnttctggaatatgcccccaataattaaaagca

SEQ ID NO: 123920 - DNA, 226 bp, Homo sapiens
ctgcctggctaattgctgctctgctaacaggtcccctcctacagaaagtccccctcttcaacactacctccttttgatcagctcctagggccctaacattaaaaaggtaatggcaggccgggcgcaatgggtcacgtctgtaatcccagctaattttaattttttttgtttgattgtttttttgagacagggtctcgctatgttgcccaggctggtcttgaactcc

SEQ ID NO: 123921 - DNA, 758 bp, Homo sapiens
agaggacagagggcttgaggatgaattgggggtgggggtggtgaggaataagtgagaagactgggggcagaaaagccagttggggaaggttgtagtagactggatagagatgatgaagcgtaactgaggccatgattactgcatggagaaaatgggaagatggacctgaagagagaaaataattgaacctgggtaattgagctttaaggtgcaggatgccttcttaaagagaggaagaagtcaggcatgagttacgggtaataggtttttgacttgcataattgattgtggaggtggctcctgactaagggaatgaatgagagagagtcctggaggagggagagcataattttgttgatatcctccgggaggattcatctagatgtctgcagctcagcaatgaggggatcgacattgaaatgaatggaagatgatgtcatgagagagaacgagacgtgtagaacaattagagaaacattagaagagagtaaaggatggaattaaggagatatacaagtagtcaaggtgttggactaggagaatgtaaaagagcattctgagaagttgaaggcagttgctttactgcctgagccttagtttcctcatttctaaaatgaggattagaatcgtgcctactcgttgtgtttagggttacatgagagaatgtgtggaaggcacttaccttgcatatcagaagtagaactcatgcataattcatcattcattccgtaagtaagagtcaagcaccagcatatgcc

SEQ ID NO: 123922 - DNA, 512 bp, Homo sapiens
tccctcccacaacacgcaggaattatgggagctacaattcaggatgagatttgggtggggacacagccaaaccatgtcacccacattaggcattcaataaatgcctgctgaagaagtggatggaagccaggataaggaggcttaggacagggggctccagagctacatcctatgaatggtagaaggaaatggggaatgagcttttatcaagagcagctgttcaaaatcagaatgggcttccttgcaaggacattccagatctgagtgacccagcagaggcagatgtcatcccctccctcctccagatgtatacagctacctcccacccctccctcctccccttctcccagccctggccctccatcgaggacttcagcatttactcattatctgcaggatgcaagccaagtccatcttctcatttccgatctctttcccgtcgtagctctcttcttcttcatcttcctttctcttactcactcctggaaattcttttgaaaatgcagactctg

SEQ ID NO: 123923 - DNA, 412 bp, Homo sapiens
tcactgaaatgtaagatatatgtacaagagaattcactgcaacactatttgtaatcacaaaacattggaaataactaacctgcagccattaaaaagaataatggcactggcatgggtataaataaataaataaataatggcatttgcccacatcctactacatcaaaaggcaactgcagggaaatatatgtaaatttacactatacatatatttctctatatataactatacatacatataggtatgtttgcatagctatagaaaaatactggaagaatacccatcaaactattaacagcaattatctccgggaaggagactgaagaaggaagaactttcctttatttactgtatatttttgaattgtttgcaatttttactactagcctataatgcttttgtaaatttaaa

SEQ ID NO: 123924 - DNA, 247 bp, Homo sapiens
aaacctgcacattctgcacacgtgtcccagaacttaaagtatattttaaaaattctaaaaaaaaagacaatggtgatacagattctgttgtataattttcttaacatcttctaataaaaaaatcaggtccaagaagtatctatttgtttccattttttgctgcagagacaatacaatgtactgggtaagagctttggcttcggaaacagaccaattagaatcaaatctcttattaaccatgtatgtg

SEQ ID NO: 123925 - DNA, 209 bp, Homo sapiens
aatggacaaattccttgaaagatataaacaacgaaagatcattcaaggagaaatagataacatgagtagccctatagctactaaagaagtctaatttttgcttaaaaaccatcttacaaagaaagctcataaccagagataaattctaacaaacacttaaaaaaaaataccatttctggccaggcacggtggctcatgcctgtaatccc

SEQ ID NO: 123926 - DNA, 534 bp, Homo sapiens
gtctctaaggcaccactgggaggcaatatagcacaatgtgaactaggttcaacccctggttcccctccacttaattactatgtgaccttgagcaggtgacttcccatctctgagccgtggttttctcacgtataaagatgcattcctacatcagagctttgttgtgaggaaccaaatgggaaaatctatgtcaagggctgagcactgcacttggcacaaagtaaatgttgactaaatggcagctattattgttgtcgtcatcaccagcagttccgtcaactcctacctgagccttaggccagttttgttaagattaatttagtttccaaaaaagatgtgctaattggattattacattttcatgtgtttacatctatatatacatgcatggctttgaaatctacacatgaatatatttatccattcaagttctcttttaaaaatctgtaaggattatattttaagtcattgaaccatgatgagattctttttcaaaaaaaggattgctataagtgatcattatgtaggccatca

SEQ ID NO: 123927 - DNA, 694 bp, Homo sapiens
atggctcactgcagcctccaactcctgggctccagtgatcctcccgcctcagcctccccaggagctaggactacaggtgctcaccaccatggcctgatacatctttttgttttttttagaggacagggtctcaccttgttgaccaggctggtttcaaactcctggcttcaagtgatcctcccatctcaggttctcaaagtgctgggattacaggtgtgagccgtggtgcctggccgtgttgctattagaaactgccctgcagtgagtatatacaaggctgcaaagtaaaccaaacccagcgaggcagccattgaattagtatgacttgacctgtatgtgtctactgcttatttggtcctggtatatgcattacagagggagcattggccctgcccatacctgaagcctacagttcgtcacaggaaacagcaggaaaatatgggacagaaatgtacatgattcatccttgaaagtgtttttggggggtagttttatgggaggatttgagaattggtttataaagaagaatggaaggagattgctccttcatttgtaggaaaacttgggcaaagatttggacagaaatgtatttatattcattgagtcactgagtgaatgagaacctgggagtgcagacctgcccttgagatgcttttggtttactgggagacaggcacgcaaaaccagaaccaag

SEQ ID NO: 123928 - DNA, 755 bp, Homo sapiens
gcacatgaaaaataaataaaactgaaaactaactctttaaaggcacaagagtttgtccaaacaaaattggttaaatgaaaaaaaattaaaaattgactcaactctctgatattcatgtcaaaatgtgaaacttgtttttgtctgaggacataaacataagtacttactttaattcagaataaagtctatgacaagcgtgtttctcttatatttacaaatgctatcaatttatgagctgtgacttgagtggatggcaatggagaacatgccaagtggattggcataaatttaataatttaatgcaaagatgattatatcggtttagaatattgagtcaattatttaagaaaatttacaaattgtaatcaaagtggtaaaaaaaagtctagcggtctgattaattactccaatctactaattaggtaacttttaaatgttctccaatggcttatgcaaacatgaaaaacattccaatttctgtttcttctgtgttccaaacaatgcaattattgaagcctcagttctaaattttctttatgtgattgtaagtttacagagtagacctgaaaaactcctcttttaaagttatccatacattctattttctctgtttataggaagatattgtatggttgtggatattcctgtggacacaagctagacaagtgggacccactaaacctctggcttgcgaacttggagaatgagtaaaagaggacatttgtcacatcaagagagcaaattaaatgagatag

SEQ ID NO: 123929 - DNA, 434 bp, Homo sapiens
tagtaacctcatgccatgtccacaatattcagtggtttctaagtttttctgaaagtctgtcaatgtaccctgttatcatttcacttattcccaaatgccgtcatccccaacttcaatacgcacatttccacatctgttttatgtactatgatgtgcacttttaagctattttactctccaagctcctctcctcctgccagttcacatttttttaggccttgctcaaactccacctcttcttgaagctttatcatctctaaagagcactcgtcttctgtcggcactagcggatgcataacaagcaccgcactactttcaatttatgctgactggtatcgctgcgtgggatttatgtgtgaatttcatctccctaactggaaggtacgattttgatggaagggactgtgctttacaaatctcttacgctctccact

SEQ ID NO: 123930 - DNA, 263 bp, Homo sapiens
aagaggggacatttcatccacattggcgctgaatctgggatgtgcccctggaagaagggtttcctgagagttttaaaggacacgtagaaattagccaggaggacagtgtgggggttgacttgtgtctgaggaccctgcatttcttcagagtggatgtaagaaggatttggggagtgatgtggaactgcaggggctacagggccaggtggggcccctgctaaggggctcttagcttttatcctgtggataggtgggggcctttg

SEQ ID NO: 123931 - DNA, 299 bp, Homo sapiens
ttctaccattcaaatcattcttcaaatactatcttttctctaagaagctgactttccccctgcttaagcagctgaacttttacagcaatcactgtccaagtcacatggcaatggtcacattctggattttgtcatttatttgttaccaagctatacgaaatattttgatcatttaaggtgtgtttataactacagtgtaagctgcactagacacacaggtggggtcacgtcttacgttttctagtcttctccctctgtgaatccactatacaacacactgtcagtgtttgatctgctga

SEQ ID NO: 123932 - DNA, 843 bp, Homo sapiens
  misc_feature (599)..(599): n is a, c, g, or t
  misc_feature (633)..(633): n is a, c, g, or t
  misc_feature (635)..(635): n is a, c, g, or t
cctaagtttaggagcacgaagaagagaaaaagatgggtctagggacagggtttggaagaatggggcagagcagattagaagaaaaaaaaacagtggggttgggatattaaccagattttgtgaaggtggtgggctgcggagtctaggtcagagaagaagtgaaggcagcaggaagggggtggtgaggaaaaagcgttgcacggaagagttgaacttctccaaaccctggtgaaggtgaagacaggtagggttggagtaactgagaggatgatctggaggagacaaggttgtatttagagatgggataatcagtctcagagttggggtaaaaaatggcattaggacattgctatacactaaaatgtgaccccctcccaaattcatatgctgaaaccctttcaatgtgattgtatctggagatagggtcttcaggaggtaatcaagaccaaatgagggctggccatagtggctcacacctgtaatcccagaacttggaggatgaggcaggtggatcacttgaggtcaggagtttgagaccagctggtggccgacatggtgaaacccatctctacaaaaatacaaaattagccggtgtggtnggtgtacttgtatccagtactttgggggtgagcngngatcgttgaaccggaggggggtgtctgagcgaaatcgggcctgaatcagctggcaagggagatccttcgaaaaaaaaaaaaaaaatttgcggcgcgccaaagttacaactgtgggggccggaagaaagctaggcagaacggcaagggtcccaaaagggggggaacgtggtgtgttatatgactcctccccccgtaacaaagacaaaac

SEQ ID NO: 123933 - DNA, 305 bp, Homo sapiens
gaacaccgagcaggttagctgggagggagacatcctgaaggagaagagagcggtggaacagaatgctaccacatacacctagaaggtgatcttgtctaaagatcctccatgcctctcaaacattttttggtccatgaaccacagaccaccatcacctatcactacttgctactgcccaaagaactaaaacctcatcaaaactaaagaagagaatgacactgtttctcgtaacagagcaatgaggtggacgccaagaaaatggcagccacagccccggaatggaggtcggctatctgggaacctcc

SEQ ID NO: 123934 - DNA, 654 bp, Homo sapiens
ctccgaactgagaaaaatgagattactaggcttagaagaatatgtaccaggcctggcctggtggctcacacctgtaatcccagcattttgggaggccgaggcaggcagatcagttgagttcaggagttcaagaccagcctggccaacatggtgaaacctcgtctttactaaaaatacaaaaattagctggacatggtggtgcatgcctgtaatcccagttacatgggaggctgaggcaggacaatcattcgaacccaggagatggaggttgcagtgagccaagatcgtgccactgtactccagcctgggcgacacagcaagactccgtctcaaaaaaaaaaagaatatataccaatagtccattcagtcagacagcttaatcaggtataggttaattctcaggctagtatataagtttgattaaatttcctgaccacaattgtcagctagagaatatttcaatttaaggaggtaagatatgattaaaagttaaactgtcagtattggatcttagaagtaaatgattattaggactgtaatagtaattattaggactgtaaaagtaaaggattattatctgcattagatatcattatatctaatgatatagagactgcagacataactacagggctctttttcttaaatcagaaa

SEQ ID NO: 123935 - DNA, 254 bp, Homo sapiens
aaaagttaactgacctaaatgaagacctagactgaaggaagtccagctgcctacttttaaatataaattcacaatgacccagattaatagacctttgagccagaaaaaggttgaaaatggtgaaggcaactgagatacggtaggtgaagaataggggctctggagccacatggcccgggctcttattcagcttcactgccttctgtgtgggtaatctctggttacttagttcactttgctaagcttcagcttcc

SEQ ID NO: 123936 - DNA, 334 bp, Homo sapiens
aaggctttaaaagtgcattattttaaggataataaatttgaagagcaaagcatgttttgtgtgtttgccacaaaacattgcttgaagcacatacttagatagaaattggtcttaatttatataatcaatataaaatactaatgcaattctacagcattcaaatgaagaaaacttgaggctttagggataagtggttagtgatattttattgaaaccactaaagagataagtttaaaagaactgcataggttactctcagtatatgatactctgtaacatttctatttatatcggcataaatttcattttttttcttcatatgcaatgtggttgt

SEQ ID NO: 123937 - DNA, 349 bp, Homo sapiens
caaagtgaaaaatgttattatcaccccagaacaatctgtatacatctggagctaattctagccttcatttttcacatcattgtacacactgtgctacatcttgtagagatgccatggaacttttgaagaactcacaaaaaatgttaaggacttcaaatacccaataatgtattttattcaaacaaaaaccttgacaatttctgacttgaaacttactgtactatatgatcttcatatcccatttgattgcattagtattaaacagtactgtgacatacatgataaataggcatattaaaacatgtcattctttatctttgcagctcctaacattaaaatatgcaatata

SEQ ID NO: 123938 - DNA, 434 bp, Homo sapiens
tatcccatgagtagggggtggtgttgtggtcagcaagtcctcactgagacaacttaagtcaaggctgaaaagagagacgggaatgagctatgctgattcctggtgcgaaaagcaatccagacagttggacctcaaggtcaaagtccctgagacagaaaagaggttagtaggttcaaggaacagcaatgaggacagagcagagagtggagtcaataaagagaggagtagaaggagatgatgtcagagaatggaaggaaacagtaagagaaagtacaaggccagcaggccctctaacattttagcttcagctcagagagatagaaggttctccacagaggaataacacagttgctttatgctttagcaggataactgactgctgcagaaagaataccaggaaaacggctggacaccagaacttccttcagtacttg

SEQ ID NO: 123939 - DNA, 522 bp, Homo sapiens
aactgtatgttgacgtcgactcgtagaggatctcctactttccacagggtggtagttcccaggctctgagaggtattttcctgcaaagcaaggtctaatttaatagttgagcattcttttttctgagtcccctgttcatggctagaattacggagatggcttttaggtccctgacccaaattggaaagagattataagtagttggtggcagccaggctagtgtccattactgactgggtcacagtggagtgtccagatgctgaagaggcaggcattttagaaatatcttcttggaggtggggggtggctaggtcactctgtatgtcagagacccacggcaatctgtcttctgatcagctcccaggagccaaggggtcaggggaaagccagccatgagggcttgggcttcagtttgacttaaagagcaagggaaacagaaaactgctgacagtggaaaaaccctggcaagggagaccccttgaatttattatttcaagcaaataaaagcaaaccataaccatt

SEQ ID NO: 123940 - DNA, 451 bp, Homo sapiens
ctgtgaacataccacggctctgatgtaaaataggttacgcatctctgtaatctgagtccctctgtccatgccttttcctggttgtaaaattttaggtccctgacccaaattggaaagagattataagtagttggtggcagccaggctagtgtccattactgactgggtcacagtggagtgtccagatgctgaagaggcaggcattttagaaatatcttcttggaggtggggggtggctaggtcactctgtatgtcagagacccacggcaatctgtcttctgatcagctcccaggagccaaggggtcaggggaaagccagccatgagggcttgggcttcagtttgacttaaagagcaagggaaacagaaaactgctgacagtggaaaaaccctggcaagggagaccccttgaatttattatttcaagcaaataaaagcaaaccataaccatt

SEQ ID NO: 123941 - DNA, 473 bp, Homo sapiens
cattttgaggcccaaaggaagagtgatccggggattactagtaaagacagttcaggctgttttgatgtagtcagttcatctagctatgctcagtgcatctctgtaacagctggtggagcagcttctgtgaaatttgttggtcaaggctgctcactaacccctcaggtttggccgactagaaaaaccctgttggagtcgctggaggtttgagttgtttaaattttatgaaatacaattctaggtgtttataaagtttcacacagagagatggacaggaacagagaaaagtgtttatgttgtttgtaggggaggatgcgtacaagtcaggtgaagaggagagattcacaaaaagatgtgcaagggatattaacctggcggtcgtgcctagcaacaccccgctgcctctttctggattttaaatgtttcagggaagaatacttgtttaagcagtagttgggcaaaaccaaaattga

SEQ ID NO: 123942 - DNA, 699 bp, Homo sapiens
agaaaaagtacatcacctgaaaagaaacagtttcaactgattgacagttgatttcattcaatcaacaaaccaaccagcaacatccagcacaggcatcaagcacatcatcctttcaacacattactgcaacagcaacaacaattgcctcaaccgtcagcacattctcatacccaagcagcaacatcatcacttcacagcattcacacaggtgcacacatcaacagcaccatattattcacgacaaacctaacactacgacactttagattagacatgtaccacaactaaaccaacaacaactaacacgggtgattcttcagatcaagaccacacctacattaccaacaaacggacagcatgactaactgcacggacagaacataaaccttgtaaaacgtgaacacgtccaattctacaatgacaaacatgactgtactacatacaatgataatatcttgtaagctacaggcatacagaattaaaatataatcgtcaggccaagcacagtggctcacacctgtaatcctagcagtttgggaggctgaggcagggggatcattgaggccagaagttcaagattggcctgggctacatagtgagaccctcatctctataaaataataataatttaaaattttaaaattaaaaaaaaatttaaattagctgggtatggtagtgtgcacctgtagtcccagctac

SEQ ID NO: 123943 - DNA, 474 bp, Homo sapiens
ggctgaagttctgtgctttagaggtggtgttgccatcctatgattgcaggagtctggccttggcttggtggaggagcctgtggataaggcgaaggaaggtctgttttcattgggggtagaggagggtaaggagttgaaatgggaaggatctcttttttcttgctgtctaaaacttgtcttttcagacacatatcaagcctttccctctctgagctactgaagtcctgggcagaggttttctgtcttacaatacagacttttaccttaggcaatacctgacagagcctttaaataagtaaataaattgctttaataaattgatttaatacattgatttattaattaataaatttatttaatacattgatttattaattaataaatttatttaataaattgatttattaattaactaattttgagagagagtcttgctctgtcaccaggctggagtgcagtggcgtgatctcggct

SEQ ID NO: 123944 - DNA, 382 bp, Homo sapiens
gcgctggacagaggttgtgggggaggtgaggctgggtgtccccagactggcaggcccacgaagaagggaatgaggaaccctcttgtgcatgggcctctctgtgacgggcctcggcacaggacccagtggccagcagagtccccgcctcgggactgccctggctctgggcgggcctgttatcctaggatgggatgcctctggccactggggcagtctcccatttggccaaggctggcctgggatgggaggacaggcaccaggcagggtgtgagcgacctgactgcccacctaggaaggagaaaagaaggctgggcccttcccagcttggacggaggggacggacaagcaggcaggtgcctgatgcatcctgctgaccccaaca

SEQ ID NO: 123945 - DNA, 575 bp, Homo sapiens
atcatctactgaattcttaccgtggatcaatcactttcgtaaatatttgtgttcgttatctcaagtaatcttcacaatgctggaaggtaaaaaccgtcatgatttccaggttacggaagagaaaagtggggcataaggaggtcagaacatagactcatacgattaaactctacttctttgttgcttttccacttaggattaaatgagaaaatataaagtacttaacacagtggttggctcattgtcttgaataaatggtaacttttaaatattatcccaattttagagatgaaaaccatgaagctaagaacagcaaagcaaatttccctgaattgtgtgactgttggtagaacagggttcacgcgtttcactccacacagttttgatgcattctgccttgcgccaaaagggtatccagcagagtggaagcagctgcttcacccgggatggaggaggatgttcaaccagctctcagaggtcatgcctgaactctaaggacatggctttatccttctcaggatgtattcttcgcctgctacatcttgaacacagcaaccacgagcagtcttcatccc

SEQ ID NO: 123946 - DNA, 287 bp, Homo sapiens
atataggccttttggtaaatattttaaaagtttaaatatcaacaaatgctagttgtggttgctagatttgcttttacttaagtgtattgcacttcctgtgagtaacgtttgtaccaaacaagataagactggataataatagctaaaatttattgagtgcttacttagtaggtgtgatgtgacttgagtcacatcatcagatacaaggaaagggtagaaaaataagatcagtaaaggagattgggaaggaatggccagaagagtaggagaaaatctaagaaaataca

SEQ ID NO: 123947 - DNA, 204 bp, Homo sapiens
gattttactgtgtgataaaagtggctctcagcaggatggggaattggaaaggggatggtatgggaagaaactgctctttctctgaagccgtgtctatctgtagtttccgatgctcagctgcatgtattcctgatgctcagcagcttgtatccccgaccacttgcatcagctgctgaggttgctctttttcttccttttgttctg

SEQ ID NO: 123948 - DNA, 569 bp, Homo sapiens
tggcaatatattcgcgtcttttagagtgatggaagatcatgtgacggtttggtgaattatccatcggtatcatctgactgatgaagcccgctgctgttgcagaacatttaaaaatgcatctcacaaattacatggtagctgggaaaaatgcaggttttttttttttttttttaaagaacaatgcttttctaaagctatgtgctagcatacgtaattttttctttgaaaggatggagaccatttcattatgctgggtatacagtcggttaaggttgtgcaaattcattacaatgtttgttaatgtataaaacattttccattctggttttagtgacattggattttttttttttataatgtgccatttctgaaacatctgccatccccttgttacctgtgggcagaagagagagaatgcactctttctaagaatgtttagaaaatcttttccaaaatggaaaggcttgggagataagagggaaaggacagctttttctgtgaatggttaggttggaattttctgggataggaactttaccatgcaataggcaaagaggggctgtcagcag

SEQ ID NO: 123949 - DNA, 274 bp, Homo sapiens
gatggaccacctctggtccaatgaaatctaagcatggtaaagatacatcttagtcctttaggggtcaattctcatggaagcaaatgatatttgtttaatagttaatataaaggaacattttgctgtgttccgaaaaacgatcactcattttatggtacagtaaacatcagagtaaataccacgggaaaaacatacagagtccaaattaccaatacttaagaattaaacttactaggccgggcagggtggctcacacctgtaatcccagcacttt

SEQ ID NO: 123950 - DNA, 314 bp, Homo sapiens
cttaactttctctctttccaggtacaagccagttcctggctcccccatgcctaccttcaaggcaactggctctcccctacaggggtcagtagcgttactctctctttgggcaccagcacgcctgagccatgttgagccctggctctccctctgtccgtctgcaagacaggcggccttggcattctctctttctctgggcgcaagagcacgcatcctgtgcatggcatcggcagggcagttatacattttcaaacaatagtggctgtgagccaagtatgagcttacacaaacaggttatataacaaatggagtat

SEQ ID NO: 123951 - DNA, 442 bp, Homo sapiens
cttggaggtggaaactgggtgcggtcagaaaagtgagtggagcctggaggccaatgagcaccccaccctggcaagtcacagcaggacagggcaggggaccaggcatagaattgggccagttgtaacctgcacaacctggaaaaggatttgtatttgtatttcatgtacccattgggtaaggtggcatttatctccagcttccttgaggtgagctcagtttaggaagtttcttttcgactgaactgtgtcaggaatctcgccaatgcctgatgctgcccaccacatctcttttgctgctgctgtggctggaacctgcctgggaggcaccggctgtgaaggctggagacccagggaggctgccctgacacctctccttgttccctgagccagggggcccatctgagccccttcacccctggggagctgttttctgtgccttgta

SEQ ID NO: 123952 - DNA, 1034 bp, Homo sapiens
accggtgtgcaccaccatacccagctaattgttttcttttacatgttttgtagagacaaggtctcgctttgttgcccaagtgggtctcgaactcctggtctcaagtggatccacccacctcagcttccaaagtgctgggattacaggtgtgaaccaccacacctggctaattttttgtgtttttattagatacagggttttgctgtgttgcccaggctggtcttgaactcgtgagctcaagcaatcttcctgcctcagcctccaaaagtactgtattacaggtgtgagcccggccaaaatcagtttttaaaagaggtttacatggccgtatggtattctctttcttttttggaaacaatactatttgtaccatgttgtgttatcaatctatgtttggattgttagcatttaagaactacatttttcagtagattgctctaggttatagccactaacaattacttatacataaaaattttcttttgagtcattagccaatttggggggcctctcaggagaaactgcataattcactgggtgaatgcaagttcattgctcttggaggctgtgatagcataatcattgcttgctgtattcatggtcagtacaccttctgatttgtttttagtagtagttttgccatattcaaagaagagctcaatctgaggagactccttgatttgaccttactttggcatagctagcatattaccttaagttagtgtttgccatctattttgttccctgacattctctgttgacgttttatgccccgccccccgtgtccagctcccctcctcacaatccctgccccctgctgccatctttagcactggaaagttaagagttttgatctcagagttcatcaactcaagcttttgctttttatttgtaaaagaaccatgtgaagctgggctcagtggcatacacctgtagtcccaggtacttgggaggctgaggcaggaggattattcgaactcaggagtatgggtccagcctggataacgtaatgagacctccatcttgaaaaagga

SEQ ID NO: 123953 - DNA, 648 bp, Homo sapiens
gtgatgcctcgaaaggtgagctaaggaaactacatttttcagtagattgctctaggttatagccactaacaattacttatacataaaaattttcttttgagtcattagccaatttggggggcctctcaggagaaactgcataattcactgggtgaatgcaagttcattgctcttggaggctgtgatagcataatcattgcttgctgtattcatggtcagtacaccttctgatttgtttttagtagtagttttgccatattcaaagaagagctcaatctgaggagactccttgatttgaccttactttggcatagctagcatattaccttaagttagtgtttgccatctattttgttccctgacattctctgttgacgttttatgccccgccccccgtgtccagctcccctcctcacaatccctgccccctgctgccatctttagcactggaaagttaagagttttgatctcagagttcatcaactcaagcttttgctttttatttgtaaaagaaccatgtgaagctgggctcagtggcatacacctgtagtcccaggtacttgggaggctgaggcaggaggattattcgaactcaggagtatgggtccagcctggataacgtaatgagacctccatcttgaaaaagga

SEQ ID NO: 123954 - DNA, 667 bp, Homo sapiens
ctctggctctggctgtggctatggaactggctacggctgtgggtatggctgtggttatggaactggctatggctgtggatgtggctctggctctggctactgtggctaccggccattttgctttagaagatgctattcttcctgctaaaacatcactgtcagaggaccatttgcttctaagatgacacgtctaaagataatactgattcaaggattcatactccaagatttctatatccaaggattacatgcctgacagagtcttggacctctagcctcacatttctttgaatgaaatcatggccataggatccacggtgtcatctgactgttttccaaatgttatcttttgctcccttaatctctgattctctgttatgactgtgttaatgatcataacatctacaattggggaagtcaatcatttgtaataaaaatggttctttattccaaaaaaaatgtttagtacaaaagagtcaaaaagctaaaataaaatatagtttataaagcaaaaaattatcagtaagctaagtttaatgtattattgaagaaataaaatgtattttatacatttaccctaatgcctaatgtttaagacatctactgtagtgtacagtaatatcccaggccttcacattcactcactaatcactcactgatccaccca

SEQ ID NO: 123955 - DNA, 112 bp, Homo sapiens
atcagttagagtttagtccttaggcccccttatctgaggtttatgcgccagtgaatccttgcccagcaaggagcatgcctttgatacgcaaactaacccattcggacccata

SEQ ID NO: 123956 - DNA, 480 bp, Homo sapiens
tcaggggaaggggtgagggactcggtcattgcccaggcagtgagccccatggctgtgaggacacagaagcccactctcttctcgctgctgttgcaggaaggctgatggcaagaaaggaacccggcctcctactcagatgaggccagggggtggcctccccggggactacctgggactcctgttttacctgcagtctcctggccccacctctagtgagccagtgacccagccgcaggcagctcctctgtctggagacaggacagtggtccaagcaactgcctagcaaggggctgtgtcacagaaacagaggtgatttgaactctcccagcctcagtttccagcctcacctttaaggtgggggtaacgacttttttctacccaagcctcctcctccctggagagttccctgtctttgagttcagagctcctccaggctctgcaacaggccatcctgtcctccccccagcccagcggattctg

SEQ ID NO: 123957 - DNA, 768 bp, Homo sapiens
ggtgctacaaatgtgtgtatggttatttgagtttatgttttcaattgctttgggtatatacctgattggaattgctaggtgatgatggtaattttatgtttaactttttgatgtaccatcaacctgttttccactgcagccgaaccattttacattctcactagcaatatacgaggattccattttctccatattctcaccttcacttgttatttttcacttttgttgtggttgtgattgttatagccaccctagggtgtgcagtgatatctcactatctcactttggttttgatttgcattcccctagtgagtaatgatgttgagaatcttttcacatgttttttggccatttgttgtgtagcttctttgaataaatgcccttttttgaattgggttgtctttttgttgttgagtttgttataattctgcatactaggtgcttatcagatatacgaattgtaaatattttctctcatcctgtaggagttttttcattttcataataatgttctttcatgcacaaaagtttttaattttgatgaagtccaattgattgacttctatttttgttgtttggactaagaatgcattgtcaaatccaagagcgtgaattttacccctatgctttcttctatgaattttatggtttttcttattatatttaggttgttgattcattttgcattaatttttatttgtggtgtgagttatgggtcctgcttcattctgtatgtatagtctcaggactatttgttgaagagactgt

SEQ ID NO: 123958 - DNA, 385 bp, Homo sapiens
gtctataatattatttcagataaaaattttccccggctccccaaccctccttgctgattccttaacatttcataaggagccctttgggatctgagcctgctccccactccagcatcatccctccccttttactttaagcaccagtgctgctgagccagcaagcctcccttaacacacagtaaagtttcacacatcctggcattaactcatgcgagaagtcgcctcacctggatctccactccccattcacctgttaagttcatatttgtccttactcatcaggtgcacctcactggaaagtctgccttgaaacagcattctcagactgacttcagtcactgtctctcccttttgactcctctgcacagactaaactatactatgg

SEQ ID NO: 123959 - DNA, 589 bp, Homo sapiens
acttattactgtggggggaagtaagtgctgtttacataactccactgagagccgacaactgaaagctcttcctggaagtctcctagaccttgacctatgagtctctcctttgagtttaatctgtacccgtttgctgtaataaaccataattgtgagtataacagctttcagtgggttctgtaagtttgtctaacaaattattaataaacttgagggtgttcttgggaaacccctcaaagtttgcaatgaccaagtagaatttattccaggaatgtaaggttggttcaacatatgaaaatcaatcaatgtaatctacaatattaagctgattaggacaaaaaccatacgcttatctcaatagatgcagaaaaaagtttgacaaaggacaaaaaccatgtttatctcaatagatgcagaaaaaagtctgacaaataaaggacaaaaatcatatgtttatctcaatagacacaggaaaatgcctgacaaaatccaataccctttgatgataaaaacactcaacaaactaggaagagaggggaactgcctcaaactgataaaagcatttaccaaaaccccactactgatatct

SEQ ID NO: 123960 - DNA, 549 bp, Homo sapiens
agatttaatcttccgaaatgcctgaccccagaacttcacaacgatcaccgctagctccagggcgcgtcacagatgacgcagctctcccgcgcagcgctcaggaagccgccatcccgtatcgctgagaatctactctgtgccaggcacatgctcggcggaaggcctgggactcaagtacctgtctttggactagacacaatttttgataggaaaaattctaaaatctaaagcagaaacacataactcctttattaaattaaatacggttgctctcagtggttttcaagctgggatgtgctacctgactgtatgctcagaggcccctgaactctccaggagagaatttgaatttatacttatttgtcacagatcataatggaaataaagacactcatttttctgtgttctggggcaggtgctgagagaccagtcatattttcaacgttggagcgatgccactattaaacgttacacacccaaagtgaaacgatgtggcttgtgcagttgagatggttaaatgtggcccttcccccccgcccacagaaacag

SEQ ID NO: 123961 - DNA, 393 bp, Homo sapiens
gacggggtttcactgagttagccaggatggtctcgatctcctgaccttgtcatccgcccaccttggcctcccaaagtgttgggattacaggcatgagccaccacgcctggcctaaagcagctcttactagtcactagggctgcctatcaattgccttaacctggtttttgtttgttgcacttttattcatttgtctttgagatcccctcacttctcctcctaaaagtgctgggtgacatttttgttttttttattgagacagagtctcactctgtcacgcaggctggaatgcagtggcctcgatctctcggctgaagcattcctcctacctcagcctcctgggtagctgggactacaggcacgtgcaaccatgcctggctaattttttgtatt

SEQ ID NO: 123962 - DNA, 632 bp, Homo sapiens
tgccctagccaccactgtatgatcagttttgaatccaataaccagaatgagactgaaaacctgtctctctactcaatcccctccataccttcccaaaggcctcagaagatttcactttccaccaccttcaaggatcactgtgcagcaacctggagctcatggttccatccctgggagggctgcagaaagagccaggagggaagaggatgcagagaagccaggggcaggaaggaggaatgggagagaaggaagtgtgcctgccctaaccaagcccagtgagcgggaccttaagatgtggaacggggcagggggagcataacaaagaccttggggggcacagaaggagtgggagggaggcccctgaggtgagagagagcaagatcccgatttgggtaagaagaggactttttttgttgttttttgaaatggagtttcgctctgtctcccaggttggagtgcagtggcacaatctcggctcactgcaacctccgcctcctggattcaagcaattctcttgcctcagcctccagagtagcagggattacaggtgcctgccaccacgcccagctaatttttgtatttttaatagagacggggtttccccatgttggccaggatgatctcaatctctt

SEQ ID NO: 123963 - DNA, 376 bp, Homo sapiens
gagaagagatcagctaggagtactacagggtttgggtgtggatagtatggctcttattctgaacattttaattctttcctttattttgtgcgaagttttaacacaaatactaaacttgtcaattaaccagttcctaaagagttaatgagtggctaggttcaagaatattctctaagacagataactgaggactggcatgttcaatattcattcccagcaactcctctgttctgcagatgccagagactacaaactacacttcccagactcgcctgcagctaggtgtcatatacaatttaggatccaccagttagatctacaaaagactttgattcagaattgaattaagagggggaaagagtcagggcgtatgcca

SEQ ID NO: 123964 - DNA, 358 bp, Homo sapiens
cctgggacgtcaaggctgcagagagccatgatcatgccactgcactgcagcctgggtaacaaagcaagaccttgtcttgaaaaaaaaaaaagtatatggaaggatgaatgcggagctgagagataataggttaacacccacactaaaaatgtagaaagaaattagtcccatgtttaggtctgtatctcacatcttaactcacaatacactaacttgcctcacaatactgcaaataggaacaaaagaagtggcacagtaatccaaaggcagtctgagttcaaccagagccctgctcaccaggacattttattacacattggagaagcattctaagagattgctgagggtgttctaattg

SEQ ID NO: 123965 - DNA, 754 bp, Homo sapiens
gagggattattgctgtagcgaggaaatattctttttgttaaggaatgataaaagaatgtctaccagtgaggcacctaacaccgcatttgagatttcaggaaactctaaatgcctgtacttaaattttacaaaaaagaccaatgttaccttatagtgtatctgttcagtgcttttggttgccctgggaactatgacagtgttcatttcacatttgtccttggtctgctcagcgggaaggttgaggactggataccagggcctggggcagggcttcctcttcctcagccacataagccaagagaatctcagcattttcctcagtggcttgttcaggaaagaaaaggccatggtttggcaggaaagagcaagtttggcaaccatgctggtcataggaaatatttgtgtgttttcaaagagaacataaatattatatgagatgcagtttgttctgtttttttagaagtgttactgaaaacgtaggtttggatacatcactacagttatgttttgaatttgccagaccttgtgttctgtaactagggcaggatttttgaagcttctttttagttggaacgccgcagcattgcagccacttttcagggtctgagcaatgataggttgtgttctccaacatatcttttctaaatgatcttgtctatcttcacattcgttacttttaagacccagacaaaactaatcattctctaatttgaaagtgttatttatgactattggaagcataaataaaattgtg

SEQ ID NO: 123966 - DNA, 231 bp, Homo sapiens
gacggggtttcaccatgttggccagggtggtcttgaactcctgacctcaagtgatccacccgcctcagcctcccaaagtgctgggattacaagtgtccactgcgcctggcctgaaccaccgcatctgggctccatttttgactgttaacatagtacctatgctttttctctcaattttttatttttattttttctttttcttttctattttttttttttttttgagacaga

SEQ ID NO: 123967 - DNA, 329 bp, Homo sapiens
gagggccaggaccaaggtctgtggggccctttgggagcatggctggtggcatggtggcctggtggcatgctggctgggactgacagcccctcaggctggggctgcataccttgtgggcatgtctggatggctgtgtgtctccatctgagacattcttccctcaccccacatccatgccatggtagcagtcgccaaaatcatagccatttattgagtgtatgctatggccggcactccacttggccgctttatatgcattctcttgggacagccatgggctgtttgtctccagggtttgtgctcttcatcactgttttgtcccccacttt

SEQ ID NO: 123968 - DNA, 772 bp, Homo sapiens
atggttatgggaggtagcaggatctgccagcagccgtcttgggaccctgaaggaaaccatcttgagcgtgaagccggtcacagaggtgggtagagaggtgagatcttgctctgttgcccaggctggtcttgagctcctggcctcaagtggtcctcccattttggcctcccaaagtgctgggattacaggcacaagcctctgtgctcagccctcaacttactcttatttctgactgccatctgtaatgggatacaggctaaggccaaaaagaacgttctttagaaatgcaatgaaaaccctcagcttcccttcaccagatgctccctacatgatactcccagaggctctaactgcctgcttacttagaagctccagagccatgactctctctcaccaggagatcacctcaagagacaacactcaatctgcaacctaaagcatgtccacgatggaactcgctcccacctggagagtatctcgagacaatggccaccttacaacctagctctgcccaggatggcaccagctggaccactcagtagataaggcgacacagtgagtcatgtagaccttgcacctgatcgctccctcccctgtgtgctgctcatgccaggttcctgtttaaaagccctgctttctgcacacaaagggaagcagtacccttaaaggcaggagccagtacatcttcccctaagctaagccttagaataacgtcactttctttacaccagacctcacccctgttcattggactctgcaagcagcaagtgac

SEQ ID NO: 123969 - DNA, 817 bp, Homo sapiens
taaccaaccatcttagaccatcccagaatttttagtgacttaaaaataatggctttttggccgggcgcagtggctcacacgtgtaatcccagcactttaggaggccaaggtgggcggatcttgaggtcaggagatcgagaccatcttagctaacatggtgaaaccccgtctctactaaaaatacaaaaaaaaaaaatggatttttaaaatttgttattattttattattactatttttttgagacggagtctcactctgtcgcccaggctggagtgcaggggcgctgtctcggctcaccgcaacctccatctgccaggttcaagcaattcttctgccttagcctctggagtaactgggactacaggcacatgccagtgaaataatggcttattatttcttatggctctgtgggttggctgtgctcagctgggcagttcttctgctccagtggtatctgctggggttccatgtagctcattccactgggaactcagctggggctgaatacccaagagggcttcactcatgggttagaactgcaacacagttaactggatctgtctccaaccatggtgcgatctgaggactgaaaatggaagtagccagccttcttgagggtgaggctcagaactggcacagcagcacttctgctcattccattgatagagaaaatcacaggccagccaatattcaaggggaggggaagtagattccgcttcacactgggggctgcagcccgtacatacagggatgggagaaattttttagtgcccattttttggtagcactgttacacatgaatagaaatataggatc

SEQ ID NO: 123970 - DNA, 151 bp, Homo sapiens
ttcatgtccttttttcataattcttttctcttcatttttttttattgtgacctctcattcaaggatttccccccttttctttctccttttgtgaaacctcacttcagaattactgtgaaagccttcatggttttctccctgctttcagtgg

SEQ ID NO: 123971 - DNA, 294 bp, Homo sapiens
aaacactagtatccgtgcgctactactacaggaaagggtaaagataactattacaagggcctagtagaaaggccaggagcaggagtgcttctgttttctttcattaggaaatgaataaaatccaaatagcaatatgtaactttgaataaaatgcagaataaccaaaacgtcaaagacactttttaaaaaattaaaaagggaaaacattcccatggtataagctttgaatttttttttttttttttttttggaaacggagtctcgctctgtagtccaggctgtagtgcagtgggc

SEQ ID NO: 123972 - DNA, 271 bp, Homo sapiens
aggaagtcccagtggaaggaatgtgctctctattccttcctgtatctcaaaacagttcactaattttctcttcagctatgtctaatctacaacacaaactatccattaaatttttattttttattttttttagagacaggggtctcgctctgctgcccaggttggagggcagtggcacaatcccagctcactgcaacatcgaactcctgcactcaaggaatccttccgtctcagcctcccaagtagtgggaatataggtgcacatcaccat

SEQ ID NO: 123973 - DNA, 280 bp, Homo sapiens
cgtgaacatgtcactgggggttagacaggaatgcttatggggtctggtggaaggcaatatggaaatgattcatagagcaagaaccacttgaattcagtcttgaaaagaagctccactgggaaggtgcattacagaccttgcacaatgaaccaaaccatggagaggtgaacctacacgtcaagtgggaactgcccaacactggccatacaatctgaaaatggcattttcaaataatttatggataacatcctaaaaaaggactgccgattgtcacactcca

SEQ ID NO: 123974 - DNA, 482 bp, Homo sapiens
agaactagtgggtatcaaggtaagaaaacatgttgagaaatttgtagcaggaatggaatcttacaattgaggggagtcaaacccactggcctcagatttctaggtgaaggagagatgatctcttaataatgaggaggtagaaatgggcattgagtaaaagggcttaaggaaactggtaaaggtttggaatactgaggggaaaggaaagagatggtggaagaccacggaagcatgagtcagtagtactgagcactcaatggtgcttggaaaccacaactatagtggtaacagtctgtatttttttatccagcaatactcagctccctgtgtgtagaagcagagaaggtagattgcagttatttttccaaggctggcattttactgggtagatactgctgaaggaaatacagggtgcagatagttcagctggtcaataatccatgattcaggttggatagggaaagaaggggggttaggaggga

SEQ ID NO: 123975 - DNA, 217 bp, Homo sapiens
tggggtctcactatgttgcccaggctggtgtcgaactcctgagctcaagtgatcctctcacttcggcctcccaaagtgctaggattacaagcatgagccaccatgcccagccacatcatgtaaagttaatcaaaataatacctaatgaatttctaactctcacaaagatgctaagcttagttttttcccctgccctaacacttcagtgggaatttta

SEQ ID NO: 123976 - DNA, 422 bp, Homo sapiens
aactgttttttgctacctcacttaataaactgagctccaccatgttccaggtcccatgcctgtcaccggggtcgaactaaagtaagactgagccttgccttctacatgctcagagcttaaatccccaaatgcattgtttgttatttctttgagtaaactctttcttcagaccagctggctacactcaatttcctgatggccaccactcctcccctcccatttctcctgcgtagattttcttctctccagttcccacaaatcccataaacttcatcacctggagggcctgtatcccctgaccagcaccatcctcagcgatttttatttcgacactgaaaaacagcctatgctttttgtatatcacaatgcatctgggtttgaatctgacctttcctctatttacctcctccttcatttctctc

SEQ ID NO: 123977 - DNA, 294 bp, Homo sapiens
gagctttgtgagatgccctagaaaattattgagcatgagaagaagatcccaggcaactctgatttgtagccaagttagacagaagttgtggataatctgtaaatctattaatatggtttcgatctgtgtccccacccaaatatcatgtcgaattgtaaaccccagtgttggaagtggagactggtgggaggtaattagatcatggaagcaaatttcccctttggttctcttcctgtgtgtattagtctgttttcgtgctgctgataaagacatacccaagactgggtaatgtac

SEQ ID NO: 123978 - DNA, 308 bp, Homo sapiens
gccgactctatgaggatcccctgccatttaccccatggccagaccgggagagcagggctgcggcgcaagagggccaactgccaggcggccggtgtgtctggctttcagaatccgggtcattgaaaggctttttaccttttccttctgggctggaaagtacttgccttacccaggccccgtcacccgcacagcggtcgtcgtgattatccctgccggcagggtgttgcagcattgaggaatcgcggttctttgctgcctccctccgctgtggagcccaggctttcgccctccctagagctcctgaggcc

SEQ ID NO: 123979 - DNA, 366 bp, Homo sapiens
ggatcattttctgtctttgctagatactattcatcgggcaaattatcattgtttagaaactttgcagtttatcaacttgtagaatcagtgttgccgagtggcccttggtctcaagactggggctggatttggacaagtaatgaaaatgtttcacccagagggcaacatgcaactgagtttttatatagttaatctggcatcctgtatgataagaaggctaagaaatgcagaaattctctctgctaagtatgaattcacattgagctctcatacaccaaaatcttttattcatacttaatgttttctcattcttatatatttcatctcgtgaaattttaaatttttaattagcaaagaccccaaaag

SEQ ID NO: 123980 - DNA, 322 bp, Homo sapiens
gggctcacctcctacctctggcctctcactctctaccctcccagccacatgttcctacctattattgcttgaatgccctgcttgctcctacgccagggcttctgccttggctgcctctgtctgcaaccctctctcctctggatactaacatgactcactccctcacttactttaggactctatttaaatgtctgtcagagagatctcctctgttcaccctctatataaaaaaagcaaaacacatacacacatagaggcactctacccacttgaaagtacttattctggccaggtgtgatggctcacaccagtaatcccaaca

SEQ ID NO: 123981 - DNA, 272 bp, Homo sapiens
gagtgtaggtctcaaggagtttggattaaccctcaaggtggggcagcctggggatttgcccttcttcacctggaagaagagtccctgggggttgagctttatttttttattttatttatttatttatttatttatacggagttttgctcttgtcacccaggctgaagtgcagtggcgcactctcagctcgctgcaacctccgcctcccgggctcaagcaattctcctgcctcagcctcctgagtagctgcgattacaggcatgcgccaccat

SEQ ID NO: 123982 - DNA, 530 bp, Homo sapiens
agctctctctgtggggtggtgctctctctgtggggggatgacgctctcttgtggggtggtgacgctctctctgtggggtggtgacgctctctctgtggggtggtgacgctctctcgtgtggggtggtgacgctctctctgtggggtggtgacttctctttctgtggaattaaatatatgcttctagacttaaagatgacaatatgcatccttgacttattaaagttcaatataaattagtacttttttcaattcctggactatgttaaggacattggaatgtgtcaactcccttttcctccttcttattttttgtgtattattttaattctacatatattctctctcaagatattattttatacagtcagtattaattttgattttcccatgtgtttaccctttacaatgctcttcattcctttctgcaactccttgcttccatctgaaattcttttccttttacctgaaaaactatttagtttttcctttagtgtctgtcagctacttataaaccatctcagtttttgt

SEQ ID NO: 123983 - DNA, 1423 bp, Homo sapiens
attgctccttttatattatcaagccaaagatagagtagatcctctcagccaaatatactaggagtcacataaaaattgctatgaaatttaccaaaaactaaggacttcattatttgttaaaaatgtgttagaatcacattaatagaatgaaagggagggaagaaaacacatgatcatcttaattgatgcagaaaggcatttgacaaaatccaacaccctttcatgatttaaaaaactctcagaaaactaggaatacaagcgaacttctcagcatgataaagggtgttcatgaaaaacccacagctaatatcatattcaatggtaaaagactgaaaactgtcctcctaagataaggtacgaaattaggatgtccactttcaccaataatcaagaccttagtttttggcaaatgacgtatacataggaactcccaaagaatccacaagaaagctagagctactaaattaattcagcgaagtttcaaggtataagctgaacacacaaaatctgttgtctatataccagcaaagaataatacaagaaagagattaagaagtccattaaaatagcatctaagaataaaacacccaggaataaatttaacagaagaagttcaagacttgtacactgaaaactataaaacattgctgaaaaataagacctgataactggaaagacatctccacgttcaatgataggaatagttagcatcgttaagatgtcactactagcaaagtgatctacagatttaatgcagtccctaacagtattccaatagctttttttgtgaaagtggaacagacagtactcaaatccacaagaattgcaaggggactcaaatagccaaagcaatcttaagaagaatgaagttgagagattgacattactcaatttcaaagcacaccacaaagctaagcaatcaaaagcattgtggtactctagcataaggataaacatacagaccaatggaatagaattgagttttcagaaataaacccatacatatacagccggtagacttttgacaaggctaccaggttcatctaatggagaaagaatagtctcttcaacagatggtgctggtataactgtaagttcacattgcaaaagtaggaaattggaccccaacctcatgccatataaaaagttaaaatggctgggtgtggtagctcacacctgtaatcccagcacttttggaggctgaggcgggtggatcacttgaggacaggagttctagaccagcctggcccacatggcaaaaccccatctcttctaaaaatacaaaaaattagccagccatggtggtacacctctgtagtcccagctacttagaaggttgaggcatgagaattgcatgaacccgggaggtggagggggcagtgagccaagatcacaccactgtactccagcctgggtgacaaag

SEQ ID NO: 123984 - DNA, 329 bp, Homo sapiens
tcttgaaatacaattgattccatcctccatcctgaaagaaactaagcttcctgtcaaaacatggtgatgcctagagaccaggaaagtgcccgtttaggacatggcatgaaaccagccaggacatcaggggctaactttcaggcccactcacatcaggccacctgtctcactgagttactcatttattctcctctgtatcctagttggcccaaggaagccacagcagaataatcaagagattccaaaggagaactccagtgagaacattatgcattcaacatgctcactgagagaagattatttcttttcctttttttttttcctgagac

SEQ ID NO: 123985 - DNA, 356 bp, Homo sapiens
tacatgccagaccctcttctgggggtatacagcaaacacagtcctaagtactcacattctagagggaagagaaagtcaacaaacaaatagatcatttgtcaacaactgataagttctttgacaaaaagcagatgaagagtttatcagtttcagcactgttggcattttgatggggatcttttgctgttggggctgacccatgtattgtaggaagtttggcagcgtccctggcctctacccactatatgtgccaaagcagctccctccccaagttgcaataacaaaaaatgtttgtagacattgtcaaatatctcttggggggtattattgcccccatttgagaagtactgggttgg

SEQ ID NO: 123986 - DNA, 269 bp, Homo sapiens
tatagccaaggctaaaagccactgcatgaaaccagaggggcccaacctgtctgcacattggaatcaccttggaatcttaaaattcccacaatccaggccacagctcagatcaactaaacgccaatctctggcggaggggtgcaggcaattcgcagtttctgaagccccccaggtgattccaatgtgtagacaagtttagtagccactagcacacaccactcgttctgaatcctagctggacactgggattacccaaaaaacatttaaga

SEQ ID NO: 123987 - DNA, 485 bp, Homo sapiens
ctcgctgttgcccagcttggagtatagtggagtggtcacggctcactgcagccctgaattcataggctcaaatgatcttcctgcctcagcctcccaagtagctgggactacaggtgtataccaccatgcctgcctagtaaaaactgtttttgtgtcacccattgagtttgagatccatggagtggagtagacgaggtgagaggtgttcagagtctgctgggctgatctgagtctctttgagatgggaccatatggagccagcctagtctgtttctctttttcacaatatgagacttaacctctctgggctggtctgaagccagctactggtcatgtcctttgacattgctaatacaaagctgtaggaaaatctattttcctcatgggtgcacttctctttggcaagggaaaggggcctaactgttcagtggatattgcacttgtctttgtttcactctgcctgccaactcctcagggttttcctt

SEQ ID NO: 123988 - DNA, 522 bp, Homo sapiens
gttgaaggagaagggagaggctggatccagattaaaggtttgtgactgctgatgaggctggtaatattgataacttcatgcagaggtttatggtttctaaaatgctttaacacattttttttaatgtgctaaatggtagatgttctttttaattttaatttgagtttttagttttgaaaatctcaaatactcggaagagtatataacagatccttatgtgtgtagttgccttcagaatttaacaggtgttccttttgttatatttgcttcagggttttttctctctcttcctctttaaagtaataaaacatctcagatacatccaactttctttgccctctctgctccccaggtaaatattatcctaaagttgatgtgtatcattcccatacatgcttttgtacatttacagcagatgatctattcataaacaatatgtactgttgcttgtatgtctttatatttgacacacatagtatctttggtatatcctttctttcatcttttttcttttttcttttt

SEQ ID NO: 123989 - DNA, 324 bp, Homo sapiens
catttaccccaccagattcaatccatccttcttctttgggatcaggaagaagactggaagggctcaagtttgtaatcctagcactttaggaggctgaggcaggcggatcacctgagatcaggagtttgagagcagcctggccaacatggcaaaaccccgtctctactaaaaatacaaaaattagccaagtgtggtggcgggcacctgtaatcccagctgaggctgaggcagggagaattgcttgaacccgagaggtggaggtttcagtgagccgagatcacaccactgtaccccagcctgggcaacagagtgagactccatctc

SEQ ID NO: 123990 - DNA, 663 bp, Homo sapiens
gttataccaatgaaaaaaaaatcttatttccaagtgacccatgaaattccattccatattttaaatgtgtcacattggaaatgccacttttttctccattgtatttttgttaccctaacccatgccctcaccatctgaggactgtgtgtatttttacagttaatagctctcatactcactggtttgtggaaactgagcatttcccctttatccagaggcagttgtggtaagtgtcttgttttcttcagatcccaaccacgggtctctaaaggtatctaagatctgtatggtcacatctgcttttccaagtaacagctagaaatattttaccatgccttcactatagctaggctataataaagtttacaatcagaggctgggcacggtggctcacgcctgtaatcccagcactttgggagggctaggtgggcggataacctgaggtcgggagtttgagctagccagaccaacatggagaaaccccatctctactaaaaatacaaaattagccaggtgtggtggtgcatgtttgtaatcccagcttctcaggaggctgagacaggagaatcgcttgaacccgggaggtggaggttgtggtgagccgagatcacaccattgcactccagcctgggcaacaagagcgaaactccgtctcaaaaaaaa

SEQ ID NO: 123991 - DNA, 124 bp, Homo sapiens
agagaccccctggggggcatgtgtggaggggaagcgtttctcactttgcattatcagctgagacctgggggagtggagatgcaaaggccctgaggtgggagtgagccaggatgtcagtgtggct

SEQ ID NO: 123992 - DNA, 2371 bp, Homo sapiens
  misc_feature (786)..(786): n is a, c, g, or t
  misc_feature (1236)..(1236): n is a, c, g, or t
gtgcatcattttaggggttacatgatgttgaatatgtcttaggattggtagtgttaaccatgatcatttggttaagatactctctgctgggttttttcactgtaaaattaccgtttttcccttggtgcttaataaagattttagaagagatatactctgaaactgtgcaaataccctgtttttcttcaaactttcacccactgattttagcatccattggtgggtcttgctggcatcagttactgcttaatgtttgtctaatgttgattttctgttttcttcatttcttttacatttattgattggaaatcgtctgtagggaagatctgtaccttcctgatatatttattgatgattattaattatttatagctgtggactcattattaataaatgagggttttatgagtaatacttgtaaaccttaggagaggaatgttgatgtatttaacttgtaaactttgttttcagcttcttttgtgttaggtaggtacatgtatgcttgggtgtaggataaatagcaatgctataataatactgtatatattgttatatgaagattgcattttatttcaagatttcctttggagataacttttaaaacattgagatttcaaaccacaagatcactaattacttgcataacacttagcataattttctcctaaacgatatcatggtctttctatagttaacactcaaggtgattttctttattgttctctttgccttctttattttgaatttgaggcacttagtatatttttttataagttatagccacanatcagtacttaccagcatgataagcagttctttactataaaattaaagtttgtaaaccattaagtgtaatttttggtcagaccacaagtcctgttgcttttttatttagttgctttaaaaattttttctaaacatacagaataacaaccgttaagatctcatttttctctccacctactctctcatttgtttcttaaactcccttttttttcagcctgttttttgtatccttgttagagagaacagacatatattgtccctgaatgtacatttaattatattcttcatgtaattacattatgtaattacaactcaatcacctaatttagcactgcttaacacatgttaacttttgctttttgttcgtttttgagacagggtcttgctctattacccaggcttggagtacagtgacatgattatggctcactgcagcctcgacctcctagncttacatcattctcccacctccaccaagtagctgggactgcaggcgcatgctgccacatccagctaattttttgtattttttatagagataaggtttcaccgtgttgcccagtttgctgtcaggcttctgggctccagcgatctgctcgcctcagcctcccaaagtgctgggattacaggtttgggccactgctctggccacatattaactttcaaccagtcatggtagctgttgttaatattttaatatataactctccagatcttttctatgcacatatactcatttttaaattgatacataatattcatactgtatgtactgttctgtatgtaacttgctttctgactttatgatatctagtttttacactctcattaaaagatgacagacatggaaccagcatggaaaacacaattaaaggaagtttaagaatcaaatgcaccagctatggtagttcacacctgtaatcccagcatttggggaggccaaggcaggaggatcgcttgagcccaggagtttgagaccagcctgggcaacatggtgaaaccctaactctccaaaaaaatataaaaattagccgggtatagtggcgtgtgcctgtagtcccatctgcttgggaggctgaggcaggaggatcacttgagcccagcaggtcaagattgcagtgagccacaatcgcgccactgtcctccaacctgggcaacagagtgagaccatatctcagaaaaataaaaagaatcaaatggattcttaaatttatggaggacttccttacaacttttttttgacctcgtgatccgcctgcctcagcctcccaaagtgctgggattacaggcatgagccaccacgcccagctgcaaatttttttattactgtactggtacgtgctttttatatatttgatctatttctttgcatcagatccctagaaataaaatttgggggacaaatgatatacagatttttaagacttgatacgttaatgccaaaatgccttgtgtggccaggcgcggtggctcacgcctgtaatcctggcactttgggaggccgaggcaggtggatcgcttgaggtcaggagtttgaaaccagtctggccaacatggtgaaatcccatctctactaaaaatctct

SEQ ID NO: 123993 - DNA, 2470 bp, Homo sapiens
  misc_feature (786)..(786): n is a, c, g, or t
  misc_feature (1236)..(1236): n is a, c, g, or t
gtgcatcattttaggggttacatgatgttgaatatgtcttaggattggtagtgttaaccatgatcatttggttaagatactctctgctgggttttttcactgtaaaattaccgtttttcccttggtgcttaataaagattttagaagagatatactctgaaactgtgcaaataccctgtttttcttcaaactttcacccactgattttagcatccattggtgggtcttgctggcatcagttactgcttaatgtttgtctaatgttgattttctgttttcttcatttcttttacatttattgattggaaatcgtctgtagggaagatctgtaccttcctgatatatttattgatgattattaattatttatagctgtggactcattattaataaatgagggttttatgagtaatacttgtaaaccttaggagaggaatgttgatgtatttaacttgtaaactttgttttcagcttcttttgtgttaggtaggtacatgtatgcttgggtgtaggataaatagcaatgctataataatactgtatatattgttatatgaagattgcattttatttcaagatttcctttggagataacttttaaaacattgagatttcaaaccacaagatcactaattacttgcataacacttagcataattttctcctaaacgatatcatggtctttctatagttaacactcaaggtgattttctttattgttctctttgccttctttattttgaatttgaggcacttagtatatttttttataagttatagccacanatcagtacttaccagcatgataagcagttctttactataaaattaaagtttgtaaaccattaagtgtaatttttggtcagaccacaagtcctgttgcttttttatttagttgctttaaaaattttttctaaacatacagaataacaaccgttaagatctcatttttctctccacctactctctcatttgtttcttaaactcccttttttttcagcctgttttttgtatccttgttagagagaacagacatatattgtccctgaatgtacatttaattatattcttcatgtaattacattatgtaattacaactcaatcacctaatttagcactgcttaacacatgttaacttttgctttttgttcgtttttgagacagggtcttgctctattacccaggcttggagtacagtgacatgattatggctcactgcagcctcgacctcctagncttacatcattctcccacctccaccaagtagctgggactgcaggcgcatgctgccacatccagctaattttttgtattttttatagagataaggtttcaccgtgttgcccagtttgctgtcaggcttctgggctccagcgatctgctcgcctcagcctcccaaagtgctgggattacaggtttgggccactgctctggccacatattaactttcaaccagtcatggtagctgttgttaatattttaatatataactctccagatcttttctatgcacatatactcatttttaaattgatacataatattcatactgtatgtactgttctgtatgtaacttgctttctgactttatgatatctagtttttacactctcattaaaagatgacagacatggaaccagcatggaaaacacaattaaaggaagtttaagaatcaaatgcaccagctatggtagttcacacctgtaatcccagcatttggggaggccaaggcaggaggatcgcttgagcccaggagtttgagaccagcctgggcaacatggtgaaaccctaactctccaaaaaaatataaaaattagccgggtatagtggcgtgtgcctgtagtcccatctgcttgggaggctgaggcaggaggatcacttgagcccagcaggtcaagattgcagtgagccacaatcgcgccactgtcctccaacctgggcaacagagtgagaccatatctcagaaaaataaaaagaatcaaatggattcttaaatttatggaggacttccttacaacttttttttgacctcgtgatccgcctgcctcagcctcccaaagtgctgggattacaggcatgagccaccacgcccagctgcaaatttttatatccaagtttctataatctttttttttaaataaatgtgcagtggcccactatgtttatgtggcataatttgttttcaatgttttgacatttaaaatattattactgtactggtacgtgctttttatatatttgatctatttctttgcatcagatccctagaaataaaatttgggggacaaatgatatacagatttttaagacttgatacgttaatgccaaaatgccttgtgtggccaggcgcggtggctcacgcctgtaatcctggcactttgggaggccgaggcaggtggatcgcttgaggtcaggagtttgaaaccagtctggccaacatggtgaaatcccatctctactaaaaatctct

SEQ ID NO: 123994 - DNA, 144 bp, Homo sapiens
tccttttcttctgtgagggacaggccttccttgggaagaaaggtcaccccttgagtctgacatgctctgcagtcaatttgagaagccttttggttaattttggacaagtcaagcctggtggtggaattcggtcccatttagcat

SEQ ID NO: 123995 - DNA, 178 bp, Homo sapiens
catgagccaccgtgcccggccgatcaatcccttctatctatgttgctatacccaagtaactgcataatctgagggctgagaaccagggctaagtaagataaaggcttgggagcctaggagttacagaaaagggcctggattggaacaattagccaatctaaggtcatataatgtcaaa

SEQ ID NO: 123996 - DNA, 453 bp, Homo sapiens
aggggaagaggcactgtaggcaaagggtgcagcatatacaaaagcctagaggtgagtccttggggaaatgtgtggtgagggataccaaaatgtgagcctgaagaggaaagaagagaccagagcataaaggatgaggcttaggcattaggtttctctcccaaaggcctgcctgagtgcttcacacataggaaggctcaactaatatatgccaaattcaatggttacatctttagaaatgccatttcatcactggtaaagtacataaattcaagctattctatctactatactactactactactactactacttcaagaacagaggtaactctataggcattggagaaaagggcaactcatagtctcaggaaacctattagttcctaacatcccacttgattacgcttaagtctccttgaacctaattcacaccaatggcatttagcaaatagg

SEQ ID NO: 123997 - DNA, 425 bp, Homo sapiens
agtttccagagcacataatttatagttatgagtctacagtgtcaacctatttttaatccaaagaaaaaagattgcatgtatatttatttttcaagaagtaaaagttaataggagagaagattcaggatatcttgtttatacataaatttacatgttgaattatctatttgcagaaggtagaatttacattttgacaaaaaagtgttcattagttttaatttctgctgatgttgaaaataatccaaagtacaaaagcaaaaaaaaaaatgtgtgaactcttgaaccctccctgaggttttttatgtttgctgatgtgtaggcacagtgatggtgtcaggtgttcatggctgtggaattggatgtacagaactaaagactccaggggtcctattggcagctcatgatctggcaattggtgaacatta

SEQ ID NO: 123998 - DNA, 617 bp, Homo sapiens
gtttcaactataaaagtgagctcttttcatttttttgccccttgagtatgaaacatatgttaaaagctgaacgtattcataatttcagtttgttagtatttttgtataagtgtactctgtaagtcacatttttcgattttcaagtatagcagtcccccttatctgtggggaatatgttccaagcgccccgtggatgcctgaaaccatggatagtactgactctatgtgaattgtttttcctatacatgcatatctataataagttttcatgtctacattaggcacagtaaaagattagcaacaacgaataataaaatagaacaattataacaacacaccgtcataaaagttatgtgaatatagtttctctgtctctcaaaatactgtaatattttcagaccacagttgactgcagtccagcctaggggatagagtaagactctctctcaaaagaaaaaaaaaagtctttaactattttgtatagaataatgacaaatattgttaccaaaggataaaaattaaagaaaatgcgtactgcagattaacatacataaagactcaaaatggaatcaagtgtaatcgcacatgacccatttcagagtcatttcttcccattg

SEQ ID NO: 123999 - DNA, 113 bp, Homo sapiens
atctttgatggacttagctgtgcagaacagatactaaatgcatcctcattcttctcataatcaaaagtttttgcttaagctggatgggaaaaagagaatcccatttcactaag

SEQ ID NO: 124000 - DNA, 461 bp, Homo sapiens
cagaggtaaggatgtggggtttcactaaaggagctccccatttggccagaggaaggagtcacaggcgaggacgtgaaaaactagaaaacctcacgggagccatgaaaaagactaactgtgattctggaggtatttaaaatgcatgaggttggtttatcatgactttagaaacatattcatctgagatgaaccaacagtaaaggccggggttgcatttactgtggcaacatttacaacacaatattctgacctgaactctccatagcatttccctaaggaaaatatgaggagcctaacacaatgatgagataggcaactgtttagcaaatatgctcacgcttcagaaacactgaaggaagtgcagtgaaatttgtctctgaacttagaagattaaagtcactgtctccagttgaaatctacatgatacttttcttttgtctttttttttttttttttttttt

SEQ ID NO: 124001 - DNA, 398 bp, Homo sapiens
ccaggctggcacaagggttccgttcaactcctcctcccatgcagagttccttctgccctcatccttttcttgcctctttcctcaaaagggagctagaaggcagaattatgtattcttagggcagaagagaagaagtcctgatcttctaaaaagaagttatataaagaaaccatttttattgaattgtgtagcattgtgacatgctattcaatttttactttttattttactcttaccttaacatattagaatagtccatcagacaaatgcattggcagcatttttactattccccaaacatgctgctggtcatgtgatgcctatttagaaatacactttttttttttaatttttattttactttaggttctgggatacatgtgtagaacgtgcaggtt

SEQ ID NO: 124002 - DNA, 455 bp, Homo sapiens
actgagctacaccacaccctggtaaaagggaaaatcttagtataaatttcacatacacctaaggctttcacatacacctaaggctttcacatacacataaatcactggcctccactaaactgaactacaccacaccctggtaagagggaaaatcttagtatacatttcacatacacctaaggctttcacatacatttcacatacacataaaccactggcctccacgaaactgagctacaccacaccctggtaagagggaaaatcttagtataaatttcacatacacctaaggctttcacatacacctaaggcttcacatacacctaaggaaacctaaggcttccctcttgttctttctccctcttctcctccttcacctctccctccactcttcctctgatctctctttttcaaacgttatggtttgttgttccataccaactgcacatttggca

SEQ ID NO: 124003 - DNA, 614 bp, Homo sapiens
gcctccagactagctgggactacaagtatgcaccaccatggctggctaattctcctggctcagcctcccaagtagctgggattacaggtgtgcaccaccatgcctggctaattcttctggctcagcctcctgagtagctgggactacaggtgtgcaccaccatgcctggctaattcttctggctcagcctcctgagtagctgggactacaggtgtgcaccaccatgcctggctaatttttgtatgtattgtagagacaaggtttcaccacgttgcccaggctgcagttacatttttacttgaaaatcgttcatttctaatgcctttttaattttttaaatcagaaaagaacaaatttgttctgccagactattattaggttcctaattctgtgaagctgtgacctggggtaaaggttaatctgtagttagcttaaaaccagtttcattactagcctttacagtatactttggtatttatccaagatcggggtgctggctttttatgtgaaaggccagaaccttaagtagcaagaaaaagtagtccttaacttttcattaaagtataacatgaatattgaaatgtacatttatgctcaaggaacaccattttacc

SEQ ID NO: 124004 - DNA, 748 bp, Homo sapiens
agtttgagaccagcctgggcaacatagtgagaccccatctctacaaatttttaaaagaacaggtaagtttaactaaatgttgttgcataatttgaagagaatagatgataatgtagaactaaaatctaagatgatccaatgtgtgagggtaggagccaggaaaaaataagtactaaagttctcgcctcatttgtcaagaggctaatgatcctgattacatctagatgctgatagaaaaatacgagtatacacacacatacatatatagcataaccaatagaagaacggaagtaaaacctcaaacttcctaagcaacacctcaaacttcctaagcaacagaggaaaaacaggacaaagtaaatgaaaccaatccaacaaaaggcaaaaataaacttaacaaaaataagcaaatataataaaaagtaggcatgaaataagatggctgaaataaatctatgactcatcacaataaatgcaaatggattaaatccatctattaaaagcagatactaaatacaaaatccatttgcctgccttctttcaaagacacatataaagcaaaatgacagagaggatgaaaaatggaaggataaaaagaacatgccagccacatggtaaccaaaagaaaagaaatgcatctacaaaacagaattcaaggccagatcatgaaacggacaaagacagagtatttataatcggaaaggtacaagcatcaagaagtgccgcagtcatcaatcataagcatcta

SEQ ID NO: 124005 - DNA, 184 bp, Homo sapiens
gacagagtaaaaatctctcaaaattctctcctatcaaagcaacgagaaagctacccaaattggtgaaatcaactttttaaactttggaaattaatcaaagatttacagcaatgcagaaagcatttattcatgaaaaatggatgaatctcagcagaaacaggaactttgtggtgcttttccatgc

SEQ ID NO: 124006 - DNA, 260 bp, Homo sapiens
tatatttctatgcctggtgttgtttgtttgacacaagtttcctttcataggcatcctgagatgtactaaagacatatattttcaagttggaatgacagtggcatacatttaaaagaggatttatttgaggctaggttgattgtataccacctagtttttataattatgtatgtgtcttcctcctctccccactagaatgtaagcctcttgattatcagagctgtgttttacactcaataccttccataaaacctgacagc

SEQ ID NO: 124007 - DNA, 559 bp, Homo sapiens
gaaagtcctgagaagtcccaccatagtacctttgtttaatccaatattttataaatgaatttaacataacctctgtttaagacatgctggcttactgtattttatctattcaaagatgcacacttttttcacgtttcgacatctctgacgatgagatgtggcttagaattaaaagtagctcctcttctgagctctcattctgcgattcttcaataagaaccaatgctaactttcagccccaacatggcccctccagacaggtggctcaaatgtgcaaaaagataagaatgcatttttgctccctgcctacacatgcacccaacaaatattcatgagtgagcatctcctgccaggcaggagcactgaggatacaacagtgtggaaggcaggaatgggctttcctcatggactctggtctagaggagaaacgaatcataaataaggcaacagaaaaagagctggcacatgaagataactgctacagagacaacaaataggtaccatgagaaagaaactcacttcgtatgctaatcaaaggatgaaaactaagtacctgggg

SEQ ID NO: 124008 - DNA, 398 bp, Homo sapiens
cagcagggaaacaaaatctgtatacatctaaacatacgcatacattgatgtgttatgtatgtgtgattttcagatgttgtcacaaaagttgtgaattatgcttattcttgtgctttattggcatttaaagcaaggcattcagcatttgcttactatcaatgtctcatgatgttcaggctctcagcagtgaccagaatgatcttactgtgataatcacaaaatcttgcctctgtttcatgttaagattgttttcaaaaggatttgacttacactttgatagtaatagtagtttatgactaataaaaatggagaaatgcttgaaaatattaactcaagtaatagtgctggttagtacaactcttaatacgtgactatgtcttttctctctctcatataag

SEQ ID NO: 124009 - DNA, 162 bp, Homo sapiens
gagcctgggaaagtgatttttaaatttctatattgggtggtactcttggtacatcacgactcataggatgggaattcttcaaacatgggaaataactctctatattccataaaacctgtacaatgtcataataaaaatgatgtacttaatttttaaaaagtt

SEQ ID NO: 124010 - DNA, 199 bp, Homo sapiens
atttgttaaatattgaaaccatattccttcaacatcctaatgaagggaactattcactaacgtctctatacgttgatttataacattattctagataatgcattttaagttaacttttgtaaaaaaaaaatcctaagtttttctttttaagaatatttgcttgggcttcatctaatttttaccttatcccctgaaatta

SEQ ID NO: 124011 - DNA, 610 bp, Homo sapiens
acaggtgtgagccactgcgcccagcccctgctgcactttaagcagagagaaaaacactgtagtcataagagctattaaatacagtacataattttaaaacatttttgaaacacagaaaacacatacttttttgatctcaggaaggaggaggagttagtaggggaggctaaaagggaagttgcacccagtttgggtctaacatgttgtggtagtaacttgtgttcttcatattataggtaaagaagtcattgactacttttaaatagggagattaggtggtcagtgtagagttgctgggtgagcagaatgcataaatgtgcctgattaactaaagatggcaaggattatggatattcaaatagcctttcccacctctgttgatgaattggtagtaacctacatcctgttggtaagtagtcagtctagctaggaatgggctatccaataaatattgtgagaggaaaatggaaagtagttagatattacatttgaagaaaaattaataatttgaaatgcctctagggagcttgtaaaattggtaggatgacagtaacttaaacagaaggaaaagaaggcaatgggaaataattttgagagtctccgtcgaact

SEQ ID NO: 124012 - DNA, 360 bp, Homo sapiens
acaggtgtgagccactgcgcccagcccctgctgcactttaagcagagagaaaaacactgtagtcataagagctattaaatacagtacataattttaaaacatttttgaaacacagaaaacacatacttttttgatctcaggaaggaggaggagttagtaggggaggcttgcacccatccatgcttctgagcgtgcactcacacatgcatgcacactaccactcattcacatacactcacacacacttgcactcatgccctttacactgtgcacattcagatccacaccatgtacactcatacactggcaaacccacacatgcatcacacacctacacttgcactgtcacacgcacataca

SEQ ID NO: 124013 - DNA, 371 bp, Homo sapiens
actttagggggtcaaggccagaggattgctggagaccagcctgggcaacacagtgacaccctgtttctacaaaaatttttttaattagctgggcgtggtggtgcacacctgtaatcccagctcctctggaagctgaggtgggaggtcaaggctgcagtgagctgtaaatgcagcatggcacttcatcctgggcaacagagcaagaccctgttttctttaaaaaagcacaccaaaaccgtgtcttactcattctgcctttataaaattccaggcccaggttttgttgttatttaaagagtctatggcttttttggataaattgcttaaaccagacacttcacatactgacatgtgagaagcgaaggttaatt

SEQ ID NO: 124014 - DNA, 458 bp, Homo sapiens
gtgaaaccacctttccaaaaattataacaggaaattatgacagtgaaagagatcagacctaactgactccatcttgcttctaacctataagctgtccttgttcattcctgggcagaggccaaactaactttggaaggaattcagttcatggtttgactctgaaacaaaattgataacagccctttcccaaaaagacccccttattgcctggggaccagtctgcttttgtaggcctaacaaattagctataatattagacattgcagtttaggggtcatgcagcctctgactccaagagtctgaacctccccaaattgctcctgggggataacatcactattgtaaaacctaagatcagtgcttgagatattttgtagaccctgcactcgatggatcagctggcaccacccagacccgtaatctggctcacccagttctgccatcccacccaggaacag

SEQ ID NO: 124015 - DNA, 286 bp, Homo sapiens
cgccggcgtcagttccgctgcctggcttgcccggcgtcctcgcctcgcctctgggccccgagccgtgccggagcgacgtcggggcaggagcggccggcgcggaggacgccggggaggtgtccgggagccgggccacatgcggcgggctcggccgtaccccgccgggccgtgccggccggagacaacgcggaggggcaggactactcgcgccgcacgagtgggggcggtgcctgtctgcgacgacgtcgcggctggcggcggggcttacctgaggagtagcctacct

SEQ ID NO: 124016 - DNA, 157 bp, Homo sapiens
ccccaatcttttattactaattcctacaaatccttcagatcttagctcaatccacatctcctcaaaagctcagtctaggccaggcgcagtagctcacgcctgtaatctcagcactttgggaggccaagatggtgaaaccccgtctctactaaaaata

SEQ ID NO: 124017 - DNA, 503 bp, Homo sapiens
taccaaatgaatgaactctgtttcgataaaactttatttacagaaacattctgtgggccagacttggcctaggggccagtttcccaggccatagtttgctgaacttctgttacaaaacataataaagagggggaaaacccattttacaaaaaaatacctgcctcaaaacattaccacgtaaggatgtgaaagtaggtctgaagagcagattcatgtttttacctcagactcaccctgcacatacgctgaccaaaatggcagttgcaattgcccagtatataaatgatttatctgcctctcatggctcagcacagtgtcggattccataagttgcatactagccttcacaattcgatatataaatatgaaaacaaacaccaaacctgagccaggcacagtggctcatgcctgtaatcccagcactttgggaggccaaggctggtggattacttgaggtcaggagttggagaccagcctggcaacatggtgaaatcccatctcta

SEQ ID NO: 124018 - DNA, 358 bp, Homo sapiens
tcaaggggttcagaaagataactatgtataagtaaatacacacatagtacacaaaagttaaaggcatttgttttacaatgctaacaacaggtgaatctggataaattttttttcttttctttctttctttttttttttggagacagagtctcgctctattacccaggatagaatgcagtggcatgatctgggctcactgcaacctccacttttttttttttttttttttttttttttttttatttttttattttttttttttttttttttttttttttttttttttttatttttttttttttttttttttttttttagtttcgtttttttattttgtctttatatttatataagacag

SEQ ID NO: 124019 - DNA, 190 bp, Homo sapiens
gcacagaggagcacctgaacaagccccactcatggagcattagagaaggcctcctggaggaggtggcattgagattagctaggcagtgagctaagggcagtgcagaggcatgaaggcgagaaagcgtacactgtgttttgtggcctgtctggggttcattgtgctgaagtacgtgagtgtctgtgacaga

SEQ ID NO: 124020 - DNA, 355 bp, Homo sapiens
tctgcaccacagcgatctaggggtactaagtatagttgtattacgaggacgtattgtgtgaaatatggacttttagtgtattcatcacctaaataatgtacattgtacccagtaggtggcatttcatccatcacccctccatcctctcgctgtgtggagtcctcagtgtctgttattcccctctgtgtgtctgttctgtgtgcacccattgtttagccccgtcttataagggagaacatgcagttttttgttttctgtttctgagtcatagtgggcatcctgtattctatatggcaacactaaagacaggtagtgtcatcggtgctgaggtgggggcaccgtaggcctgtgggga

SEQ ID NO: 124021 - DNA, 509 bp, Homo sapiens
ctccatgaatccttacctcgatgccaaatcacattaggctcccatccacctgaattcaccaaccaacccagctttatctattattccacacaatgaaactaaacgggtgacctcacctaatgccgtaagaaagcagttgtacaattcctcccactctcaccaggacactgtataacttaatgtaaaaaaaaaatacaatcaactgtgcatgttagtttaaaacacattgaaacatgatcagtcaatagcagttgtattgctttttccttctggaaggaagtgcatgtttcaaatacctcctcacatttatatgctaatttaccactgttttaaattcataaattcagataatgactatagattatttaagaagtaggaatagtttctacatacaattttgcatgttttcacagttaataaaatgttcaagctgaattgtaaagcctttttgtcatatcaagctgggaacatttttatttaaaattctttcagtacaagaaagtgtgctg

SEQ ID NO: 124022 - DNA, 311 bp, Homo sapiens
cagtccccattctctgtagggtcccacatctatcaggtgctcagaccctgcccttcaggatgtatcctctctacctggggaccatccagtgttttctcttactcggcctccaattgtgatcgcaatgccagcagctgtgctgatggccccctgaaattgacttggcaattcactatcctcactccagtgagcttctaaaaactcaataaacttgatctttgccccgcctcctgccacttgaagctttggtggcaatgatgatggtgatgatgatgatgaagatgttgaagaaggggatggggagaagggag

SEQ ID NO: 124023 - DNA, 272 bp, Homo sapiens
aacacccagctatgggattggaggagtccacgtgggcacctccatatgctgccatcagagactagaagaatgtgggataaggacagacacgcttaggaaaaaacaaggcgaaacacagcaggacaaaaactgaacctctggcacgatcattcgttgaatttgcaaaaggaaaaagaaaataccaagttccaaatctatccctagaaaaatgggtggtgactgggtgctgtggctcacgcttgtaatcccagcactttgagaggccaaggcag

SEQ ID NO: 124024 - DNA, 381 bp, Homo sapiens
ttctacagtattgcacaagcgaggaggcgagatcagggggagagtggcatgaggagggcagctgtgctaagagagatggcgcagcagagtggggccagaaaggcctctgggaggtgacagatgagcttcaaggtcaagcagagtccgcagtgcaaatcaggcgtaggaattgggggagaaaagggcacactaagcagaggaacaaggctggggacttgccagccgtttgccagggtgggtagacaggccagagaaggggccggcagtgcagagcccacatggggtgctggagagttggggtgctctctgagggcagtggggagtcagtgaaaggccaggtgaaattccatctgtcttctgttatcattgcttgttccgctg

SEQ ID NO: 124025 - DNA, 670 bp, Homo sapiens
agcgggggaggagcggggcggtgagagcctggctaggcaggctggaaacagtagctcttaacggtcccccgcccgttggtggcaaggcggctggactggaatcccagcaggcgacatgcgaggaggcgggcagcccaggagggttggacacggcaatgtggacctcgccgcttccacaacgatgctggctactgatcgcgtgcacttccttgccaaagaaaagaaattaatgttatgactggatgaagacaattgtgaagaaactgcactttgaggttgtctatctctgtattctgatggaaaagcgtggagtttagaagcactgctcactccttcagtttctaacaagtttgagactatggttaggtggtgaggaaggcaggctcagcacccaagccttggggagacgcagaaagggcccatcccaggcactcaggtggagcaggtggtctgtcctagagaacgttccatgtggatttgagaagaatatatattctcatgttggatgcagtgctgtgcatatgtttgttaggtttagttgttttatgttgttgttcatgttttctattttttatcttctgtctacttgttctatccattaatataagtgaagcattaaagtctccaactattactgttgaaacaccaaaaaaaaaatctctccagcgct

SEQ ID NO: 124026 - DNA, 388 bp, Homo sapiens
ctaagatcacacagctactaagtaacaagtatgctgaagtccaaatctgacttctgatatgggaaagcacagtgggagagaaggcgattatactgactatttagtgttctgaatgccgtcttaaggcattctgtactccatactgggtcaagggcatccacatcatctgggaacttgttagaaacgcaaattctcacatctactccagacccattgaatcagaaactctagaaggtggggcacaactaactgtttcacagtacctccagctgattatgatgcatataaaattttgagaacccctggcctagatgggaaagatgctacacaaccagaattcattggggtttataaattgactgcctataaaatggagaaagagaaaatg

SEQ ID NO: 124027 - DNA, 874 bp, Homo sapiens
atctcttggctgctagggcttacattgttgtgtgataggcacccatgtgaatgtttacaacagtacattgattggtgatagtgagctatgacaaatgggtacctgctaagttagggtttttactatcccagcaacctaggatataaggttttgcctagggttgactgaatgatgaatggtggcccctagccagcatacaccaactttcctgcataatttgggaaagagaagatggttgatatagcaaagggacagtaaagaagagacctccagcagcagagtacatatgcttgtgaaatattttcctagtaagaatcattaaaattttttttagagacagagtcttgttctgtctcccaggctggagtgcagtggcacaattgcagctcactacaagctcaaactcctgggctctaatcctgggaagaatcttaattaaaaagataaagtttagaatttaggagtttgtcaggaagaatgagatcagaagaaaaaaattttaaaaatgccaccacatatcagtatataatttatagtatcctaaaatgagttttctataggatcatagttatcaactatattgcaattctttatttaggatagtatgataatagatacagtttattcagtatggacccaaatatttaaccgtatcataatttatgttgagatactgtttttttagtatcctaagttaaaactaccttcataataaattgttttcttgagttgtgagctatcagtagaatgtaacgtgtgttgtccagacaggccagtgctccacccctacaaggaaatagggtagtggcttccctgtttccctgcttttgtgaatgtaaagtcttaggcaggtcaaattactcaactctagaat

SEQ ID NO: 124028 - DNA, 699 bp, Homo sapiens
gtaacatttgctcattttgaacaatattgtatgagtagtgtgaagtgatttttaaaatgtctgtcatttttttcatgttcccattttattaaaaggagggatggaactatattgtggaagctaatgtaatttttgtctctaagaggtttttttttctttttagactaaaagggcttaacagaagaaaaatttatctttcttaattgctaatttaaaggctaattttttccctagattgcttagttttgactatttgattccatcatatcaagctgtgaatttccttcattttcttgttttgaggtttcattattaaatattgtcaaaaataagtggctcatcaactctcttgaaagtgtcttattgctatgtttttttttgtcagtatttgacattctgaattgaagatgtgagttggaaacctggttaattaccaagttacataatcctgtatttattaactaggttagactacatacagactgttcttgaaaatgaaagtgctgttataactcagaaaacacattcactatggcccatttcaagttaattgaaggattgagcctttgatagtgcatttgccctgtgcggctctgttacatgcattctttctaggcaaagatgcattgttaccattctctcatggtatgttgaatatttcattagattcaatatttcaatattaatccaagctttttt

SEQ ID NO: 124029 - DNA, 250 bp, Homo sapiens
tgctgggattccaggcgtgggtcaccatgtctggccgaacattctctttcataagcacagtacaactatcaaaacaagaaatttaacatggacatgatacttttatctaatgcaaaattcatgttccaatttcatcaattgtcccaataacgttccttattgctgttttttctcctggcttggaatccaattcaggatcacatgttacatttatttatttatcttttccgagacaccctggtgacttaac

SEQ ID NO: 124030 - DNA, 184 bp, Homo sapiens
ggaaaaacaaaaaccaataatggttgtattggggtcaactattcttttacttctttactttccaaattttctttataagtatgcttgaattttataaaggaaaagagaattactgcatctattacgtttttaagctgcatattttgtctcaaattatacattttgatggtccctcgtggtctag

SEQ ID NO: 124031 - DNA, 208 bp, Homo sapiens
agcctcagggctgctgccaagtgcccacctccagaagccgctgatgggagacccgacgtaactgggacagagccaggttccagcttcctctgaagttatctaccatgggcggatctgccaagcacacgtggaccctgagcctgatgggaggcaaactgtgtaacctacctgggggaagaagccagtgcctgattgtgcacagcactaa

SEQ ID NO: 124032 - DNA, 560 bp, Homo sapiens
tagcatagtagaatatatatcataaaatggcttgcctgtatgggttgctagggacggacagtgagaattgcaatctgtacagtgattttggaggatgtccctgactcatttcaatgttaacgacagttgttggtatctctgtcttaactcttttattaacattccactctgtaacaaacagaggattacatatcgtagataaagttagggcctttcttatgactccacacacctgtactctcctagtaccttttgttcacagaggtatcaccacctgtgctcagaatagcatttccaactcaattgattcatggggcaggaaaaatgagttcttgtgccagtacgaatagagttgtggggaggaagctgagaaagagaaaattaggaaatgcatttctaatttatcaagatatgagaatgggcacttcattttcttacatatactcccagtcacacagtctgtatgaccactggataatttattctaggtgcacaaaggtcttaattggtactgatatttatagcattcatcacacaaagaaataaaagaaaataaaaga

SEQ ID NO: 124033 - DNA, 211 bp, Homo sapiens
taggagaattgcttgaacctgggaggtggaggctgcagttagccgagattgtgccattacacgctaccttgggcaacaaaagcaaaactccgcttcaaaaaaaaaaaaggaaattctgcttcaatttccttattatttattagtccattcagattttctgtttcttcttgattcagtcttggtaagttgtatatttgtggaaatgttttta

SEQ ID NO: 124034 - DNA, 404 bp, Homo sapiens
gtatatatcagctcggtacccccgtatgctttggagcattgagaggaactaacagctttacaaacttcaacctctcttgagtcattgccatccccaggcatgtgaaaaataattacaagtgtaggaaagaaatacagcatagtagcataacatattaaagagatttaggaattctagttcacactaaattcattgagaatgaagcgtgctgtagcatgacactctgcaatcttagggtatagtaacagaggccatataaggaaatgaatgaggaggtcacccctccttcagtaagttgaattctggattccttaatttgagaagaaagagcaattaagtgtatattcagatgagagccaccaagaccctgaggagatctgaaaacaaggactgtatgatttttt

SEQ ID NO: 124035 - DNA, 498 bp, Homo sapiens
caaagtgctgggattataggcatctgcaccacagcaggctgaattcttgttacaactataagtctagaacttctaattccgaaacatccttcagttccatagactgaacagttgagaatagttggatggaaagaaaagaggaaggcaagagagaggtagggcagggagaggagagttgagcaaaggaggaaaagaaagtgaatttttgctgcctgctgagtgtctggccatgtttgtttaccatggtaaacaaacaacaagtagattgagttgggggctgaaaggggcaggcagaaagccttctgtgaaggacctgaagtgtcaatcaacaaagtagtctgaaagtcacaggtatatgaaggtaaggacagttcttatccctgtccttggatttacaactagcttttaacgtactcttttaagttgttaagactgttgtttattttgaaattaccagcagctccgctgtgggtgcagaattccggctcggcgcttggg

SEQ ID NO: 124036 - DNA, 215 bp, Homo sapiens
tgtgtgtgtgtgtgtgagagggagagagatccaaaaagagaaaactttgtaaagatttggttccattttgtctgagaaagactggattggcattcctcatctgtatgaaacacttctcaacagattccatacaatatatcgcttggaaaattcaagagctgccaggtctctagctcttgctagcatttggttagcatttcactgtatataagatc

SEQ ID NO: 124037 - DNA, 369 bp, Homo sapiens
gaacaattttctctggggtctttgctctatgtatatacctcctagggaacttaagtgagtggtttcgttgtcacgggagttgaacctacaatatttgacaccctgggagattggaaacaaaaaattcaaattgcattcccaacatgtttattgaacctgtgccattttcagtactatattaggtattaaaaatataaaaaacaaaaaagattacatacttcactaattttaaggaactctgagtaaaatctgataaatatacattctattataatacaatgtgctaaattcaataaaagttacgcacaaggttttataaaagcactgtggacccaatacacgtacttgagatagcaaagaccccaaaag

SEQ ID NO: 124038 - DNA, 180 bp, Homo sapiens
tacatatagatgatcagtgatttattttacatgaacagctttgtccttttatatgaaagggctaccgggatgaataaatggacagaaatggaaaatgttctaaccttctgttgaagtataacatatgtatgcaatgcagcatttgatgaatttttatagagaagtgaacacatctgtggg

SEQ ID NO: 124039 - DNA, 431 bp, Homo sapiens
tgcctcagcctcctcagtagctgggactacaggcacgagccattaagcctggcttgaggggaaaagtcttttcccatggtgggaggagaagaattaacagctgtggaccagctgtgggcaagctgtgtcttttccttgcttgaaggcatcttcttaacattttctctctgaaggcataaataagcttccaggttttcaccctattttcaaagaacttttcaaactctagccttaaaatccattagggtttattacatctgcttctttcagaaaaggtagataataagtaactttgcaccactgaggtaagcaagcaattgtttcccatattaaatgtgttggccctcaccaaggtacatgagaagcttggaccacgatctgaatcctaaagggacttctgctgggactgaatgcttgcattagcggttcac

SEQ ID NO: 124040 - DNA, 299 bp, Homo sapiens
tgccaatttttccattgacaggcttgtcttctttttaattgtcatagttctgtacttatttccgatactaattttctgtcagtttttttatatggcaaatctcagcttgtgacttttcagtcagagaaaagtatcttttaatgaataaaagttcacgattttaatattttcttttatacaatgtatattttggaccacctttaaataagcctttctctactccaaagatcatcaagtattattctattttgtcttctaaatgtttttaaattttgcctttcacatttaagttcttgatc

SEQ ID NO: 124041 - DNA, 345 bp, Homo sapiens
  misc_feature (22)..(22): n is a, c, g, or t
agcggcgccctttttttgtaanttcacttccctgactctactgaggccccacactgccctatccatatggtggattaatgtttgtattgttgttatcatctttcagtcacatgctgcggtactgttgtcactttagatctctgcacgttggataattaggagttcacagagttatgtgtacacgtggtttgcagctcaccagtgtctgcatttcttctcattttgaactttgcaggagccttatgtcagcttttggacattatttcttagaggacttgggatgtcttccgtatattatacatctgtctgtttctcttaaggatgtaaggtctgtaagaatagggg

SEQ ID NO: 124042 - DNA, 203 bp, Homo sapiens
agaccatgaccttttaactctgtgttagtgaaggtgagcagatattagatgtgagaagaacactcctagacaattgtggttgtgtggaaatgcagtatagaatatggcttgtcttcatcataaactcctgggcgctggaagcacttgtggtggagctctgcggatagttcttgccttgcagggctaggataggatctgcatgt

SEQ ID NO: 124043 - DNA, 566 bp, Homo sapiens
ggtaccgattacgctcctagacggcagaggtgacctcctagggttctcaggaggggagctgtgccttgtagagtcacggtcactacagaaagtgctgcagccagcccacccagatcaagatctggcatgttggccttctttgttcacgttcctcattagcagctgcgcagttttaaagacacatgccggaactgggccttagtctttgtcgctggagcaaaataaagtagctctctgtggacacgggaggttccagagcaccgaatggagagaaacaggtttgggtcctggctttgctgtgtcactgtctgtgtgacttgaagctggtcactccccaaatcctgctccttgtctgtagagtgggcctggcattttctcgtccctgggaccgctgtgtggagtgtgcgttacagggaaggttcagggctttgctgctgctcagaaagtggtggtggatggatccgtatagggtttgaatctaaggtgctggcctctcagcaccttgttgtaataggctgttattgtacagtggaataagggagctggccctcttctgattctcttcc

SEQ ID NO: 124044 - DNA, 258 bp, Homo sapiens
ttccaactcagcaactagagggatccttttaaaatacaaatcaaatcagatccctcctctgctgaggacctttcagtagttccattttgactgagaatcaaaatctttacgatctgaccaccccatgtctgttaccactttatcctcatcctctacaattcccgattctctttgatccagctcctagcagccacacccacacctgagggcctctgcaatggctcttcctctgcaaagagctctcttccccccgatgcc

SEQ ID NO: 124045 - DNA, 427 bp, Homo sapiens
tcccccaaagatcgcaagtgctgtgggttataaacgaagccatgcatcatggggccgcctgtaatattttaaaagtggtgttggaaaaccgctccaataaacttgggagaagacggatcacctttctgaaaacgcaaaataggatgctgtgggcataaatatatgcaaagaccagattttgatccatcctgagttaagaagcaaggcctcgttcctcttttctggcattcctggtgctccagctgtaagaggtttattactggagctcagctcacgtttacatttcaggctgattgttggcaccagcgtcacatctggtattacttcccccaagtggctgcattctgcaccaggcacccggccctgtcaccctcagaagtcccctccaacatttccccacaatctcagagaagaagggaaaatgcca

SEQ ID NO: 124046 - DNA, 360 bp, Homo sapiens
tggaaatcaagtctggctgatgtcaggggcagtaaagcccatcccatgtagccacgtagctttcccagttccactcaggctgtggtggctgtcccttgctagtgagaaaaaggaacttgactgatacctgaacaacaccctagcagcaattccagtgggtgttcaagcaatgtcttcttcaaggcacctcacatatagttaggaaaaacaaaactttacctttacagagttctttcctctagtaaaccaaatgacatgcctcacatttttaaggtgatgaaaagagaggtcagtaaaattttccccaagaaggaaagggtgcttgggagtcctgcatggggggctgggggtggggtgggg

SEQ ID NO: 124047 - DNA, 258 bp, Homo sapiens
tgaatcctgtgcccacctgatgtaccatctcccatccttggctttgggagaagataggccacagggaccttcatggtttgctgcaagctcaatgagaatagaaatgcccaatggggatttgcttgtgaacagcagtcccaggtcatcttcagaggagaccaaggccccattgtggccaatggccaagatctgagtttgaagcaaaaaggaaagacttcctagtgggccacgtaagtgctcattatatgtgtgccatgg

SEQ ID NO: 124048 - DNA, 286 bp, Homo sapiens
atggcgacgctcggagttcaaatatgacaacatggagattcatctttatctatgataaatgcctgagtccctggcctgtcctgtggaaggtgggccctataggggattaaggctctttgtcttgggttaaatgagtccctggcctgtcctgtggaacgctggccctatgggggctgaggctctttgtcttgggttaaatgagggttgccatgtggatgctgttaggaggagagtattaagtgaaaatgctatacaaagtccatgctttctccgtggcggtcgccat

SEQ ID NO: 124049 - DNA, 712 bp, Homo sapiens
cttgggagggcactgttttcttagagtgtaaactcataacatcatcccccattgtttgagcttccctatgggatgcccaggggagatagaaagtagaagtgccagaatgtcctccaaatggatgtccccatgtttacatcaatgaaagaatcatttcagaaatttttgcagaacatcttgctccaagagagttataacagccaaaggcaaagtggaaccgcccacatcctatctattttcatactgtaggataactcagttaagattctagaggtcacagttcacgtccactctccttttcagaaaaagctaagcttaaactattggcaaatttgtaaatatcctctcgttaagattttagcaaaacacaacagaattgcaacagttcaatttacgtcttcaagttgaagtaaattttaagagccattacagaggagtcttgaatatttatcacccctatttagggagcacctataaatgccaagcagcaagctaaatgtcctatatacatcattatacatcacatttgatcttcacgggaatgctagagggtgaaattattagtcttggtttacaaacagcaataatgaagttcacaaaggttaaataatcttcccaagtttcagcagctagcaagaggcagtattcactggacttgatggctcatgcctgtaatcccagcactttgggaggccgaggcaggtggatcaca

SEQ ID NO: 124050 - DNA, 338 bp, Homo sapiens
cataagctcaattgtacatggtcacacaattaagaattgagctgcaattaaaactcagaaggagtgacttcaaaatcaattatcccatcaggctcacagattttaaaaaaatgtgtaagttgccttatggaaattacacaacacagaaaagtttctaagtagagaaaataggtaaacaagaaaaagtgaggaaaagaatcttctacccagattgccagtccagtgtccctacaatagcttcctgtgcacgctcgcccctgagttagcagctcgcccctgagttagcagctcgccctgagttagcagctcgccctgagttagcagctcgcccctgagtt

SEQ ID NO: 124051 - DNA, 363 bp, Homo sapiens
ccaagggctgaggacagcaccttcctagagggctgtgcacaagccaagttctcagcagcaacttttctgagagaaaaccatctagctccaaatcacgtgttcattatccattttcttcccaccttttgccacttctcctttttctgtggtccctccctgtttagcaggtatggaaggtttgggggagaagccactcattttctctgcatctcttctggccctgtttctacctccaaatctgcaccatagccccatcctcagcttccttgtatttcctgaagctgtgtcctctctcccccagcccctggccgcacccatctcagtgtaatggtaccataaaggggccaaggaagagcctgtttc

SEQ ID NO: 124052 - DNA, 194 bp, Homo sapiens
cagagtggaggaatgtacttaaaacatgtgtattcactcaatatttatttcctgaatgtttactacaagccaggcactgttctaagccgtggagataccgcagaaaacaagacaaagttctgctcatatgagccttacattctagaggaagacacaaaaaataaacaagtaaaacaaataatatataattctag

SEQ ID NO: 124053 - DNA, 448 bp, Homo sapiens
cagccgttaggatgagaataatgaagcatctgcctctatgagaaagagcgcaagagagaaaccaccccagatcgataacttgtaagtaaccagcatgaaaaagggccaaaaagcttttcttttctttcagttcttaaataagcttttcctggtggtatcactattcatgttggagtgattaagtaaaaacaagaagacagaacatttactaggcaatatgttgtttttattttgtatatttactataaaaatgtttgaaatgcctttatcatctgctgaaaagtaatcatagaattgacattattgcagatggtgtgagagatttttaagattaatgatagtagatatgagttggaatgtaattgttaagcttaaggaaaaaaatctagcatgtagatagagtgtgtttggtgtctttgtgcctgttttatagaaggcacgttacctt

SEQ ID NO: 124054 - DNA, 455 bp, Homo sapiens
tgagcaacttaatttcaaagtccgaagtcgacctcttcaaagttgtataagaagggctgagataatgtttataaaataaaagaagctggccagacacggtggctcacacccataatcccagaactttggaaagccaagccccatagatcgcttgaagccaggggtttgatatcagcgtgggcaacatggtgaaaccctgtctctacaaaaaatacaaaagttagccaggcatggtggcacatgcctgtagtcccagccacttgagaggctgaggtgggagcatcgcttgcgcccaagaggttgaggttgcagcgagccatgatcatgcactgcacccaagcctgggagacagagtgagaccctgtctcaaaaaagtagtaagtaaacaaacaataaagaaagaaacaaactaaatagtgaagataaactgataaatcttagctctcggttttttt

SEQ ID NO: 124055 - DNA, 211 bp, Homo sapiens
aaacaggactgagacaagaaactaacaaagggcattgagaaagaatggtcagagactaaggctggaagagcatcagtagagaagaaggtactggataccaagcaaagacagctgcagaatgtgggaggtaatgttaacggtggttacaccactgaggtgggattttattgactttctattttctctcatttccatatcttatgcaataatt

SEQ ID NO: 124056 - DNA, 533 bp, Homo sapiens
attacatgtggacgaaggaatagaaggaaaggtaacaccatgtgctagtgagtatttttgtttttgtatttgatcgagggaggagttgggaagtcaagagcggtagaaagatggataatagagtaatattcagtcattattctgaaagaatgcacaacccatagtattatagggaataattacaatgcaacgtaagtactaaaataatggcttgttaaaagtaccatagaggtatggtagagggtatgatgaattttatatgtatggagggatgttaagaaagaatttatagaggaggtcctaaaagatgagtacgtattcatcaaggtaaacaacacgatcccagatagaaagaacttggtataaaaggagacagggagactatcaagaggttactgtaatagattaagtgagacacaaaggcaggcaggattctgagcagaaggacagttaagagatacttaagaggcagaatggctaggtgtggtgcctcacgcctgtaatcccagcactttgggaggccaaggcaggtg

SEQ ID NO: 124057 - DNA, 383 bp, Homo sapiens
attgctgaatcacacaaatattttatcttatacccactcctttattgtacctgggagaaaactaaaggattcacacagctaaaccagcaactgccacccctggtatatttatctacagtagttacagttatagaaaaccattagccttgtttaccttgtggtggcttggtgttctgtcacttagtgcagagagacttttaatgaaatcaatctttcaagggtctaggttccaaatatttttttccctaatctgttgccaatttttcagttgtattttgtgagtatcttcctattgagctgactgtgtattccttttactttttcaaccctattatttgatactagatgatattcatgttgcaggccacaaaaaaaagtgttgg

SEQ ID NO: 124058 - DNA, 683 bp, Homo sapiens
attgatctacaaaattaaatatatatatatacactttatttttaaaagctcacctattattaaaaacatgtctttgcaagtttaactgccttgaaatttctattaaaaagaaaattatgtgttaaacatgatgttagttattataaacaaagtgtaataaaattgggagacatataggtatattagcagatacactgacatatttttagaatgaattcagttcttgcattcttaaaattaacagacatatttatccaacttcatagctaactaaaatctacatgtgacgctgatgagttactgcagggtgatggtgcataaggctaattacatgattcattctacttttgtataagacagctttatgcatgtatgcaacttaaaacatggtcaaaaatagaaatacatacattaattacctgaaggagattcagacaaagacataatgtaataatccattaacaaaggaaactgtctagctcactgaaagcaaggtttctatcttctaaagaacctgaacaagtcactcctgggtagcatccaaaccaaacactttgggttaagaggtggagctacactaaaacatttacaatccattcactcctctgacacaataaatacaacagactgtttagactcctaacaagactggggctttaaaaactacatggtttttttttttt

SEQ ID NO: 124059 - DNA, 256 bp, Homo sapiens
aagcaaggctgaatataagtaagtactatactcgataatgcaactcatccccattagcagagatcagagaagggagataccagaccacaaatcctggagcagcctaagcaggcgtttggaaagagggcaacagaggttgcccctgaaggaggacaaaaacaagactccagatggcagctgaaacacatgtgtccaatgttctctttcctgaaaaccccctacagtcagagtgagtattttgtttgcttgttctctg

SEQ ID NO: 124060 - DNA, 495 bp, Homo sapiens
gcgttctagaggatccctgcatttactccatggcttgctcaccattcaggtcaatgttccactacaggtgctttattctggcatgagggaatattccttgctacggcagacagaaatagcctaacaacctggttaagcagaccattagagataccagagattctatccaccggtgtcaggcagatgctgagagtcttgacctttctctctgtcctttgaaaggcacaagcatttgcaatggagaaaataaaaggaggtgagtatgtgctaagagccggaatgtactgggccattcccaatctgtgaatttaaaagagaactgcagcagaacaggaaatgggctgaagtttagtcatttcattttccctccctctgagactattattgttctctctctatctgtaacatgaaagatagcctgtgctttcattataaaccactttcctcatctggatttctgaagtccttatctgtggcttgccacaccttacatga

SEQ ID NO: 124061 - DNA, 256 bp, Homo sapiens
attttcttgtatattaatatattttatgcctgttgaatcacacaaataactaggactttgtattttaagtttagcactagattacctggcttcttactctagttttgccattcactagctgtgtggccttacacaagttatttaacctctctgtgcctttgtttcctcatctgtctacaatgggtcagccctcatatctgaggtgcattgtttctaagacccccatggatactaaaatctatggatgctaaagttc

SEQ ID NO: 124062 - DNA, 348 bp, Homo sapiens
tactaccgattgaacatccctaattgaaaatctgaaatcgaaaatgtgccaaaaatctgaaactataagtgctgacatgacatgacaagtggaaaattctacatataagtacttaacacagactttgttttatgcacaaaactattttaattattaactggtcgctattatggcttgtgcctgtaatcccagctactctggaggctgaggtgggatgatcacttgaggccaggagttcaataccagcctgggcaatataaggagacccttgtctctacaaaagtaaaaaaattagccaggtatgttggtgcacacctatagtcccagctactcaggaggctgaggtgg

SEQ ID NO: 124063 - DNA, 445 bp, Homo sapiens
  misc_feature (44)..(44): n is a, c, g, or t
gacctgaaggcaggcgcgaattcactagtgattgtgagctgagntcgcacccagcctcttctttggtattcttatctgttttattccatcaataaaaaaaggcgtaagagcaattctataaattcttttgaagattccaggaatgtaaactatgtgaaaggggctaccacagtactgtgcacagatgtccaatgaatattagagggtcccgccttattttctcacctctatcgaggtattttcctctgatccttgtgctattttccttctaaacacgtgtccaggactgaaggctgctcacctttaccccaatataaatgtctatcccccattacaactcgggttccttcaggtcaggcctgtggatttcacatctctgtccccagcccctgcacattgtctggcacagagcaggtgtttggtgacagctgggttgacttggcca

SEQ ID NO: 124064 - DNA, 280 bp, Homo sapiens
gggtcatactgagcaagtattacatagtagtaatgatgaggtcctacaaggcaatttgaattaacttggacactaaaactaaatggttcttgaatcctatgatctcataggtcttcagattaaacaattcatcgttagtaaagcatctaacagtgcctgttctgaatactgattccctttctcttcaatctggttggtcttgcctctaactccaaggttccgcccatttgcagattatggaaattaggtaactgaatttcctaacttgtaagtaaaacaa

SEQ ID NO: 124065 - DNA, 414 bp, Homo sapiens
gagatactttatagactaacattctccaatcttgggtcaaagttgttacaatatagttagaatagtaattatctactcccagtacctgggagtccctgattgtccctgatctcaagacaattttattacactgacgcttcctctgcattaaatatcagggattcagattaagtttctgtcctcccagagtgcagaacctaggggtaaggaggtaaatgataaaccaagaatgctaaccagaatgttatatttcttaggagagagctattacctctcccttggatagaaggagagagtcaagccacatttcagaagaagtgtggcagatttggagggctgatacatccctctttaaggaaatatttgtgacttcaaggaagatggttagctgatagcctttagctattagattgt

SEQ ID NO: 124066 - DNA, 344 bp, Homo sapiens
cattgatgagatgaataatgctgctatggacgttcatctacaaatttttgtgtgaacatgttttcagacctcttgagtatatacctagaggagaactgcaaggttatatgggaactctgtttaactttttgaagacttgccaaactgtgttcctaatctaccataccattatacgttctcactagcagtgtataagggttccagttttctccacatttttaccaacatttgttaattatacccatctcactgggtatgagatagtctctaaactgtggttttcatttctctaatgactaatgatgttgggtatcttttctgtatttagaagaaatgcttggccc

SEQ ID NO: 124067 - DNA, 902 bp, Homo sapiens
gtgttgtactggggtttctaaccagggcaattgggcaacagaaataaatttaaagtatcagattgaaaaggaaaaagtacagctatctctatttttagaggacatgatcttgcaaatttgaaaatgctaagaaatccacaaaaatactatttattggccaggcgcagtggctcaagcctgtaatcccagcactttgggaggctgaggcagggagatcaccacatcaggagttcgagaccagcctggccaacatggtgaaaccccataattactaaaaataccaaaatattatctgcacgcctgtaatctcagctacttaggaggctgaggcaggagaatcgcttgaacccaggaggcagaggttgcagtgagctgagatcacaccactgcactacagcttgggtgacagagcgagactctgcccaatgaacaaaaaaacaaaacaaaacaaacaaacaaaaaacctatttattatagctaatgaacaaattcagcaataatgcagggtagaagacaaatacagaaaaataaattatattttcaataattagcagtgaataatccaaaaaccaaaataagaaaacagtttcatctacaattgcaataaaaaataaaatacttagaaataaattgaacaacataagtgcaaatattatagggtgaaaatgaccaacattattgaaataaattttataaaaaccctaaggtaatgaaaagacatttttgagttcatgaattggaagacttgttattatgatgatgccaatattccccaaatttatctacagatttaatgcaatctctataaatatcccaactgccattttgcagacattgacaacctgattccaacattcatatgaaaaggcaagagatccagaatagtcaaaactgtcttggag

SEQ ID NO: 124068 - DNA, 575 bp, Homo sapiens
acagaactatacacttaaaaatggttaagatggtaaattgtatgtggattttaccacaattaagcccacagatatctgctatccaaatccttcctactgactttatccgggtctaagatctcctatttgggttactacagcagctactgtcttccttggttcattacattctctcctcactctaacttaacctgtagatcattaacaggtttaccttcctggtttaccacattaatccctggcctccaaactttcaaaggctctctataccttgcacaacaggataaaagtagaaatctcctcaattcagcactcaaactcttctacagacaaatagctttccaactgactaaagtttcctaacgaaaacattctcctcaggaaattcagttgtcagctcatcctagtctccttctatttccctccccctaagctaatcttcactttacactcttgctttttcctcacaaagtaactgctacaatctctcggtaaatctaaactttcataggccagctcaaatccgaagtttcccaagttctttggactcttggggtctcactcatctctctcta

SEQ ID NO: 124069 - DNA, 678 bp, Homo sapiens
ctaaccaggttaggcataggcagatggggcaaatgtgctgggaaggtttctgggaaagggtctctaaattcttaaaaagtgcaagggaaatcttctatctctgtatagaaatgtccaaagaggtgatctaggaatttggcagccaccctggacccagggggaacaaacagaagagctccagctagtgccctaggctgcatgtgcaattccatcactgagctgctaaaacaacagccctagagctgcctcacttgggcttcctgtttggtgagctaacaagcccctttttgttctgaacgtttttattgagctttattttcaaaaaagcagcctgattcatgcacatatctttagaagaaatttaaaacgccctagaaaagaatatcttcagtttaaaatctaagcaatttggaatttacaggaatatattcctcttagttccagttactcaccattaaaaaataatggtcctcaggttcagctcgaagatatttaaaaaccacttgctccatgaacctttccataagatcccagtcttcaatgattccatgtcgtatcggccactggaggaagagacaccagagttgtcaagcctcagttcgcaacaataagagcaacagtttaacagtggcacagaagaaactgtattattaagaataaaggtctccttctcattgc

SEQ ID NO: 124070 - DNA, 195 bp, Homo sapiens
agtcaacacctatcagaactatataaggcctaggttaagaatgccatttcctaagctccacaccagacttactggaaggcacctggaaatgagaaccagaaatctccttgtgtagcaaagtccttagcggtttttatgtgcactggagtctgagaaaggagtccagtggcccactatgatgaggtgacagccctg

SEQ ID NO: 124071 - DNA, 607 bp, Homo sapiens
tgcagtggcaccatcccggctcactgcaagctctgcctcccgggttcacgacattctcctgcctcagccttccgagtagctagggctacaggctcccgccaccacgcccggctaatttttgtatttttaagtagagacggggtttcaccatgttagccagaatggtcttgatctcctgacctcgtaatccaccggcctcagcctcccaaagtgctgagattacaggcgtgagctactgctcctggctccagttagcatatttttaagaaaagatttaatatattcttttattttaactttacttatttatgtacttaatttttacttgagacagagtttcactctgtcacccaagctagagacaaggttttaccatgttgctcagactggtctcaaactcctgggcccgagcaatccacctaccttggcttcccaaaagtgctgggattacaggcatgagccactgcacctggcctatttcaactttatataacagcagttttcacacgtactccaaagaaaacagtataatgagccatcctttacccatcaccaagcttcaacaattatcaaccataaggacttttcaaagaatgtatttaaaggc

SEQ ID NO: 124072 - DNA, 781 bp, Homo sapiens
aaaggtggagccaacagcattgcagccacaatggatgtaggtgtgacagagaagcttcaaggagaactaaatttgggggccggcaactcaaagaatggagttgccatttactatgatggagaagactatgagaaaggcagatatgggggagaaagatacagaattaggttttttaaacctaagtttgagatgtctattcaggaggagctacctacccactaagcattggttatttgtgaggtccaggagagaggtctaagctgaagaggttatttgggaatcatctgtgtattatggttttatatgataccctctattggtgtaaatggaattattgtaataaagttttgcaagagctcatctgtttcacaaagcaagatacccttgtgtatagactatatgcagtagtcccatggtgagaagttgtcctgaactcctccccttgaggtttgtgtggtatgacatctcatttgcccatttcgaagggattaaatgcctccctcctttctctatcttaccatatccccaagaggcaaccatgtggtcgccagcagagaatagctcagttgctcttgcagcacattttaaagcagatgagaaaagccttcacgctgaaatagaaatatctcagagaaaacttggctccaaggcaccccaagagagtggggggggttcctgatatgggagggcccagcagaacgcctcaaggcatcaccttcctcaacatgcacaaatgtggctgccataacacaaagcttctatataaatatgtcaaggagca

SEQ ID NO: 124073 - DNA, 573 bp, Homo sapiens
gtgccccccactttctactatcccaacagcacctgccgagtgccccccccccactttctactatccagacagcacctgccgagtgccccccactctctactatcccgacagcacctgccgagtgccccccactttctactatccagacagcacctgccgagtgccccccactctctatcacaacagcacctgctgagtgccccccactttctactatcccaacagcacctgccgagtgccccccactttctgctatccagacagcacctgctgagtgtcccccactctctactatcccgacagtacctgccgagtgccccccactttctgctatccagagagcacctgccgagtgcccccactctctactatctcgacagcacctgccgagtgctccccactttctactatccagacagcacctgccgagtgccccccactttctactatccagacagcacctgccgagtgtcccccactttctgctatcccgacagcacctcctgggaaattcaccctcagctgtggtctgtgtcccagcccgggccctgggtttggtgtggggctctaggt

SEQ ID NO: 124074 - DNA, 379 bp, Homo sapiens
ggaacttacatttaagtatttgttctgtgaaagagtggatgaaaaggttaaactttactctgtgtttcattcttccccattttggttttgagagcctgaaagttacattgctgttgtcctccataaatgatgtgctgattccatggaaggactgtcagtggcatatacatcaaacttaatcagctctgatgaaacttcttacaaacttggccttcatttccttctttacattgcttttcttccacagttaaacccagttatttcagttatatatttcagtctgtatttttatccattcgttcataattgcttcaaacagaggtcagtagaaataggtctgtcattctctctccacttctttccccacttctactgccca

SEQ ID NO: 124075 - DNA, 337 bp, Homo sapiens
gagtttatttcgatgtttcctgtgaagtagagatcacttttttttttcataaagataaccctgaaatatggatccaattttctttccataaggataatctagtgaccaagcatcctttattgaatagtccatctgttccctacaacttttctaatgccacttaaatgtttccatatatatgagagtttgtatctgtattttctctattccataccattggtctttttgcctatcttgtactacactgccttaattctcatagctttataataattatttatatttgatagggcaagtctcactcccttgttctttatttttcagactttctgtcata

SEQ ID NO: 124076 - DNA, 726 bp, Homo sapiens
cgcccacctcagccttccaaagtgctgggattataggcgtgagctaccatgcttggccctaaactatattttttaaaaatgcttaaagactactgcttggcaaaaaataaaaataaaaaataataacgaaatcaccatcagcaaagtaagaatccaaattagcaaactagaaaaaatatgtgtaacgcatatgataaacaaagggctaatctctgttaacaatcaacaactcaatagagaaatgaacaaaggatataaacagatactgcataggaaaggacattgaaatgactcaaatacatatgaaaagatgcttactttcactcttacgagagaaatgtgaattaaaacatatttttatctgtcaaattaacaaataaattttaaaaaggagacttgataatatgccatgttagcaaagctgaaagaaaacaagtacttaatacattgccaaggcagtactcacgacactgataaaccttatgtggagtaatttttataacagtacccatcaaaatcacaaaggcatatctgctttgacctggtagctttactcctaggaatttacattagaggatgtacaagcaagcatggacgataaagtttgaacatgatatcattacagcattgtttgtaattagctaaagattagaaacaacctaaaatattcaacaatcaggaactggctaaagagattgtggtatacaacctttggtagaatgctgt

SEQ ID NO: 124077 - DNA, 450 bp, Homo sapiens
ctcccgtaccacctaccctaaacatgcacctccttctgttttcctctcttggtgaatgcttactgctgaggtattatatattccaaaggtattgaatttccagtcagcataagtcaaatgcaaatggttatccaccatttcttcatccaccaatatttactgggcaccttctatgtagcccatatcatgttaggctctgggatgcaagtgaaaaaagttatcacctctgccctcatggagcttacaatctagtaggggaaacacacaatatgcagggattattttatgtattaagagtatataaaccagggtactgggataatagttagggaacacttgctttttagatagaatgatcaagaaaggcctctgagaaagtagttaaaactggatttgaaacctgactcctcaattacaagctgcatgaccctgggcaagtaagtcgcttat

SEQ ID NO: 124078 - DNA, 654 bp, Homo sapiens
attgtagatatataggtaatttgaaagagcactaatgtactcttcctgtgcaagatatcctgtagaacatacgcaaaatatgcattttttttttccttcaacttctattttaagttcaggggtgtatgtacaggatttgcatatttgttacataggtaaatgtgtgccatagtggtttgctacacagatcatcccatcacctaggtattaagcccagggtccattagctattctccctgatgctctccctcctcccacctcagccccctctgacagcccctccccccacaatgtgtgttgttcttcccaatgtggccatgtgttctcatcattcagctcccacttaaaagtgagaacatgcagcgtttggtttccttttgcttcgttagtttgctgaagatcgtggcttgcaactccatccatgtgcctagaaaggacatgacctcgttccttttttatggctgcatagtattccatggtgtatatgtgccacattttctttattcagtctgtcattgatggatgtttaaattgattccacgtctctgcagacataaagacaaatggaacagaatagagaactcagaaatcagactacacacctacaaccatctgatgtttgacaaacctgacaaaagcaagcaatgggaaaag

SEQ ID NO: 124079 - DNA, 530 bp, Homo sapiens
atctcacaaatttctacccaccaaaggacaactccagatcaaagattgctcttcagaggaggcctgcattggatggaaatggccaggcccttgtatgaccacctggtttagttgttcatcagagactgacctaaaaatagtaagaccttgattcaaaagactgggttggatcacaatgaagcaaacagttgaagactgttgtctaagcgcaccctttgtagctgggcagggaatccttcttgaaagggtatctgaaactactttaaagttcatatggaaccaaaaaagagcccacattgccaagtcaatcctaagccaaaagaacaaagctggaggcatcacactacctgacttcaaactatactacaaggctatagtaaccaaaacagcatggtactggtaccaaaacagagatatagaccaatggaacagaacagagccctcagaaataatgccgcatatctacaactatctgatctttgacaaacctgagaaaaacaagaaatggggaaaggattccctatttaata

SEQ ID NO: 124080 - DNA, 280 bp, Homo sapiens
tctcaaactcctgacctcaggtgatccctctgcctcggcctctcaaagtgctgggattacaggcgtgagccaccgcacccctccatcttgttttattttggtatccaatgaagttgagcaatcttagccattttgatttccccttgaatacactttgtgtatttttctgttggatttactttagatattatttctgtcactttttgatgatgtaaaaatctccctttctgtaagccagttgtcatctttgtctactatatcacattaaaaatgaattctt

SEQ ID NO: 124081 - DNA, 286 bp, Homo sapiens
atctgattgcccttccaatttgtttccactcacctggagaactgtcgttttcagcatgtgtgcctttggaaacttttctgtgcctacagcttcagaaaatgtatcctattattttagtgtgttttcaaacaacacaaatagtacagatctatttttccactctgcatttcaccttgcacataactctatctccttccttacttcccctctatcatttcaggccttctagtgaacaaaggcatgacaggaccccatgtggacctcagggtacactgcagcctgggcc

SEQ ID NO: 124082 - DNA, 418 bp, Homo sapiens
tgtaagtgggagaagagacgtccctctgccctgggcctcagctctttactctgcagtgactcttcccattgtgatctcagccctggaacccatgagagctctggagtgggtcctcctgagtggccctgacttcctgctgtggggaagatccccagtgtttctcagcatcagaccatccgtcactcagtttggactcaagccacacatcactgtttcttcaactggcaatgaaggcaggggccaggcccctggttcatgtccagaaagatgactttgtgctggccagggcttcacaaccacagccagagtgctccctgcatggctgccatgagtacacacagggttggggctggcataatcactggcgtatgcatttgtgtgcgcacacacacacactgtctgtctcacacacacacac

SEQ ID NO: 124083 - DNA, 701 bp, Homo sapiens
cctctctagggattatttagaattaataaaatcaagtactttttcacacgagcctgaaggaattgttaactgaaggaacttttatgtgatacagtttgttctgaaaattaggtatttaaggactttgtcaattatggttaagcacattttttattaaaaagaacaagatatgtagctaagtggctgtgtccgggctgagatgtttcttctcactcgatcctacagtgaagtcaaaatatagtgacagattcagtttccatagctgcagaatctgttttcaaaaacacaaggctgtgatttcactgtagttcagtgcacattgagaagctaatatggaaatagaaatgaaacttttcaaaatacatgccttaaaacaaaaacttccagttcccctttagtgcttagatgagatttttttttttttcaggctttgtaagttttgcagattaatttcagaagttgacggcaatgtgatcctggtggactgtcattctgtagtgttagtcaggaagcccctcacacactttcttctcatttcctaatgcgacagttggttcagtgaatatccattgtgctttataggttgatattgatatgtttgtaattggcctatcacgtagttagtttttttttcttttttggcaatcacctttttccatgtgaattttcaaaaaatgtatttatttatttagaagcaggat

SEQ ID NO: 124084 - DNA, 248 bp, Homo sapiens
accttacccctcacccttttcagcaattcctaccctccttccccatccgtccctctaggcatcactttgctcttctccaataatgacctggttttctcaagtaaccacataactcgaagtaagcatttagctgtcagcccttagacacagtggaaaggtgtgggtgatatttgatggaaaggaggagaatttgattaactccctataaatgaagaaagcaaaatcaataaatttatcttttatgttcc

SEQ ID NO: 124085 - DNA, 331 bp, Homo sapiens
ttggtacatagttcttagtctctgtgaggcaggtctcggtgtcttattcaccagttttcatctctagcacaacatattcttaagtttggaggcccatggatataaattaccttcacatattccagtaaatcgggaggacatatcaattacagtttctggttagggaggaagattttcctggcatggctgaagagggaggccctaatttcttgtcagtacccactgatggtttcaggaaacccagcaaaaacaggtattctctaacagtctataagtgatattgtatctgtaagaatcagtctgaaattttcagggtatttctctatgaaga

SEQ ID NO: 124086 - DNA, 687 bp, Homo sapiens
tgtggcactggcagatctctgctgttgcaaccagcctctgagctccttttttctcagtagctcccaggcattcaaagtgtgccagtttcccatcagtgctcccagtcagtcgagacataaactagtccctcaggcagcccccctgaaaagctggaatgttagatgtacattccattcttctcttttcttcccaagggaaaagccatgaattgggcttttctcctgcagacactgagcgatactgggttaggggaagggctgtcacagttgaggtgaaatggcttttcttacccatttcagcatggccattcttggcattaagcttgcctatggtcctgtgccttcttaactggtttctggagttctcataaaagcttctggattacaaattgctgttaagttgatgtctttgtggggaaactgaggtgcggggcttccttttctgctatctagtcaacatcacttcttcatgacaaggagtcttaaaattgagatagcaattttaggatcttgtctcttcactgaattttatgtgttgtatacctgaggagttttagtaaatggatttattgaaaactcgaaaaataaagagagaaaaagaaatgtgaggaaaagataaaattacagagtgttttaagaagtttaatttgttattgccaaaaccaaataattttaatatttagctaa

SEQ ID NO: 124087 - DNA, 618 bp, Homo sapiens
agggcggctggggcccgggcgcgtcacggggccgggtgtctcttgggtccccgtgggccgaagaggctgggcggggttccgtgggggccgcgaggggcccggagcccaggactgggaccgcggggccgaccttgggccctgccgaggttccgcgagtggccggcctgagctcggctggccctttcggaggaccgggagctctccgttggcggccccagatgctcccggaaagaagccgcagttatttcagagccagctgcaaacctatagcagaccccacgttagctgaaatgggaaaaaactttgaaggaggcagtgaaagatgctggaggacacgtcagagaagaacagaaggaggacaatgggaaaagaagctcatatccggagaatattccaggcccactccaggcagtgggcaagatatggtgagcatcctccagttaagttcagaatctcatgcatggagatgaacgatgaggagccccagagaccccagaatccaaaatattggagaacaaggtcatatggcttggtagggacatagtctgggagctaatcatttcaactctggacaaagagaagctgagaaaactgacaactaaagatacattcagatac

SEQ ID NO: 124088 - DNA, 379 bp, Homo sapiens
tgggtgcttatgtgcctggcactctctaagagtttatatagacatagaaacctatcttatgtttatgtataaatgttcatatatacatatcttatttaataccctcatcagacagatgaggcagatgccattaccactctcatttttctgatgaggaaactgaggcagagaggttaagtaactggctccagatcatggagctgatagaggcagagccaagatgcaaacccaggcttcttgttgcagaaaccctgctcctaacccaacgttgtgctacttgtgaattggcagagtcctgtgctcatggaagacgctagggaacacactgtgttatggagtgctctccacgggtcagcactgtgttcagccaggactatcc

SEQ ID NO: 124089 - DNA, 272 bp, Homo sapiens
ctggtgttgcccacctcaggtccccacattgactgcacctggggcttcctgactggcctctccgcattcactcctcttccccaccaatccattcaccacccagtagcgacaccaaactttctggaaacatgttggctcttggaacatccccacttgaaattcattaatggattccccctcttgaaactaagaatgaaacccaaactccttacgtagcccacagggctcatgcgttatgtggcctcccagttcctctcaggccaccctccctt

SEQ ID NO: 124090 - DNA, 597 bp, Homo sapiens
aacaaggagcaagctcaaaaactaaagaaagtagcccattgcctggcaaattactagaaaaataataggaacgtttaatgtccataagaagactttctcatgaggccaggtgtggtggctaccacctataaatcccagcactttgggaggccaaggcaggtcacttgagccagagttaaagaacagcctggccaacatgaccaaaccctgcctctactgaaaacagaaaaattagctgggcgtggtggcaggtacctgtagtcccagctactcgggaggctgaggcaggagaatcgcttgaacctggcggagattgtagtgagctgagatcatgcacgccagcctgagtgacagagcgagactctgtctcaaaaacaaagactttcatgaaataaaacgaataatgaggtatccttggcatcatctgatggctctgagtatttgttgggctgctccattctgatacgtgggccattctgtccaacaaggtgtggcattgagaaggattggtggtcacattaagggcttgttttcttttatattgttaaataatagactctgaaatgttacttttctctgtaaaacaaggtagtactt

SEQ ID NO: 124091 - DNA, 292 bp, Homo sapiens
tttgccgtgttgaccaggctggtcttgagcagctgacctcaggtgatccacccacctcggcctcccaaattgttgggattacaggcatgagccaccgcacctggtcccaaatttctttctgttactgatttttaatttccttccattatggtcagaaaaaatacactgtaaggtttcaatctttttaaattttgtgagacctattttgtggcctaatatatatggtatatcctcatgttcacttcagaaaaatgtgtattctgctggtatcagatacagtgttcctatatgg

SEQ ID NO: 124092 - DNA, 605 bp, Homo sapiens
tgtggtggtgggcgcctgtagtcccagctactcgggaggctgaggcaggagaatctcttatgcccaggtggcggaggttgcagtgagccgagatcgcgccactgcactccagcctgggcaatagagtgagcctccatctcaaaaaagaaaaagattcctttttcctacttacacctattaaaatattaaaggatttatgtttaggaatttgagattttatcacaaaatattgaatttactatgttaacatagtaaatggctatattttgttaaacatctgtgtgaattctgttagtagtagtctcatctctataaaaattgtagcgattgtcctcttcagtcaataacaaagccacttaaattatgtaggaaaagaaatgtggactagatgaatgttatttttagttagttctcactagaaattagtattataatattcacaagctctgacataatggatagataatatatctttaacaagccattttacacaaatccttttaaataaattacacagtctactcacttgggattgaaacattttaaaacaaactaagcaagaactacataatctaaagtgactgtgtgacatattagagagggga

SEQ ID NO: 124093 - DNA, 384 bp, Homo sapiens
gtccccctctccctacgctacagtctgcctgttctctctgcagtgtgacatcccacctccccagatgggagaatctgataggactagttggatactcccaagagagaccatctctgttgggtggaccatttcacagtcatttgccatctaagagtggctgcccaagggcctgatccatattcctggttcaatcacttgtattcagggtgatggagacatggataaaatagggacaaagaacagcagttaaggactgtggatgtggcatacacatagaacatcacagcctcctttcccacgtattttccacaatacatttccagatacccgataattcccatacacgatgaaaccatccgtaactatgatcccagaaataagcat

SEQ ID NO: 124094 - DNA, 332 bp, Homo sapiens
ctaaaagataagagtgtatgttaaaacaaaagtagcaaactgtaaaatatgattaaattgtcaacaaacaaagaaaatccagtgcttttctagagtggcaaaacattgcatgttgtcaactgtgctatttccctggctgaaaatgccctcttattctttctctgcttgctgaacctctacccatctcttaagacccagctcaaacctcatgccctttcaacatcaaccttaactctccaagcagtcttatgtgcccctcccaaaaacactttgtatgtacgtacctctgccactgcacttgtcccacggttaattatttcttcccctttatg

SEQ ID NO: 124095 - DNA, 730 bp, Homo sapiens
tgtttacagggcatggtaaaaggaataaaggtgaaaagaaaaatataatgtctggacaaaagtctttagaattttatacagatatattcttcatatgtgcaaagtatgcaataaaggtatctgttttggtttctataagacatgcttggcaggcttctgcctgggcttccctggccagtgctgactggcagggacaaactatctctcaggctcacagtgactctgtcctggctgtcctcatgctcggagggacatgcggaccaggtaccgaaaggagtgtattctgtcagtgctgcagaaacctggaccaaccttgactctggtcttgatatcaaacctggacaatggagctcactctggctacacagaggtggggccaacctgggcacagacaacatgctccttggtgctgccgtggcctcaactgctcactctcctagtgagtgtttcatcctaagcagggcctcctatttaggccctacgtgaggccctatgtgtgatgtgtagagtttccagcaatggggcttggactggcccatcccagttctgactctcctggccacccagggcctacctctgctgatggccagtggtagatggcagtggttctttttctaaatctcaccctgtgtgctcccctgcccatggcattcagcagccaaagaccagagaagtgctcttctcctgcctgcaaatactgtgaagatcaccccatcacccagcagttcag

SEQ ID NO: 124096 - DNA, 293 bp, Homo sapiens
ggcacctagaagaggctatgaggctgtggggactgcacctttgtgggtgccactgctgtggttattcaaaggtgacctcagcccctctttctgtctcttgccctctagctgggggggcagtatgtcagactaaactgcttcctcttgtccccatgtcacggagcaccagtgactcgacatcccaggccactctgtctggagcatcccctgagcttctggcaacaaccttcacccccatgtgactgtgcagctcgcaggccctggaaagttgctggtgccttgacgttggactt

SEQ ID NO: 124097 - DNA, 593 bp, Homo sapiens
atggtttatgtaaatgcacacccttctatatatgtatgcacagataacactagcattgatatatctgtcactcggtttattaaaagcaggcaaatgaaaagacaggaaaagtagttcatgtataaagtgttgaaaccacagagttacgttatagccgcttgggagtaggagcagaacgttgctgtgattgcgccagaagagagtcatgacccctgttcgcagtcagctctgcaaagccattttacatgacagcccccacccagtttggttcagagcattcctgtatgctagtatatgagttattaatagtttttatttctttcagacctctttcctgattctcatcttgtctttttcattacctttctattttatttctagaaataggagtattagggtagaggttttagcttctgtttttcttgcactggagtaccaacattttgtttttcattttatacatttttgtaactgatacattggatagtttatatatcttaatttttttataacttactggagttgatttgacaagttaaaatataatgggactgaaaaataacttgagatataattggatcttacttgatact

SEQ ID NO: 124098 - DNA, 521 bp, Homo sapiens
ccaggtttgatttgtcctggtccctctctggctaattagggtgagagccgccatccttccttccctgagctgcatgcttgattcaagagaaaaatctttcttttgtcatacatgacactggcatgtttctttagtgatgataaaggcgacatgatcagtggcatgaaataaaggttttggagtatataaaccatttttacagcggctacaaattttagaatgtgtgactgctattatgtatgatggtaatcttttcatatgattgtattgggcaagtatgtctcatttctagggtttttatctgttttgtttgtcttttatggcatatgtgtacttagaagtaaatatagttggtactatatataatatgtacaatacaataaaaaataatttcattgtccttattttgttctcactggacctgttgaggtgggagaatcgcttgaacctgggaagcggaggctgcagtgagctgagattgcacctccagtctgggcgactttgagaccgtgtctcgaaaa

SEQ ID NO: 124099 - DNA, 131 bp, Homo sapiens
catcatggtgtcaagtcttggagcagaggcatccatcaggggctcccgaaggccacggtctgcatgcccacgtgcctgatcccacccacgtgcctggccttggctcccggcggccggcagcactaccttgt

SEQ ID NO: 124100 - DNA, 284 bp, Homo sapiens
ggatggctggatatagaaaatggatgatgcattcctgacccagatcacaaaactgatacaaaggcaaggtgacagagagtctcaactatcagcccattactaagaactccttcagctaaacccagatgacagcccacttgatggctgattctttatttttttttttttttgagacggagtttcgctcttgttgctaggctggagcacaacagtgcgatctttgctcactgcaacctccgccctccaggttcaggcgattctcctgcctcagcctcccaagtagc

SEQ ID NO: 124101 - DNA, 266 bp, Homo sapiens
ctgcccccaagttaaattttgtaataaggccctaaactacaacatcaagctggaagtcttgcatatgaaatattcacgcgttttgacagatgaaacccggagactgtaacccacaggacgcagggattaacacaggccctgtttcaagctgctaggatgctgagctcaaaccacagcccacagggactcccactggcaggggccagcgcttaggagatgagcggaccccttaacttcaaggagagggggaacttcccgtggaccag

SEQ ID NO: 124102 - DNA, 421 bp, Homo sapiens
gaataaggtctgctctgttgccttcaataccagaaaccacgctgggaatgtgggctgccatcttcaaggctcccactgaactatggaaggttgtggggcaagggcaagtaaaaaaacccagttttcctaccattttgaagttgcttttttcttgattcagtgttcatttggagtattagtcagttttcacactgctggaaagaattgcctgagcctgggtaatttataaagaaaggaggtttaattgattcacagttccacttggctggggaggtctcaggacacttacaatcatggtggaaagctaacaagaagcaagtaccctcttcactggctggcaggagagaggagagagtgcaggggaaactgccacttaaaaaccatcagatctcgtgagaactccctcgctatcacgagaaca

SEQ ID NO: 124103 - DNA, 589 bp, Homo sapiens
cgcagtggctcatgcctgtaatcccagcactttgggaggccgaggcagaggtgggcagatcatgaggtcaggagttcgagaccagcctggccaacatggtgaaaccgtgtctctactgaaaatacaaaaatcagccaggcgtggtagcgggcgcctgtagtcctagctacttgggatgctgaggcaggagaagagcttgaacccgagaggcggaggttgcagtgagccgagatcgcatgccacggtaccctagcctgggtgacagagcaagactcatctcaaaaaaataaaattcatgcggggaaaaactctacatgaaaaccccatatttcctacagacattaaaattatataagaaagaacgtcttagactggcataattactggtgccaattaatttaagaaagcaatattagtgggtcaagatttctcattccttaccaaagaagcacaggcttcaaagaagaatttacttcagaactacaacaaaaagctacagttaatcctacttcttctttataaatttagacttttaaaaatacagtacatttagtatatattaaaaagagacaacaccaaatttacctta

SEQ ID NO: 124104 - DNA, 128 bp, Homo sapiens
ggcagctttacgatataattaggggtacagacttccttctttgtgctcacaggatagttgcgggaagaaggaaaacagaaagtggggaaaagcacatgccagttgagtttcgtctcttttaatcaaga

SEQ ID NO: 124105 - DNA, 363 bp, Homo sapiens
accttcctccccaccctaccaagaactcttctctccagacagtgttttctgagcagatcacaggatggatgccatttcagcataacttcttcatctaaaagaatcagtggatgcttctatccaatgatgatccttaaacatgaacagccaatatattattgcagtgagttgactatattccatattacttaaatcagaatgtttatggatacattccgacataggggatgaagccaaaaccattgaaataaacaagaggccaacttcctgctaagcattaactctgttcaaggattctcctccacctccaaacacacagtgacaaaggccaaggcacctggagatcaaggattcatgcagcag

SEQ ID NO: 124106 - DNA, 629 bp, Homo sapiens
actgttgcccacatcatgtggtctacctgtgctaataggttcatgagtcttgtgtcaccctgtttacactgaggaaatgaaaccaaaggtattagtgtctctgaatcaggtgcctctggaaggtacagatactgggtggaatgttaggatcatctccgtgctgcaagatgtcctctggtcttcaggacagtgtcatgggagtggaccgaaggtgccatgtctgaacagtcctgggcatcagattcccaactcacctggtagctaatgaaccttgaatatcaaatgcagggagccccacctacccacagggtggagagtgtgtttgatagtaatcttgtatgtgtgaagatggatattttatttccattagctgtgggctcttgaaagtgagcaaagttggttgtggtttaactgtcctcgttttgtcttacaacaccctagccaccccatgcacagccccaaccagtaggggccggtttgactttgagcattttccatgaatcaaccacatttgccagagcacgtaaacaaaagaagcctgagaaaataaaacaccatccgccacatcagcgccctcccaccacccactctgcctcctccaccaccaccactgcattctctctctacat

SEQ ID NO: 124107 - DNA, 288 bp, Homo sapiens
cgtggattctcagatcttcttcatgtgatgccccgccctccacgcaggaccaggtggggccatggactgggcaaggggaacacacccgctccccacttgctctgagtcagggacggtgccagctttgcaaggttcacaggagctggccaggcccctgtgcatgggcaccaccttcccagcctctctgtgcgtctgtttcatggaacaaagcctggtccacgggcttggggccagatgcttctccaggcctcacactcctgcagctagaataagcagccatgtctgggc

SEQ ID NO: 124108 - DNA, 484 bp, Homo sapiens
actgtattagccaggatggtgttgatgtcctgacatcatgatccgcccgcctcaacctcccaaattgctgggattacaggcatgagccactgcgcctagcctgggaaaacatttttaaaataattgttgaggaatataaaacagcttaaaaataaaatgatagagttacattactttcacccgtaaaccgaatgttacttttactaatccatgttatctgactaaacagaaactgtcgtccaggtattctgtttgcttccttgctcctgtctttcacttccctattttaagaatttgactcatgtcgataaacataaaatgctctctcttcctacctctagtagtctatgtaaattattgcttccaaaagtcaccttctcaaaaagtcctccaagactctactcatcctatctaaacacctttacaaaaccacttcctttgggcaccatctgtgtgcaaagatctaaggataccccatctctca

SEQ ID NO: 124109 - DNA, 626 bp, Homo sapiens
ctgccgctactactacgacagcagtatggtggaccccctggcaaacttctctgtcttcttccagccctagtgaaaccatggttaagaaatcctacactaaatgacaaagtcaaatcaagctgtaagaattcagggtccaatccaattccatccgtgaacagttgcaatcccttcccttgatcaaagaactttgttgttggttttgtttatgctttcaatcttgtttttaagacacaaacagggaaggaacttggatcatcatcaacctgaagttgtgtgtacctgaacctcccagaaaagacaagaatacattcctacctcctcattttacaactgattacttcagcaacacatcggcggccatcaagttttactaaattgagaccagaccaactccagagtcatcggacagaggcagatgaggtagcatctggctagagagatggcgggcacctgtcaatggctgctcttgcaaaagttactgagactcgcagtaagaattacagccttcaaatcaaaagaaataagcgtttaggctgcaacacatagcataagacagttgctgtgggactttgcctgtgaatataatttctgttgcaatgtcatggttccaatggaagtggaga

SEQ ID NO: 124110 - DNA, 210 bp, Homo sapiens
caaggctgcttcttactcagctgctgtggctttttggaagttgcagctcagctggccacgtctgcacaccctctcccacgagaccatacagcgatgctccacctcagaatggtccacagggaggaggaagggagaatagtttctctgcaagctccttcctgtcttctgctctcataggtcagagttgctctcccgaggaattaagttccc

SEQ ID NO: 124111 - DNA, 400 bp, Homo sapiens
tagctgactctagaggatacaccttatgctctgacacaccacatacagagtcatttttattgagtaaatgtgtattttagtgcctcccacagggatggaccagtgaacaaaacaatgtccctgccatcctggggtatagagtactgtgtgtcttggggttgcagacaggaatcatgccaccataaataaatctataatacatggccaggcgcggtggctcacgcctgtaatcccagcactttgggaagctgaggcaggcagatcacctgaggtcaggagttcaagactagcctggccaacatagtgaaaccccgtctctactaaaaatacaaaaaattagctgggtgtggtggcggtacttgtgattccagctactcaggaggctgaggcaggagaatcg

SEQ ID NO: 124112 - DNA, 225 bp, Homo sapiens
tgctgggatcacaggcatgagccaccacacccggtcctcatttcctttttagatagagcaagcagatggctagattagggaattttgattctataaagcattttagaaagtcccgtatgatatctgtaaaattggtagatttataaccagttaaatgacagtgttggcctcagaagaggtctctggtagtaagtcataagcaccttgtcctagatcttgacctag

SEQ ID NO: 124113 - DNA, 731 bp, Homo sapiens
ggtaattatagtgctgttaagatctcctggtacagataggaaagtcagccctacaaagattgagtaagtcacactgagttctgcctgactccagagttcctgctctttaccgctgagattgggaggagcatgtggggctggaaaagataaatgcccttggtgtccttttctcttttcactctcagtggttaaaccaagatgcaatcagtatatgagccacctctcagtgtccaaagctagagctggccaaatggagcagatggccaccctgcttactgtgagtgttccctagtcttggccatgatggtggcttggctgttagactgatcaaaaattgcagctgggggtaacaattcatccctcagaggttcagaattagcatcactaaagttagcgacctttaaaatcaaaggaggtcctgcagtttagttccctttggaccaaagtcaggtctggcccttcagaaaaaaatccattattcagtgcagaaagctttcttcaggtagcactggaatcacaatataaagagaccaaaggtaagctagatgaaaattaagcagcattaatgaaacaaagagacttctgaccataatacaaagcagggtccaaaaattctactgctataaaatagggagactgtcctaaatgactttcaaggacccttccaattttaaaagtctaggtatattacttctacatgtttagactttattctagttcatagccacaaa

SEQ ID NO: 124114 - DNA, 930 bp, Homo sapiens
tgagctgagatcgcaccaccgcactctgctccagcctgggcaacagagcgctagactccatctcaaaaaaaataaaaaataaaaaagataaataaagaaggacacatccttacagacccacagcgcatctggcccagcaaacttaatgatcattccttaacatcagcttagaccccgtccagacctggcttccatcaatggcctttaaaatggcctcttgcagttggcttaggaagctgtgtttgtgccaggccccagggcgcatctgatgccctgaggacctggcagtcagctcttgttgctgacatcagactcgcccatcactagcaagcccagcctgcggatgcctcatgtgagaggctggcatgcctccctgtgtcccaggctacctgctcaacctctcagcatggcatttatggtgcccaggggtggcaggtagagctgtaccatggggacggcgatggcagacaccctgccttgattggccccaaatgctttctgccttgggctccctgtgggtgacactgaggtgtccacctctctctctggatcatgggctggctttggggtcagacgtttccaccatggctttgcctcctcctcttgaattggggtgagtcctaggacaggacaccccacctccctgaccctctgtctcttgtcaaaaaaagtctgtgaaaaggtgactaactccactccttgtaagcaaaacacagaatgaaactgtaatgagagctcattcatctgccacatcagcaaagacaaaaaagctccagccatcgttgctgggtgcaggtggggacacaggtgctccaggtatatgctggaggaactggaaactagcgccaccctgtggacagcgacgaggtagattctctgcaatttaaaaaatgctcatggccgggtgcggtggctcacgcctgtaatccc

SEQ ID NO: 124115 - DNA, 345 bp, Homo sapiens
caggacgaccttcagtttcctcatccatgaaacctggggaggttactctcaggaaggcttggatctgtttcttcttcatccctgtttctcagtgtccagaacagcttctggcacgtaataggcactccacaaatatttgttgaacgaaaggaagaaaatgcctagcagtcagtcagtctgttcttacctaagtcgagtgacctccaaaactcgacgctgcttttccctctgctgctaagcctaccagctcccactcacagtgaagccttggcctctcaggccttgcagggtgactcagttcaaatgtacattttattctgcactttctactgcccaccccactgg

SEQ ID NO: 124116 - DNA, 500 bp, Homo sapiens
cagctcggtttcccttttggggtctttgctccaggaagagattcaagctaacgattgactttttggctatcagttaaggagttcatcaaatgcctgagcccctgtcatatgctggactctaccttgtgttaggtatacattttctgagccttaacaaaaagattcttccttaatttatttagcttccccacacattattaagagggggagaaaattgctcaatacacattattatgtggatgtaaaacgtggactgaatggaggaaaggctgtttgcctggagtcttttttgagtatctctcagagaggctcataatttcaggtatgggagaaagtctagtcattacccagtccatcaccctcctttcatgcatgaggatagcaaagaccccaaaaggggtctttgcttcattatctcaattacggggatggtgtttcatggatgtatataacttaggccaaaacttatcaattgctaccctttaaaatgtgaggtttat

SEQ ID NO: 124117 - DNA, 416 bp, Homo sapiens
aggtctgtcgaacaacgtactggcatcgattgctccgatgacggcaaaaagtcagagtacaatactaatcacatttctgaaataaattacatgtgctcaagaaatcttactagtcaaatcaagagcactgagtaccattcttccaaaaaagtaacactgagagagcacagtacaaagaattacggtaaaaagcagacaacatcggcgtgagtcagggaacggcttatacaagtcacatgactcaagagatagtgggagaggcacataattccaatatgggaagatgtgcacagaaggataagtttataatcttaggaaaagatcagcagatttgattacataaaatcttatgaaaggtaaaagatatcttaaaaggcagaagttgagagggcaattgggtgggggatagaggagga

SEQ ID NO: 124118 - DNA, 489 bp, Homo sapiens
gtagacaatgaatgtgttgattgaatagttaatgtgactaggttaaagagaggagaagtgcaatttgatggatatgtagcaatgattattttggcaaaaccagattttcatattcctgaaatatgttattcctagagtttacatagataataaaggtacattataatctttgaatccttaaaaatatacataaatgatttgatatattttcatgacagtacaagcttaatctcttttctaacaaagaaagaagctggtacttggctgagactgttgttcttgtcttaagcactgattgacattaacagcaaaatctcctttttcctgtaatgttagctgtgcttgaagctagctagcatctttcttctatgagagtaaaagctgtttcttttattatgtcgttccgcatacttctctcctggattgtatcacaagggaaaaaatcatccccaatccattcctgcttgtattcccatagaatattttagg

SEQ ID NO: 124119 - DNA, 305 bp, Homo sapiens
gcacctactctgtgccgggtgatggagagtctctgttggacaggccagacaaggtcccagccccagtaaagctgtggattctggagagggacagagacagtgatgataaagacatggaaacaaaacagtctgcaacaagtactgtaaaggaaaacaaacaggatgctgtaacagagaatttgggggactgcttagggttcctgggacatttgaggagctggtaggctgagatctgaagttggagctgaccatgggaagagtagagaggaggaaaaaatgttccagatagagacaacagcagctac

SEQ ID NO: 124120 - DNA, 651 bp, Homo sapiens
tgagccactatacctggccctgttttctttttaaatacagtttaaggcacggtggctcaaaagcctgtaatcctagcactttgggaggctggtctcaaactcccagccacaagtgatccttccacctcagcctcccgaagtgttgggattgtaggcgtgggccaacacacccagccagcttcatttctgcaccgaaccttttattttgaaatgattgaaagattcacttgcagttataaaaaataacgtggaaagatctatgtaccctttacccagtttttgccaatggtaacatcttgcaaaactatagtacaatgtaataactcggatattaacattgacactttactatttttttagatcaaaggtgtatttcatacttaatggtcaaaatgattttcaaaagatagaaaaaaaatttaaaaatagaagtccaaataactaataggtgaatacataaataaaagtcttcttgtttcagcccctggcctcattccctaaaggaaaccactgttaaaaacaaaaacaaaccagggctgggcacggtggctcacacctgtaatcccagcactttgggaggccgaggcgggtggatcacctgagcttgggagtttgagacagcctgagtaacatggagaaaccccatctact

SEQ ID NO: 124121 - DNA, 319 bp, Homo sapiens
cccaccaccaagtcgcccttcctccttagacacagcacaggtactgcatacaggtggcatgctgcctgcagccgggtaagccataactcttgggcagtcttcaatatagatgaagtctttacaaatcctgaagctcctccctgaaattcaaaagtaggatagaaagactgcactttctaatgacaacctctacgtttctaaccgcacggttgatggaacgagtgcgcttatcactcactctgctgacctggcctctagggtacggctgaggttagggatacaacccccaaaggttctgaaggcctgaggctggaaacct

SEQ ID NO: 124122 - DNA, 491 bp, Homo sapiens
tgaagtgtttggagcagggatagaatccaagtctgtctgatttctggtctgaagaggtctgtcattaaatcagacacaagaacgcacaggcccagcaacatgggactattctgtgcaaggacagagagccctccagaccagagtgcacctgcagaactagaggtggccatcactagaaggcatgtcgtgcctcagctctgctacacgcacgaacgtttccagcctaaatgactgacttttgagtcagcccctgaaggggcatgcaagctcatgctctgcaaactggcagcacacctctcaggggtctgctgggtcctcaacaccacaggacgggcatggaccgtctccgtgcagcatcattttactggggctatctggggaggaagggattctattaataagcacagatatattatggagtaggaggcatcattcatgtggaatatataacgaaacaaagcattagaagaaacacaggctttgaagctgga

SEQ ID NO: 124123 - DNA, 618 bp, Homo sapiens
aggcaggagaatcacttgaactcgggaagtggaggttgcagtgagccgaaagcacaccactgcactacagcgtgggcgacagagtgagactccatctcagaaaaaaaaaagaaaagaaaagaaaggctttgttctgaggtcaactgctaaggggacagcaggcaaaactcaaatctgcctcccatatctgggttttggggcaagttttatgggttaggaaggactggttggtatgtgaaagtgctggcagggcaggatttgattggaaggacttcaaatgagacgacttttggtaaggcatggggaggggtcttatcaccagaaattcctagacaactgaccccccacttttgaaaatgttccagtgttcaggttccacataagtcccaaacgtttagttccatggttggggaaaagactttagttcccagtgtcatttgaggtcgaagttttcttttctgtgcatgccctggctgcgtaagttgcaacttcttagctctgtgtctgcaaaataactggccgttctgttatccacagagtagggccagataagactggtctggtggttacaaactgaaattcaaccagagatggatgcagatatacagaggatgtgct

SEQ ID NO: 124124 - DNA, 512 bp, Homo sapiens
aagcagcatgctgtctgtggctcgactctagaggttgcctttcaacgcaggaatcgtcatagttctcaggctttccatgcagttctggttgtgtagagttggtagttgaatatccttaaccttgaataactgacgttcttcctcaggtctggaactactttacagtaagattccacttgtaagactgtagtcaaaattcaaatgcacatagccaaatgcacatagcaatctattttgaggactgactatgcatagttatacacatagttttactatgagtatagcacttttagaaacagcatttgataaggtcatacagttacctagtcccaaagtataaatcacatagcttcattttgaattaaaagggtcttattaattgaatctcatgggagaaatctaaagactctctgctacctcctcttttgacacctattacttctttagtctacaattttattttgaaggaatatatttgttctcctccccattacatcactaactgtatctga

SEQ ID NO: 124125 - DNA, 422 bp, Homo sapiens
cctcacttttacaagatccatgtcctgttcacaagctccctgctcaaaggaccgccatagaaaatggctgcagcaacatatggaattttttttactaaagcaaattcttgtattatatcaatggggcttagatgagagacataaagtgaagccagagatcaaaagcctagaatgcctggttaaggagtttatcatacaggaatccattcaataaatacatcagttcggctaggcgcggtggctcacgcctgtaatcccagcactttggggggccgaggcgggcagatcacgaggtcaggagattgagaccatcccggctaacatggtgaaaccccgtctctactaaaaatacaaaaaattagcctttgcacagggagcggggggcagggggctgaggcaggagaatggcgtggacccgtgag

SEQ ID NO: 124126 - DNA, 309 bp, Homo sapiens
ccatctacttgcatcaaatctccaagatttgagtatgtccttgggacgaaaaaccccaggctggaaaaggtaagtactttttttcttgtattttttctcctggttatctttgattactctttgttatctttggtgactctgattactcttacaactattttatcatcttccagcatttctttattttctgattcgctatttctgctcatatttttgtttccttccttttattttcgttggattagctatgccttttcttactgagttggacacttaacatactaattttcagctgggtacagtggctca

SEQ ID NO: 124127 - DNA, 398 bp, Homo sapiens
agagagaaaaaactgccataaaaaaagggctacagatgtcatggaagtttgaaaccccgcagggcattcattaaatgttaaagctccaaaataatctttttttgactccgtctcccacatccagggcacactgatgtaaagggcaagctaccaaggctgagggcagttctacccatttggctacgcagggttcggcccctgtggctactctcataggctgttaagtgcctgcagcttttccaggtgtaggatacaatctgccagtagatctaccattctggaatacagaggacagtgacctccttcccacacctccactaggcagtgccccagtggggactcggtctggggcctccaaccccacatttcccctccacactgacctagtagaggttctg

SEQ ID NO: 124128 - DNA, 2222 bp, Homo sapiens
agcggagtgggacggccagcgcgtgcgcactggcctgtcagcggcggtggaccatggaggccgcaaggcccttcgcccgggagtggagggcccagtccctacccctggcagtagggggcgttttgaagctgcggctctgtgagctgtggctactgctactgggttctagtttgaacgccagatttttgccagacgaggaggacgtagactttatcaacgagtacgtgaacctccacaatgagctgcggggcgacgtcattccccgagggtctaacttgcgcttcatgacttgggatgtagctttatcacggactgctagagcatggggaaaaaaatgtttgtttacgcataatatttatttacaagatgtacaaatggtccatcctaaattttatggtattggtgaaaatatgtgggtcggccctgaaaatgaatttactgcaagtattgctatcagaagttggcatgcagagaagaaaatgtacaattttgaaaatggcagttgctctggagactgttctaattatattcagcttgtttgggaccactcttacaaagttggttgtgctgttactccatgttcaaaaattggacatattatacatgcagcaattttcatatgcaactatgcgccaggaggaacactgacgagaagaccttatgaaccaggaatattttgtactcgatgtggcagacgtgacaaatgcacagattttctatgcagtaatgcagatcgtgaccaagccacatattaccgattttggtatccaaaatgggaaatgccccggccagttgtgtgtgatccactgtgcacattcattttattattgagaatattatgttttatcctgtgtgtcataactgttttgatagtacagtctcagtttccaaatatcttgttggaacaacaaatgatatttacccctgaggaatctgaagcagggaatgaagaggaggaaaaagaggaagagaagaaagagaaagaggaaatggaaatggaaataatggaaatggaggaggaaaaagaagagagagaggaggaggaggaggaaacacaaaaagaaaagatggaggaagaggaaaaataagagtagaaagaggaggaaaaagatgtatcaccaatataaaccaaaagtgtaatacaaaaaaagacagaaaaaaaaaaaaagtaaaacactgagttttaacaagaaagaaaatatgcaaaccaccattggaatgttttttattcccttctctcctatacttattcaatcaatttaaatttgtaaaacaaagaaacaaaaaacatgtaaggtgggctctttgacactaagaacagataaagacatgacaggaaaaacactgaaaaacatttgaccagtctaattaatcttaagatttcaccatgttattctaataaagtagggaattttcattttctaaacatgtttccatctctgtgttttaaatagtaaggtgcttaagatcattccaagttcataacaaccattgaataaaatttgtatttttttgtttttactgttactgtcatagtttttattggtggtagtggtattttcatgtgatattaaggtatctaatattattatttgtctttgtggtttttggaatagtttaagtggtacctgtacatcctgctaggatgcaaacttattatttataattaatgttcaatatttcattaaagacttgctgtaattttctgccaccaagggctaataaatgccataattttaattagttgtggtagaggaatctgggtgcttccaaatttatatgataaaataaataaattttttaaaaactattaacttgttattcaataggtatagtaaaagttaacagattaataagataactgcttaccactagtaatactaataaatgaactaaataaaaatacctagcataggagatttctttatctataaaataaatggatagcactagatgaccactaagacctcttccatcaatgaatattcatggatcaactttgtaaaggaatcaatagtagttgtgaagtacactaagcaaacacctgagggaaaaacttgattcccatgaaaatattcctgaactcagcaccttatatgcattgcattcatactaattgctatgttgccccttataaaccatggactggattgaaaggtgtataattctttattcagggctctggacctcttcattggaaccaagttatataccgaggtaat

SEQ ID NO: 124129 - DNA, 773 bp, Homo sapiens
agcggagtgggacggccagcgcgtgcgcactggcctgtcagcggcggtggaccatggaggccgcaaggcccttcgcccgggagtggagggcccagtccctacccctggcagtagggggcgttttgaagctgcggctctgtgagctgtggctactgctactgggttctagtttgaacgccagatttttgccagacgaggaggacgtagactttatcaacgagtacgtgaacctccacaatgagctgcggggcgacgtcattccccgagggtctaacttgcgcttcatgacttgggatgtagctttatcacggactgctagagcatggggaaaaaaatgtttgtttacgcataatatttatttacaagatgtacaaatggtccatcctaaattttatggtattggtgaaaatatgtgggtcggccctgaaaatgaatttactgcaagtattgctatcagaagttggcatgcagagaagaaaatgtacaattttgaaaatggcagttgctctggagactgttctaattatattcagcttgtttgggaccactcttacaaagttggttgtgctgttactccatgttcaaaaattggacatattatacatgcagcaattttcatatgcaactatgcgccaggaggaacactgacgagaagaccttatgaaccaggaatattttgtactcgatgtggcagacgtgacaaatgcacagattttctatgcagtaagataaagaaaataaacatgaaaaaaatgcataatggattggacaag

SEQ ID NO: 124130 - DNA, 271 bp, Homo sapiens
aaacttgattcccatgaaaatattcctgaactcagcaccttatatggcaaaataataaataccttttattactcaattttaaaataggcaaaaagcaatgtataatatttttccaattgccattccatactcagctgtcttattgttgcacacttattagaactcaatgtgactgagatgtgaaaggttgatataattctatttatgacagggacttagggaacttattctaattgagaatcagaggcttaataaacctgaaggtttaagt

SEQ ID NO: 124131 - DNA, 1649 bp, Homo sapiens
agcggagtgggacggccagcgcgtgcgcactggcctgtcagcggcggtggaccatggaggccgcaaggcccttcgcccgggagtggagggcccagtccctacccctggcagtagggggcgttttgaagctgcggctctgtgagctgtggctactgctactgggttctagtttgaacgccagatttttgccagacgaggaggacgtagactttatcaacgagtacgtgaacctccacaatgagctgcggggcgacgtcattccccgagggtctaacttgcgcttcatgacttgggatgtagctttatcacggactgctagagcatggggaaaaaaatgtttgtttacgcataatatttatttacaagatgtacaaatggtccatcctaaattttatggtattggtgaaaatatgtgggtcggccctgaaaatgaatttactgcaagtattgctatcagaagttggcatgcagagaagaaaatgtacaattttgaaaatggcagttgctctggagactgttctaattatattcagcttgtttgggaccactcttacaaagttggttgtgctgttactccatgttcaaaaattggacatattatacatgcagcaattttcatatgcaactatgcgccaggaggaacactgacgagaagaccttatgaaccaggaatattttgtactcgatgtggcagacgtgacaaatgcacagattttctatgcagtaagataaagaaaataaacatgaaaaaaatgcataatggattggacaagaaaaataagcgattgaacactagttttttatggtcatgttaatattattcctttgatcagaatgctactattatgttatcaaaggatggttgacacagtatcatctttagatttttctaaactgcagagctttttctgttctatcttaaccctattccttcccctgaggacataccagagtgtcagaaagaaagaatgagaactaacagttatacccttaaaaagcttcacagtttatgcccaaacagcagcctgtttgataataactgctttaaaggatagtatattccaaaatatttatgaagtagcatatatttaatacccttttcttttagtttttcctccaaaaagctgaaatctccaaatatttcaaaagtaaaaagtagaaaatatgtttgattacatttttcttttagtttttccaaacatgagagaatatactccaaaagtataactgtagctaaaatatacaatgcttagaggaatatggtaggagataaatttggataataagtaaatagcatattatggttggtttttaattattatactttaagttctggggtacctgtgcagaacgtgcaggtttgttacataggtatatacatgccatggtggtttgctgcacccatgaacccatcatctacattagatatttctcctaagctattcctcccctagccctgaccccctgacaggccccagtgtgtgatgttcttctccctgtgtccatgtgttctcattgttcaactcccacttatgagtgagaacatgcagtgtttggttttctgttcttgtgatagtttgctgagaatgatggtttgcagcttcatccatgtccctgaaaaggaaatgaactcatccttttttatggct

SEQ ID NO: 124132 - DNA, 814 bp, Homo sapiens
tgaaatgtaggtctatatggaaaagttaccattaggaaaatatggccatactgcttttttacccctgcactatttcagtgcaccacagaataggattcgagatttacatatgcctgtttgtgattttatctcagaatataacaactctggattacattttcctctcaactgaaaaccctcagtaatgcaaagaaaggccttcctttttcttcagaatcacaagtgactaaattgccttctagccattttttcttgtaaaaaaagtgttttgaggaggctgtattttttattccatttcaatattaaccaaataggctgagaaattcatagcaattgaattaagacttgagttcaagatgttaaaggaatccttttgtatgacttgtccagaccggcctattgccctacccgtttgattctctgggaggcatggtgctcctcctggctgcacatgctctctgtgaactgatcgcatcttgggttcttctcaatttgacatacttgggagtcggaatgactggatgggggatgggtagaggatgactggcacacttgtatagtatgtaatgttgtgtacatattatttatatggttgtggctcaaataaagtttaattccaacacagtacagattatttggatcccagagccattgtcacacatgaccgaatggaggcttggggcaggaaataggtcctaggccggttgagtctgaattggcctgctcctgggtggggaatgtctttctctttcaagcaatgacaataaacaagaggtatttatcatcaccaataaacaatcccccaagaggtaca

SEQ ID NO: 124133 - DNA, 348 bp, Homo sapiens
acaaagccagactccatctcaaaaacaaaacaaaacaaaaaaaaccatatagtcagtggtccagagactaagtgaaaatttctggtggaaggtgaaaattgatttgaaccttaagggttgcataatttaaaatttcagcttatataattaagaaattatacacaatatttattgaggaaaaattacaaaaagaggcaatagaaatcacttatttcccctgctggatggaatttgataggcgcataaatggtgaatcagttcttaagcatgagcaagggaagaagcaggaaagttcaaagcatctttagaattaatgaatagatcatgtactgaaatactatgatcttc

SEQ ID NO: 124134 - DNA, 720 bp, Homo sapiens
cttttacacaaaacaaaatagaataacacaggattaaaaactgttaatcagtagaacatgtatgcacaaaaaaatgcagataagacgacaggcttattgacagtattcgccgtttttcattctgccttttttaaatgaatttatttcattaaatactctttgtaaacaagatatttaatggttgtactaaactatgatggaattatacttcactgaatatttaagtttccaaaatttgaggttacagtgaggtgaagattttggtgaacatctatatatacttagtacctctattaagtttctagaagtaaaaaggagtgaacgtttaacatttttacaacgttgtacttgatatcccctgccaatataatactttggccttccactagaaacatgagaatgttttttccttgagtcctaacaaaccttagtcttttctgtcactattttaggtgagattaaacatttttcacagcattctgtttatgccttttcaacatttttgtcacagactatctcagattaacacttttgtacctttccatatcaataactaatcctaaagttagtatgctcatgttttaattttttagtacactgtttttcaatttaatgttttcattttttaaatcttttagtttatactctattaaactgaaatattatggtttgaaaacataacttattttttaaggcataacttataatagctttgtattc

SEQ ID NO: 124135 - DNA, 348 bp, Homo sapiens
tgtttcctccatggccaaaaccactgggtatgccaagaatgttaggcatccctaggcatgattccaagtcagtagtcctttagatgcttgtcttagtgccagaacttaatgctacctctggatctaaagccatcttagtactaccttcctattggaaggctgtgacagtgaagttgaggctctagaaaataacttcctgatacggtattgtaagtagctgatatttgttttgttgtctagggttgactggatttactttacctagggaaatgatcaaagaatttagtaactaagagccttaaagctttcttcagtttagtttcagtaagttaatcttacatatttttt

SEQ ID NO: 124136 - DNA, 568 bp, Homo sapiens
gactgtagatagtcatgtatgataattcaatttctggatcgtgaatttctatgctgtatccctacacaaataacttttgagagcataccataagcaaggaggaggaggaagaggggagaggaagggggagaggagaggggaggggttggaggagaggagagcagaggaagaagagtagagaggaggggtagggaggggagagggaggaaacagcacctttgagatgttatccctgaagctcccatcaagaaactaggccagtggagaaaatgaagtccttttagcatagttgttaaataacctgtttcgcccttttcctcacttaccactatttctactactcctctccaatcctcctcttaatttcaagcagaaggtaccttttacttctctaaaaaaaaccctattttacccgtattttagattcagctgcttgctagctttttttactctctctctttttttttctttttttttaaagggtctggctctgtcacccaggctagagtgcagtgacatgatcataacttattgtaggctcaaacttctgggcttaggcagtctccct

SEQ ID NO: 124137 - DNA, 175 bp, Homo sapiens
atagagacagagaaagaaggacagagacacagcggccacctgaatgagcacaccaagatcaacttgactccctgggtgacaaagtcaatcctcagcaccgagcaacacgaatgactccatacatgcgatttcatgggtacagcttcacctttcccccttcttctctttcctgtgc

SEQ ID NO: 124138 - DNA, 560 bp, Homo sapiens
aatggtaatttcactttttgtgacggtactttagagcaaaaccgactttcttcacacaaagaatttgcaatcctattgaacagaggcagtacctgaatatcagaaatccttcattgtttaagtatcatctgatattcttgattggcttcagactgaaggttggagttgaattagggagaacggaggttaagtcctaaccttgaaagacttagcagccattgaaacactgcctttgggcacttattggcctgtatttataaaaaaaaaaaaaacttttcaattcaatgaggggagggagaaaacacaaaacttgtcacattcatcaagtgaagccactggaaagacatctacagaacacccaaaaagcataatctttccgaagcgctgatagaaatggtaattggatgggtcagggaataatacaaccgaagcaggggcaaagcagaatatcgctaaaaaatcaaggtcaaaaagaaaagaacagacccttcttaactagtaaaaaacttacacttggcctttgtactaagggaaaaatatacctgttgctacccgtaatt

SEQ ID NO: 124139 - DNA, 477 bp, Homo sapiens
acaaactcattcctaaaatatgtggatggaagctatggtaaccatggagacagggcaggtggcaaggagaggcagagacagtgtgagagaccaatagacagataggaagagagaagatataaggaatgtttcagacagagatcgtcaagcaagatggaaaaaataagacgtctaagcaagactgagattaaagagatgcaatgtgagagagtgtattacaaggttcgctcttcttcctgcccctgtcctatctccctgcccacaataatacggggtggaggcacctggaatgtcccttgccttatctaaaagtgctcccatatccaccttcctcatacttatctaagaggtctacataagggagctgaggtccaagtttctctgcgatgggtgttccgtttttgagagatggggcgggggtgtatctgtgtctgactccaggctggaccgtgatctccttcacaattaaactacagg

SEQ ID NO: 124140 - DNA, 496 bp, Homo sapiens
gctctgttccttccaaacttgggaggactctaagatcaattcccaggctcctgcccagccagggtgtgtcgggcagagcgcagagcagcctccgcccctccttgtcctgcttctgactcattatttatctttggcaggaagtaaacacagaaaggagagtgggagggagaggaggagtgagctcctgacttttgacgctggctgaaaaggaagatcatgtgctgaattaggtgtgtgtctgttttctgctcctctggtttcaacagagcatttgaggctttaaacaacaggggaagaggagtatttttccattaggagataatacccatttattgtagcaacttggaacatagcgaagagtgcagagtggagaggaaaaaatcaccaatgctcctaccatatgcagacaatggctttcaaaatattagtgttttcctcacactcttcttttttctagttcttttctttattgattgtgagatagctatattttgtt

SEQ ID NO: 124141 - DNA, 508 bp, Homo sapiens
caggagaggatttattttccttctcacttagtcatgctagaagacagaactctacatctcaagttttatgtcttaagatagagatcttatcatgctttccccttttcaggagctttcagtggtgactttcaatccagactctgtagcttagagttttaaaaagccatcatgatttgacttcccacctaagttgtttagtttaccttctgtctgtgctacatcattcatattttacacttgccttcttgcttctgagctttttgtgaaaggcatccttcctgtccagaatgccctccctctttctgtcatccttccaagaccctttcaacacaaggctctttaaggtctatcgccagcatccccaagtggtctctctatactccgtaagtgagaattcctatgtctgttgctccctaacagtttcctaacactttctctttttctgcgtttttcagtctgcctgtacttttggttatgagcttcatgagggtaaggacatgttctatga

SEQ ID NO: 124142 - DNA, 87 bp, Homo sapiens
aaaatgccttgaaataatgtaaccagaaatacgaaaagatgatacgaaaacgtcgctgctgaaggacatgaaagaatgtaatactag

SEQ ID NO: 124143 - DNA, 363 bp, Homo sapiens
tcagaacactgtacctattctgcaccacagcccacccctcaaagtgctatttgcaatcactcagcctccttaagggtagaaactctgcccctccggcacaggagggtgaccccaggtcctggacagtgtccagagtggtctgatacccttggcaaaccccctgccccctctccctccaggctgcaaactgttcagcatgaggctccagcaaatcccagcaggagaggtggggctgcccagaactggttcttgtttaaacataaacccattcgataattagcaaacagcccacttctaagataaacaaataggagatttggactccaaaagccccaccctagatttctcccttcccacctccca

SEQ ID NO: 124144 - DNA, 549 bp, Homo sapiens
gcagcaatgactttaaaggccagggagaggtgggaaaaggtgagggctcccaggatgcaatgccggagacatggtgatgtccttaggtccaggactgctgggggcaatggcacctgagggaggtaggtgtggagcatgaaggagcacagggtgaagttcaaatcatggctgaggccagttcaagctgagggtaaaggtgcctgaggagggcacgagagtcaagccaggtttgggggacaggggagagtttctaagttgtatgggtctgctgagggatccagcatgactgggtccagtcagggagtttgggggattcagagtgaagggttggatcctggacatttgtgcaggccaggagggaagaggaaggtggtggcagggagcatagagtccatgggtattgggtgtgtgtcccgtcaacctcacatcatgcaaaaacgtaggactgagttgtgaagagtttattcaagtgaaaagctgggaatggccattcaggaaaagacacactccagagaaatgggcacagggctccaaagacaagagttcttt

SEQ ID NO: 124145 - DNA, 328 bp, Homo sapiens
ggaagcaaatcttttacctgttcttcctctttcttttacctcttcttcttttcatttatcccttctttctcttctagcaaataagaatattgcataaatgttcatcttcctcggggtctctcattaaaaagttaaagaaaatatctaatttctagaaggtgactattttctcccttgggggtagggggctgcagagggaatttagagacataagtacaacccatgtgtatccagaggactgatgcccctagggtaagccctggattttgtaggtgcttagaacacttgtttttttaattttagatggtgggggatggtgtacatgtac

SEQ ID NO: 124146 - DNA, 520 bp, Homo sapiens
cagaactcctcggcctggggtcctgtttgccaaaaggaatctggatgttgtgagtgcctcaagtcactgactccccctcctcatgaccaggggatgatgagcagctgtttaataagccaccggtgtcaaacccggtggccgggggcccaggaagaaccccgacttgggagtgcagccccttaggcatctcagagccagggacaggaaagaaagacaggttgtgttgccagtgtgactgaagcaaattaccttccctgggctggtttcctttatctatcttgtctatcttttcttacctccctcccgggaccttgagatgccttggaaatcagatgggaaaagcactgtcactcactgcaggggttgtggtaatgctggttactgatgccactgggaacaccaagctacaggagtcagtcatttgggacagtgccagcagtcagagcacaggtcacacttgttccaaaccatggcagtcggtgcttgctgcccaaactattgtctgagtttattttttaag

SEQ ID NO: 124147 - DNA, 309 bp, Homo sapiens
actcccgtgtccacagcctggatataggctcttttggaaaggagacctgaccctgccaaaagagtgcttccactgagggcaggtctgacctggaggaagactacagggagctgttggggctgccaacactccacagatagctatgggagtgtgctttagtccctggagggtagggacctgggcatgataccacagcattcgctgcaggcctcatggagatgaggaaggtgccatctgagggaagagcattccaggcagaaagaagagctggaacttgcctggagggtttgagcagtagcacagatgtca

SEQ ID NO: 124148 - DNA, 839 bp, Homo sapiens
atagtgaaattgtgacacaccctaaaagaacaagaattactcataaagtgtttttctatttgtttcagagcttgagattccttgtcacagattctcagagagcaaaagtactttttagaaacacatttctctatgaacagtgaagaaatgttaattgggagatgatcctatcaaaaaccatcatggaacttgactgtaactcatacttatttcatttgttatagccaaaattaaaataaaatttagtagcctctcaagaattctagaaatgatgaggtggaagacgtggtaggtccccctcagaagtgaaaaattatcccatcattgtctttctctgggaactacttctttatggcattgtaggtttttctgtgaatgatttggaagagttactaaaaattagggtacaacattgtatttccagtgtgattccagctgtttttaatcattcttatattctgacacctgacctaagaaagacaccagagcatttacattgctcgtttgggggtaatgagacaaagactggaggagagtgttttcttttctctacagttttcctggattttccaaatttccttctgggtgcttgtattctttttaccttctagatggtcaggggaaaggctgagcactcctaacaaatgaagcattgtgagtttttcacaacaagtttcatgactacaagttgatggaggctgggggcattctgataggtcaggaattcttcccctggggtccgtggagtctgagggtcttctcgtagagaattccaaatcttacttcctggtgattgtaaacgtgaagttatgtgtgtgtgtttatcttgagagatacca

SEQ ID NO: 124149 - DNA, 559 bp, Homo sapiens
cctgacagttccctctgtggataagccatagaggtgtccagtgttggtttaatatagcagctggtttgaccgagtaccctctgctgcgtcaggtaatgttaaatgatgtccatgcccccttgactctgatcaagacatggctacaacctgcagtttccagctttcctgggtttaagggccattgaagaatccttgtagataagagaagaattgtacattccaggaactggaggcatagctagccttggaaagctcggagggttagttgagacagctttagacttgcacatctgtgacctgagtatctttgagacttgatttcatcttctagacccagaggcagagatcatgtttgtggttatttttctgggaactgagactgggcaaagggaaagaggccagtacgcaagagtgctgtttataaatggttaacatcgtccccagtcccgtagaagaagaatgaaatggtattctcctgtttggtggttttatttgattgtttttgaattctttgtctctgacagaaggcatcttctgtatcctttatgttgtcactcac

SEQ ID NO: 124150 - DNA, 531 bp, Homo sapiens
gggtgacagagtaagattctgtgaaagaaaagtgaagaaaaaagagaagagaagagaagaacaaaaaattctaaaatttatgtggagtcacaaaacacccgaatagccaaagctatcttaagcaaaaagaacaaaactgggggaatcacattaccggatttccaattatactggagagctatagtaaccaaaacagcatggtattggcataaaaacacacatatagaccaatggaacagaatagagaacccagaaacaaaatccacacacctacagtgaagtcattttccacaaaggtgccaagaacgtacactgaggaaaagacagtctcttcaataaatggtgctgggaaaactgaatatccataatgcagaagaatgaaactagacccctacctctcaccataaacaaaaatcaaatcaaaatgaattaaagacttaaatctaagatcttaaactatgaaactagtacaaggaaatgtctggcaaactctcaaagacattggtctgggcaaaaatttattgaataata

SEQ ID NO: 124151 - DNA, 809 bp, Homo sapiens
gagccttccaaactattccagcctctgcctgttacccagttccaaagtcacttccacattttcaggtatctttacagaagcaccccactcccactaccaatttactgtattagcctgttcttatgctgctaataaagacatacctaagactgggtaatttataaatgagagactgactcacagttccacatggcttggaaggccttcagaatcatagtggaagagcaaggaatgtcttacatggcagcaggcaagagaaaaatgagagccaagtgaaagcgaatatcccttataaaactgtcatatcaggtgaggcttattcactaccatgagaacagtataggggaaactgcccccatgattcagttatctcccactgggtccctctcacaacatgtgggaattatgggagcttcaattcaagatgagatttggatggggacacagccatgccatatcaacccctatctctcaaaatatatagatctaaaataaaaattgatgaaagacttaaatataacacctcaaactatgaaactactacaagaaaacattgaggaaaatctccaggaccttagtctgggcaaaaattttttgaacagtaacccacaagcacaggcaaccaaaacaaaaatagaaaaattggatcacatcaagttaaaaagcttcttcacagcaagggatacagtcaacaaagtgaagagaaaatccagataatgagagaaaatatttacaaactaaccatctgaccaggaattaataaccagaatgtataagaagctcaaaaaaactctacagaaacacatcca

SEQ ID NO: 124152 - DNA, 396 bp, Homo sapiens
atcatagtactccctggagaacagcgggggtaaaatctacatctggcatgattcaccaccctagtgataacacatagtacatccgtaagggtcaccaagttccggacgcatcctgagaaatgtgaagactgtgattctagcaacgaggaggagacctgggtcactgggttgaaagatgtgatgaggcaacatgtgatgcccattcttgatggaaacaaaccagcaaagggtttttctcattgttttaagtgcttttaatgaattgattcattaaccacagagatattttccacagcaccacttactgccgaactttctgccaagaacaaggccaaaggcaaagatctccggacagctgcagcatcagggaagattgatgcagttatatcatccccc

SEQ ID NO: 124153 - DNA, 357 bp, Homo sapiens
tggaggaatatattatgttaaggttattctgaacctgtctaggactctggattgtatctcttcatactgaaatacaatttcttattctgaaaagaggataaggggtatgacctttaggtccttttgaggtaggtgctgtctgaagaaagttgctaatacaaacctggccaacatagtgaaaccccatctctagtgaaaatacaaaaattagctgggcatggtggtgggcacctgtagtcccagctactcgggaggctcaggcagaggaattgcttgaacccgggaggtggaggttgcagtgagcggagattgcaccactgcactccagcctgggcaacggaataagaccctgtctcc

SEQ ID NO: 124154 - DNA, 318 bp, Homo sapiens
gtacctgtgtcacagatgttactttgaggctcacacaagataatacactgaaggcacctaacacagtgtctggcacaaaataagtccccagttaactacatcacaggaagctggttgatttgaccttctttatgaaccatcagggactcagcctgtcccaggcagctagatttcccaacgcaacaaaagtcggctgggcctttgatctctcacaaggaatcacagctgagctacagctcggagtagttatttgcttccctggcctatacccctccactccccagaggcactgaagtagaagtagtaagaccctgcctc

SEQ ID NO: 124155 - DNA, 627 bp, Homo sapiens
cgttatggaggaagttgagatcactatcatctatagtctgtcacgtctaaatagaggttaccacgacttacttaacgtggtaaaggctacatcagagctcttcagcaaaccagcctagtggggagactggagacgtcttcccttcgaagctgggaacaaggcaaagattctctctcgcactaaaacagtattagaattcctgacccccagtaagataactccataaccagcagaaggaatgtgaacatttgtaattatctgtttacagtaagggccatctaacatagttcactgattctagcatgtactttttaaattttttttaagacgtgatcttgctttgtcacccaggctggagtgcagtggtgtgaacacggcccaccgtagtctcaacttctcgggctcaagcaatccccccacctcagccccccaggtaactgggactacaggtgtatgccaccattctgactaatttttgtatcttttgtagagactgtgtcaccatgttgcccaggctggtctcgaactcctaagctcaagagatcctcccacctcagccttacaaagtgctggaattacaagcatgaggcaccatgtctggtccttttttaaaaaatagagacaggg

SEQ ID NO: 124156 - DNA, 441 bp, Homo sapiens
ttcattgtactccagggcctgcacacctaaccgtggcaccaccacagctacagtccttgcagaatggccaggattttgaacagcagaattaggggagaggatattcagacacagccagtggaataaacaaaggcacagatcagaagtgtgttttggaagtttgattcagttggatcaggggttataacaggcaactgctgggagatataagttgggtttagacatggaaagcagtaacagctacagagttgggctttcattccactggaggcttttgagcaaggaggtgacatgatcacagctggcctttgggtgactgactggcagttagagatacaaccaacaggaacagggggagcctggccagggaggctagttagggggctatcgtagcagtctaggcaagagacattggagccagcatgaggtggtggcatccag

SEQ ID NO: 124157 - DNA, 495 bp, Homo sapiens
tcacccccagcccccaagggcaacccgctcaggtacctttccacgctgtggaaactttgtgctttcactcttcacagtaaatcctgctgctgctcactctttgggtctgcgccaacttaagagctgtaacactcacagtgaaggtccggggcttcattcttgaagtcagcgagaccacgaacccaccagaaggaaccaactctggacacatctccggacacaatgagatttggatggggtcacacgtccagatgatatcatcttccctgtcagcacagggtcaggcaggtcctctttcctcttcctcagagtagactgttttccctcatggtgttgaccacatgtgaaattatatctctattgttttgtcccttgtcagcttacctgttggacctaaatgtgattatatcagttctgtatctgtttgggttcatggctgttctcctgaatctagcacggggcctgatcgtgtaatacgtactcaaggaatctgca

SEQ ID NO: 124158 - DNA, 738 bp, Homo sapiens
atatgtaattgcacatctcaactcaaatagatcacatttcaagtgctcaacagctgaatgtggctactatattggacagtacagctctgtttaactactaaattataggacatacgagaacagagggacatggcatcacaaggatgcaaacaacagtgtatggagtctattcagatcctaatttgaacaaaacgtaaaacatttacgagagggcaatttgaacaatgattggatatttgtgatattcaggagttgttactcctttatttagatgtgataatggccctgtagttagattttttttttaatcacttaaagctacataatgaaatatttacagatgaagtaatttgatgcctgagatttgcttcaaaataatccagggtgagtggaggatgtatagatgaaacaagattggccataagctgataatgatttgaagctggatgatgggtacatggaaaaaaatcattgtactattctctttacttttgaatgtatttgaaattttccccaagttaaaaaaagaaaaaaaaagactgtgggataacattacaataacactgctcatattcttgaaagtacaattcattaaagatactaccatgagtctctctaaacctgaaagaaccagtggctactgccaccaccactacacacaggtaataaaccaggaaaatcttacaaataaaaaccgaacaagagtaatgctcatgttttgttttgttttttaatttt

SEQ ID NO: 124159 - DNA, 456 bp, Homo sapiens
atggggtgttggagccagagtggggtgagatgtgcacctgtgttgggggtcaggtgcagcctggtgtggcatgtcagagcatgagcatgttgagggcatcatgcgtgagggtggcctgcaggggtgtcagagcccagcagcatgtggagggtactgacacagtggggtggcctgacgtgggctgtccaagtccaagtggcagaggagtgagtctgagagatggggcagcctagcccggggagtcaaagcctaagcagggtgaggagctcccctgggcagagggtggccgagtgtggggtggcagagcccagggagtctgggaaagcatccatagggagagggcgtcattgtggaaatgggagaggaactacctacagggggctagatcagataagtaagtgtatatataagggactggagccaggcgccttgccatcaaatcagggaggtacagat

SEQ ID NO: 124160 - DNA, 444 bp, Homo sapiens
tgaataacaatgacatactcgttataagaaaactcaccaatatgtggctttaggcacggaatagagaggcaaagttattcggatttaatcagtacatgtcaaatctttggaatatcctttcctgtgcaatcccctctcatctgtttagagactcaaagcagcccacgaagttttttgcatactttgcctcagagtccaggattgcttatgaaatgtatttgtgtggtggatgcgtcagagtcttagagccaacataagagtccagagactgagctgtaagcatgataaagctgtcaatgactggcccgtgggaatgcttgttgaaggcatatacacctccctaatcattttcttcagtctttaatatgtaagtgatacagctaccgttatttttttccctgcagcaattcaagcattgcaccccggattaaatcatgtatctct

SEQ ID NO: 124161 - DNA, 369 bp, Homo sapiens
ccttctttactttcctcctctacctcttttcagataaattctggatattctcacagaccttctatttaattaaacaggcaggtgagccatgctcagtctgctcttcctgctttctcacaggttgcttctcatatctggaatttgcccatttacccatttttaaaatcaaaaattaaaagatacagaagaaaattaaaatcactacaaatccagtatcaaatgctttgagtattctcttctgagaaactacagtaaaaagatctcatgtattttcagaaaattctactgaaacaaactcacccaagtttttgtgacatcaaaagcactaacttaggccaggcgcagtggttcatgcctgtaatcccagca

SEQ ID NO: 124162 - DNA, 390 bp, Homo sapiens
ccgccttggcctctcaaagttctgggattacagatgtgagctaccactcctggctgctcctgtcatttcatttgtttttccagaaaattatgcattgtggttttgtactatgaaggaagtcatggaaaacagaaatgtattaggcatggtcctgtttaccccatatcttatactccataaaaagtaataaggcaaatacagcaataattctaaacttggaatgttcatgatcactatcataagagaaagtgcattaaagaagaaacagttgattttctggctgaacaatatcaaggacaattttaactggtttcaagttggactgaactagaccaactcttagctactctagttctagccatagaaattagattgaatggagaaaaggat

SEQ ID NO: 124163 - DNA, 697 bp, Homo sapiens
gtcctgtgattactcaatgtttaaccttttgaaagactgccagacagttttccaaagtgggtgcatattttatattcccaaaagcagtaaatgagggttccggtttgtccacattatcaccagcacttgttactgtgtgtctctttggttacagccatcctagtgggtgtgaagtggtatctcgttatggttttgatttgtaattccttgtcggctaacttgtacatatttcttaggctttgtagaagaaaaattgcatattggatgacatagcagtacacgtcttagttcaggctgttataacaaagtaccgtagattagtggcttataaacaacaaaacttttttttcacagttctggaggctgggtagtctgagatcaaggtgctcacagatccattgtcttgtgagggccagtttcttaatttgtagatgactgtcttgctgtgtcttcgcatggtgaagagcagagaaagagagatcctgtgtctcctcttctttttataagggcattaatcccattcttgagggttccaccctcatgacctaattaccccccaaaggccccatcttcaaatatgatcacactggggatttaggcttcaacatatgcattttggggggagtccaataccagtacatgttataagcatgaatatacagatactatattttaggtgattatattacatatccct

SEQ ID NO: 124164 - DNA, 276 bp, Homo sapiens
tttacaaatctaacactgttagagcccccagaatataatgaaactgtaggccaggcgtggtaactcaggcctataatcccagcactttgggaggtcaaggctggaagatcacttgagtccaggagtttgagacaagcctggacagcacggcaagacctcatctctacaaaaaattcaaacatgagctgggcgttgtgttgtgtacctgtggtcccagctactcaggaggctgaggggggagaatcacttgagcccaggcgatcgaggctgcagtga

SEQ ID NO: 124165 - DNA, 738 bp, Homo sapiens
gtctcaaagaaaagcttctcatttactaattttcagaaccagccattggtctgatagttacctgcaattgtggcaattttgaatgttttttgtttagagtttttttaaatattattcatggatttttattcagtgttttatagtcacttataatgggtattccttttgatgctcaaattatgcccattttggtcagtgggagtttatttagtcagcttctgtgtccttttcacccagccccatttgtatttgagtaccacctcgctttccagcccaaaagatgcccaagctcatcttgtactttccctgccacagacctgtagtcagccatttgctgaagtgtttttaaatgaattgatggtgctatgataggagtttataaatgctttgattgaaaaggattatttctgtaactgtgttcagtgccatttcttcctaaacgataactgtgagaattatactaccaggggacaaggaggaagtaattttgtttgctgctagatctctagttttcctttttgccctcatccaagtaaatgagagaaagaggagaaaccaccttttcccactgaagactttattcttggatgccagtttttacctattctttttctctgccatattttctttggattaatactgttgtttttgctttctttgtttctggtgtgtttattttagaataaccacacagaatactccctaatttcattcactcatcactataaaatattaggt

SEQ ID NO: 124166 - DNA, 503 bp, Homo sapiens
ttacactggcaagattgtgggtggagtggcatgggaaggtaaatgtgagcagacacactcagggatggagctgcgctgaccatatgaaaaggaaggggtggatggagagagagtgaagtgctgtaccggaggaaccctaattacacaggataaagccttaagggagcaactgttcatatctacacaaatcgatggggaaataaaagaatggaagattcaaaacagaaacagccatctgcacatataataaacatttggcaagttgtgatttctccatctgtcccccgatgagcctggagtactaagctgatgtatagcaacgacgcttaacaagaaaagcccttgagatgtcctcttccctatttctgtcagtttctcattctgctttataaattccggtagtgtgaccctttggtcatatttggaaagaagatacagatattaagaaacaaaagagattttgaagtacgtgcttgggtggggcacgaggggacagtgtggac

SEQ ID NO: 124167 - DNA, 479 bp, Homo sapiens
tacaagcctgtagccctaggcaattcctttcaagggggtagccttatcccagcccttgatttcatgtgagtcttctgcctcacatgggttatttagttcttagtaccctgtatgagtcttgcccctggatgcctctgtttgctgttggcagaattgagctggtctacatcttcaggctacttaccatattgtttctgttccatttctgggctatggagatgtttttaagtgtgaaaatgccttacatttttcccattttatattaaatctattatcactatcattttggattggcgtggtcctcaaagccccatcttgactagaaatcaactagcatttgcttctctgcagttcgtaatctagcttcctctctcacctttctcttggcaattgccctctctgaagtcactgctgttgtttccgagtcactgaatgaaaccgtttttccttcagcccccattttccttcactcctctgca

SEQ ID NO: 124168 - DNA, 168 bp, Homo sapiens
tacaagcctgtagccctaggcaattcctttcaagggggtagccttatcccagcccttgatttcatgtgagtcttctgcctcacatgggttatttagttcttagtaccctgtatgagtcttgcccctggatgcctctgaaggcccaaaatctcctcctgtccctctcca

SEQ ID NO: 124169 - DNA, 484 bp, Homo sapiens
agcaacttttcatgctgtggaagcttagttcctttgttcttcctgctaaatgttgctgctgttgactctttgggtccgtgccgcctttgagagctgtaacactcaccacgaaggtctgaagcttcactcctaaagccagcgagactaggaacccaccaggagggaggaacaactccagacgggaggaacgaacaactccggaggcgccacctttatgaactgtaacactcaccatgaaggtctgcagcttcactcctgaggccagtgagaccacacatccaccagtagaaagaaactacggacaagtctgaacatcagaaggaacaaactccggacataccatctttaagaactgtaacattcgccgtgagggtctgcagcttcattcttgaagtccgcaagaccaagaacccaccaattccggacacgctgggatactttgtgactttgtttacagagaaaaaataatatattttttcattcc

SEQ ID NO: 124170 - DNA, 547 bp, Homo sapiens
  misc_feature (526)..(526): n is a, c, g, or t
ggaccatgtttccacacggtcctgggcagacttaaataacgggcttaatgtggaggtggttttgtacactctggtgcctgtgctgttcctagcttttccaccagcagtccacactgctgagggttgccttctatagtagtcccctcttagcctcagttgcactttctatggtttcagttacccacggtcaaccatggtctgaaaataggtgaatatgatacaattagatgttttgagacagaaagagcccccattcatgtgactcattacagcatagcattataattgttctattttattatcagttattgttgttaatctcttactgtgtctaattcgtgctctgaccacagtgagtcattgaaatcactggaccttcaggtgaacccactggttctctcttaaggtggggactattgatgtcacaggcctgaatccattctactagtagatatcacaataaaagcaatagagatactaacccagaggtcaagactatcccatttaacacaatgactagacccanatggcaaagggaaataggtgg

SEQ ID NO: 124171 - DNA, 300 bp, Homo sapiens
accagggaagttgaatttgcagtgagctgagattgtaccactgcattccagcctgggccacagagcgagactccgtctcaataaataaataaataaataaataagtaaataaataaagtgtagctctggtcttactaagtgtatgatgtttgtctccatgaaataataataatgtaagatctgagaagttaatacttaaagtaaaacctacagcaaaacagtctgctgaatttgtctgtgatctcacaggagagtctagttgtaaaccgaagcaaggatggtagctaatatcgcagcagt

SEQ ID NO: 124172 - DNA, 414 bp, Homo sapiens
tcttttggttttgtattcccattagtatctagctaacagtaaaatcctactataagtggggtataaaatctggcatattgttattaataggttagtaaaatcatcagtgtgattttgcacagacggccaatagttataaaggcaatcaccagtcatatcagaactgcagcctcctggtaagaatagttgctcagagttttttcagtgaatgaggatttctgtttttattaattatgctaatacagattatttaagttcccacttttcatttaattctaaatacaactacgttggggattattattatttttttaagaagcaggaactggccagttcctgcttcttgaaaacacagctttagaactttacacagaatgtgctgaactccttgctcctaccaccttctaccactgc

SEQ ID NO: 124173 - DNA, 440 bp, Homo sapiens
tctagaggattcagcaaggtggttgtgggtaggatgactggttggtgttagagtgccactggggtgcttgggaactttggttcaggaaagcactgtgcagtccttttaaaagatgtctgcaagtttattagcagtccactcaaaaggtggagtctaagttttctcaccttgaatatggttgacttgtttctaataataggctgtggtggaggtgatgctgtgtgatatctgggaccaggagagaaggcaatatagaatccccctggttctctttcttgggacactcacccctggaacccagccaccgacgctgtgaggaaggaagcctgggccacatggggagaccacttactggtgttgtagcttggctgagctcccagtcagcagccagcatcaaatgccagacacatgagcaagctcctcattgactccagcaccag

SEQ ID NO: 124174 - DNA, 262 bp, Homo sapiens
cacagtacaagctgggtgtagctgaggaacagcagcctgtgtggctagagcatgtacgacggggagagctatatgttgtgcacagagctccgtggaaagtggctatgacactcgctctgccagctacagacctggtcttcagccacttccactgagcggcatcccacacaattcttacactcctgccatgttctaagttcaccctcattctcccactcttagcctcaccttgccctcattactgcttgctttcctgactctg

SEQ ID NO: 124175 - DNA, 528 bp, Homo sapiens
ctcttaatctcctcaattttatgccattccaaaatagaagtctctctgatgatcaagcctttcaatctttacagatggctcttttcccttctacttccttgatcagtgatttcacagacttgactcctttaatctgttagtcagtgtttggagactaattattgttgctgtttgctacaaacccctcagtttatggataacatcccagttatagtatcccagaaacaaaatttcatagcttataagactatctaaatttttacccttaaaatctagactgtttaaagttttatgtagtacatagattgtgtaactgtgtactatagaaaaccatgtactgtggcttcttcactttgaatgtatgtagaaagagtgattgttaattgttagcttttgcaaattaagtgtattctaatatgtgctgaaaactttaggtccatttatacagtattttatttcacaggttctttccacatcccagtatttactactaactacaaatatgttcgtttttcacctttacatttg

SEQ ID NO: 124176 - DNA, 528 bp, Homo sapiens
tcttttttggtttgcccactgaggtatccaaagaacctggaacagcaactgctgttcttattacacatttgttgaatgaatgactgaaactcacaaagctgaatgtacaaagttattgactgaagcactatgtatgataatggaaaagcagatgttcagctaaaggcgattaataaattatagtatgactataaaatggaatattttgcagctatttaaaaagatgaggtagatttatatatgttaacatagaacaatgaccataatataaataaaaaccaacaaattacagactagcaagtatattatgatatcacttttgggaaaatatgtgtatatgtacacataaaaagcatagaagggcacatacactaaactgttaataatggttaactttgggtgatgaatgggggggttttcttttcctgtaccaagtgaaaaatggaaaatttaaagcttacagaatttattttgaaataacattgctggatttttcccccccatgggtatattattttatagttagag

SEQ ID NO: 124177 - DNA, 524 bp, Homo sapiens
caaacaccgcatgttctcactcataagtgggagttgaacaatgagaacacatggacacagggaggggaacatcacacaccagagcctgtcagagggtggggggctaggggagggacagcattaggagaaatacctaatgtagatgacaggttgatgggtgcagcaaactgccatggcacatgtatacatatgtaacaaacctgtacattccacacatgtaccccagaacttaaagtataattttaaaaaatttaaaaagagtcgtaactgcatcttggctaaaaacaaatgtaaatagccataactgcatcttgactttattggccctaaaagaagaagaggagtattaggttagaagttgttcagctgcttcaccttgcattgaactgttctgagagaattcactcaaagtttaaataacttgcacagagatctctgaactcaaagttcatgctctattttggtgagtggtggtgccctttccttctgtggagattagaataagcaatgagtcactctggctg

SEQ ID NO: 124178 - DNA, 290 bp, Homo sapiens
gctcccactgtaatctcaataacacagatgttttttccaattcaagttgtgaatcttaaagcaaatctgtcaattagaagagagtcatcaggttctgtagttaaggtcttccagtgctaattcaagcaatctgctttccatctagcagaagctacaccccacatgtgtgtcctgtgtgattgtaactttgtttttaaagcactacctggggaagcatttcttataaaaattgtcgaaacaacgtaacactctcacccacatgtatttcctttcagtttcaacccatccag

SEQ ID NO: 124179 - DNA, 462 bp, Homo sapiens
tggagggaccagaatccaagttccatctgcctctgcccaggaatacccaatactatccagggtctctatcaccttttgtatctcacacacaaggacacagctaggcattcaaatgcctgtggaaaggtgaaatgaaaattgtacctcaagttccaatcctccccaagtggcctccaggacaaactaggggcagaccctcaagggatgcaggtagttctcaacttttaaggcaacctccataccaccctcgtctcttctgtttcctcagtttcaatccttaaagttttctcaggagttcccaaagacccctcaagaagagaaacaacattgggtgccttaattaactaaaatccttttagtgtttcctcaaacttgtcaggaagagtgtttcacctcagagataagaatgagctagagaccagtggattagttgaaattacatatccaatatcgatatgtaac

SEQ ID NO: 124180 - DNA, 372 bp, Homo sapiens
cttattaggtagaggctctaccagtgattaatttggctgcagtgtacctccctccctccatgtgtttctcacctaccttctactgcagtggaggttcctggcagggcaggagaacatagctcatcgtagagcatggagagcccagagcgcatacgcaaggcacagttcatgggttccccttcctcttcccttctgcaccctctgactcctgaaaacatccccaggagtgaaactggatgcaagcgtttgcactcagtgtttacctgtggaagtttcggtcacccacttaaccaagatccctgagctgtgcatgttagttgctttttcatcatgtctccatagcatggaattactgaggtacagctgcatgat

SEQ ID NO: 124181 - DNA, 572 bp, Homo sapiens
tggtgttctagaggatccctgcatttactccatggcgaagcagtggcagaaatggagaaaagagttgggtgcaggaatgtcagtgatgtaaaagtcaaagacttgactgctgaaggaatgtagggaatcagtgcccttggaatgtcaatggcctggtctacattgagaatgaagactgagaaagggcttcctgagggacagagagctgcaggtgatcaaggacactcaatgggtctctgagggaaaagaagaccaaagaattagggagtagctagcagaaaatggaggcatgacactaaacacagactgaaaaagagtgctgattagaaagagaaaggagcccaaaggcagatgggaaaaccagccaaggatggagagacgtctgttcattagtttgtagtttggacctcacctatcttaccaatgtggtattatgctctagtaaaaagtcagcgatggccgggcatggtggctcatgcccgtaatctcagcctcccaaagtatctacatttttttctctgtccctctttccaactgaatatagacttcaccaggccatggagtaaatgttc

SEQ ID NO: 124182 - DNA, 478 bp, Homo sapiens
gcggttctagaggatccctcacgcccatgtccacaggtcagtctccctttacaattagcattaaaacatgcctgttctaattccttgatcagttttgttttgtggttggctttgtcattgctccttaagagactgccagtgtttcatatgagaaagatgatggtgttgaatgcagtgaataatggagcgataccagcagtcatgactgggaggcatttttggaccacgatttaatgagtagcattcattgcaaagtgcaaagaaaggcccatggaaagatgagtaccctctagtctgcttaattcctcactatctttttactgctcccttttccttggcttgattcgttcagtcattggagaagcatttgccaagttcagaccgtgttcaaggcacaaagacagaaaagctcaggtccaacctcagtgaatcagccttaagtatttgctgagcattgagtatgtacgcagtacagagt

SEQ ID NO: 124183 - DNA, 375 bp, Homo sapiens
cgtaaatattatttgtttatttaaatatttttctcatgtctctcctaagattctgtcaatcttactacttttaaaaataatctatgatccaaatacatgtgaaggtactttatcaatagtaattattttaacatattaattattattattaaattttgaaagatttccttacaagtggcagatatatgttttattttgtttcatttttacaaagtaagatcttaaatattctaaagtttgtattgtgacttccagtaatgtaaactatatgaggctaatcctcttttcctcctttttgtttgttaacctcatttgggataactgtaactagtattattttatttatgtaataaaaatatatgtgaaataaagtgt

SEQ ID NO: 124184 - DNA, 306 bp, Homo sapiens
ggaggaagaagtggaaaaagggcacttcagaccaaaggcacagcatgagaaaaggcttgtgggtatgaaatagtgcatgcactactgtaagaagttggcatgtgctagatcacagagaggggtgcaggggggttgagatgggagaagagtcataagctgaagaacaaaggaggttgaatcagtggaggctttaaccagaaagtgtggaacattcaaaaggctccaagcaagaggtgttttagaaagctgtgagaggacatgctggagaaggcaacatgagagtggggagactagtccaaaggccac

SEQ ID NO: 124185 - DNA, 526 bp, Homo sapiens
aacattagcttagggggtaaagtaggttacccaactcggaaaagcaacatcaaagtccttataattaacacatattaggggcccaacttaaatttcaagcagatgtcatgagctgctcagagtagcgtgttacaactctgcgttataaggtaaagtgacttagagtgtaacagtagtccccaaacaatgtcaaatagacactggtaagtatagattgctcctctccttgcatcacaaatgttaattcaccttgcccccacacacattaaaactcagcatatttcacaaattgagtgtttcatttctatttcaggtagacttatggtaagtcagttttgctccccaaataagttagccatatagtacttctatatgcaaaatttgaatctcaattttactactcaagcaggaagtaaaagtcatttttctatatcttctttgctcccagactgtgttacagtttacagatctgaatattgtcacttgtacaccatacatacacagaggtctaaaactctctacaagt

SEQ ID NO: 124186 - DNA, 143 bp, Homo sapiens
tagctgcagtcctattgtcagttgtcagcactctgcctgttttcttttttgttttttcgggggttttcctgtttttttggtttttgagatggagtctcactctgttgcccaggctggagtgcaatggcgtgatctccgctcac

SEQ ID NO: 124187 - DNA, 152 bp, Homo sapiens
taagcatttcaagcaggtttttaaataaatgctttaattttttttataagataggaccttggctttgtggagcattatagagctatattttggagttgaaatttgagctcctttttggtaactgtggagttactgctcaggaaatgaactgt

SEQ ID NO: 124188 - DNA, 165 bp, Homo sapiens
tgctgggattataggcatgagccactgtgccctgccaagttttatgttgtatctatgtcttcttcagctctcagaagtttggtggtaaggatttgtaccattccaactgcaaagaaataaagttgcctacaatgaatgaagaagcaaatgtttacaaggcatgca

SEQ ID NO: 124189 - DNA, 358 bp, Homo sapiens
gaacgaaatggatattgcacattttaatggaaggactgaaatcctctgcaccaccaaaagttctagagaggacaaagcattactccctcctgttatccagcctttactctgcctttgcggctccagtgagggctagttgtgctggagcacgtccgccagggaagaggtgaggatggagtgttggtgagggcatagacccccgtgtagttctctgctgccccaggccacatcctcccaccaaggtatcaggtggcaagtgggcccacaacgtggggactcagtgcttagttttggagaacacaaaagtgcgactacttggaagcttctcttttaggtagaaggagatgtaagaacccga

SEQ ID NO: 124190 - DNA, 252 bp, Homo sapiens
cagaagttctaagtctgttctcattacacagtatcattgctcttatacattatatttaaaagcacattgtatgaaatgaaaaagtatccaagaaatggcccctgtaccatgaatctggccacatttcagctgtccaatataaaacttatttttgatgagacagtaaaaatgattaaggctcaatttctaaggtgcaatgttagaaaattctccagattctgatttgtgctcacttccttgggactcaattac

SEQ ID NO: 124191 - DNA, 698 bp, Homo sapiens
gaaggccaaagggtggaatacctctccagccctttttctaagtggtgacacttagaaaaggatccctagaggtcaggcctacacctcagagtgtccactcaccttgcatatgtatagctttggtcccgagggaagtatgaatcttaattttaagacactgggtgcctatcactttccaggacggtgtttgggattaaggatgcacaatttggtacaacaaagccttagctctcagtcagcttagtatatcccatatatgcctgggtaagtaatgaggttaaaggaagtaaaatgaaagattcagacaactactgaagaaaggtgatttatttggcagttgctttgtttcaccagtttatctgagcagtgtcattgagacatatatgaaaccatgtaagatcaatcatagagccttttaatattccagagcttgaagagattttaggatcacttagctataacctctcatttaacaaatgaagagcatgaaacccagagattttaaattacttactctgggtcacacagctaattattagaatctcagggtggattttagatacctagtgtaaccactcagataataacaaagattaataattatagccaacatttacctaaagttactataatatgtatagtcatatacgtaatctcagttctgacagtaactcaatgtaataggtttaccataccca

SEQ ID NO: 124192 - DNA, 268 bp, Homo sapiens
tttaagattgatagatgtcccgaaagaagtgtactaccgagtcactttctctctgcgcctctgttttcacatctgtaaaatgtttccacatctgtacatgcagtagcgtgccttacgaggtttgtccatccatagatggttgtgcagatggaggagataagcatctttaaggtgtgtgagggccatgtgatatcaacttcaccagccctggtggactctaggcagcatgttttggggcctcagccctgtctgggtgctgggatggcag

SEQ ID NO: 124193 - DNA, 197 bp, Homo sapiens
tagaggagcttaattctgcacccacagccgcagcgcggagccggatctggtcctaggggtatgcttttgggtgcagctcttcactttgaggcttcagtccctcttctgcaaggaagaagttggtcatagtggtccctaagggcattttttgttccaagtcccctttaatttaattacatttgctgggtggcagaatt

SEQ ID NO: 124194 - DNA, 488 bp, Homo sapiens
tgatagggtaacagggagtgaggcagctgttttgggacagggcacacagccaactagcatcatgatctctatcataagaggctcctcctggtcatgtcaatacagatttgattctacttttcacatggctgatgagttacctggatctacacatttcaatctcaatgttccaaagaaagcctacacagaggagcttaagcctagagtccattcattctaatgttcagaagaccacaatttgagtagacttaaaaacctcattactgttgaaaacaaattttggctcaagtaaaagctaactttgctcagttcctgactttcacttaaaaatgttgttaatgatttgctcatatttgaaatcaaaatgttaaaacaaatttggagacacgttgttaacacatactggtggcctcaatattctaagagcacaaatgagcatgtgcaacctccttagcattatgatgtcaagaaaacctctatccctccat

SEQ ID NO: 124195 - DNA, 399 bp, Homo sapiens
tctttgacatctactttcagggaaacttaatcagaaagaaggcaacgagtctcaggcttcattttacatacctgtctcaagagataaaagagaattccttcttcatagctttaatgcagtgccaagcttaagcagattacctgttgcttcccttatacctgggccttactttggccctgtttggcctcatgaatttgactatatctgtatgaaagttttcaccaaaaatagcacttttcttaggttatattatatccttcacatgctattaacccacatatttactacttttcccagggaagggaagaaattgtgggcatgggaaagatggcaactaagaattgagatagttctttatttagttcactaggagaacagattgaggaatggattgggaag

SEQ ID NO: 124196 - DNA, 463 bp, Homo sapiens
atttgatgacagaattcccagatggtgacatgcaatggttttgcagagtcaagagtttctctttgggacaataatttggcccatagaaaccatgatcacattctgaataaaagtagagatgacaaggcctaacaaaatatttttctaatcaccgaattagtcatatgaacaatgacactttgaaaagtaaatcacatttacctatatattaagttagaccatttttatgtgaagttgtgactgcttaggaaagtgggacatacggtcacatcgccctgacatgctgtgggtgttatttaatttcattatggatattgtttaacaaacataaaagtaaaaagaacagtgcatccatcatctaagttcaacaacatcaacattttgcccattccgtagaaacgtaaaaattaaatgtcaatgaccctgaagccttctttgtctgagggttttatatttttaaact

SEQ ID NO: 124197 - DNA, 294 bp, Homo sapiens
atcatcataaggtcagcttccaggaaaacctgaactgaggactatcagtgtagttttataaaacaagtggtattttatctgttaacaataacatagctcagaatttttaaaaaatgaataaatttaactggaagaactcttagtgttctgtcattttgtcacagatatgcaccagccagtgaataatgttttcagcataatttcagttagtcttggatgtaaattaacactggtgagtgtgtgttcacttccacatggccataagcctgttatcatctattttcttccctatcc

SEQ ID NO: 124198 - DNA, 196 bp, Homo sapiens
aaccctgctgcccttttgaattatgtcatttccttagcaagaatttttatttattgcttaagcatttaaagtgatttttataaaaacaagattgctcattgtaaatcatttacatagtaaatgtgaattgctattctttaattaacttgtgtttaaatagctgctgataggtcaaataaaatgcctgaaaatgacc

SEQ ID NO: 124199 - DNA, 518 bp, Homo sapiens
agacctcaattataccaatttctgcttagtagatgattgtcaaaatggctctgataagagtaatgtgatacaactctaagcacaaattgtggaagggaaatatgatctaatcatatgaccttggttaataagtttccaaaataggcctcagtaggtcttatctacttgagaatttcataatctgatgtcagccttgtctttcttgacctctgttgctttggatactgtgaaacagattcctccttctggaaatcttttctccctttgggttccataacctgatggtcttcctgctaccctgagagctccgtctcggtttcctctgtgagcttgcttctcagatggtgctgtgcctcaggccctatctcagctccgaccttttcccagtcaatttcatatacacttatgactcagctaccataaatatgctgaccatttccaaatctcttatctcaagcccaccctcttctcttgaacttgacacccagaacttccttttatttgtattaacaaaagaa

SEQ ID NO: 124200 - DNA, 345 bp, Homo sapiens
cagcagtagcagcaatggggcatgggaatctggctctgcctcaggaagggcatgaaaggaacctgtccctggacacacgctgagcagcagctccaagccacctccaggctagagcaggggcaggggctcccaaacggccgggacttctcccacaaaggagttgtttcagtcagagttctccaggaagacagaacccacagcggggagacagaggggtgagaagggagtttggaagggaattggctcactcaattatggaggctaagtcccatgacaggccgcctgcaagctggagacccagggagcccgggctgtgactcactcctggtccaaaggcctcagagc

SEQ ID NO: 124201 - DNA, 306 bp, Homo sapiens
acaggtgatgggaacacttcctttctcaaagcagccgtgggtggctgtaaaggcaaattatcccatgtaagtgatgccccttgagtttgtgagcagcacaaatggagggagggagggagggagggatggattataggggagaatcagaaaacaggagaaagaaacaagtggaagaaaatgaaccaaaaccacataccaatgtatgctttacatacatatatatgagcatttgaaggcatgtggtttctttcactaagtacttctctaagagctaccgacgtgggatgttttagcactaaaactcat

SEQ ID NO: 124202 - DNA, 435 bp, Homo sapiens
gcctttttgcagggggagggagttagtttctccagggaggcaattcataatgtgagtctgaaattgaacacaggaaggcaggcagctgtgcttacgaattaactagagctgatgtttaatttgcttcttattgatgccatttcctcactggttcattagctgtagttggagaataaatgccttcacagttcattctttatgatgtcctcagcttctgggtcagcctcatttgttccttatcttccctccaaaagagggctctctcttagcctctcctcatgtctaaaggctcatctgtgaatttctggggcagggccttggcttcagtctctgcacagagcagggtccccttggtatctacagtgtctgcccactgagactaccaaggataatgccattgcaacagtccagataggggtgttggaaaataacttg

SEQ ID NO: 124203 - DNA, 678 bp, Homo sapiens
ctagcatgctcacatgtgtgcacacacacatacactcatgctgtgaaagaaacattgagggtgctgtgagagtgaagaaagaaccctaacttagatctagagtgcaggaaggccttttccgaggagtgatttttaagctgagccctgaaggacaagtaggagcagcaagacaaagggatgtagaagagagtgtttatgcagaataaacagtttatgcaagggccctaaggtgcaagagagtttggcacattggagaaactattaataatgaggtagtaagaatggtgcaaaagtggtaggaagctggtgagataggcaggaagcagaaaataggggctctagccaggtgtggtggcattcactgtaatcccagctacctgggaggctgaggtgggacggtcgcttaattaagcccaggagtttgagaccagcctgggcaacatagcaagacctcatctcttaaaaaaaaaaagaaagaaaaagaaagaggctgggtgcagtggcttatgcctgtaatcctaacactttgagaggctgaggcaggcggatcacctgagttcaggagtttgagatcagcctggccaacatggtgaaaccccgtttctactaaaaatacaaaaattagctgggtgtggtggcgggtgcctgtagttccagctgcttgggaggctgaggcag

SEQ ID NO: 124204 - DNA, 355 bp, Homo sapiens
tggcctgccaattgaagccccagcccagggcccttgccacagtgctagtgggccacccttgcccatcatgcagcatggcatccatctgctcagcaccctacacaacaccggaggtaggggagcccaccacggaacccctcaccaagaaggtcctcaccatggagaaactgaggtactggaggcggggcctctgcagtcacgctgggtcacgtgctccagtcagccaagctgcagcggccaccaagggtgcccagggtctggcctgttggtcacagtgttgacctcatggcctgaaatgggtcttccctgaccagacaggttccagcccaccatcatctatcactgcctcagccct

SEQ ID NO: 124205 - DNA, 207 bp, Homo sapiens
tggtggggaaggcctgtgtgaattactccagggaacaagtgggaatgaggcctgcaaagagaagggactgaaagcgggaagggagataagccagagaggtctgcagggctggagtgtggacttgattccaggaacacaggcagcctctggaaggatttttaaaaagataatggctgggcatggtggctcatgcctgtaatcccagcg

SEQ ID NO: 124206 - DNA, 524 bp, Homo sapiens
ggatagggagataaaaagacaactgtcctttgtctgatcaacagaaattgacaagaacaactgaaaaaacaatctggcaagaaaggcaaccacttaggacaggggcactgtcaaatgaaaacatctcaataaccatgtgctcgatacctaaaataaacctaaaaatgaaaagaggaccggagtttttaataagacattttgacaaagctgttaaaaataatctttaaaataaactgagtatcagtggtctgtggtccctctccttatggcccatgctgtccattttctcccatatatttactctcttttaccacatcacctatccttctgtgtatctgaatgccagttgaaggccacagcagttttgtgtcttagtctggacaagaatatgtaatgtatagtcagctatcccttggtatcctgggggatttgttccaagaccctcctcagatacccaaatccaaagatgcttaagtcccttgcataaaatggcatagtatttacaggtaacctacacagagcct

SEQ ID NO: 124207 - DNA, 224 bp, Homo sapiens
cccgctgctctgtgtagccttgggacatggttccctgcctcccagccattccagcttaagctgtggctcaaaggggccaaggtacagctcaggccattgctttaaagggtgcaagccccaagccttggtagcaccttggcagcatccatgtggtgttaggcttgcaggtgcatagatgacaagagttgagctttgggagccttcacgtagatttcagaggatgt

SEQ ID NO: 124208 - DNA, 672 bp, Homo sapiens
cgcggtggctcacgcctgtaatcccagcatgttgggaggctgaggtgggaggatcaccagaggtcaggagttccagacctgcctggccaacatagtgaaaccctgtctctagtaaaaacacaaaaactagctgggcatggtggcacacacttgtaatcctagctactcgggaggctgaggcaggagaactgcttgaacctgggaggcggaggttgcagtgagccaaaatcgcactattgcactccagcctgggtgacaagagcgttaactccatttcaaaaaagaaaaaaaaaagtaactgttaactttaagcatcttcaactgacaaaccaaatgacattactttggaactgctccattcaccggacgaggaacaaaaaaaaccctcaagtttcatttcagtctctccttgaaaggtatttgattcctggcggattccaggtgcaaataatggttgaccattacaaatctgtgaggccacctcattatgagttcatatggcaaccaaatcccattttccctctgcaaattcaatccgcatcaatagccccatatatcactggctactgctgttggctgcctgattttgaaacataaaattttttttgaaagattactgccaacacgtaataggcaaactgcaatttcaattccctacgcatgtgcttgaag

SEQ ID NO: 124209 - DNA, 479 bp, Homo sapiens
aaagcaaacttgcagttctcaacaaagtgttttccactgatgtctgctaaaatggtacttaggaggtaaagtatgtaagaatatccttctgatgcaattacatttaataacaatatcagtgtgggccactttcttagctaccaccagttctttaatgtttttgaaaattaacttccagtcttggccacagcagcctaagagtccccagaagtagccagttttaggcatatttgaaaggaatctgtcttttctacttgggaggttgaggaactttcaccttctttctcattcttctcatttctgttaacttcttcctcaatctttctttgtgctttcaggatcttctgttttattgactgtctgtatctttggtcccatgtgttgactgctttctgcaatgattcaaaactttttattttgggaattctaccctagcctggtccttgtcccactgtgtcatgtccctgttgattgcagta

SEQ ID NO: 124210 - DNA, 390 bp, Homo sapiens
aattaatggtgactatgataacacttttcacccgatccttgctagtgcattgacttgcgttgtctgcatcgagttcttaaaagatgcttggtaaagtcttgggtcacagttttaacttctgctggggttcctgctccacagccctcatttagaactgtttcactttggctattgtttagctttgggccatatttggctgttttttagctttgtaaaaatgctcatttaacggacacaaggcctgggttagaaaatgtagtatttccttccccctctgtttgcgtaggagctagcgctagtggaagcccatctctcccttgcaggattttgtggaaagtgacgaaaataactcaaaccacatcagtgttctgcttgatttccaccattctt

SEQ ID NO: 124211 - DNA, 415 bp, Homo sapiens
taaagaagatagccacacaaagaaaagtggaaggatgccaagaagaaggcacagcatgtgcaagtctccagaggcaggctggaaaacactggttgaactggatccaggaactgaaaaatatcagtgtggttggaatgactttggagggagacaggaaagggccaaatatataacctaaggttaagagtcagaataaaatccaaacagcagagggactatattatagagttaagcaggggagtgatatattatttgtgattatttgaaaatatttttatgaaacatttcaaacgtgtaaaaaagatatgaacactcatgtaccacccagcattatcaaatctaaacgctattgttagattcaaaattttgttaataattaaaacatacatgatacagcaatgcaactaaacaactg

SEQ ID NO: 124212 - DNA, 232 bp, Homo sapiens
aggaaagttgggggtgggaaagacaatggaactgtacacagtgatgtcattctcagctgcaagaaaaaaatcttaaggcaaccggattatatttgataaaagattaaagttgcatgcaaattctaactaaaaacatctgtttcctgaccctgtgcgagttctaacgttttgataggaattctggttttggaatttctgagtcttaagtttaccttcctcaactactgcctgg

SEQ ID NO: 124213 - DNA, 310 bp, Homo sapiens
tcataaccaagaagaatgtgctaagtggcaaagtagcaccaaaaccaattttgagttgacagggcaggttgcaatacagaatcaggaaccaggcaatgtaacatcagaataccatatggaaaaatctttcaaaccacaaattgataatcacttccctgtctaaaaacattaatggctttccatttgcacacagataagtttaaattccttagcatagagtgtggcctcattaataagatagtccccatctatcactgcagacacgattcctgaagtttcttgccagtactacttcaattacatgcagtgc

SEQ ID NO: 124214 - DNA, 1084 bp, Homo sapiens
acccctactcatcttaaggaatgcttccttaagaagtctgacacttttttcttttttttaccctggaaaacaatcagtccccttttacaaatctcttaaggttataaactcaaactgcactagacaatagaggcaaggaaaactattttgaagaaggcccaatttgaacctcagctcgctagatctgttgtctgctgggtgaatcctggggaattcattgctcatggaagagtggtgttttgaccgtcagtgggtatacagtgattgatgctttgagaaagccatgcaactcagaatcactatttgtggaacagcctccatataacatgatgtgtgtatgtgtgtgtgatgtatagctggctttgaataaccacgcttaataccctcagtggaacgtggtgcatccttcatactccatggtacacaatgtatactcacatactccaaggtacttcttatcctttctaaaggacactgtaatacatacacagtaaaacctcagctgaccaggatagtcctggttagataaaaattaagcaaattttctttatgtctaatacatatgacagtggtgtgctggtaaaacccttacaaccagcaatccagggggagaaaaagccctgatttgtggatttcaatgctgcaaacgctcctacatggtctatcttgagctgccaaggtgatgtcaactggcttgcaaaacttctaaaacctaagtcagctcttgggagctgtgcactggtgctggcacaccgctgacatttagtatcccactgacattagcacaccgctgacattagcaccctgatactagaatgttaaggatgtgccagccctgctttccactgtgtgcgctgctggctccgggcttctggagaaatcttgtctcgagcacttatagtcactcttctgttaaagagatatgaaaatataggctgttggcgatcaggctgcatagcccagttgtttctttctgcccatccagatgtaaacctgcatttctatgattttctgcttccctgtggaaagggagtgcagagagcaacatattgttattcaaatgttgctagttgtatttttttgg

SEQ ID NO: 124215 - DNA, 572 bp, Homo sapiens
ttaattttgtatttttagtagagacagggtttctccatgttggtcaggctggtccgaactcccaactcaagtgagtcacccgcctcggcttcccaaagtgctgggattacaggtgtgagccaccacacctggccgtatttttattttttgacacagggtctccgccctgtcacccaggctggagtgcagtggcttcatcacagctcactacaatctccacctttcgagctctagcgagcctcctgtctcagcctcccgagcagctgggaccacaggcgtacaccaccacgcctggctagaggggggacttttgatttgggtactgagatataaggaggagctggtctcaattccctgttcatagttgggtaaactgaggctcagagaagtaagtagtccactcgaggtcccacagctaattcaggtctgggatgtgaaggcccagcagggcctggggagtccaagagggatggatgctccaggctgagggtgcagcgaggtcaaaggcaggaagaaagggaagagggagcgggtcgtggtggctcacacctgtaatcccagcgctttgggag

SEQ ID NO: 124216 - DNA, 410 bp, Homo sapiens
tcgctcgctctagaggatccaccttaggctctgacccacctttgctcgtggcattctcggcatataggattcagctggcttcccatgtccctttccatatccggaccaaatcaatccttcaagtctgaattattctattctgtttccctgaccacctcagcgcctaggattagatacctcctttgaattcttagaacactgtctgttggacataactgttcagtatctgatatcccttgctattgtttgttaaccttttccatgcataattgaatcttccaccaaggctgatgagctatttgagataaagtcccctgcctcaaggaaaaagtcttctgccttaaataccaaaacagtggtttgaccagatttgaaggatgtgttcctgaaagtagaatgtcctcatgaat

SEQ ID NO: 124217 - DNA, 697 bp, Homo sapiens
gggattgggaggagggaagggagcctggctaacagtaggtagaaaatgtagggaaaagtaaaaaccattgaggggcaagcacttactccactttgctggatgtcacaatggactggggagcctaaacttgatcctcgagatgcagttcatggtgaattccaactaagtggctggagccccacacataccagttggaatcacgtgccccaagtctctgatggtcacatgacgtctttttactttaaagctggaatgtaatggttgaggcccatattccaaaaaccacctctacgtttgaaaaaaaaaaggtggggaggagtgtgaactagcttctaatcaaggaagtctactaggattttggatgaggggaccagaaagggaatttggtgctcagcttttatccaaaacaaaaacaggagctgtttttaaaataagggattgaaatatatgtgagctgggacatgtatctcctctcttcttcaatctcatggtttttctaaatttaaaaaacatcttactaattattttctagggaagtcatcctattactcatgcctcattttgtccctgaatactagatttgaagctaaatcccacaagatagtgttaaaaagtaaggctctgttcatcttccttggtctggcctatattctaattgaactgttccctattttaggcaactacttaaaggtagtaa

SEQ ID NO: 124218 - DNA, 505 bp, Homo sapiens
tcatgaagctttccctctatgtattctcagggaagttgtacagtttcgggtcttacgcttaaatctttaatctattttgagttcatttttgtatataagatccaatttcaggctgggcgcggtcactcatgcctgtaatcccagtactttaggaggccaaggtggttggatcacttgaggccaggagtttgagaccctcctggccaaaatggcaaaaccccgtctctactaaaaatacgaaaattagccaggcggggtggtgcatgcctgcaattccagctactcaggaggctgaggcataagaatcacttgaaccagggaggttggagattgcagcaaggtgagattgtgccactgcactccagcctgggcaacagaacaagactccatctcaaaaaaaaaaaaaattgttttattattttgcatgtggatagccagtttccccaacatcatttgttgaagagactatcctttccccgttgtgtattctgggtactctttttga

SEQ ID NO: 124219 - DNA, 207 bp, Homo sapiens
aactcagcttctttaaggctttttttttccccccttatgtctcatgatatgttagtaagcatatggccatgtttagaagaaagtaatgaaaaggataagccagtgctgcataagtggtttctgaaggcatataacctggccatcttaagaacagttcgttgagaaattgctgagatcagtttaaggagtaacttccttttttttttt

SEQ ID NO: 124220 - DNA, 185 bp, Homo sapiens
gatgtcatgttgtacaaatgagaacgacaacctagatctgcttcaatgctgggacctacgatacaggaactcaataagcatttatttatcaaatgaatgaagacaaggcaactacccactttcattagatggacatctgagaataaaccatactactccaaacataataacatccattctactac

SEQ ID NO: 124221 - DNA, 261 bp, Homo sapiens
ctgaaagtgaaatatttgataattcctagtttcatacacctactgtatactctcccaaatgtctaaagtgaaactattttgtgagagatattgacattaagctttcttccagctttactcttgcaaacattgtctaggaggaaatgtagccatttgcatattgttttagcacctaaatgtagccatttgcttattgttttagtctggaaggtgttggagccggtgaaggagcaggtgtcatgctccaggttaatgtttgct

SEQ ID NO: 124222 - DNA, 503 bp, Homo sapiens
ggaggcagaggttgcagtgagccctgatgacgccactgtactccagcttgggcaacagagcaagaccctgtcccaaaaacgaaacaaaacgccctttgcatgttcagtgactggaatgtcagaagtgaaattgatgaataatttttgtaatatttaagtgcattcaaaatgttggacaggtaatttagatatctgggaatattgtagtttactggtttttttttttttcattttagtactagttgcatatatgctctgacatgaggtattgaagaaatatgaaatgtgtagtctctgctacgcttataaaacataattctgaaaatgatctttaatgcaaagaaatatcttctaggtttattttatacttattgatacttatatttagttcacattcaatctcttagatataagaaaactgtgagtgattatcagtttgaagggatttgtatattaatgtttgtatgctttttagtgtaataaaaactgtttcaatcttaaat

SEQ ID NO: 124223 - DNA, 730 bp, Homo sapiens
gacagtgagacaagaacttctcagcctcagggcacttgtggtcctacactgaagctattcagcttcttcgctctgctgatccctcgtccagtaacaagagaatagtctatcttctcgatatacttcagagctggaagaattatgtgagctttgttatgacaagccctctgatgagtgtatgaatgtccaggcaacactgtaaacgtaaagtgccatagaaatgcaggccggcgttacttgtaggctcaattcccaagtcttcctagagttttactcatcagaaagtctacaggcagccagttccaacatttttggcaagaacaacaaaatatattaaatttatactatatattatagatagttacaaaatatatttttaaattttaaattcttattttaaattagtattgaagtctgttaattgcaggaagaagatacataacagggaggtttggccaggttttgtttaacatcctttggggcccaaggattttataatttctgagatgagagtttagagtttctgactctcagcatagatttgatttattaggagaaatagagatgatactgtcaatgaggatttccagtcatttcctttgataggctatgctgtggtaatgcttcattgtgttaccaaaaaggggtcccgatccagaccccaagaaagggttcttggacctggtgctagaaagaactcagggcaagtccataaagtaaaagcaagttt

SEQ ID NO: 124224 - DNA, 284 bp, Homo sapiens
cctgcctcggtctcccaaagtgcagattacaggcgtgagccacagctctcaagggagctccttaaccttcctgcctcagtttcctccttcagagtaatgtcaatgaaactggaacattaagagtgagcagagttgatgctcacattaaggggggtgttttaaaggatgcccagggggctttgcttctcccaaacatcggacactgcctggaactgtccctcgggttgcgcagagcgagcccagcttctgaggcgacagagcccgcacccagcagtggaacccgt

SEQ ID NO: 124225 - DNA, 459 bp, Homo sapiens
ggtaagaggataggaagagagaatgggttcccagaagctcaatgaagaaagtatttcaagaaggagctgattaggtgctgctgatgtgttctcattcaggtttcagttggaacaaggggaataaagggaggactgaggtgttatatttaataatagttcactggagataccaaaacacctttgttggtgaaatagtggggatggcaccctgttttcagtgagcttaagagaatatgaggggagaggaattaggaaaaagagagtagagacaatgctttataaaggagtatcgctgtaaagtagatgactatataatgactgatcatggaatttaagttcagtaaagaaggaggtgagagaagtgaaaggtataggaccaatggattgtagatcctggagaggttaaagaatttttggagtaaggaaactggagagagtgagctggaaaaatagtggtag

SEQ ID NO: 124226 - DNA, 263 bp, Homo sapiens
agcagagccccctgaacccttctggttttggagtgctgcctgattcacgaatcctttaatgcttaactattacgtttatctgaagtttttcttttaatattcataggtcctagcagagggtagaaaatatttggggtgtgactcatgcctgtaatcccagcactctgggaggccaaagcaggcagatcacttgagctcacaagtttgagaccagcctgggcaacatggtaaaaccccgtctctacaaaaaccacaaaaattag

SEQ ID NO: 124227 - DNA, 540 bp, Homo sapiens
actgaggtcaccaagaaagtggcaacgagggcaagggaacctggcctcacagcatctgtgctcctggggcatgccccggaaagccattgctacagccccaagtgggcagacgaagagcctctgccagaacccccaggcagtcccagtcccgacctagggcctgtgccatgggtgcacagaccactgccgtcaccttaggagcctgcctgccgcctgcctgctcacaggtctacacagggacacgctcagtccctctgctcaggggctggctcccctctaacaacccggcttctagggcctctgccctgggtctgccttcctgcttttatagatgtctccacttcttccaaggaaatcggggtcatcaggcataaacaacctcaacttcccaccccatctcctcagagaccaaatcctatgtcaccaactctacctgtcagaaagcagtttttgttccaatgtccattctagaaacttttgtgcctccctccacctgccttagacaagctcccaaagagaacagccaccccatgccatctc

SEQ ID NO: 124228 - DNA, 401 bp, Homo sapiens
gaattaaaacccagggaagtgatctaacttgctgaagattacatacaaatgagggagaaatgaatgaagggaggagggggagagaaagaatgtgtgtgagagagagagagaactagaatagtggctgccaatgtagaatcttatctaataaattagagtctggtgaattttctccggattaattaagaaaaggagataacaagagtttaaggcggggttcccaaacttggctgcatattggaattatcttaggagttttacataaatctcaatacctggttcctattcccagagtctgattctgatttaattggtttgagatacatctcagacaatgggatttttaaaaagctcctcaagtagaaccactggcttaagtcttcgttgttagagcctaggaa

SEQ ID NO: 124229 - DNA, 547 bp, Homo sapiens
agctaagattaagccactgcactccagcctgggtgacagagtgagactctgtctcaaaacaaaacaacaaaaacaagcaaggcctgcttaaggagcgtgggctgaggtgagaccctttcctgtgtctgttatttagactccccctcccaaagggggtgaagaacaaattatggcatctctccaagcttcccctgcctataaaaaggccagttggcaaaagtaaagagttctactttctaaagtgacagattcaggccaggcatggtggctcatgcctgtaatcccagcactttgggaggctgaggcgggtggatcacctgaggtcaggagtttgagaccagcctggcaaacataatgaaaccccatctctactaaaaatacaaaaatcagctgggtgtggtggcatgcgcctgtaatcccagctacttgggaggctgaggcaggagagtctcttgaaccccagaggcaggggttgcagggagccgagatcacgtcactgcactctagcctgggtgacagagcgagatgccgtgtcaaaaaaaataaa

SEQ ID NO: 124230 - DNA, 485 bp, Homo sapiens
cctctcacactgtgggatacagttgggctcccttcttgaccttcctttccagagcgccaccctgcctcctgtcttgccggctgttcctcctcagagcctgtgctggttcatcctcatattcctgtcctttctctactgttgaggggacccaaaactcagtcctcagaattttctttaccttagtcatctcatccagaggtcacgttggtgatcaccctcaagtactgattacatccgcatttatttctggaactctccccaggactctagactcatacatacagctgcttttttgacatttccacttgactatctgctaggtatctcaactcatccagaaatgaactcgtttttccccgtatctccaacccaacctgttcatcccagtttttcctgtgttcataaatgtccactctggttgctcaggccgaaagtcttgaagtcatcctagacgcctttctttctttcataccccacatctaatt

SEQ ID NO: 124231 - DNA, 298 bp, Homo sapiens
cctatgcataagcatgtaccttccccagagtgtatgtttaatgtatattccttctctacttttttctcttctggaaatttttaatggttttcaagtactgtagcttctggtaacaagcagtgaacttaatgttaatgctatgagccttggattatgctttctctttcctgaagttatttatgccttaaggaagaggaacctgtcattgaaataaaaacatttaccttgtagaattatttgcagtgatttgaaaatatttggttaaagcactatcactactacttaggagaagagccaa

SEQ ID NO: 124232 - DNA, 575 bp, Homo sapiens
agctcaagcagtctttccatctcagactcccaaagtgctgggattacaggcatgagccactgtgcccgaccaaatattcttctttttattagttgatgtaaaagtctaaaaacaagttttgaaattaacttgatgcctttatttatggcaaatgggcataagatcattttgacaatttttatttatattatatattctaggacctttcttatctatgcttaatgtaagttaaatggttgtgagccacagacacaactgcttaaagggaaaaatggtttatttctcacatactctttgaattcctttcacatgattatttaatattacattaggagaaattttagggaaaaaaagatgctcataattctacctgctcaatgaaacatttttaattttttatacatatatagtgctatctcatttttatccatcaaacttacacatgtgtaagtattattaggagtatgcttgtagtttgtattttttgtttgtttatgaaacatatattttctctgttgctataagtgtttgtaattggttgttaatggccaatagttgaataaatcagatttcac

SEQ ID NO: 124233 - DNA, 424 bp, Homo sapiens
gaaggagtttctataaactaccatatagacaggatggaattcagaagcagcaataacatctggctttacccaccggatcagaactgtatgaaaggctgtctaactccagagactggtaacttttagcttaagaatagcacagatagggcaccaaaactgaccagggtcagttgtagataaactaccttaaaggagcagaggctcagtaactaggaagatgggcaagaagaaaggggtacgaaggttggcagatgggctgcacctattaaactttgtgtgcctatcaaactacctacatgtttgtattcactcaataaatcacacagctcaccttaaaacaccttatgaaatcatactctaaagtgggtctgaaacttcctcctttcacttaagaacatgttatggccaggcgcagtggctcacg

SEQ ID NO: 124234 - DNA, 274 bp, Homo sapiens
aagatctgactgggtgggcaacatagtgagacctcatctctatttaaaaaaaaagttttttcatctatagaaactaacatttaattgttagcagtcttgcccaagacctgcggggtcaggagtccaggactgtcctgggtgcccccgccttgcctggacgtgagagtgctgtgtggggccccgggagcccctggtcccacaggcagggccgacaggcaggtgccgtgcccgtcctccctgcccacgcaggtgctcagagggacaggtgggccag

SEQ ID NO: 124235 - DNA, 284 bp, Homo sapiens
actaaacttcctttctctcctgttggtgcagactcattttaatactattttacgtaaaataggtggaaaatagcccaggagataaaaatcatatgctaaaatcaaatctaaaatattttttgcactgtttatttcatatgcataactgaagagaaactgtaatatttttaggacatttccaccagaatttccaacagatgggaaatagtaagttagtaccattattccctcaattgtctggtcaagaaatttgagaatgttctttgacttcccttttcctccca

SEQ ID NO: 124236 - DNA, 380 bp, Homo sapiens
ctgccgcctactactaccacggggtgatgatcctcacctgatgcttgacaccatgctcttggacttcctagcctctggacccaagagccaaataaacttctgttcattataaattgcccagtctgtgatattctgttaaagcagcagaaaatgaactgagacacaagatcattgtgtttagatagtgaaagtgctacaagaagaactgcaaatgggtggatcaaggcaggttttaaaacttagaaaacactgagcaggacgtggtggctcacacctgtaacctcagtactcaggaggctgaggcaggagaatggcatgaatccaggaggtcaagagcatcctgactaacacggtgaaactccatctctactaaaaaaaaa

SEQ ID NO: 124237 - DNA, 219 bp, Homo sapiens
gcctggccagaaagtgagtgttggtgacatgctctaatctataaaccgtattaatgttttgccagttgtcctggtaatgccctttatagatttctttttttttgagatggagttttactcttgttgcccaggctggagtgcaatggcgtgatctcggctcactgcaacctccgcctcccgagttcaagtgattcttctgtctcagcctcccaagtagct

SEQ ID NO: 124238 - DNA, 757 bp, Homo sapiens
caaacagatttttcagctccaatataattttatcaaacccctattgtatatgtgtttcattgttgactgaaacatcattacgcagcacgtgactataatagaataatttttggcaatgcaaaggaatgaactgatggacacagcatgggtaaatcttaaaatcatgctaagtcaaagaagccaaatacaaaagaatatataatgcataaagggggatggacttaaaaggggcacgaagaatcttttggagttgatggaaatggtcagtatttgattaatgttgtttcagaggtgtatacagctgtcaaaactcattgagttgaccactctaaatggattcacttggttgtatataaattaagccatagtaaaattgcttacaggaaatatgctgaggaaaagacatctaacacaaagagcataaactttgtgatacctttatttgaaattctaggccaggtgtagtggctcatgcctgtaatcccagcactttgggaggccgaggcgggcggatcacaaggtcaggagatggagaccacactggctaacacggtgaaaccctgtctctactaaaaatacaaaaaaaattggccgggcatggtggtggccacctgtagtcccagctacttgggaggctgaggtgggagaatgacatgaacctgggaggtggagcttgcagtgagccgagatcatgccactgcattccaacctgggtgacagagcgagacactgtctcaaaaaataaaaaaaaaataag

SEQ ID NO: 124239 - DNA, 674 bp, Homo sapiens
gaccttgaaatgttttattttgatggggcttaaatgagtgtatacatatataaagacactgagctcatattatgatttgtgcacttcatattttgcctcaattaattttttttacaaaagattcatggaagcctggtgtgtaattgtgtaaaaaagtggaaacttgcctatcagtagaagaatggatgaattacggtattgttacacagtgggattatgtataacagtgaaaatgaatgatctaaaactacgtttatttttgggtaactctataaaaccatccacaatatggtatgaaaaaaagtcatacaaggacacaaatgacattcctatgtcaaatatgttaagaaaattgtatgctcatgaattctacctatggtaaaaataatatgtgcatgggattagtaaacactaaattcaggataatggttatctctggttgagaagaggaatggattagagcaaaaggcatagttcaaccatatctgtaatattttcttagtctgcatggtgggtgtgcatgggtgtttattaaattttatgcctttctctatatttgaaatatttaatttgcaaaagaaataattataagaactctagttaaatatagcaaattaaaatttcacatttaccctcctgtccccttgcaactgtatcataatgagagtagagga

SEQ ID NO: 124240 - DNA, 377 bp, Homo sapiens
aaaaaagcagatttgtaaatgggcaatggattcgaatagacatttagccatagaaggcatccagttggtgaaaaggcatatggaaaggtgctcagcatcactgattatcaggaaaatgaaaatgaaaaccgccacgagtggtttagaccatagcggcatgcatgaaagttttcagacctccagttgttgggagtggctgaggagattggggagcttctgtctgagttggaagagtggagtctcaacaagaaccagcgtattctggacatgtgtgcgccctggagtgttcatggctggatgccttgtctacctgtgccttacagagtgacaccattgtggtgtggtcgatcagaggggcaggaggctttcagagggag

SEQ ID NO: 124241 - DNA, 727 bp, Homo sapiens
ggaaaatcccaggatagggaatccgtattcaagactgtgcatccttttcctaggtctgtctctaaggcatgaataaattgaatgtacgcattgaatctatttctgtcacatttggggccacaacatatggagagttggcttgtttttctaacttaactgactttgtttaaagacccttgctcagaggagagttctcaatcaaagtagccatactccattccccatgggaggccatccaaccctgggcctgaactttgaacatggcaccagttggcaaaaggctctgcgaatctacccctttgtttttaagacagtgcctgggtgtttggtccagcatgggtgggtaacttagggggtcttcacaattttactacacatcttgaatggcataaggcagggcaacctttccagctgaagtgtcataacatagaagtggattgtggtgaccacaattaatgtattagaaataataggtagataaacaatgttggcaagttattttcttgaagatatattacagtattcagtgggtacagagtttcagctttgcaaggtgaaaagagttctggagatggatcatggtgatggttgcacaataatgtgaatgcacttcataccatcaccaaactgttctcttttttttttttgagatggagtcttgctctgtcgcccaggctagagtgcagtggcgtgatctcggctcactgcaagctctgcctcccgggtt

SEQ ID NO: 124242 - DNA, 328 bp, Homo sapiens
ctagaaggattactttggatgctacaaagaggaaagtggatgagaaataggcaagatcagatggtatcaaagcaaggagacaacttatgaagcttttttggccatctaggctaggaatgatgattctctaaaatggagtagtatcaataggaatagggtgatgagaatttcacagcagatcaggagatagatggattggatacaagtgagaaggaggcattcagggtgattcttcagtctttaactattcaactgggtggatgtcctcatgccattttcagagagagaaaagatagagagtaaatttgggtaaaggaattgaaaatga

SEQ ID NO: 124243 - DNA, 143 bp, Homo sapiens
caagagctctttgtaagcaatggctccacaaagtcaacctgaaagccatctggtcatagctgattctatgtgcatcatcctcaaacaggacattccagtccaaaccttggtaatagaaccagtgtttccaattgtgtcctgtt

SEQ ID NO: 124244 - DNA, 478 bp, Homo sapiens
gcgttctagaggagtcatcgcattactccaggatacttttgacaacagatgtatttcctgctcatgctacatgtccagtgcaggttggcagtggggaagaagggggctctgttcagtgcagtcacttgagacctagctaatcacctagaacattgccacttgctattccagaaggaaaaaaaggaatgctagaaggtcccacactgaaagttcaatgctctggctccaaaatgacagctatttccactcactcctcatgggccagcacttagcatgtggtcctcagccaaccccaaagggactcaggaaggaccatcccaccatatggctggaaatatttgatggcagcattaatggggaacagtgttccaggcagtggaagtctttgagcccttggaagaaagacaaggcgatctctagagcacatccttcccaatattaatgaatttaacaaatgagcaagccatcctcccccact

SEQ ID NO: 124245 - DNA, 473 bp, Homo sapiens
gggtgatctagaggatccctgccatttatacttttgacaacagatgtatttcctgctcatgctacatgtccagtgcaggttggcagtggggaagaagggggctctgttcagtgcagtcacttgagacctagctaatcacctagaacattgccacttgctattccagaaggaaaaaaaggaatgctagaaggtcccacactgaaagttcaatgctctggctccaaaatgacagctatttccactcactcctcatgggccagcacttagcatgtggtcctcagccaaccccaaagggactcaggaaggaccatcccaccatatggctggaaatatttgatggcagcattaatggggaacagtgttccaggcagtggaagtctttgagcccttggaagaaagacaaggcgatctctagagcacatccttcccaatattaatgaatttaacaaatgagcaagccatcctcccccact

SEQ ID NO: 124246 - DNA, 151 bp, Homo sapiens
tctgtgtactctggcccctgttacccaggagaacattcggccctacttcaaactctgtggttgagccctttgctttggtctgtgggctgcagttttctcattatcagagtaataggctatggttttgcttagcaggaagttagtctgcctg

SEQ ID NO: 124247 - DNA, 318 bp, Homo sapiens
ctttaatgagtatagagtttcagttttttaagatgaaatggctctggagattggctgcacaactgtggtccttagcactactgaactgtacacttagagatgggtaagatggcaaattgtatgaaatgtgtactttaccacaatttaaaaaataattttactttttacagcagaaaaaaatcattttcatttgattgcatgaataattctttctttggcctgagagcataggtcaatcaagattatttttaaggtatatatgtgatatcatctagattaaagaaaatccttcaaattatattttcttctggcatctag

SEQ ID NO: 124248 - DNA, 614 bp, Homo sapiens
cctaggtagatattttatagaaatttacatccaagtttataccacagtaaatctctaagggacagatttcaaggaaaccccctgaatagttggattactgttttcttgcagctaaaaatttttgattatgtgcccaaaccaaaacaaaagattgcatttagcttcctcgatgagaatttctgaaaccaaatacaaatgaaaccacaggaggaaagataaggactcacaagtttatgaaacttgctaatgggactttaactccctcttagactcactcactcaactttcttattccatttgatatattttattttacattattttgaaaaacaaaatgaaacattgggggatatgttccattttgaatatagaactattttgagaattgtaggaaaatcattgtatatttagaattacacgtgtcctacaaaattgtcctcatacatttattcatccatttagcaaatcttttttaatatctgtcatgttaggtactcttctgtacacctgtgatacatcaataagcaaagctgacaaaattctttgcccttatactgcttctattctgggaacaggggctgtgaataaacaaataaaaaaagcctgtcatattg

SEQ ID NO: 124249 - DNA, 549 bp, Homo sapiens
gtaactggatgcaacctttttgaaggatatttaagcattatatgtcaaaattaggtatacagccctttgaatagaagttccacttctagaaattgcaaacagatacttgaaaaagtataccaacagacatgtactgggatgtttattgtaactaatagcaaaacaaaacaaaacaaacagcagacaacagccttcctattcactaatggatatgaaattacggataggtaaattatggtatattgacattatacaagcactaaaaaaaggagcttagatctatatgtcctcaaacatatcctccctagatgcatgggcagaggtatttacagaacagtttgtacctacatgtctttgtgtatgtgatgacgtggatgtgtgtgtatataaacatctctatggaaagtgcataagcaatggtagtatctaggcagtgggactagaagttgcggggtggaaaggctattttaagccccagtcatgtttttaaaagacaagaaaaaaaaaaaaaggcctgcaactcaacacttgatctgatgaggttatttg

SEQ ID NO: 124250 - DNA, 462 bp, Homo sapiens
aaaaacagccattccagaagtagactctagtaccttatgtagtctttttcccatcaagccatcctgtttctcagtgtgatgcagttttttgaaatacaaattagatcatgtttgtttccaaaatgatcagttccactctgaaaaggtgttccccttttatagctacagatctaaattaatactgtgagcaagttaaaaattgaggaagagatcctggccaaataattcctgtccaaccttccccataagtagactgaatgcctcagttaacatggagacactttttccttctgcacaaagtcattgagatataatttggaggcttcagataagaagcactcaggattgggaaaacagcaaaggttgtataaggccagtatttacctaagggaagggtcagagatctttcataagtactagttaagacttacagtagagatacctgtagagacaaaaaaaaaa

SEQ ID NO: 124251 - DNA, 785 bp, Homo sapiens
agggctaaagatgaggattcaaggccaggagcagtaatcccaggactttgggaggctgaggtgggaagattgcttgagcccaggaggtggaggctacagtgagctgtgatcgcgccactgtactccagcccgagcaacagaatgagaccctatctcaaacaaaacaaaataaaaaacattaatagcagttccaggaccagatcctgcaaggtattctctcattgctttggttgcatttggttgtaattcttttactgcattctctcatttggttgaccataagcctttggtaatcactggaacccaatcctctggcctagcttttcaaagggtgtcccaggcagatatttcattttaaaaaatttaaaatccacattcaagtcagtttgagaacactatattagaggcataataaaagattccatgtatttaagaaaataaaggagaaaaacaaattatctaggcaaaacaggagaataaacattcaaagcttaaatactgattagggatgtcataaaatagaagaaaaatgttaggtatgcagcaatagcattagaaagccaaatcaggctgggcatggtggctcatgcctgtaatcccaacactttgggaggccgagacgggtggctcatttgaggtcaggagttcaagagcagcctggccaacatggtgaaaccctatctctactaaaaatacaaaaattagttgggtggtagtggcacacgcctgtaatcccagctacttgggaggctgaggcaggagaatcacttgagcctgggaggtgg

SEQ ID NO: 124252 - DNA, 668 bp, Homo sapiens
gtctctgggcctcagttttcacacctataaagtgattgacattgaggttaaaacatctgtttttgatataaatttaatataatgtcaaaggttaattgctttataaagctaatgttgactactgcaagggttggtaaatgaaatctgcctctcccctctccccatcttagggatggttacattgtgaaagttgctgagagctctttgagttattggcgtgtacctattcttctattcatagagaaaataaaatatgaatggcaaaacgaattggtaaaattgcagtgggcatgctcttaaattagggagggatcattttatacacattaacagattattataattcttgagaagaaacattaagtctgtttcctaggttcctgttttctagttcttcattacaatagtagatacgatgtagaaatcctgtaattaacattactttagccttggttgttacaggctcttttggactaggatagattgttgataaccttgataatcaaagttactgccacatgaaaataagagttaagaacaaatatttgaattattctaacagtctaaggatcaccatcttagatttgtaaaactggaggtttattgcagcatgaatatgtagatgaactttttaaatatcatttcttagctctccaatttacagtgat

SEQ ID NO: 124253 - DNA, 531 bp, Homo sapiens
aagcggctggaagtgggcctggaagagcagcaagtcggcctccctgggcccagctccgtcctctcgacggcctctccaggtgcaaaacttcctcgagtcagcctctccaggcccagctcccctgcctcgaggaatactggtgacaaacctttactgagcatctaccatctatcagagaccgagcctggtactggagaagtaaagacaagctgaccactggcctcaaagacgtcacagtgtcacaagagccccagatacacggacaatgtcgtaagtgcaccagcagactgtgtgggttggtgaaggtaggatagcagagaaaaaggggccaaacatcggacgagctagacggcaaagtattgacagaagaggtctgtttacaccgaatacatgagttaaaagtccagcagacaaaaaagggatacaaactacgtaattcctcacatcttttccagcctcaacttccccgaatccaaggccggccatggtggctcacacctgtaatcccagcactttgggaggccaagatag

SEQ ID NO: 124254 - DNA, 324 bp, Homo sapiens
ctagtatcaaagatctcatgtgatttcatcaaatgatagtaaaatcatttcatctttctttaatgcctataagcaaggaggtacagtcttacctaggactttaatccttttttttttcttttttgtagagacagggtcttggtatgttgcccaggctggtctcaaactcctggcctcaagtgatcctcccacctcagcctcccaaaatgctgggattacaagcatgacctaccatgcctggccaaatctattttttacaacattcattatcaactatatttaataagacaactgtgcctgtaagatctagcaatactaatacaa

SEQ ID NO: 124255 - DNA, 1355 bp, Homo sapiens
agtggtcactgattatttagggttaagcctatttagggctaatccagtagtagctgccatgcttcaggttagtatcccattgggtgtagttcatggggtaagtggtcgaaagtaaaatgaataactttgtatgggccgtgaagtttgttgtcaggaactagaccttcataaccctttaagcaggttgccactggcccatatgctgctttgtgtaagacaaggttgtccaactcgcggcccaacgcaaatttgcaaatttaaaacatgaatttttttgcgatttattattttttttttagctcatcatatatcattagtgttagtgtattatatgtgtgacccaagacagttcttccagtgtggcccagggaagccaaaaaattgaacaccctggtgtaagttataagcaagcacctttttctcaagacactatgtgttcagctgctgagaaaccattacaagtaataagtatatttagattccgcaccgcccccccccccgccgccttgtctccaggcaggtttctaactcaccaccaagcaagggggactgcatatcctttgtgtaggaggcttctaaagatcttctcttctcttgagactttctcctttaaaaaaaaagaaagaaaatacctgcaagttctccaagggatgtctgggatcactaaatagtctgaggtggtgtttccctcaggcaaggctgtgccctagttaagagcatggaggtacactgcctgcttgtgaagcctggtggctctcaccgctgtagcactttaggaaggttacttaatgcccctggctctttatctgtaaaatgaagttaaggaataaatgagaatgcttaaacacagcccaggacctaacacagagtaaaagctcaagaatacccagagggggtcagccttagtgggctgtaacttgtataggatttgggggtgggaatacagagcagacattgctaattcatgctttgcctgatctcaagaaataagaactctaccctaggcttactacctacggagtaagaactacttggccctctgggactgatcttcaagcactggtcatggtgggaccaataaggggccggtgttcagtagaaaatactggctttggattagcattttgcttcttcccaagatcatatggccagcaaggtggccaaatgagtatcttctctgaatttgctttattggtaagatgggtctgctgcccactgagggttaagtgaagccctgtgcaggaaagctctgaggccctctgagctgtagtgggagctcagtaggagcctgtgtgccagcaaccacagtcctgggtgtgctttgagggggtctgcaggttgctgcccagggtgga

SEQ ID NO: 124256 - DNA, 996 bp, Homo sapiens
gcggccgctcccacttcagattgggcaacatggccgagaggccggggcctccgggcggcgccgtgtccgcgaccgcgtaccctgacacccccgcggaattccctccgcacctccaggcgggtgcgatgcggcgccgcttttggggcgtattcaactgtctgtgcgccggcgcgttcggggccctggccgccgcctccgccaagctggccttcggcagcgaggtggtgagcatgggtttatgcgtcttaggcattattgtgatggcgagcaccaattctctgatgtggaccttctttagccggggcctcagtttctccatgtcttcagccattgcatctgtcacagtgactttttcaaatatcctcagctcggccttcctgggctatgtgctgtatggagagtgccaggaggtcttgtggtggggaggagtgttccttattctctgcggactcaccctaatccacaggaagctcccacccacctggaagccccttccacacaagcagcagtagcaccacttggctagacggaccagctggaaagatcatgatggtggcccagccttgggatgtcatgtgggactgtgtcctagggcgatccagttgtgcagccttctgaccatcagccaagggaagcaggcctctgatggagcaggctctggctctgtaaggagaggtgcagctgcagcagtgttctaccggaagtgttttgatcatctgtacagtgctttggattcttcctcccaggcctaccccagtgagccttcgcagatgctggagatcctggggttggtctgctttgtgtatggtacttgaaaccacgctgtaattattgtcctgttgccaaacaaaagccagtcatgtaactctagaagcagtgactggtggggctttctgacagttccatgctgatgtatcaggccatctgtgtcatgcttatgtattatggcaagaagaggaaaactggattaataaatacgttttttgtaagttaaaa

SEQ ID NO: 124257 - DNA, 892 bp, Homo sapiens
gcggccgctcccacttcagattgggcaacatggccgagaggccggggcctccgggcggcgccgtgtccgcgaccgcgtaccctgacacccccgcggaattccctccgcacctccaggcgggtgagcatgggtttatgcgtcttaggcattattgtgatggcgagcaccaattctctgatgtggaccttctttagccggggcctcagtttctccatgtcttcagccattgcatctgtcacagtgactttttcaaatatcctcagctcggccttcctgggctatgtgctgtatggagagtgccaggaggtcttgtggtggggaggagtgttccttattctctgcggactcaccctaatccacaggaagctcccacccacctggaagccccttccacacaagcagcagtagcaccacttggctagacggaccagctggaaagatcatgatggtggcccagccttgggatgtcatgtgggactgtgtcctagggcgatccagttgtgcagccttctgaccatcagccaagggaagcaggcctctgatggagcaggctctggctctgtaaggagaggtgcagctgcagcagtgttctaccggaagtgttttgatcatctgtacagtgctttggattcttcctcccaggcctaccccagtgagccttcgcagatgctggagatcctggggttggtctgctttgtgtatggtacttgaaaccacgctgtaattattgtcctgttgccaaacaaaagccagtcatgtaactctagaagcagtgactggtggggctttctgacagttccatgctgatgtatcaggccatctgtgtcatgcttatgtattatggcaagaagaggaaaactggattaataaatacgttttttgtaagttaaaa

SEQ ID NO: 124258 - DNA, 1065 bp, Homo sapiens
gcggccgctcccacttcagattgggcaacatggccgagaggccggggcctccgggcggcgccgtgtccgcgaccgcgtaccctgacacccccgcggaattccctccgcacctccaggcggtaggtggtaagagacgtcggggactgaggcctcttcccttaccagggacctaaaaccttttctccggttgggctagttcgctctcggggaagaactacacctcctacatccaccctctacctctcattttaagtcccttgtgcctgagcatttctctccacgtgactcttaaggtgagcatgggtttatgcgtcttaggcattattgtgatggcgagcaccaattctctgatgtggaccttctttagccggggcctcagtttctccatgtcttcagccattgcatctgtcacagtgactttttcaaatatcctcagctcggccttcctgggctatgtgctgtatggagagtgccaggaggtcttgtggtggggaggagtgttccttattctctgcggactcaccctaatccacaggaagctcccacccacctggaagccccttccacacaagcagcagtagcaccacttggctagacggaccagctggaaagatcatgatggtggcccagccttgggatgtcatgtgggactgtgtcctagggcgatccagttgtgcagccttctgaccatcagccaagggaagcaggcctctgatggagcaggctctggctctgtaaggagaggtgcagctgcagcagtgttctaccggaagtgttttgatcatctgtacagtgctttggattcttcctcccaggcctaccccagtgagccttcgcagatgctggagatcctggggttggtctgctttgtgtatggtacttgaaaccacgctgtaattattgtcctgttgccaaacaaaagccagtcatgtaactctagaagcagtgactggtggggctttctgacagttccatgctgatgtatcaggccatctgtgtcatgcttatgtattatggcaagaagaggaaaactggattaataaatacgttttttgtaagttaaaa

SEQ ID NO: 124259 - DNA, 1034 bp, Homo sapiens
gcggccgctcccacttcagattgggcaacatggccgagaggccggggcctccgggcggcgccgtgtccgcgaccgcgtaccctgacacccccgcggaattccctccgcacctccaggcgggtgcgatgcggcgccgcttttggggcgtattcaactgtctgtgcgccggcgcgttcggggccctggccgccgcctccgccaagctggccttcggcagcgaggtggtgagcatgggtttatgcgtcttaggcattattgtgatggcgagcaccaattctctgatgtggaccttctttagccggggcctcagtttctccatgtcttcagccattgcatctgtcacagtgactttttcaaatatcctcagctcggccttcctgggctatgtgctgtatggagagtgccaggaggtcttgtggtggggaggagtgttccttattctctgcggactcaccctaatccacaggaagctcccacccacctggaagccccttccacacaagcagcagtagcaccacttggctagacggaccagctggaaagatcatgatggtggcccagccttgggatgtcatgtgggactgtgtcctagggcgatccagttgtgcagccttctgaccatcagccaagggaagcaggcctctgatggagcaggctctggctctgtaaggagaggtgcagctgcagcagtgttctaccggaagtgttttgatcatctgtacagtgctttggattcttcctcccaggcctaccccagtgagccttcgcagatgctggagatcctggggttggtctgctttgtgtatggtacttgaaaccacgctgtaattattgtcctgttgccaaacaaaagccagtcatgtaactctagaagcagtgactggtggggctttctgacagttccatgctgatgtatcaggccatctgtgtcatgcttatgtattatggcaagaagaggaaaactggattaataaatacgttttttgtaagttaaaaaagggaaaagtcgacgccgctgagtttagtagtaatat

SEQ ID NO: 124260 - DNA, 509 bp, Homo sapiens
gcggccgctcccacttcagattgggcaacatggccgagaggccggggcctccgggcggcgccgtgtccgcgaccgcgtaccctgacacccccgcggaattccctccgcacctccaggcggtaggtggtaagagacgtcggggactgaggcctcttcccttaccagggacctaaaaccttttctccggttgggctagttcgctctcggggaagaactacacctcctacatccaccctctacctctcattttaagtcccttgtgcctgagcatttctctccacgtgactcttaaggtgagaagcctcttgcccatccctttactccgtaattaacgggtgttgtgaccagatgaccagtctgccccactaccaggaaaattgggagtttgggatactgtaggcataagaggatactgacagagacgttctggatgttttcctgacgctgagaactcctaaacttgcatcctggcgtctgctaaggtgtatctctgcctctccctcccacgt

SEQ ID NO: 124261 - DNA, 565 bp, Homo sapiens
tctaatcacgccaaaccctcgtccagtgtaggtggtaagagacgtcggggactgaggcctcttcccttaccagggacctaaaaccttttctccggttgggctagttcgctctcggggaagaactacacctcctacatccaccctctacctctcattttaagtcccttgtgcctgagcatttctctccacgtgactcttaaggtgagaagcctcttgcccatccctttactccgtaattaacgggtgttgtgaccagatgaccagtctgccccactaccaggaaaattgggagtttgggatactgtaggcataagaggatactgacagagacgttctggatgttttcctgacgctgagaactcctaaacttgcatcctggcgtctgctaaggtgtatctctgcctctccctcccacgtcgtagaccagcctctgcttgctataggggtttcattgcgtctgcagcccaaggttagcctctgacctggacagtggtcactgattatttagggttaagcctatttagggctaatccagtagtagctgccatgcttcaggttagtatcc

SEQ ID NO: 124262 - DNA, 1169 bp, Homo sapiens
gcggccgctcccacttcagattgggcaacatggccgagaggccggggcctccgggcggcgccgtgtccgcgaccgcgtaccctgacacccccgcggaattccctccgcacctccaggcgggtgcgatgcggcgccgcttttggggcgtattcaactgtctgtgcgccggcgcgttcggggccctggccgccgcctccgccaagctggccttcggcagcgaggtgtaggtggtaagagacgtcggggactgaggcctcttcccttaccagggacctaaaaccttttctccggttgggctagttcgctctcggggaagaactacacctcctacatccaccctctacctctcattttaagtcccttgtgcctgagcatttctctccacgtgactcttaaggtgagcatgggtttatgcgtcttaggcattattgtgatggcgagcaccaattctctgatgtggaccttctttagccggggcctcagtttctccatgtcttcagccattgcatctgtcacagtgactttttcaaatatcctcagctcggccttcctgggctatgtgctgtatggagagtgccaggaggtcttgtggtggggaggagtgttccttattctctgcggactcaccctaatccacaggaagctcccacccacctggaagccccttccacacaagcagcagtagcaccacttggctagacggaccagctggaaagatcatgatggtggcccagccttgggatgtcatgtgggactgtgtcctagggcgatccagttgtgcagccttctgaccatcagccaagggaagcaggcctctgatggagcaggctctggctctgtaaggagaggtgcagctgcagcagtgttctaccggaagtgttttgatcatctgtacagtgctttggattcttcctcccaggcctaccccagtgagccttcgcagatgctggagatcctggggttggtctgctttgtgtatggtacttgaaaccacgctgtaattattgtcctgttgccaaacaaaagccagtcatgtaactctagaagcagtgactggtggggctttctgacagttccatgctgatgtatcaggccatctgtgtcatgcttatgtattatggcaagaagaggaaaactggattaataaatacgttttttgtaagttaaaa

SEQ ID NO: 124263 - DNA, 775 bp, Homo sapiens
  misc_feature (29)..(29): n is a, c, g, or t
  misc_feature (47)..(47): n is a, c, g, or t
cggtacccctcaacgctttatacttctcnacgctttatacttcctcnacgctttatacttccgtattgaattcaagtataatattaagtatgcatggagaagtataaagcgttgagctcaacgctttatacttcctaagtggggaaccaggacttctacccccacctaggaagaataaggcagcattcctctctttcacctaccagaactgtatcagaaaaagtcagtagaaccaagtttagttaagatccagtctcataatatgaacatatccaggaccacttatcataccaagaaccagaaagctctcaaactgaatgaaaaaggcaattcatagaacccaacaatgagatgacagtgatgttagaattatctgacaaattttaagcagccatgataaaagcagcaatagcaatcatgcacacacttgaaacaaatgaaaaagttgaaaacctcagcaaagaaacagaaagtcacaggaaagaaatagaagtataaagcgttgagctcaacgctttatacttcgaagatgacctcgttccggagctgggtatctcaaatctgctttcatccagccacggcccaaagccatctttctgcctactggatgcttacagtgactgtggatacgggggttccctttccccattcagtgacatgtcctctctgcttggtgtaaaccattcttgggaggacacttatgccattgaatctttccccagatgattagggtctaggaatgtccatactgtggccttttcctgatatacatgct

SEQ ID NO: 124264 - DNA, 495 bp, Homo sapiens
  misc_feature (379)..(379): n is a, c, g, or t
  misc_feature (382)..(382): n is a, c, g, or t
  misc_feature (387)..(387): n is a, c, g, or t
  misc_feature (391)..(391): n is a, c, g, or t
  misc_feature (405)..(405): n is a, c, g, or t
  misc_feature (443)..(443): n is a, c, g, or t
  misc_feature (447)..(447): n is a, c, g, or t
  misc_feature (450)..(450): n is a, c, g, or t
  misc_feature (452)..(452): n is a, c, g, or t
  misc_feature (458)..(458): n is a, c, g, or t
  misc_feature (462)..(462): n is a, c, g, or t
  misc_feature (464)..(464): n is a, c, g, or t
  misc_feature (466)..(466): n is a, c, g, or t
  misc_feature (469)..(469): n is a, c, g, or t
  misc_feature (473)..(474): n is a, c, g, or t
ctcaactatttgttagctctaagtggggaaccaggacttctacccccacctaggaagaataaggcagcattcctctctttcacctaccagaactgtatcagaaaaagtcagtagaaccaagtttagttaagatccagtctcataatatgaacatatccaggaccacttatcataccaagaaccagaaagctctcaaactgaatgaaaaaggcaattcatagaacccaacaatgagatgacagtgatgttagaattatctgacaaattttaagcagccatgataaaagcagcaatagcaatcatgcacacacttgaaacaaatgaaaaagttgaaaacctcagcaaagaaacagaaagtcacaggaaagaaatagaagtntanacttnctcnacgctttatacttnctcaacgctttatacttcctcaacgctttatacttccnatgnaantnaatatnatantngnatncagnngaagtataagcgttgaggggt

SEQ ID NO: 124265 - DNA, 705 bp, Homo sapiens
  misc_feature (29)..(29): n is a, c, g, or t
  misc_feature (47)..(47): n is a, c, g, or t
  misc_feature (589)..(589): n is a, c, g, or t
  misc_feature (592)..(592): n is a, c, g, or t
  misc_feature (597)..(597): n is a, c, g, or t
  misc_feature (601)..(601): n is a, c, g, or t
  misc_feature (615)..(615): n is a, c, g, or t
  misc_feature (653)..(653): n is a, c, g, or t
  misc_feature (657)..(657): n is a, c, g, or t
  misc_feature (660)..(660): n is a, c, g, or t
  misc_feature (662)..(662): n is a, c, g, or t
  misc_feature (668)..(668): n is a, c, g, or t
  misc_feature (672)..(672): n is a, c, g, or t
  misc_feature (674)..(674): n is a, c, g, or t
  misc_feature (676)..(676): n is a, c, g, or t
  misc_feature (679)..(679): n is a, c, g, or t
  misc_feature (683)..(684): n is a, c, g, or t
cggtacccctcaacgctttatacttctcnacgctttatacttcctcnacgctttatacttccgtattgaattcaagtataatattaagtatgcatggagaagtataaagcgttgagctcaacgctttatacttcctaagtggggaaccaggacttctacccccacctaggaagaataaggcagcattcctctctttcacctaccagaactgtatcagaaaaagtcagtagaaccaagtttagttaagatccagtctcataatatgaacatatccaggaccacttatcataccaagaaccagaaagctctcaaactgaatgaaaaaggcaattcatagaacccaacaatgagatgacagtgatgttagaattatctgacaaattttaagcagccatgataaaagcagcaatagcaatcatgcacacacttgaaacaaatgaaaaagttgaaaacctcagcaaagaaacagaaagtcacaggaaagaaatagaagtataaagcgttgagctcaacgctttatacttcctctacgctttatacttcctccacgctttatacttcctcaacgctttatacttcctcaacgctntanacttnctcnacgctttatacttnctcaacgctttatacttcctcaacgctttatacttccnatgnaantnaatatnatantngnatncagnngaagtataagcgttgaggggt

SEQ ID NO: 124266 - DNA, 855 bp, Homo sapiens
gcatggtggcacacacctgtagtcctagctactcaagaggctgaggcaggagaatcgcttgaacctggcaggcagaggttgcagtgagccgagatcatgccactgcactccagcctgataacagagtgaaactccgtctcaaaaaaataaaaaaacaaagtcaagaaatagatgctggtgaggctgtggagaaataggaatgcttttacactgttggtgggagtgtaaattagttcaaccattgtggaagacagtatgattattcctcaaggatctagaaccagaaataccatttgacccagcaatcccattactgggtatataggcaaaaaaatataaatcattttactataaaggcacatgtacacgtatgtttattgcagcactgtttacaatagcaaagacatggaaccaacccaaatgcccatcaatgatagattggataaagaaaatatggtaaattttaagcagccatgataaaagcagcaatagcaatcatgcacacacttgaaacaaatgaaaaagttgaaaacctcagcaaagaaacagaaagtcacaggaaagaaatagaagtataaagcgttgagctcaacgctttatacttcgaagatgacctcgttccggagctgggtatctcaaatctgctttcatccagccacggcccaaagccatctttctgcctactggatgcttacagtgactgtggatacgggggttccctttccccattcagtgacatgtcctctctgcttggtgtaaaccattcttgggaggacacttatgccattgaatctttccccagatgattagggtctaggaatgtccatactgtggccttttcctgatatacatgct

SEQ ID NO: 124267 - DNA, 726 bp, Homo sapiens
gggccatctccaccactgtgtctaatggccatgtgaggagctagaattcccaccctgcccagcagcaataaagatgccctccatgctcaactatttgttagctctaagtggggaaccaggacttctacccccacctaggaagaataaggcagcattcctctctttcacctaccagaactgtatcagaaaaagtcagtagaaccaagtttagttaagatccagtctcataatatgaacatatccaggaccacttatcataccaagaaccagaaagctctcaaactgaatgaaaaaggcaattcatagaacccaacaatgagatgacagtgatgttagaattatctgacaaattttaagcagccatgataaaagcagcaatagcaatcatgcacacacttgaaacaaatgaaaaagttgaaaacctcagcaaagaaacagaaagtcacaggaaagaaatagaagaaatagaagcatacaaagaagaactaaatgaactgaataatacagaatgaaaacaagaaacttagtgaaaagcagaatgaaggagacagcagaatggaggagatagaagaaataatcagtgaggtagaagaaagaataacagaaattactgtttgaaaaactgagagaaaaatatgctggaagaaaaagaaacagtctcagaggcctgtgggactaaaacaagagctttaacatttgtgtcatcagagccccggaaggagataa

SEQ ID NO: 124268 - DNA, 576 bp, Homo sapiens
gcgtgcagttgtctgtgagtatgcatcgtgtgcttgtactcccagcgttgtcccttagggacctgggagcagcgacacccaaagcagcgagtacactcagcacccagatctcctccacaaggaaccagggctcctgggagaaatggccgattgcagagctgaagcagggacaatacaagaggaaactggaacgacttatgtgctggaaagtgaggagctagcccaagacaagaggacatgcccaaaggcccagaagccacactgaaggggctcctcctggccacagatgggtaatttgagcatcaaaatcaatgatgactgtaacataatcaccattaagaacatgggaaaccataagatggcactggtgattacttacaaaaaccacctctctgcgagcaactcagtaattagacatgaaagaaccacgtccaggtggagacacctggcattccctgcctgaatcaggtggccaaagttgccaccaccccaacagagcaaactggtatcgcgccctcatgacagccgcgccaagatgagcacagcttcactgctgcgccactgctgccaacgatg

SEQ ID NO: 124269 - DNA, 398 bp, Homo sapiens
gcagttccctccacattagaactctgctccctggttaggatccacatgtgcagcaaagtcatggccacctgccctaagcatggacgacccatggatgtgagggcttgctgttggtttctggggatggatttacccacagtgatgagtacgagttgcacgagttgacttgtgtgaacagggcatagcccctgatggttgtaaattagcatctttgtgtagaaggttttatcatgtggctatatggccctcaagaagagagtaacatggaggggctgtatgatatctggtttaagaagtgaaacagactgtgactatgaccctttttctcgaagcctgtggccatgcccctcatccctatgggaaagtaattttctctatgtctctgcttccagggccct

SEQ ID NO: 124270 - DNA, 383 bp, Homo sapiens
gcatgagttactacgcccagtcgaaacatttctgtagataggaccataggtgcttgatatgtgtagttctgccccttccacatgttgttgcaggagagtagttttatatgcctgatgatcagaacacttgacacttacaagaatgtggtctagggacacctgggatcctcaggacccttttaggatttactgaggtcacaagtattttcataataatgctgtcatttatcttttaactcctgttccctcctgagtgtacagtgcattttccttgtagctgcttcatgtgctggggtgtcatctgtctgacagtgtgtttgtgacaatatgtgcttttctattgtttttctaaaattttatttttcggtttctgatatgtagta

SEQ ID NO: 124271 - DNA, 472 bp, Homo sapiens
ggtaagatttgcatacagtgaaatgcacaaatttaaaatataccatttggtgagttttgatctacaactgtgtagctcaaacctctgtcaagaattagaacaatatcacctcagaaagtcctctcttgcctgcttctaatcagtcttcttgcacgtcaggcaaccattgtcctaatttaaaaaaaattatagataagttttgcctattctagaacttcatgtaattggaatcatacaatatgcatactttgtttctgtttttttcaccttagtgtttttaatattcatccatgtttatccatcctattagtagctcattgctttctgttgctgtgcagtattccattgcataaatataccacactttttatccattatcttttgatggacttcttggcaatttccatactttggctattatgtataaagattctatgaatattcttgtgcaagtttttcatggacataatgt

SEQ ID NO: 124272 - DNA, 157 bp, Homo sapiens
ttccactgacggtgggatggaatctgtgccccctgtgctgtcgcacccctgggccttggcccatgcctttgcctgagctgtgtctctgcctaaaatagcacccatttgctcctctaaggctcgcctcagtgatttccgaaacccatttcctccatga

SEQ ID NO: 124273 - DNA, 326 bp, Homo sapiens
caaaagtcttgttaaataggagaaataactgtgaaaggaaaggggaggaagcaggattggataggggaagacatgtagatacagatctgacagtctctgccaactcatcctggaactcctgagcagactgcctatgagaaaagtcctgcattgggtggcaatgtctaggtcttttaccagcttaagtcactggttgtgactaccccaagaagagcatgacctagattccaatcctgaggtggacctgaagaagttaacagctggtagctctaagctaatcacactccttacaatgaagcagtgagttctttcttgaaggaatttct

SEQ ID NO: 124274 - DNA, 595 bp, Homo sapiens
gcagagaatgagattcgggagcagaaagttgagcacagatttcctttactgaatgtcaaggtgggcagcacagcacattgaaaatgtcacagctgattttacagatttcaggacaccatagaatgtctgttttttatctgtagaaaggatctaaattgatttttacatgaacatatattatttgtgtaagctatagtgtagagaagtaacattaatcataattgaaatctaacactagtgttgtatgaaaggagagaaggttagcactccccttgacaaggatggaagaggcccttgggcctgacaacacgcatacgcaaggacaaaaacccaaacaccgcatgttctcactcataggtgggaattgaacaatgagaacacatggacacaggaaggggaacatcacacaccagggcctgttgtggggtgggggtaggggggaaggatagcattaggagatatacctaatgctaaatgacgagttaatgggtgcagcacaccaacatggcacatgtatacatacgtaacaaaactgcacattgtgcacatgtaccctaaaacttaaagtataataaaaaataaataaataaataca

SEQ ID NO: 124275 - DNA, 411 bp, Homo sapiens
gcatcaatcacttctaaaacatccttcacaaagaactgtaggccttctgcttaaacaaactcaatgcctggaaactcatctccccaaataattcattgttttcagataatggtagtattagaatgtgctttcatattttgagtaaactctattgattcctttttctggaccttagaatagcaaagaatgaatttagtcacttttccatggaacattccttcaactatattagagagttatcacattttaggtgatattctcctggtcctcatatataataattttaagtccctgccatcctcatggctcttctctgattctggttctacttatcagtcttctcctgttcttttggggggcgaggagcatattggttttttaagagatggggtctcgctctgcttcccaggc

SEQ ID NO: 124276 - DNA, 427 bp, Homo sapiens
ggtatctcaaaatatcaatgtcggccaggcgcgtggctcacacctgtaatccctgcactttgggaggccgaggtgggcaaatcctttagcgtcaggagtttgagaccagcctgggcacataaaattaactttagttttttttgtctctaaaagaaaatttaaaaacaaaataaaaaaccactaattccctataaacctcctttcccctgacctcttgcaacctccattctttcactccagcctgggcaacagagcaagactctacctcaaaaaagaaaaaagaaaaaaaaaaaagaacagtcttttcaatacccaaatcacttcattaaaaataaagacagcaagataatcacatggatagcccaggagccccaactactttattgagctcactgtaggaatgagattaggaagctataaaattaag

SEQ ID NO: 124277 - DNA, 437 bp, Homo sapiens
agctctcactgtcccactgtgttgtcacagtgtactacatcattgtcagactcactgttttcatttccatacacacttagattataagagtttgtaacgttttcacaacattacaggtcatgaaacaatcctcattttcctataagttattccagtggctcacatagtccttgccacttctccttcaccatgcaatgaggtacaacctggtattggttttgtgcttgactctgaccctcttgccatcttttgtaaggttctgtgtttaaatattgcatttcaggcagctgtggtgttgccagccttgaggcagggttctggagcctgaagacatgtgtccttggcagtaacctgtgtgtagacccacctttctgaaattagacccagatgctatctcaaagctaaaagtcattttcttgacatcaagcatttttggc

SEQ ID NO: 124278 - DNA, 383 bp, Homo sapiens
tgtgaactttaaaaatctatcttccttttacaaaatgagtgagtttgtggagtttaaatatcactaaatgatttagttttttcaaaaattaacttcccttgctgatacaaatctctttgatggaggaacactatctcttttttaaggaaagggcatggagataccacttttagtcttagtcggaccacaaagcatttatgccttcatcatgagccatcgtttattgaatttgcagtagctctgtattgagagctaatggaagtagaaaaagatttcaagcaaaccctaagaaaccaccacaccaggcccattttcttaatggaaagtttgctgattctggagtggaaataaaatgatgcaaacaggtatggaacgctgcctca

SEQ ID NO: 124279 - DNA, 169 bp, Homo sapiens
ctccattccccatccgctaatttttatgagaacagtaaattattactattactattatttttgagatgtagtcttgttctgtcacccaggctggagtgccatggctcaatctcggctcactgcaacgtcccgtttcccgggttcaagcaatgagaacagtaaataaact

SEQ ID NO: 124280 - DNA, 567 bp, Homo sapiens
gagatattgactcctttaaatttctgcctgtgtcctattttaaaagtggctctgctggatggacaagtggtggaaggaaatttggaataagcaacagagattctggttgtcttcagtaaaaaactatgcattggggccgggcgtggtggctgacgcctgtaatcccaacattttgggaggccgaggcgggtggatcacctgaggtcaggagtatgagaccaacctggccaacacagtgaaaccctgtatctactaaaaatacaaaaattagccagttgtggtggcatgcgcctgtaatcccagctactcaggaggctgagtcaggagaatcacttgaacccgggaggcagaggttgcaatgagccaagattgcaccactgcgctccagcctgtgtgacaagagggaaactctgtctcaaaaaaaaaaagaaagaaaatagaactatgcattgcttagggtgcacccttccaattatctgattctagtctttcactgcctttgagctatttttacaactaagttgtagagttaatgcaaaataattcttgtctatggatgtgcatatt

SEQ ID NO: 124281 - DNA, 308 bp, Homo sapiens
cacctcttccccaaccaccagctgactagagatgcctccaacagctacaggaggctggacccacaacaggaaaggaacctgggtccatgaaagactgtgtggagcagagaatcccccaccctagttcccagcaactaccagagactgtggcatgagcaaaaaaaaaaaagaaagaaaatagaactatgcattgcttagggtgcacccttccaattatctgattctagtctttcactgcctttgagctatttttacaactaagttgtagagttaatgcaaaataattcttgtctatggatgtgcatatt

SEQ ID NO: 124282 - DNA, 308 bp, Homo sapiens
gtcaaggagtggaaattctgccctgacctgtggctcctaacagcaagtggagactgaatgggccctgggagcctggcccacctgacgctcatcagatgttaagcccagttccctgtggttatccccgagcagcaaatgtcacacagctcatgtcacacagctccaaggacacacaggtagctgtcaaaattcctggggtaaggatgagttgaggccccaggctgccccacagggctgggctaggagtctgaggacaagtgctgagcatgtgctgtgacaacacctctgggtcgatggtctgggcctct

SEQ ID NO: 124283 - DNA, 155 bp, Homo sapiens
ccaatcaatgactaacacattctggaagctccaaacacaaagtgggtatggaaacagacttttgtgtagccccaaattaggcatattcaattgcttgttgacataggatacattccaacggggaatggaaccagcttatgggtcttctggagaag

SEQ ID NO: 124284 - DNA, 266 bp, Homo sapiens
cctccccatgtggcaggtgctgcatccacataatgaccagcatatggccctgacctcctggagcttccagtctagtgaggagagggaggcaggctgtaaacaattaaactcttcactattttgtcaatgatacttgtgaactgaatggtgggtaggtgatctgtcttagccagggtggtctaagacctggagaatgagaaagccagagataggattgatggagaaagggcattctgggctgagggatggtggaagctacatcctag

SEQ ID NO: 124285 - DNA, 382 bp, Homo sapiens
aatctacttgaaatcctattttatatcaaaagacgtttttctttttgagataaggtcttgctccgttgcccaggctggagtgcagtggcatgatcatggctcactgcagttttgaccccccaggctcaagcgatccttccacctcagcctctcaagtagctgggactacaggtgtgcaccaccatgcccagctaagttttgtaacttttgtagagatgaagtttcaccacgttgcccaggctggtctcaaactcctgggctcaccttgtcctctcaaagtgctggtattacaggtgtggcccatggtacctggctgaaaagacttttcttctttggtcaactctgacagcatagcatgtactatgcgatacattagtccctg

SEQ ID NO: 124286 - DNA, 402 bp, Homo sapiens
gccacaacatatacccaacgatacaatacaatattgctttataaactaggaactacctataacagacgcatccagcaataatgcactgtgcacacacaaatactccaaagagtggattcctcattaatctgataatgctgaatccaactttatttttcattacctttaaccaacgttttaacttcaaacagtccacctggtatttcccaaatacaacatgccagggaatcagtttcatattgtgcccaagtcactcttcaccactgagaatgacatttttctttattcctcattcccatcagccactttttaaacaacctgaggctaggcattgtggctcacatctgtaattccagcactttgagaagccaaggcaagacgattgcctgagccaggaggctg

SEQ ID NO: 124287 - DNA, 716 bp, Homo sapiens
aacttcacaggaaaaagtcacaaaagtcagtcatcaatggcccataagggtgaaatccatgaccctcctccagaggcagttcaaactgtaactcctgtggaggttcacataggcacctggtttacaaccacacctgaaggaaatcggatcggcaccaaaggattagaaagaatagcagacttgaccccattgttatcctttcaggccacagatcctgtcaatggaacggttatgacaactcgagaagacaaagttgtcatagttgaaaggaaagatggtactcggatagtggatcatgctgatggtaccagaatcacaaccttttatcaagtttatgaagatcaaattattctgccagatgatcaagaaacaaccgagggtcctcggactgtcaccaggcaggtgaagtgtatgcgggtagaaagctcacgctatgccactgttatcgccaactgtgaggacagtagctgctgtgccacctttggagatggaacaactattattgcaaagccacagggaacataccaggtgttacctccaaacacaggctctctttatattgacaaggattgttcagctgtgtactgccatgagtcaagcagtaatatatactatccttttcaaaagcgtgagcagctgcgagctggcaggtacatcatgaggcatacttcagaggttatctgtgaggttctggatcctgagggaaacacttttca

SEQ ID NO: 124288 - DNA, 191 bp, Homo sapiens
caaactgatttccaaagaagtcaagtgactgcctgcaaatcctatgtgccatatttgaatctaagacacagttgactgtaagatgaaccattgatttaaaaacagcttcttgaggagaaaatgaatcaccatattagatgtatgtagcaaacgtaaaatgtacctggatatttcacaaatgctataatgtg

SEQ ID NO: 124289 - DNA, 737 bp, Homo sapiens
cactttataatttgtggatgagacaataagggattcaggattatgataggcagtggatgattttggggggcttgttacatctccattgtaccttggacgtgatgtggcaagacttgatattcatttttttttttattttaggcatcagtgggtggaccagaacgttgtcatgacagttggtttcctggcagtaacttagtgtcaaacatgcgacactttataaactatgttagagtaagagttccagagactgctcctgaagtaaagagagactcacctgcaagtactagctctgataacttgggttctttacaagtaagtgtaaatgtaagaaagaaaataagaaaaagctttatgttatgtatgttatgttgggatatactgttcctataatatccaaaagaaaaaaaaatgtggttgtagataactttaaattgtcttttatttcctctgatatatctatgtaacttctaccttaccagtctttttcccttaatctgccagagttcacgacggcctaaagttcttcaaagagaggtagatgtgtatgatattttcattaactagcaacatggctttaactggaaatggggaaaaaccgctttgaagtatttgtgtgtgtatgggtgtttaattaatatggttaaatttaaaagaaggtttcttggatttatgtgtgttttttttttttgacaaagtgatttaagcttaatattaaagaaaatttatattattga

SEQ ID NO: 124290 - DNA, 733 bp, Homo sapiens
tataatgagatgttccgatatacacatacattgtgaaatgatctccacaatcaagctaattaacatatctattacctctacagttaccattgtgtgtatgtgtatgtgttgaatcagtttaatctaagatctagcatcttgcaaattgcaagtataaaatacccccatcccattgacccactctcatctcatcaattcaagtaccaccttcaatcactctcagctgttcacatttttttactgagccaaggattcaagcactctttcttcactttccgtctaattcctgaattgaagtttttcaaacttgggatgagaatgagcaatatttcaagagcaggaaattagtgacagggagagggaactttggggagagggattaactaaaatagtttaattaaggaatgacagacagttatccattcctggggattctcttgaaaagctttttttgtgtctcccttctattgttgaaagatgacatggattcatgtgagacatttataataagaaagagaactagaatggcagagtctgggaagggagatgagtgacaagagggtccctatttttttctactggtctgggaccaacaacacatcatttaggaaatagattggttactctacacacttggcacaatgatctacagatgaagggcccaatctgaaatgtaactatgcatttgtttaaactgcagtaaaacacactgaataccttatagcaaaatgtg

SEQ ID NO: 124291 - DNA, 728 bp, Homo sapiens
ataattatgtttgtgtgtatttaggtcctagtttattaatctttgaaagtcagatattatgtcttatcttttaatccctcagagcacctcactcattcactcaacagatactgaataacctgcttgtgccaagtattattaaactagtctagattcttagggtatatcggtgaacaacaactataaactcttgccctcatggatcttacactataacagggagtaggggagtagctaattggatagtaaatcatatagtaaatgcttaatgtgtaattgttgaatcgaatcttaagctaaggaatttgaattttctattgttggctattgaaatccattgaagggcagtaataggagcggactgtctcataagatatgaatttggcagcagttagtataaagagaaggtagagatggggaatgccatttggatatggtctaggcaagcagtaatgaagattaaataagattgtggttgtggtaatggagcaaaggaaagtaacttatttgaaagatattgtggaattagaattgataatacttagcacatattttcctaaagttgtcttaatatcttttgttacatctgggtccctgtacctatctttgaaacccatttttaaattacttttatttatttgattaattattggatacttattgtctagagtagaaaggaccccctgtcaaaaagcttgatatctgaatccggctctaccattaagaat

SEQ ID NO: 124292 - DNA, 218 bp, Homo sapiens
cagaatccttatgctttgaggcctccgtgctctggctcgtgcccacctctccagattatttccagacacttcccgctgcaatattgcactaccacctactgtctgtcttttcggacctccaaaacaccgaggtcttttctctgtcaggatcttcacatttgcttttctctctgctgaaaatcctcttactccaggctgggcgcggcggctcacgtctg

SEQ ID NO: 124293 - DNA, 286 bp, Homo sapiens
gtccctccatttggggtccctgacttcctgcaacaccacagcacttcatttccaacaaatgaaatgaaagctgtgccaaaatgaatgaaagaagtgccgccccaccccacagcccagacaagtttggctcaaagatctggtctgcttacccactggtcctgctctattggagagtgctgtagacttttgaatacatataggaaaaagtgattcccattattaaagactgaacatttccaaataacaaaatcacatgtggcaaaacttgtgagcatttctgttgttt

SEQ ID NO: 124294 - DNA, 328 bp, Homo sapiens
cgtgagcatgtgtaaggccagagaaggtctcctggaggaagtgactcagggtgagattagagtgatcagtcagcgctaaccaggtggagtggagaaagaagggcaatgagcattccagacacacgggacagcctgtgcaaaggccctgtggcgataggacgtgagggtctttaaggagctgagagatagcgtttaaggagggcagtgctttcttccctgatgggactggaggtgatgatggtgcctaatccctgcatccctggcagaggggaagcttgtggggcttgcaggagctgcctctctgccccacacccatcagccagaggag

SEQ ID NO: 124295 - DNA, 325 bp, Homo sapiens
tttgtggtgagtgttcatatgagattgtgtgtgtttgtgatgatatgaaagctgttgcagtaatagtgaatgaaaacatattattctgctttagagaaaagaagatgccttctttcttatcagtgcaacaaatttagggattaactgaaactgatctctggtggcatttctcagattctattaaacctagtctgctaaggggctgtccaggtaatattagaagatttcacttcgtagaggagacgcaaatattttgaaacaaaatctcaccgctcgcagcttggccaaactggctccaacattcagctggtgttcacatagcttt

SEQ ID NO: 124296 - DNA, 452 bp, Homo sapiens
gcggcgcctactactaccgggcgggacgcgtctggcctttcttactcattttaaataacttcaaacttatacaaaacattgcaaaaataaaaataggacaaagaacacaattcaaacacttctctctccacttgaggccctttacctctagacacatcagtgtctatttcctaagaatgaggatgttctcttgtgtgccacaggacacttgtccactactggccctgtttagaaaatgcttgccgagccctgtgctggagcatgtgttgcccaggtattcatgtgtaagaatgttcctcagaggtcatgacagccaagtgtctgcaaatggcattggttctgagcagcaggagacaggacatgtagcctggtttgttggttgggtggaatagcacgcacacgtcaacatggtgcttcaggagcaccgcctggcagcgtgcatgcgtctcgta

SEQ ID NO: 124297 - DNA, 280 bp, Homo sapiens
gcaggcctcctgtctggagagatgctggcaatctctagctggctgggctcacagggactgtggggaaggggacagcctagaacaaaattatgaatagtcccaacaagtgggcaaagctctatgatgggggaagtcaggatgggcaaccctctgcaactcaggcatcaggacatctattgaaggttactaaggctccatccatccggctggactgggcaagattccaacccctgagagtaggactagtgatgccagctactagttatcaataaacactgtg

SEQ ID NO: 124298 - DNA, 307 bp, Homo sapiens
cctcatccatcccacagacaggcatctgtctcccccaaactcctagcctcttcctgtctgtccctctcatttggcttggcctcatctgccttgccctacctgtgtgtaagtgtgcacgtgcgtgtacaaacctggtctcccagctagactgtgagccctgagaagtgagctactttgatgatgtttcatcacaatcccaacattacttggcatgatgctttgtccctggtggatactcaacaaacatatacagatcgctatgcacccctcccatagccacatcattaggagaggtccaggatgacgt

SEQ ID NO: 124299 - DNA, 331 bp, Homo sapiens
gtaagtgtgcagttttgttacacctgtgaaggatttcaaattgctgtatgaaaagtacaatggagatacgatgctagctttagatagttcccaggtataatagatatatatgtagaaaaccatttttttgtaactgattagagaatttcttcaatggtaacctgatacctggaacagttgcacagttaggtgattacagtttgaaatcttttgattattttagcatttttgctatgttacaaatttgcaaatagtgtaactgtagttgagctatagctttgaaattgagttttattgaactatgttataatgtattatgtaattgtgtttc

SEQ ID NO: 124300 - DNA, 571 bp, Homo sapiens
cctgtaggaagcttaggcttggttccaaggcctcatgacatggccggggcattaccagtcaggctgagctgggggacagaggtgatggggacagcaggcatgttctgtcctcacgaggcccacagtctaggcagggacagatgtcagcagtcatgaccactgcagggcatgcttggagagactacaggacatcgagggggctcagtcagagagctgcaccatgatcccggctctgtcaaggatgagtcatctggcctcagtttccctgtctataaaatgaggagtctgggctgcacagtgtcaaagactcagagaacctagaggggctttctgaggccgctggctccaggagcctaggacccagtcctaccaccatgtgagcaacactgccccacactggatcatttctctgtgtgttccgggctgcgttagagaccaggaattccgccaagcctggggacaggtgttatcctgtcccctccagagcctggggggaagcgtcccctgacctgaggtgccacctctcctgctgctcacacagactgctcttccctaactcagagccagggtg

SEQ ID NO: 124301 - DNA, 425 bp, Homo sapiens
ctacctcagccttccgaaatgctgagattacaggtgtaagccaccacacccagatgaatgagttctttagagcccagtaaaagacttgtgcccatcagttaccaactccaccctgcctgagctgctggactcagtgtcccattcgcctcttctgaagagtcacttgctttcaccttactcagatgaaggggcaaaggaatatccaagtccaattatttttcttccctgctttcaaatacccaatcctcctgactgatcaagataccattagcttcatttctccccccaagtgttttcagcagtttactttccctagccagacaaaattggcacctgtgtgtgttttctagaattttaaaggaattccccttaactcccctcacaggcatattctaatttaatgactatatctccccttcttttcc

SEQ ID NO: 124302 - DNA, 547 bp, Homo sapiens
gaatataaaatagctgctctgaaaagctcatcagtatatttgtcttatatatttgaattgagcagcattcttgcaagtacttttttctgtatcaaaatattgtgcgtattagaacttgtctgaaacatttaatcagaataatcttaaacatctataaattatatggagggtaacttcatttggtttagataaacagcaatttaaaaaatactaaatttagatactgaatatagactggtatttcttactgaattttagctaatttttttctttccataaaacagttttagcagagctttgttacaggtattataggttagaatttaatagaataaaagatctggcatggtaaacctctaaatcatatggactgtagacactcagttacccttcatatggtatctaaaacagaccttgccttaaatatctcattggtaaaatgttgcttttgtttttaaagttcttctttctgtcattcagcatttcattcactcatgtcttcatacaggctgtagtccaaatgtttattttctttattcaggaaagc

SEQ ID NO: 124303 - DNA, 465 bp, Homo sapiens
cctggaggagctaacagccaagaagtatgggaccaagaatatgagagctgccctacaggcttgcggaggaagaaaagattcgaagcagcagcgtggcacaaactgacgggacattatccaccctggagtatcagcgtgaggccattcctaacaggctttggagcccagctctctctttcccattctctggctcagtggctatcctttcttcaagtgcttcctggaagcctcctccctcccccaagtgccaaggggcgccgagtctgtttctcacctctgctcaccaggtccctcctctccaggccataccaggtttctgatcaatccgaggcagggactgggggcatagtggggccagggtaggggcaggcaggcacagcagtgtgcactgtcacagcaagtgggctgggtctgggaatttcagttgggtttagaagctggcctccaacatggccactgtcttcc

SEQ ID NO: 124304 - DNA, 401 bp, Homo sapiens
tccacttttgcaacctcctcatttttcctcttgctggcgccatggaagaagtgcctttcgcctcccaccatgattctgaggcctccccagccaagtggaactgtaagtccaattaaacctctttttcttcccagtctcgggtatgtctttatcagctgcatgaaaacaaactaacacagttactaaaatttttttctcttctaattgtccatatcagattgctatgagaagaggaaagggttaagctagacctaaatataatactgtatgtaagaagttgaaaaaactgtgataaattatctctacatactaataggaaagatatccaagatctacgggcagagtcaaaaaagcaagtttgcaaactgagaggcagagtaagtatgatactgattctgtga

SEQ ID NO: 124305 - DNA, 491 bp, Homo sapiens
atatagttcctgccattaaggagctttatatgaaataggaaggcctaaaaataaacaagcatttataatttgatttaataagagataagaccatgggcacagattggaggattcttaagggatatttggttttttagaattaataagagttaacttctcatgggaaaggattatgggaaagaagaagatattgttggtggggtgcagtggcacacgcctgtaatcccaacactttgggaggccaaggtgggtggatcacttaagcccaagagttccagaccagcctggccaacatggtgaaaccctatctctactaataatacaaaaattagccagatgtggtggtgcgcacctttagccctagctacttgggaggctgaggcacgagaattccttgaaccccaggggacagaggttacagtgatctgagattgtgcagctgcactgcagcctaggtgacagagcaggactctgtctcaaatacataaata

SEQ ID NO: 124306 - DNA, 790 bp, Homo sapiens
ctcaaataaaaaggctgtagtgcagtggcatgatcatggcttgctgcagccttgattcctgggctcaagccatcttcccacctcagcctccccagtagctgggactatacacacataccatctcatctggctaaattttaaaatttttttgtagaaatggggtcccactgtgttactcagtctggtcctgaactcctgggctcaagtgatcctcctgcctcagcctcctgaagtgcagggattacaagcatgagccactgcatctggcctgatttagtgagtttggacaaatgtatacagtcatggaaccaccaccacaatcaacaaaaggaacatttccatcctcttacagttattttgtgatccttttagtcaatttccttccctcattctcagcctcttccatttctagttgtatagttttgcttttctagaaagttatataaatggaatcatatggtatgtagccttttgtgtttggctttttttatgtagcataatagttttgagaatcatctgtgtcgtcgtatgtatcagtagttttattctattttattgcagaataggtagtccattatatggatgcacaatttgtttatacatttaccagttgatggacatttgggttgtttccagttttttatattatgaataatgctgctgcaaacattcatatacaggtctttgtgtggatatacgtttctctttttcttggatagatacctaggagtgagattgctgggtcctctggtctaaggccgggcacagtggcacatgcctgtaatcccag

SEQ ID NO: 124307 - DNA, 380 bp, Homo sapiens
tttgcttctcttctcaagtctgggattgctaagtagcacagagtagtggtgtagcattgagcttcaaagatcaaagtgtgggggaacacatcatgatgtatggcttccttacatgtagaagaatggcagatacaaataacagtaatgatttttatttgcaaagcactttacaatttacaaagtactttcacatctattatctaacgcaagccccaaactaaccctatgaggtatgaagggatcaatatttccttctaggagaaattaagcatttagagaagtgacttgccctcatttacaaaactacttaattagaaacagaagcctacatttttttattctcagttccaacttcatttttactatatgatgcccttttg

SEQ ID NO: 124308 - DNA, 202 bp, Homo sapiens
gcaaatcacttctctagagtgcattttctcttttgtttagtaggtacgaaaacaagagaaacattcaattattgattaggtattatgggtcaggcacagggataagcattttacctgcatcatctaatttaaccctcacagtagtcaaatagagtaggtactgttatcccccttttacagataaggaaactgatgcctggag

SEQ ID NO: 124309 - DNA, 1577 bp, Homo sapiens
agacaagggcggcttacaggagctcctgtggtgcccggctccacacactgccaggcagcccaggtccacatctgtccaggagtctcctcggcggccgatgatgccgcccctcccagcagagtggggtgggcaaggccggcagtgctgtgtgactgtgtgcaagttggcccctcacgggcctcagtttccctgtgtgtctggggaggctgtcagagtggctgagctgacaatttgtcacaggctctcctgctgggcacccatgcctccgtgctcccatgcccctccccgcaggcctgagtttcctgttcctctggtctccatagaaacctctgtccctggtcagcaagagcctgactcctcacttcctatctctgctggggcttctcctgggccttgttggagcccgccctgggcctaagcctctcccatagcgcagctctgcgtgacagtgtcttctcacctcgtgctcttggtcacctccacctcgccacacagtacgtgtaaaggtcaccctgagggcttcaacaccaagagcacagcaaaatggctgtccctcggtctccgggtggggagcctgttacaccaatggggacaggatgggaaaggactcaggggaccccatcaaccctcggccggctctggggcctgacaaggacagggcctgggaaaggacagaggaagtcaggagacaagaccattggtgtctggccgtgcacccttgctggacagtggctgtggctgcaggtggccgagctgcagtggctgctatcggggcaggcaggccggagagcttcatcagctacagctggagcggacaggacacccaccctccagagcccaggccatctcacgccctgtgctagtttcaagggcgttggcatcctgaatctgccactgccaccctagactgatccactaacctttctgagcctcaattttctcatctgcaaaatggagctcacaccacctggttcagaagattggcctaaaggaggtctggatgcgatgacagagagagagtgcctggtgatacctggcagacagcagggcctggcagggcctacacccaccatagacaccagagcatgtgattgtgctacctcctggggtctgtctgcccaccagtgaggccaggaacccagaaagggaagcaggagtgcccagggtggccaccacccaccgcatgaggaacagagccggccacaggtgtcacctgggtatctgctcgtgccatgaggaatgccctctgcacccggtaccaggcctggccccctgagttgctctcacaggataccccatgggactgacccagagcgcccactccacaccctgggcagggcctcgtccgccttctgctccgtgaaggctgggcatggtgcatggcgaccccacctccagcagccccagagcaagggcctgcagctgcctccccagaaccccctcggctctgctcccacagacctgggttggagggaaggaggtggggaagctggaagggaggccagtccctccccagtcagcctaggggctggggaggcagagtcctcctcccttccccaggctgagactcaccacag

SEQ ID NO: 124310 - DNA, 384 bp, Homo sapiens
tcaaacaaccttcaaaggtaggggtgagcttctcagccctcttttagggataagaaaatggactcaaagttggtaaataacctgcccgagaacacacagctagaaagtggcagagtctggactcagacagagcatggcctgactgccagcatttgaacacaactctgccacttggctgtgtgatattggggggtgacagcctcatctgtaaaatggagacaccagccaggtgcagtggctaatgtctgtaatcccagctatttgggaggctgaagctggggtttgagataagccctggcagcatagagactctacccctaaagaataaaaggaaaaaaaattagccaatgcctgtggtcccatctacttgggaggctgagatgg

SEQ ID NO: 124311 - DNA, 811 bp, Homo sapiens
atgtgtatatatatctacacacttacatatatgtattacatatacacccaccattacataccattgtttttctgaacatgtaatatatagtatatacacacatatatagtatacccacataccattatgtttttctgaacatgtaatatatgtagtatacatatgcgtatatttagtatatagtgtgtatatatgtttatactatatatactatatagtatatatacactttatatatagcatatacatactctagcatatacatacatacatagtatgtatatgctatatataaagtatagtatagtacaatacaagaaagatatactatataatagtatatatagtatatacatactatgtatatactacatatacatagtatactatatactatgtatatgtagtatatacatatatggtatatatatgctatatatagtatatacatacatggtatatatatgtattatagtatatttattggattattgttatatgttattattttatgtattggtatatgctatacttgactattatggtatgcaatagtatatgctacaagtatggaaatgcttggcatgttatggacaatttcgcaactcgtcccgacaactcagtgacgaaggctcaacccacattccgaggagacaggcctaaccaacagacacagcacgtctcatgaacgaggggttactgcaagcaccgacaaacacgcacaacgagcacgcagacacaccaaatcacacacacaagcaccacattcaaaagcccctcgcacgcccgccacgcgcagtacagcccacaa

SEQ ID NO: 124312 - DNA, 497 bp, Homo sapiens
tgaagagttgtcttcagccatgctggaagagagtcccaagaaggtcttcatagtgaaaggatccagttcagaatcatgccttgtatttggttgtcatgtgtctttagcgtccttcattctggatcatttcctcagtctttccttgattttcatgaccttgagtctctggaagaatacaggcccattattttgaagcatgtcccttaatttgggtttgtctgatgtttccttaagattagattcagggtgtatgtgtgtatgtgtgtgtgtgtgtacatgcacttgtatgtgcacaggtgcttgaaagaaatggtcctatattgcctatgtttttgtgaaacatgctttctttcccaccccacaagggcatttgtgtgtttacatatgcagctagatcattcattttaactgcaagatgggattctgtcctatgaatatactgcattttgtgtagctattttccttttgatggatttatggagttggtcgcaattttt

SEQ ID NO: 124313 - DNA, 272 bp, Homo sapiens
agtggtgagctagatcactttgatactgcctgtttctatgggcaactttgacaggaacaacaacagagaatatttttctccctctaaaagggctgtaagagaaatcaggattggaaagagactataaaagacttgatgacatcagccttaactttttcctggaatagaagtcttcctcacaagtagggcattcaaactcagtttgagccagagatgaggagctcactacctccacagggcagcatgtgtcacttttcaataagctccacagc

SEQ ID NO: 124314 - DNA, 172 bp, Homo sapiens
ctgaaccgtcctttgctgctctcatccttctccaattcaaaatctaatttggtcctgaaccctcctctctctatatactctcttcttgatgactccattattcccatgtaaatccatgagataatgtgtgtaagctgaccgggtgtgatggctcatgcctataatcacaaca

SEQ ID NO: 124315 - DNA, 568 bp, Homo sapiens
gggagctttaattgagagaaccagtataaactagaatgccccatgtaaacctgacagatggtcacattactatttcaactttttctaagtatagagcaaaagacagactttcaagattttttaagataccaaaatgatcttagtaccaaaacttcacaaagatagctggcatgggcatgtgcctgtatgtgcacacactgcagatcaatcttgatgcaaaaccctttcataaaataccatcagatagaatttagcaatgcagtccgggcgctgtggctcacgcctgtaatcccagcactttgggaggccgaggcgggtggatcacttaaggtcaggagttcgagaccagcctgaccaacatggtgaaaccgcgtctctactaaaaatacaaaaattagccaggtgtggtggtgcacacctgtaatcccatctattcgggaggctgaggcaggggaatcgcttgaacctgggaggtggaagctgcagtgagccgagactgcgccactgcactccagcctgggtgacagagcaagactctgtcttaaaaaaaaaaaaaaaaaaaagaaaa

SEQ ID NO: 124316 - DNA, 411 bp, Homo sapiens
  misc_feature (5)..(5): n is a, c, g, or t
agganacccaaccctgccacccacagcccgtaccctcaggtcatcctgccacagtttgggggctattggatcgaggacccggagaacgtgggcaccccaacatcgctggggagcagcatctgtgaggaggaggaagaggacaacctcagccccaacacatttggctacaagctcgagtgcaagggtgaagccagggcctaccggaggcacttcctggggaaggatcatctaaacttttactgtaccggcagcagcctggggaacttgatcctgtccgtcaagtgcgaggaagcagaggggatcgagtacctccgggtcatccttaggtagggctgttgcgctgcttgaggccacttctcttccaggcagggctctcatcggtggtgtgggggctgggatgggactcagaaa

SEQ ID NO: 124317 - DNA, 170 bp, Homo sapiens
aaaacaaacaccaactcatgtatccagcccttgtctaggccaggagagcacaaatatgaataaaaagtagcccccaagaaaatgttggggccgtaaggtgggtggaacatgacgagcttaggggagggtagttcacgctctggctctcagaagaggcaacacttgagccg

SEQ ID NO: 124318 - DNA, 533 bp, Homo sapiens
tacactagtaaatatgctggagtacatgaatgaacctttgagtcggcactcagaccacccacagccaaatcacttggggactccttaaaaaatgccctctgcttgccaaggcagctggcaggaaatggccagtgggggccccctccttttgacagcaccctgctctcagaggttgaaccctcagagaccacagggagccaagccggggttcccttcccacttggggtttccttctaattaggacacaatggaacagggctagactactcatttcacacaaacatcagactgggccccttgtgaaaaccctttcagtgccccacaatgctgaggaggaaagtccaggccccctcacaggacattcaatgcctgtcgctggctgccactgctgacctctccagccacacccgtgccgcagccccttatactctactgtcacccccaaccaggtttgtggtcccccaatgtgtcctgtggtcacactgcagcctctgtgcacacctaagacccccaggagagcacatacctcctca

SEQ ID NO: 124319 - DNA, 510 bp, Homo sapiens
taaagaattcaatagtgtgaactttactttacatagttatatgggaattttgcaatgtcagttttaaaatttgaactggataatttttctcctgaaggcttcagacatgagcacgcttccaactcatgttttgctttaccctgtttgactgaactctctggtgattctagtcaactggaacttcagcactccagttctgtcccgactgatgacccttcttgctgtgtcctcacatgatggaagaagtgagaagtctttcttgaatctcatctataaaagcaattagtctattcgtgagatctctgcccccatgacctaatcacatgccaaagcccccacctccagacactatcacctcgggggttaggatttcaatataagaattgggagtgggccgggcactgtggctcacacctgtaatcccagcactttgggaggcctaggcgggaggatcacgaggtcaggagatcgagaccatcctggctaacactgtgacaccccatctctacc

SEQ ID NO: 124320 - DNA, 221 bp, Homo sapiens
aattaattccagaaattaaaagttcattctcccacctcaacgcccatggaatcctgaatgtgatttacatgtcaaaggctgactcagatttaatacatttacttcggaaaaacttagagatgcctgtcaaattacaaagcaattgcctaaacattccagtgacatttaactgctatcaaacagttgaaagttgatctttaacagaatacagctgtgggtgc

SEQ ID NO: 124321 - DNA, 464 bp, Homo sapiens
caagttcatatttgaggaaagtgaggcataagttcacatagctgctaatgatggatccaggacttaaacccaggtctcatggaaccctgagtaacccctcccctccccacgccccaggctcttgttttcagctggacagtccttccagggtcacactactacagacccaagagctactgctcagcctacccctccccagtgaccaaatctggagggcactgaaggaattcatgtgccgtctgtcccttaatctgaacacagagcacacacatctctggccccatggagcccacatccccaaccagtgtgacaaggagcccaccatctccaggccgccctgtggagcagaaagaaggctgaccagaggctgtgaaccaggcaaatccacccaccacagactgggccctaagttccctataaagggagatttagaaagccaggaaatccagtgccaaggttcactt

SEQ ID NO: 124322 - DNA, 483 bp, Homo sapiens
tttcactatttgacaaagatggtgatggaactataacaacaaagaaactaggaactgtaatgaggtctcaggcagaatcccacagaagcagagttacaggacatgattaatgaagtagatgctgatggtaatggcacaattgacttccctgaatttctgacaatgatggcaagaaaaatgaaagacacagacagtgaagaagaaattagagaaacattctgtgtgtttgataaggatggcaatggctatattagtggtgtagaacttcaccatgtgatgacaaaccttggagtgaagttaacagatgaagaagttgattaaatgatcagggaagcagatcctgatggtgatggtcaagtaaactatgagtttgtacaaatgatgacagcataatgaagaccttgtacagaatgtgttaaatttcttgcacaaaactgtttatttgccttttgtttgtaacttatctgtaaaaggcttctccct

SEQ ID NO: 124323 - DNA, 182 bp, Homo sapiens
tcccctgtcctctgctctccccctatctgcctggaagtgtccttgccttgggagtcctccctcccacccaggtgaattcattcctcctttaatgctctgtcatccaagcgcttactctgtccccatccccaccatgactccaggagagtcagggcgctgtctgactctcatccatctcccca

SEQ ID NO: 124324 - DNA, 373 bp, Homo sapiens
cacaggcttgagggtcaagctaggctgtaagacagaaattcactctgcatttctaggaagatggcttgtggcttttacacaggaggactctgaagaacctgctatatcaagtgtcagttatgtgcaagaaacgggattagatactgtggatgaatagggaagtttactagtccttgaccacagggagttcacacattaatacacatgaaaacaaaactgccagggtaaagcccagtacatcctaaatgccaagtgaatgatatacacaatagccagttgctcagtggaagaaccagaaatttgcctggggaaggtctgtgtagacttgcttccatatctgcactgactttgggggtcaggggatctcttaagg

SEQ ID NO: 124325 - DNA, 703 bp, Homo sapiens
tacttttcacaggatttatagctcgtgctgggcccatgcccgagggtgcgtctgtggggagagaaagggctggggacagggatgtaggacttttcttgttggtcctgagcagaaaagttttgacatcaccatctcttacctccctacctaagccttaaagtagaattccggctggaaaatggttttgtgaatttaaattgttttcaagcaaggggagataggcgaaatcattctctctccctaattaggaggatggatggagctgaggactccccgggagggaactggaaggaagatttcactgggggtcagcagggcagctcaatctatgaaaaaatgccaaatagttgatgtttattaggaaaaactgctccctgctatatacccttcataaggctagttaattcccccgtgagcacatgcattctgaatctctgtatttcagagaaaatacccaaagcttgcacccacaccaccttccaaaacaggattaaagagatgtcctcctgagccatgttgagattggtttagaaatctcttgagttttaagactgtttaaaaacggttctggcttggagactggtttccctttggaaaccagtgtctggtggaagctggtatttttataactctaggctctctatcagatcctgtgttaccatggttgctaaggggaacactggcttcccctggaaagtatcac

SEQ ID NO: 124326 - DNA, 101 bp, Homo sapiens
tgctgggattacaggtgtgagccaccatgcctggcctgaatccaggtcttaatcctcagagttcatgccttttttcctttcctttcctttcctttttttct

SEQ ID NO: 124327 - DNA, 648 bp, Homo sapiens
aggtggatcacttgaggtcaggagttcaagaccagatgggccaacatagtgaaaccccatctctactaaaaagacaaaaattagccaggcatggtagcaggcacctgtaatcccagctacttgggaggccgaggcacaagaatcgcttgaatctgggaggtggaggttgccgtgagccaaggtagtgccactgcacttcagcatggttgagtgacactccgtctcaagaaaaaagtcatttcaatgactacctcaggagattcataggtatctgacccacatctgagatgggatttgcattgcattttagctatgatgagaacaaatatttaatatcttcgaagattaaaagcatactgtgataatatggaaatcttggtgggaattcagtcattagtgagaatgttttgcgttaagttcaaaccagcctcaacgaagctgatgtgagggaagggaaagtgaactctgagtagagcagggacagaagaaagatgctccagtgcagatcaggaaggagcagggggtgaaatgttacaaattctagaactcagagagctgaaggtaattacttccttttcaagttgtgaaacatgttaacctgtggtaaaatacttacaagatgataattaccatctaaccgtgttgaag

SEQ ID NO: 124328 - DNA, 609 bp, Homo sapiens
tgcagcagacaaacagggctaacaaatacaaccacagcaaccagcctcaccacagtagaccctcatgtgcctggaagtactacaatcctagtacgcttctgcagtccattcattccctcactttcccagacaactccttcactcctcaggcttccaaatctcctcttggctcaccttagatattccactgagaaaattagaacaatcagaaaagaattccaactacctccgaacccacctccatcaccaggccttccttttgttactggggatgaactggtagagttcctatctaagacaactgctccacttctcactagatctcaaggactcaaggacattgctcagcaattctctcccttttccccacatcactttgcctctcaccaggaccatcccatgagcacagacatgctatcatttccctaatcttaaaatccctcagccgggcgcggtggctcacgcctgtaatcccagcactttgggaggccgaagcgggcggatcacaaggtcagaagatcgagaccaccgtggctaacacggtgaaaccccgtctctactaaaaatacaaaaaaaattagccgggcgtggtggtgggctaatagtccc

SEQ ID NO: 124329 - DNA, 308 bp, Homo sapiens
agtgaggaacggccaggtataattggtattttggtgataggattaacaggactggctcatggataagatataggggaggagaaagaagacaagtcaaagatttttggcctcattagcttgtgcagaaaatcagatacttgtgttctcccagttcagtttggtatgtctactgggcattaaagtggagatgttgaatgaattgtttaatatagcagtctgagggaaaaaattagggctgaatatttaaaactgtgggtcattagctacttcatctgctagattccaaggtcaaaatataccgaccatat

SEQ ID NO: 124330 - DNA, 719 bp, Homo sapiens
tgacttggtggtataacctagggctcaggtctcacctctcagatgagggctctgagttcatacagccctttggatctcctggtttttttctgacagaatctgttttggttttgtttgtgttttgaatgatactaagggtaataaaaattcttatttgatatacaaatttctcagaagattggcatttagtattcagctttgctatgcttaattacttcattttcagaagaagtatacgatttataaagtatatgatatggaagttataaacattaacatcacataattaaagaaacatacccattttagagattgaagagggtgatttgtggcttcacaaaaatagaataatcactctagctaccattatttctttcatatttgaagtttttctatttctttctaggtttgtcaagggctatttaatgagttactagaaaatgggatttctgtgtggcctggttatttggaaactatgcagtcctcattggaacaactttattcgaagtatgatgaaatgagtattctcttcacagttttggttactgaaactactttggagaatggattaatacatctgagaagcagagacaccacaatgaaggaaatgatgcatatatccaaattaaaagactttttgattaagtatatatcatcagctaagaatgtatagatttttatatttgtataataaatattcttctctcctaaaaaaaatg

SEQ ID NO: 124331 - DNA, 522 bp, Homo sapiens
  misc_feature (17)..(17): n is a, c, g, or t
  misc_feature (29)..(29): n is a, c, g, or t
  misc_feature (51)..(51): n is a, c, g, or t
  misc_feature (64)..(64): n is a, c, g, or t
  misc_feature (78)..(78): n is a, c, g, or t
ccctgtggtcccccccngtaaaagggggnccctagacccgaggcaagctgnccctacccctagnatccttccccaccngacggagaacccctttacaagaaagaaaaaaccttccatagaaaggtacttaaacttccacccctgtttagccccctattaaggttgcctttggatgtaggaagaggcccccacattggaacctaagacaggtttgtcaagggctatttaatgagttactagaaaatgggatttctgtgtggcctggttatttggaaactatgcagtcctcattggaacaactttattcgaagtatgatgaaatgagtattctcttcacagttttggttactgaaactactttggagaatggattaatacatctgagaagcagagacaccacaatgaaggaaatgatgcatatatccaaattaaaagactttttgattaagtatatatcatcagctaagaatgtatagatttttatatttgtataataaatattcttctctcctaaaaaaaatg

SEQ ID NO: 124332 - DNA, 820 bp, Homo sapiens
tatattctagtaggacaaaatagacaataaataaacagagaaataaaaagtttctgatggagtcctacaaaggaaataaacagtaatgagatagtgtgacttggtaagcatacagaaggtcagccgtgcatctatctgtttggttattgctgaactagaagctataagctagctactcaataaaggaaacatgattttggtataatttgttataccaaattgcatctttattataatattgtttattgtaagagacttcagtctaaaataattgttcttggattgcatccaagaaccaaaaggctgaggttattatgcggttcttctgtgatatcaccccaaatgatgtgttgaggtaccagtgtttattctcagattttattttcttttatgacttttcagctctagcaataagttagaaactgtctgaaaatattactttaaatacaattcagaaactttaaaaatgttgggtttttttggtccacccttaagccctgagtctgtgactcttgagagtgcatgaacactgaattacagctggcaacgtggaggaatttattatttacatttgtgctcatgtgtctgtttaactacttttttcttaggtatgatgaaatgagtattctcttcacagttttggttactgaaactactttggagaatggattaatacatctgagaagcagagacaccacaatgaaggaaatgatgcatatatccaaattaaaagactttttgattaagtatatatcatcagctaagaatgtatagatttttatatttgtataataaatattcttctctcctaaaaaaaatg

SEQ ID NO: 124333 - DNA, 763 bp, Homo sapiens
gacggagtcttgctctgttacccaggctggagtgcagtggcacgatctcggctcactgcaacctctgcctcccaggttcaagcaattctcctgcctcagcctccctagtagatgggattacaggtacacaccgccacacctggctaattttttagtatttttagtagagacagggtttcaccatgttggccaggctggtctccaactcctgacctcaagtgatccgcccacctcggcctcccaacgtgctgggattacaggcgtgagccaccgtgcgcagcctttcccctttgaacttaacacttttggtaacctgactatattcagatattctagatctataattttattttgatttttctaatttgttctaatgattaaatactcttaagaaaggccatgggggatggctttcatttcgttccagagactccttcagcagtcgtcatttctgtctgggtgattgagacccagcccagacctgaatgcggacactaaaaagatttaaagactttgagagtcccccagctttctgaccctggcttttgtggagaggtctgggaagatgggagatagtgagctcaaagaaggagaagataatggcgtatgtcccacattttctcccagggtatggcagcctccctaatacccttataagctaggaagctcctaggatgctgtagctcagacctgagctttccgcgtcagcaagtaggaatcgtttttgctgcagagaataaaaggaccacgtgccctcgtgccg

SEQ ID NO: 124334 - DNA, 941 bp, Homo sapiens
gacggagtcttgctctgttacccaggctggagtgcagtggcacgatctcggctcactgcaacctctgcctcccaggttcaagcaattctcctgcctcagcctccctagtagatgggattacaggtacacaccgccacacctggctaattttttagtatttttagtagagacagggtttcaccatgttggccaggctggtctccaactcctgacctcaagtgatccgcccacctcggcctcccaacgtgctgggattacaggcgtgagccaccgtgcgcagcctttcccctttgaacttaacacttttggtaacctgactatattcagatattctagatctataattttattttgatttttctaatttgttctaatgattaaatactcttaagaaaggccatgggggatggctttcatttcgttccagagactccttcagcagtcgtcatttctgtctgggtgattgagacccagcccagacctgaatgcggacactaaaaagatttaaagactttgagagtcccccagctttctgaccctggcttttgtggagaggtctgggaagatgggagatagtgagctcaaagaaggagaagataatggcgtatgtcccacattttctcccagggtttgtcaagggctatttaatgagttactagaaaatgggatttctgtgtggcctggttatttggaaactatgcagtcctcattggaacaactttattcgaagtatgatgaaatgagtattctcttcacagttttggttactgaaactactttggagaatggattaatacatctgagaagcagagacaccacaatgaaggaaatgatgcatatatccaaattaaaagactttttgattaagtatatatcatcagctaagaatgtatagatttttatatttgtataataaatattcttctctcctaaaaaaaatg

SEQ ID NO: 124335 - DNA, 254 bp, Homo sapiens
ggtcatggtaaacttgccagtgtatataaatcatccaaatggacatggtgatgaggagttggacctgtagatctgaagcgtagagaggaaggcagagttggagatgtagatatgggagcctctggcctgtggagagagtgtatgatcaccatcctggactacacgtggagaagaaaagatgaccagcgacagagggctgggtagagccagcaaaggagacctcaaaaggatggcagacagggtgaggtaaggtc

SEQ ID NO: 124336 - DNA, 480 bp, Homo sapiens
attttcagtctgaagaagaaaagacaaaatagatgacagaaggagtattagaagggagagcgatgagactcagttggacaccgagagagcaaagaagcaataatacgtgaagatgaaaatgaaatcaatttcagcataagaagacaagaacttatggtaaagctgcccacagccagaagaggatcctagaaggacaggaattccctgtctgcagcatttcataagcatgtaatattgttgcagggatactgcagaaggagttgaagcagtggacagacagatgatataggtgattttacagcctaagaaagccctgtgcttgtgcccccaaaacatgaggtgctagtgaatgaatgctgggggaaagcccagggcctaggtgttgcaatgttctgtggttggcagatgctttttgttttgttaaaaagtgcaacaaataaaatttatcaatacttttctgctactcaggaaaaaaaaact

SEQ ID NO: 124337 - DNA, 387 bp, Homo sapiens
ttctccttcctcagcctcccaagtagctgggactacaggtgcccgccaccgcgcccagctaatttttctatttttagtagagacagggtttcaccatgttgaccaggatggtcccgatctcctgacctcgtgatccgcacgccttggcctcccaaagttttgggattataggcatgagccactgcgcccagccaaagctagatttagaaatccattatttcacataactggtctcagataaaccagtctacatcacaatgtctaaaatgaacaacacctgtgacaggtcagcacagactaagtaagtgtattagtgtcaatttatagcttaatttctctctcttttaagatacagacattccaattattttctttctgtatcctttg

SEQ ID NO: 124338 - DNA, 164 bp, Homo sapiens
accaaggcttacccacatccactcctggtaactaaagaagatgcggacattgacagattcagttcatcttttcacaacctgctaaaacaggcttgatttttttctggttgaactgcctgcctatctacctccctcccttcctatctacctgtctatgttatgtg

SEQ ID NO: 124339 - DNA, 554 bp, Homo sapiens
cgcggtggctcacgcctgtaatcccagcactttgggaggccgaggcgggcggatcacgaggtcaggagatcgagaccagcctggctaacatggtgaactcctgtctcaactaaaaatacaaaaaattagctgggtatggtggcaggtgcctgtagtcccagctactcgggaggctgaggcaggagaatggcatgaacctgggaggcggagtttgcagtgagccgagatcgcaccactgcactccagcctgggcgacagagtgagactccgtctccaaaaaaaaaacaaaaaaagatgctttactttgttttatacattccaaactactcctactaagaatagtaatgaaaaaattctccggccgggcgcggtggctcactcctgtaatcccagcactttggaaggcaggggtgggcggatcacctgaggtcgggagctctagaccagcctgaccatcaggggaaaccccgtctctactaaaaaaaaaaaaaaaaagaatacaaaattagccaggcatggtggcacatgcctgtagtcccagctacttgggaggc

SEQ ID NO: 124340 - DNA, 358 bp, Homo sapiens
aatgttgtgtgaccatcccctctatcttgttccaaaacatttccatcacttcaaagtaaaacaccttaaacactaagcagtttctcctaatttccctctccccccagtgcctgtcaaccaccagtatgcattatatctatagattttatctatcctgaatatctcatgtaaatggaatcatatatgacctttttgtgacagggtattattactctgttgctcaggctagagtgcagtgactttttgtgtctggttctttcccttagcataatattttcaaggtttgtccatgttgtaacatgtatcagtactttattctttttgttaataggcgaataatattccactgtatgtatgt

SEQ ID NO: 124341 - DNA, 715 bp, Homo sapiens
caggagaatcgcttgaatctgggaggcagaggctggagttagccaagatggcaccattgcactccagcctgggtgacagagcgagactccgtctcaaagaaaaagatatgctcattttgatttggaataaagctgcctggccaaaagatggcttgtggctagaagaggaaggacaaataagaaaacataaatggttcaaatagcactctatgtacaaaaacatgaaaaggtgaaaatttcttaatttcaactttttgttagaaattagtacgtcacatatagtcctccagggagcgctctgaggctgttactagtcctttagttaataaagcgagaaggccctgtaacttagcctataggattttagcgctgacgcctccgaacccacccaggctttcgcctcggaaaggcacggaagaggccccatgttaatacccgcagtctaggacacggagtcatcctcagggccctgtcacccgtgagtgagattacagtcattatactgcgggggcgggcgtcattatactgtggaaggtggtgctgcgggaactgtacagagacctagccgggtgttcctgccctgcggatggcagcggagaaccctggggggcgtttttagcctgcggatcgcctggtgctgctgaagccgcgcttgaagacctagctgagtgtcctcccctgcggaagcctgcggaggacctgggcggactcttta

SEQ ID NO: 124342 - DNA, 145 bp, Homo sapiens
  misc_feature (34)..(35): n is a, c, g, or t
  misc_feature (37)..(37): n is a, c, g, or t
caggattatatctgcaccacagcaatttgccccnnanctgtttctgacaacctgtatgtatgaggcaagtagtgcagttcaggatagagaatggaacctgccctgggagatcaggctgtgaatcttggctctgccaacttactct

SEQ ID NO: 124343 - DNA, 305 bp, Homo sapiens
gcaggcgtgggaagggctgccgggccagcactgtggggctggccgcatgtgtgggctgctgtgcgtgtttgcaggtgtgtgtggacgtcttgtgtctgtggctgtgtgatgtgtctttgcggactgggcccatatcacgctcccacctcctccactgaattgggctcctgtccccacgccttccctgcgtcccaggccagcctgggggccgtgctccacctcccctcccgaactggactcctgtccccacgccttccctccgtcccaggccagcctgggggccgtgctccacctcccctcccgaa

SEQ ID NO: 124344 - DNA, 434 bp, Homo sapiens
aatgccgcgtgtctcagcctgggcactgcaggcacctggggcacgtgggcagccgacctgggcattgtgcagtgtggagcagcatccctggcctctactcactagatgccaggagcacatccccaaaatatccccagacattgccaaatgtcccctggaggacaaaattgcccgataaagaaccactggtgtcaagaagtacagaaaacctgccaccctcatcccacacacctaacattagaaaatccaaatgtaatttgatttaaagatgttttcttacatataatgggccattaaaaccagagcaaacaggctgggtgtggtggctcatgcctgtaatcccaacactttgggaggctcaggtgggaggattctttgaacccaagagttgaagaccagcttgggcaacacaacagtgagacctcgtctctaca

SEQ ID NO: 124345 - DNA, 631 bp, Homo sapiens
gaccaaagaggctgggccccgccatgggccagacggcaggcgaccttggctggcggctcagcctgttgctgcttcccttgctcctggttcaagctggtgtctggggattcccaaggcccccagggaggccccagctgagcctgcaggagctgcggagggagttcacagtcagcctgcatctcgccaggaagctgctctccgaggttcggggccaggcccaccgctttgcggaatctcacctgccaggagtgaacctgtacctcctgcccctgggagagcagctccctgatgtttccctgaccttccaggcctggcgccgcctctctgacccggagcgtctctgcttcatctccaccacgcttcagcccttccatgccctgctgggagggctggggacccagggccgctggaccaacatggagaggatgcagctgtgggccatgaggctggacctccgcgatctgcagcggcacctccgcttccaggtgctggctgcaggattcaacctcccggaggaggaggaggaggaagaggaggaggaggaggaggagaggaaggggctgctcccaggggcactgggcagcgccttacagggcccggcccaggtgtcctggccccagctcctctccac

SEQ ID NO: 124346 - DNA, 413 bp, Homo sapiens
ctgcccaagtatacacagcttgttgttgacagaaccagaacaacacacagttctcttttcttccagaaaagtggggctggttccatttctcactcctgtcttcctttggatggaggaaaatgataatgaaacctaacataatgcctatttcaacttcagaaattttcctcaaataattgaatcagtaggtttgaggcttcttgggaatcattatgttagacctgaaacagaaatagccaatcccttggttgaaacgtgttacatttaaattgatactgcttttccccaaagtgcaattagaaaagacaaagacctacttctgtaaatgttgttaagggaaaatggagcaggtgtctcctttctttcatttctctgggtcagttgtactcctgaagtctctctctgtttagatg

SEQ ID NO: 124347 - DNA, 125 bp, Homo sapiens
cgtgtgctagtgtgtgtgtgcgtccacgtgtgcgtgtgtgtgcgcgcacacgcagcaccacctggtggccactcagctcactgcgcccgccacagggctggcctgtgcttctggctcagaaaact

SEQ ID NO: 124348 - DNA, 137 bp, Homo sapiens
gcatcacgcaacttaccagagacgaggcttaaacacaagccttcattttctcattaataaatccagtggtttcccttggagagactgccgctagccactaaataaaccaaaaagaaaactctctggaaaggcaaaca

SEQ ID NO: 124349 - DNA, 351 bp, Homo sapiens
attcactcttacatggctctgttcccaccacccagtcactcaagccacacatgatggagtcagctctgagccactccttcctaccttccgatttcaggccatctgagagcccttttgaacctccaaaatgcaccttgaattcactcccacttcaccatctcccctaacctgggcagctacagcctcctacctgggctccctgcttccacaactgcctctctccagttttactggccacagagcagccagtgacctcctcctggcctcccacaccttgaccaccgcactccagccggctccctcctcctctgcttggcagaggcctcatccttcaggtctcggcttcaatgc

SEQ ID NO: 124350 - DNA, 669 bp, Homo sapiens
ggttcatatattatagtgattgccacccctcacaccctggtgtgttcctacatttacgttattgaaatccctaacaaccttctcacccacttttgcttagaactggtgaagcacagaggtacgtcagaaaatttttcttttttttctttttctttcttcttctttttttaaatacagggtctcactctgttgcccaggctggagtgctctgttgcccaggtacatttatggctcactgtagcctccctactgagctcaagccatccttgctcctcagcttcctgagtagctggaactactgtaggcatgcaccaccatacctggctaatttttgtattttttgtagagatggggttttgccatattgcccaggctggcctccaactcctggtcttaagcaattcttccacgtcagcctcccatagtgctggtattgcaggcatgagccactgtgcccagacagaaaagttttctaaactagaaaataaactcatttatttattcaacaaacacaatcaactacattcactgttgaattatactcaatacgaattaactcactgaaatcaactaaaacaatccccttctgaatttttgttgataaaatagatacctgaagcatatgataagggaaagagagctagtcttggaatccagtcctacctctac

SEQ ID NO: 124351 - DNA, 487 bp, Homo sapiens
tgcaaatcacttagaggttttgttaaatacatacggtaggtaaccaaaatacatatggtgactatatttctatgtaccagtgtttcttttttctagtttccaaccagacatttccatataggaatcatctaaaactcttcacttccatccttttaaaataattttcccttatttgactcccaggtcttaaatctgctgatacaaaagcagattgggggtgggggagagctgaaataaacaagtgagatgtgtattttacttagaagtctataatttgcatttctttctttttccaaaatacagacaactgtgaagagataagcaaataaatccctgagggagtatgaatacaagcaatgaaaaagaaggctgggatcaggtgtctgtgaagcaaattacacctgaactccataaacttgccatctgtccaaattgaacaacttgtccggaactactgagaaaatttctgaagcacaggttgattgat

SEQ ID NO: 124352 - DNA, 408 bp, Homo sapiens
tgagactctgcaaaattatcatgccgtccttgggctcccggcttttattgcttctcccctcgctcattatgaaatgattagttgtctccgatgcccttttgaattgctgctaacgttgtactgcggttctgttaccctggttctgaataggagagtcttggttcagggttaagttaatgtagtcattactggcccatttggggacccattcatcatgctaatttcatgtccaacacttgggggaatagagtacaaatactcaacgtgaagcaaatgcacagtgaatccaaaagacgcacatgaaatgtccagaactcagtcacagaagacaggcatggggagctctggggccattactttccataactgtgggagcaatgcagacatcagagagggcctccaatgggg

SEQ ID NO: 124353 - DNA, 634 bp, Homo sapiens
ttccattcatttctgcttccatgatctctgctcacactgccccccatactggcttttccctttcttcaacttccacaacaggccttttctgaattgatacaaacacattcacacaggtaccacaatgtgtgtcatctcaaaagcagaactgagctggtttgtctttttgtctttttgtctactgaagcaacacactacaacagctaaacagattttacaccaaatctgaagggctttcttctgtgtgtgacacaacacacataacaaaaatttgccatgattctgtttaaatggacagtttagttactgttaagcacattcacactgttgtgcaaccaatctccaggactattttcaccttgtaaaaccaaaattctataccaattaaacaactctcattcctcccgcacccctgctccctactcctggcaaccactcttctatcttatttctatgaatttgactactctaggtacttcataagagtagaatcatacactacagtctgtgtcaattaatgatagggataccttccaagaaatgcatcgttaggtgatttcatcattttgcgaacattgtagagcatatttacacaaacctagatggtggagcctgctacacaccgaggctatat

SEQ ID NO: 124354 - DNA, 503 bp, Homo sapiens
tttaggtatttccaattaatgcattttgaatgaaggacctagatgatcgcagtcagagagaatggttaagaggtggttcctgttctcagaatctgaaacttcccaagggttaattttatgttcagtgttttgggagattttcttgtgctttaaaaggaactaaagggactttgaagttagttacattgccttgcataatctgcaagataaagtatatccagggaggagataactgtgggctctgaaaagaatgaaagtgaggctgatactttacaagccattcagaattggtgaataggttttcagtggttgttcttaaaacttccagggcatacacaccaatttcaaaaggaacttaaagaactatgaatagttgtgcctttctgttttacgggctaagcctgtatacttatgaaatttgagtatagttttagttggcaaaacacttgagtttaaaatgctacccagtgtgtcactttttttggtaacatgtatttggcgct

SEQ ID NO: 124355 - DNA, 335 bp, Homo sapiens
tgactgcaggccaagcctggctgagaagcatttgggtacagaggggcttttggggaatgatcaggggtgatcaggagcaccagctcctacagattgtttgacacatgccacaagccttgaaatggaaaaggaacacacatatgtcatatcacctctcaacatttcactgaaggagattttcccctaaatagaaagatatggagaaagagtactgagaataatgggctggataagtgggacaatccttgcccttactgaccttcctgaagtgtcgctgaaataggtggacttagaactgaatggaatctactctaagttatttagcaaacctcttc

SEQ ID NO: 124356 - DNA, 766 bp, Homo sapiens
acgggcagtgtggatggcatgcagtgggatggtgaaggatggggccagaggaaggaaggacatgcccgcccagctgtgtttgggatgctgcctccctggagaggggtcatgaagcctagcaggcagtggagcccaggtaatggtggaccttgaggggaacgccagtgggaaacttagacccatgaactccagactgtacattgaggccatcagtttcaaatgtttactttttggtatttgctattccaagctgaacacagggaggtgggtgagttggaagcttgtttgtgcttggaagcttgtttgtgctggatgtactttagcaggacttccccggactacagggggcttctgagccactgggctccccagagtgatgagagacctgctgtgtagactactcctgaaagactttcatgaaggcacaaaagcaacaggtttgctgagtggtgctgcccgtgccccataaggagaacggtgtatactgtttccacacgatgcagcaagccaagctccaggctgcacacttggggtctttaaaggatgcctcattagagtaaaatgggacttacttttttttttataactcaattttattctgagcccctgttatgctaggtggcagaaatgtcatctcaggcaatgttgggggcctgcccctttcctcagggcttgctatcgaggaagtcatcgagggcttgcgatcaaggcctggggtcccacctgtcctcacagcttgctgctgggacacctgctcctccgtgcc

SEQ ID NO: 124357 - DNA, 470 bp, Homo sapiens
gtggtcacacggtttgctggtgtctcttcatccatccttttcatttctaatcatccattacactccattcaagtgtccctgtgggatgtggctttttctgttgtaattagcctgcaacgccttactcccccttctctcccccagtttatcacttaggcaaattctgtacagtgtttgatttgcggggcagtaattgaccattttctttcaaggagtgcttccttttgaagatggaacatcagcttcagctttttctgtgtagacattggctcagacttgctatgagctcatggtgttcggtggcctgggttggggaggccagtctggtgtgagggttttaatgcatacccactctggcatccagaggtgccagtcaggagaggaacagctagagaactgtagagagacggatggtctattaatacctccaaatcttcaaggaacacaaatgagaagttaagataaaagca

SEQ ID NO: 124358 - DNA, 402 bp, Homo sapiens
caacaataggggagtctctaagctgaccagtcaggcatcagcttggcgactgggctgtctgtgtacaacgtcatagtgtgaaaatccgtggctttttcagaaagcaagctatttttttctcttattacagctactaaattttgagttattctcacctttattcattttttaaaatgtgggcctgcaaaagtatatctagtactataacaatatcttttttcctctaaatttttattttttaatttttgtgggtacatagtaggtttatatatttattgggagtataacaaccccttaatagggagaaacaacatttgaggggagggaaaatatgtatacaataaacagagtggggtcacatgataacattctaggcattttgtcagaggtggacctaaaatt

SEQ ID NO: 124359 - DNA, 450 bp, Homo sapiens
gctgaggtaccatctctgtcattgtaactacgccaaaggcagatggatgagagaagggacctgcccttaggctgaaagatttgttatgttggtagctggtggtgttgtctggaacttatgaattgtattttccttgtagctttttcagaaagcaagctatttttttctcttattacagctactaaattttgagttattctcacctttattcattttttaaaatgtgggcctgcaaaagtatatctagtactataacaatatcttttttcctctaaatttttattttttaatttttgtgggtacatagtaggtttatatatttattgggagtataacaaccccttaatagggagaaacaacatttgaggggagggaaaatatgtatacaataaacagagtggggtcacatgataacattctaggcattttgtcagaggtggacctaaaatt

SEQ ID NO: 124360 - DNA, 290 bp, Homo sapiens
ctgggctaggcgcgccacccgtgcaagtccccggggagcggcggtgcaccctccgtcccgcgcgctcgcagccattgtagggtgggcgctcgccaggcagggtgccgacacgccctctccgcgctgcgacgggcggccgggggaggagagggtgcgctgtgcgcaccggagggagaggctccggcccagtgccgcctgcccgccagcagaccagcaggctcctctttgcggcgggtgccccacgcgcctctcgggcgcgcgctcccagccccgcccgcgtgcggcggccg

SEQ ID NO: 124361 - DNA, 405 bp, Homo sapiens
gttgggcaggatggtcttgatctcctgacctcatgatccacctgcctcggcctcccaaagtgctggggttacaggcgtgagtcaccgcacccagccagcttaaggatttttgaaagaagcctctgactctcttagccttccttgcccaccccctgtgcattgtcctacactcccgaagagttacaatctattttacaacccttacagtaaaagagtgcatatgctgtcagaaaatgggattggaagttttattctgtagggatattttaggtttctgcggacactaatgctctttttccttcctaaaaatagtgcagggtttgaggtcttatagcacctacataaattctaccagggatctaagggaacagcttcaaactcagcacctgagaccccgtctccaca

SEQ ID NO: 124362 - DNA, 433 bp, Homo sapiens
acctgtggattcccagactcttctaaaccagtgactgaggggttcatctttggcccatcttggacctctaagacactctccagcctatagctatattcatttggattggtcagttcccaagccaaactagttgttaatattttttatatcacctttatttaactcaaaggatttatattttgatggtgtcatttaagacacagtgtgacaaacttaggggtaaagtgagctaaaatgataggataattgagcttccattcctatgcaagaattgatgactttagtttcatagaaaagctggaaaatacttaaattttcctccagaaagccattttttttctgggaagaaacatatactcttataacgaacattaatgaacattatttaggaaattcacatcagagaaaaatttttattaaaaaaacagctgtt

SEQ ID NO: 124363 - DNA, 251 bp, Homo sapiens
cagctttcaggatgagaactaaagagccctaaaggtctctcatgtaggaagagggtggtgtgtagtggcagagagggaagcttcatcagtgagagccaagtgctaaaagcagctgcgtgtgacatttccgtcagcagtccttcctccctcattgtgtatgagacacacatcagatgctctggtttatgatttcagcttcagagtacataccctttgagatccaagctcacatatctcttccggtggcatgg

SEQ ID NO: 124364 - DNA, 485 bp, Homo sapiens
gttcgccaggatagtctccatctcttgacctcgtgatctgcctgcctcagcctcccagtgctgggattacaggcgtgagccaccgcgcctggccaaaatatataaccttaagtgtaagtttactaactttggaaagtacatacaccagcataaaccaaccccctttcaagatctacattattttatttatttatttatttatttatttatttatttattttgagacagtttctcccttgttgcccaggctggagtgcaatggggcaatatcagctcaccgcaacctctgcttcccaggagaatcacttgaacctgggaggcggaggttgcagttagctgagcattgtgccactgcactccagcctgggcaacagggcaggactccatctcaaataaatcaagtgtgaaggatgaaagctgctatggcaaacatccttagcctgcaatcctgtggaatacttcccaaattcacatttaaaataccc

SEQ ID NO: 124365 - DNA, 257 bp, Homo sapiens
aagaaatcagtattttgagcaagctccccagatgttgatgatgcacattcaagtttgagatctattagatagacagaaaggagcccatgggagcttttgctgaagggagtgatgtgataatagcagtatctttggaagctcaatagggtgggacagtgtaggatgtagaaactagagtaaggaaaccagttaggtgactgttaaagtagttcagatatgaacttcacaaattcagattttctttctggctggtaccc

SEQ ID NO: 124366 - DNA, 280 bp, Homo sapiens
cagctcgtatatggtctcagctcaacgatggtcctcagctcaacgatggtcctcagctcaacgatggtcctcagctcaacgatggtcctcagctcaaccatggcccctgcagctgttgtgagagatggtttctagacctttcaccatcctgcttgcttctgctggaagggcctccatttgtcaagctgagattctgtgagaatccagccaacttctgtcctaacttacttcacacagaggcagcttttgaagatagatgtgagggtagctgagccggctg

SEQ ID NO: 124367 - DNA, 517 bp, Homo sapiens
tgcaggttgtcagtaagcagtgccttggtagcaggctgaagggcggccatgagcactcgaatggggcccatttgcccagttcacagatggggagacaggacaggtgggccagagtcacacagttaatcagagccactggaagactttctagcatgagggtcccggccaagctgccctcaccatgaattatgctgcagggtggggggcatctccccagagtccccagcagcaccccatcacacccagcccaagccagcagcaagctgcttgtgatgaggatactgccctggcccctcctaagaccccaccatgtggccattaaggatcatgtctaataggagcactgaatgactctgaagcctcctcgtgacttagtccaaaagagaagaaaagaaaattataaggtgaccagaaagaaacatactagaatgatgaccaggatgacctctgggtgggaggactacagggcagttttatttttcttccttcacttttctgacttccagacttctgcagc

SEQ ID NO: 124368 - DNA, 521 bp, Homo sapiens
gattactctgggtacctcatttaagtgaagtcatgcagtattggtctttttgtacttgttttatttcacttcacattgtgtcttcaagtttcacccatgttgtagcatgtgtcagaatttcttccctttttagactaaataatattctattgtttatacgaacattcaggttacttctatcttttggctattgtgaattatgctgctgtgaacatgggtgtacaagtatctctttgaggccctgctttcaattctcttgggtatattcccagaagtggaattgctggatcatatggtaattctattttgaattttttgaggaactgatatattgctttccatagagactgcaccattttacattcccatcaacagtttgcaggagttactatttctccatatcccccctaacacttgctattttctgttaaaaatggatatcttaataatcaagcaaaaataacaggcagatttgaaaaagaactgaatacagcttttagaaataaaaactataattataa

SEQ ID NO: 124369 - DNA, 172 bp, Homo sapiens
gaggctggggtaattctgtccagcccctctgtggatggagtaggagtccctttgcgtcccctacttcacctgacacctgccaggagagtctccatgcctatcttctttcctcttcttggattttacagtaggcaagtgccaggtgtgtaggctaggaagagtagggagctcg

SEQ ID NO: 124370 - DNA, 126 bp, Homo sapiens
aaaaattgcactaaaataattagaaggaggcttgtagtggtttaacttgaagaaggctgcttgttaaacatgaacagcagcacgactgccatgtacagtgggacaggtggtgcactgcacaactcc

SEQ ID NO: 124371 - DNA, 348 bp, Homo sapiens
cttcctctccaacacccttctgaatatatatcatttgttctttcttttcaaactacatttctcatcattatgaaaattacaaaagttaaagcatgctatgaaaactttccaaatagctcattaaatgactctagtaatctaccctccattttctttttacctcacttgcatgcccatttggccccacaaatttgaatatactcaattgcatatttaaactggctattccattatcacccctagattataataatctttcttgaagttaatgtataactttacaacatggcaagatgctgaatgactacaggtgaatagcttcatatacatgcatatgaatttaacatg

SEQ ID NO: 124372 - DNA, 216 bp, Homo sapiens
ccttctcctctactctcactcacaagggccggctcagcccccttttggggttttggttgtaaggacagagtggctgggggagtggcagctccacgcaagaggaccccacatccatttctggcctagtgctgccacccctcactgctgactccagtacaacctcctccccacacagataatcgtatctcaaagcacaagtttccaatcacacagcaa

SEQ ID NO: 124373 - DNA, 687 bp, Homo sapiens
cttcggaggatccaccttatgttctgacccaccggatttcaaatccttcctgcttaaggactcagaaacaagtcagcgtctggccaacctcaggcaacgggtggagcagtttgccagggccttccccatgcctggttttgatgagcattgaaggcacctgggaaatgaggcccacagactcaaagttactctccttccccctactctgggccagtgaaatagaaagcctttctattttttggtgcgggagggaagacctctcacttagggcaagagccaggtatagtctcccttcccagaatttgtaactgagaagatcttttctttttcctttttttggtaacaagacttagaaggagggcccaggcactttctgtttgaacccctgtcatgatcacagtgtcagagacgcgtcctcgttctggggctgtgaagtagctgagatggtccatgtcctcaaggagctttacagcatagttggggagtaagacaaatgcacattaatctccttagagtttgctaagtgctatgacaagggtttttgctgggtgctgtgggtaaactgtaggaagaaaaattagctctgcccaggacttcgggggatgtttcttggaggagacaacatccaaagttgaatcatgtagagtgagtcgagttagcctggttaaagaagggtggggaagaacc

SEQ ID NO: 124374 - DNA, 353 bp, Homo sapiens
aacttggtggagaaatggctgattcgaggtctggacaggaaataagcaagtgatctggaacatgtcaaaccaaatactaaagaggctatcaaagttattaggatcatttcaaaagaacttgagtcaccttgaagaagctcctgatggccagagatggaacaaattgcacattaataagggtaaacattgtaatggagctgatctattgtttcataaggatacttaaagaaatactaacttatcactgttggataatattagtaacttaactcatcacttgcaatctggtaagtaaagagtgagaaagaagtattttatgccacttaaaaaatattaaaaatgggatacccagg

SEQ ID NO: 124375 - DNA, 200 bp, Homo sapiens
cagctcctgcctccgacgggctgtccaggcccaaaacttcctcaagtcgcctcttcaggcacagctcctgcctaacactggcctctttaggcacagctcatgcctctcagtggcctctccaggcccagctcccgcatcccggtggcttctccagactgagaactttctcaagtctgccatttcagcccaaactcctgcct

SEQ ID NO: 124376 - DNA, 656 bp, Homo sapiens
ctttaaatgtaccttaaaaatcatcatttcaagctgtagttcttgtagcattgtgcacaagatgctttatatgtctttatagattctttgtgtatgttcagcaccttgagataaaagattaggtcccctattgagtatttccacacctctctgtactttccttattattatacttatcataccttatgattactttgtttagttatctttcctgctaaactgaattccgtgagaaacaacattatgtatccatttttgccattgttgtttcagcacctagcaaaggacctggcaccatagggagccctcaatccatgtttctcaatttcagagtaataaatgctatgaaaataatataactgggtaatataataagagtaattgggaaatttccttagattggagctcagggaaggccccttctaatacctgaatgacaaaaatgagctatctgttcaaatacacctggagtgtttctgctgagagtgttttaggaagagcaaagacactcgagtaggaacaagttgagcacgtttaagggttcatgcctggctgggaggaaagaagtaatagcagaggagttttagggagaaaagggctaaataatgaacggttttgtaagtcagagagagtttgaattttattttaattgcatt

SEQ ID NO: 124377 - DNA, 317 bp, Homo sapiens
gattataggagcacaccactgcgcccagctgaggtgcccacatttctatctccacctcactcttttcagactttggtcttgtatatacaatacatttccatgtatatgtcttataaacatctctaatgtaacacattgtcagtgtaacacttgatttcccccaccaaactatttcttccctcttttacttgctgactcctctgttcacccaggtgctcaaaccagacaacccggctcccacccactgaacgtggagaagtggggcaagtgccaagagtcacctttgatccctctctgtctgttagtcacttttcacc

SEQ ID NO: 124378 - DNA, 278 bp, Homo sapiens
aaaatttccacttgtgtccttgttttacacctctcctactatcatcacgtttccctgcagacctcttaaataaggtctgagacatgtagtcctttccgttgtattctcattattcaagcaccccactgatgtggtggtaatgcgtgaagggaggggaagcattctatgatcttatgattaggtttcagtcttagtgagcctgtgcccctgggctgcgaccttcacaggtgcttctcagttgttgattttcagtttgctaaggttttttgttgtgagac

SEQ ID NO: 124379 - DNA, 628 bp, Homo sapiens
gtggtgtaactaggaaggtgatgtgatgggtaatgctctttttcccagcctgttctactagtgggagaatacaatcagtttataatgcataataaccaggtgtcttttgggtattcctaaatattcaaccttttggagttacacctcctataattttcaaatagaatgctttgaatgacgatcccagtcttcctccagtatctccatggattatcaagagtgtacctccagccatctctgcttcaatggtttgcttctgctgaattctcaatttctatttcagtctcctcatctatgacagacagtgatccttcccaggtagcactttgcctctggttgggtgttggcataccctctaggtgccataaagtagagctatgtatccacctttactgaaggtttccacacttcaggagaaaattagaatacagcaatgctcagcactactgtaaacctatattttgaatatgactatttccaaaatctaaggcaaaaacattagatgctttgcagctttatccagcttcctagcctctctgctgtatgtcaaggtccaccttctctcatttgtaggagagagcacctttcataaaagtttcatagggccaatttcccccttactttaaga

SEQ ID NO: 124380 - DNA, 587 bp, Homo sapiens
agggcttccaggcccctccaagcctggggaaggacgtggcatccaagctgagccagagggaactgctgctgtcctcccttcatttctgtggaccttggaggctttggctttgtggcagggcctccccaggcagctctgggacctaggagtttgcttctgatagggtcagctttcccatttcccttcaatgcttgggaaccttctcccttagcttcacacttgccgtttcaagccctgctgggaccttgtggcttggctggaatccaggactgtattttcatggagaagaacctgcagattcttccatcctcagctggccatggcccacagctctgcatctgcatctgagcttctcaagactcctggagcatgaggggaatggggcggggccactgctctgtgctgacgggctccgtctcggagattcttgtcctgttttttttctgttgtttttttttggctggtgctggggacaagcctgtgcctgccaaagctcccaggccaagtttgggggctggtgtttggggttgggtttggggttcaggatgctgcagtctgtgcaataataaacccgcatctgctcacgg

SEQ ID NO: 124381 - DNA, 657 bp, Homo sapiens
ccagagaggcaaccatcaggaaccgctgcatgtcagatggtcagccggagggccagacagagctgaggaaggggctggaggagcctcacacttgtgggagacccactgctccagggaccaggccagcagaggtggacgtcctctctccagcctccgacaagggaggactccagtcgtttctattggatccagcccacgcagaagccagagctgagttgagcaatgaaactgatacttcctttgcagagaggagcttctatttaaattatgaagaaaaagactcagaagaccaagtcctccctccacccctggaggagagaaaagggcgcctggatgcccctcccggaggtgagcccaggccgacgctgaattccttagacctgagggtttctgctgctgcttccagcaggagcaaggacgaagcccacatgacttccccaaaggaaggggcagggacccccaagaaccatggaggacctggtgacctgaagggatctcccgcaggacagacgtttgctgaaggctgggaagatgcccagtggggagtggaaggagagtttccccacctgacagccagcgcagcccgagaggaagggacccccgtgagtggagatttgctgggaaaggctgaggaaagtcccacagaggaactgaaga

SEQ ID NO: 124382 - DNA, 338 bp, Homo sapiens
tatatggacaaatatctctggaagaaaacacaaagaagacactggttaccccgggcgaagcgaactgaaggctaagatgagagtgagaagacttaataccctataactttaggaaccttttgaattttaaaccatgcaaatgtagtccccataagtaccaccaacataaaaaataacaacccaaaaatgaaccttaaattcaatctatttgcagatgtaagcatatatgttagtacaaactgcaccatgttgtaagctccctgctattttgcagacctttgtcgaagtgaaacatttcacaggggttcaggccatgagaagtatcctgcctaaccacc

SEQ ID NO: 124383 - DNA, 661 bp, Homo sapiens
gaactttgaaactattcaactgatagctctctagtttggttcttgccagacctggtggagtgtcacactatgcataagcatgtgtgggaccagggaacagagcatgaaggggaccagtttgcattttcttcagcatagcttcattcactttgaaattgtatctcagaactttcatctacctccgcattcttgaatgccagtttgtccctccagcttctcaattcagctagatagctacttggaattctgctctatgctctgtagtttggaatgtgcctctggggcaatcctggttctcttgttctctttcttactggggtcaaaggctcttgctgcctgttcaatgtctgaaaaaatgtgtttaatacattttgttcagttttctagttgttaaaagcaagagggcagattcactctttgttcctccctcatgggcagaagttatttattcatttatttacttagagtaatatttttaaatgtatgaaataaaatgtatagaaaaaattgttttgaaataattgtaataacattttcataactacaaaatggttttatatatgtttaatgcattcaataataaaacctagtatgggggcctaataatacctctaattctctttgaagtctttacctgactccagattaggaactgctacct

SEQ ID NO: 124384 - DNA, 114 bp, Homo sapiens
cacagtctcgtcctgtgctggaggcagagtgcacccagggatcttatgcccctattgcaggggtgaggggcccaggacagcatgagccgggagaatggccaagggctagtggca

SEQ ID NO: 124385 - DNA, 347 bp, Homo sapiens
ggacagggtatatggcctcagcagaccccattggggatgtccagaataaattcagggggacaatctgcaggaagttccttcagatcaacactgaaggttaagtgactaggatctggggcaggtctgctccaccgccttttggatgctgcatcgctctgcctcagggccagtcaacggggaactactgatgctcagggcaagacagtttttttctgtggccagtgctgctgtcctggtgcagtacccctgacctctacccactagcagcaccactacccacctcctaggctgtgacaaccaagaacgtttccagatgttgccaaatgtcctctgaggggtcaatggtc

SEQ ID NO: 124386 - DNA, 154 bp, Homo sapiens
ttgcttggctcttggtagtgggaagtgcaggggtttcggctttaggtgtggctagatcgagggctcatgcagtattttcatctcatctctcagttctgtttttctctggggttggcgtcaggcagcctctgcacagccaaagaaacggtccatg

SEQ ID NO: 124387 - DNA, 447 bp, Homo sapiens
tgggtagaaaagaaagaaatctctttgagataagaaattagaatgcaaagggtagatcttaagcaatctgagaattgtacatgtacataaagctgcaccctctcacaagagaaaggttattttatcttctgaaaaagcatagaaatgcatcttttatgggaagataatgatgctaccatttaataagagcctacccttaaaggcagcattgaaactgtattttgtctttagaagacatagactggtgcatcctccgctttagttagacaacagcatgataaggaaaaaactgtcttctaaagccatctttagggactggctgtgctctgtggcatagaaaaggtaaagttgaattagccaaaaatccttagggaaacaactggtaataaggttttcagtggacagattttgtcattactaaataggcagtgaggtgagaagtacaga

SEQ ID NO: 124388 - DNA, 229 bp, Homo sapiens
tttgcacatggcatccttctatctgtaacatcctccctgcgtcttcgctcccctgggcaaagataactcctactaaagcctcagatgtgacctcctacaaaatcccagagttgtccagctgcttgaagtattgagcctttgagctttgggagaagttaaaccattgtgctcctaagacggtaagaagcgtcagaaaaccaggctctgaacctctgctgtcttttttttt

SEQ ID NO: 124389 - DNA, 740 bp, Homo sapiens
aactcctggcctcaagtgatctgcccagcttggcctcccaaaagtgctgggattacaggcgtgaaccactgcgcctgacctgtagaaaggttttaaactataatttcaatgtctttaatagttatagggctattcaagttatccttttcttcttgagtgagctttggtaattggtgtctttcaagaaatatgtccgtttcatctaagttgttgaatttagtgccataatcttgcttatagttttcccttattatccttttaatgtctgtaaaatctgtattgatttcatctctttaattcctaatattgttaagttgtgtcttcattttttttctgtccagtctagctagaagtttgtcaatttcatacaccatcccacaaaagcagctttgggctcactgattttctctattgtttttctgttttctgtttcattgatttcagattttacccttattagtccttctcctctcttctgcttaatttgtatttaattttctcttaattttcttgtttcttaagtagttgaatttattaattcaaggcattttctttttcctaatataggtgttctgtgcggcatctcaccaattctgatgtgggtgtgtgtttttattttcatttagttcaaaagactaatatcccttttcatttctcctttattccatagcttatttagaagtgtgttatttggtctccaaatatttggggatttgtcaagcatctttctgttattaatg

SEQ ID NO: 124390 - DNA, 291 bp, Homo sapiens
ggtatctccctatgttgcccaggctggtctcaaactcctgagcttgagtgatcctcccgcctcagatcactgtttttacatgagtaatatgctttttaaaaataagcctcatacacgtatgcttctagtacaacataggttgtacaataagattatgtcctctcccatagcattggcattaagcgcttaacttctggagtcatgcaaatttttttctttacttagtggctgtgtgaccttggataatttatccatctgtacctgggatgcccctatgggtaatgtagggaa

SEQ ID NO: 124391 - DNA, 325 bp, Homo sapiens
ctctggggtgacccctaagttgtcatctttactcttgatttctgtaatcttttctaagaatttaggtgttacatcacttcaaactcagtatgcctgaaagttccagaatcttgcagtcttcttgtcttctggccttgaatcttggcattattttttagttattcttctttatctgctatttagacttcaactcctatggattattttctctaaaatgtgtttaatacctattctttatttgttattttgactggtacttccacctgagcctatttttatttatttatttttgagacagggtcttgctctgtcactccagctggag

SEQ ID NO: 124392 - DNA, 410 bp, Homo sapiens
acagtcagtgaaggagatatgacacaaatacaaatcattctaggcccagggaatagcaaatgccaagtctctgaggttggagcatgcctgcggtatttacatttgaagaagcttgtcattggagttgagtaaaggactgggtaatataggatgaagtcagaaaggtaatgatggcactggtgatgggctggttgtgctgccaggtcaagcaaggtcttatagaccattttaaggacttcagcttttagactaagtgatacgtggtatagaaagacattggatgagttggaacagaatagtgacatgattggacttttaaagagtcagtctggcaactgttgagagtaggctaaaggagaacaagggcagaagcagtgaaaccacctaggagactgttgcagtaattcagg

SEQ ID NO: 124393 - DNA, 277 bp, Homo sapiens
cttggggcattggaaccatgcctgtggctttgtcctctacctccttgggatcaggcacctgttgtgctaggagagctgaagtgttcccaggctgtggggaaagcactccagcagggccactggcaagactgtcaggccaatcagtggaggctgtgctgtgtgaacacagttgcagaatcagccaggcaagagccttgtagggattgtggacaggaagacatgcagaacagatgtgtccagagagccttgggggaatgggtgcctatggccacatttt

SEQ ID NO: 124394 - DNA, 552 bp, Homo sapiens
gtagctcgcatttccaaacaaagttcttttcaatttctagggaaaacataaaaaaatggagcctcaaaactttccaagagcccagtggaagtgataaaaattcaaagcaaaaagtccaaatgttagtataaaaagattctagaaagcacggggatacttgtaagagtagagttggactctgtgttcccacccatactctaaccaaaaagagtcctaaaaaaaaagaatagcttgacaaagttaaaaagaaatttgagttctctccattacagctgctatgcaaaccaatagacctgcagagtaactgtcttagcaattcagtaactccaaagtttaatatagatggtagttgctttcaacaactgcagatataaattgtgtgtgatggtacacaccaatagtcccagatactcaggaggctgaggcgggaagatcacttgagcccaggagtttcgaggccaacctgggtacctatctcttaaaaaaaaaaaaaaaaaaaaaaaaaaaaaaaaccctgaaaaaaataatttttaaaattcattttccaattaa

SEQ ID NO: 124395 - DNA, 365 bp, Homo sapiens
gttatattttatacttcggaagatacaagaagggatttggaaaacttttgttctgtatttaactttgactaatgaggataaacttcctgatgacataaaacagtaaatacttattgatgatataaaacaataaaaacatgtgattctttaattacagttattggcacagagtagtttaagtgacattagtcattgtcgttgttataaccagtattagtatcgctagtatttgtagtagtagcattgatgcatttatacatcatttcttcaccagtggagtaaattaggcagatacatagatgtcaaataagttataggtctctctcagctttattccaagtgtcacaactctgtgacatacatat

SEQ ID NO: 124396 - DNA, 230 bp, Homo sapiens
cctctctaatgtcaggatatgtttacagccagcatgatttccatatacattcctccttcacttcccactggtaatgaaagcgtacctttcctccctccttgaactaggcaattcttactctgctataaagaaatacttgaggccaggagcactggctcaggcctgtaatcccagcactttgggaggccgaggcaggtggatcacgaggtcaagagatcgagaccatcctg

SEQ ID NO: 124397 - DNA, 389 bp, Homo sapiens
cagcttctagcatcctctgtcacttacttatggatcatgtggattgtctgccccttcctcttcgaatgcaagctccccaggggcaagacttggttggtttttctcactgccacattcctggaatgttcaaggcataccaataggtatgtgttgaatgattgaatgggtgggtgcatgaatgaattaatgaatgaacttgtggcactcaaatacttctgccatttgccagctggggtttgccagggtagcattttttatacgaaaaaaaggagggctgggtgtggtggttcacacctgtaatcccagagctttgagaggctgaagtgggaggatcgcttgaggtcagagttcaagaccagccaaggcaatctagtgagacccccatctct

SEQ ID NO: 124398 - DNA, 480 bp, Homo sapiens
cttagaagctgcctcagaatccaggtccctctaatattgtcttcttcccccaaccccgcttcgtgcccaagcacaagaagggattctctgggattttctgggattttcttatttcaccatgaaatcttatttccaaaatgaacaagattgccttcttcctctccctgaagtccccctgtctctttcagaaaagaagactgaggaatgcaactagaatggatttttcacaagagaatgcctgcttttctggctcattcgaattccaaagacaatcatttacaagttaatttctgtccatttcttctccttaagaatcatttgctgtctctgagaagcattgtccacattccccattctcccctctcccctgtgaaaaaggatataagcttctgtacctcattgggttattgggtaatcattctcctgagaatcacctgtgctatgcatgttaaaataaaattgtgcaagccttctctgcta

SEQ ID NO: 124399 - DNA, 580 bp, Homo sapiens
  misc_feature (357)..(357): n is a, c, g, or t
taggtggtggtagatctggatgtgatgtgttagtctgagtctcaggttaagtccctgggatggatgtgtcgagatgagattgtgtgtatgaagtgactttgggtgtagtagggcatgtctgtgcatcgtggggttatacgcagtgtatagctcagacacttctagcgtgctctcagactaagacgttggtgattatgaaactaagaaaacctagtttttcagagaccagatctttgtatgtctggaaagttatattgtatgatggagacactgtccatgatatttatgtgggacaggcctggtgtgtcatggtgataatgttcagtttgtctcccaaaatatacgtgacatgtccgnataacactatacaactgttgttgattcctgtgttggcttgcccctaagttcagagcccaggcctggcctctgacacttagggcaacgaaaataacacattttccaagcctcaatgttttcactgacatatacacatttacaatcttaaggtgaactcagccataagggaaaataggagcagtgcctttttccttttttgtaaactgtgtcagaaatccaagcg

SEQ ID NO: 124400 - DNA, 867 bp, Homo sapiens
gaaaacaatggctccacgagaccctcaagtgccagagctcatgagtgacagtgggaagttgaactaaccttttaaccaccctagtccacacctgtcaggctgacgggctttcagtggtgatgtgttgggagctctgtgccgcagatctctgtgtgctcctgagactctgcccgcctgtctctaccctgctgtgcccactaggaggaggctgacctttatgttctacaccagtgggtgcccttggtctccagcttccagtgggccagtctggcgagagaccctagctggagatgaggggaggtagccttggcctctctccttgcccttcctcgctgctgctaccccaggattcttgcccatcccttactggttttccttaaccccaccctcacccttgaaaacagactctttaaaactctcctcactcaccctcattgagtgtgtcatctgctccagctaggatattggctaataccgcatgtttcagaaagaaaaattcgcagttctatttatttttttactgtggattgaagggagaggcaaccaggtatatggatgaaggagtagggcctggctgtcaccactggtgttcacaaaaggctcccgtttaagtcctcttatattccaaatgaggggttataggtcgagtcagggcgttgctctaacagaagcaaaaccaaaaatacacggccgtagatacaaccctgttctggtacttcctaattttgtgtgtacatgtgtgcacctggagcttcaagaaatgaaaatggaaatggcctgagtgtttctcagccctaggatgaggctgtttctgtgatttagggctggaggttatgaagacttggtttacaatatgcacagtacaga

SEQ ID NO: 124401 - DNA, 205 bp, Homo sapiens
tgctgggattacacgtgtgagccaccgtgcccggccgcgttatcttaagctttacagcaaccctaggaaggaggttattattatattcactttacaaatgaagtgactgaggcacagagaaattaagttactatttcaaggtcatatagtaagtggcagagattaacttgaactcagatatgtccaactctaagctgttacatta

SEQ ID NO: 124402 - DNA, 435 bp, Homo sapiens
attttcagatttatccatgttgtatatatcagtagtttgttccttttattgctaagtagtattccattatatagatataccacaagtattttataaccatatgctattattttgcttgagcaaatgtctggaagtggaatggctaagtcatgtgataggtgtatgttcaactttttgaaaactgccaaactgttttccaaactggttgtgccattgtacatcctacaagtagtgcataaactatcctgttaactccatatccttgttaacacttcgtgtggtcactttctaattttagccattctaatagtttgcagtgttactttgtggttttgatttacatttaattaataatgatgttgagcattgtttcatgtgcttatttgtcatccgtatatattctttggtgcagtatatattcaactctttttatcc

SEQ ID NO: 124403 - DNA, 788 bp, Homo sapiens
atccccaggattctaaacccctggaaagagttttaggcacaagattaagaggtggatggaactggaggtcatatcttaaatgaaacaagccaagcaaagaaagtcaaatatcacatattctcactcctaagtagggactaaaaaatgtgtacacatggatgtagagaatggaatgattgacagcaatatagacacacagatgacccaacatggaaaataatatattgtaaaagtcattcagttgtggggaaatgtgcagagaggattctatttggacttgttataaataagcaagattgtatcaacaatctagagagcctctgaagtgtaactaccctttcagcatttcagaagaccatacactattcccgttgatgagactatacaggatgaacaaaacagaaaaaaattgtgtcctcatggagcagactgcataaattttattcagaaaagatatgctacagaaggtgacagtgttggagtggagtgactgaaattatacatgtagccacagggataaattgatttttgaataaaattctgaatgagaagttatatgaagcaggcctggcacggtggctcatgcctgtaatcccagcactttgggaggctgaggaggacgcatcacctgaagtcaggaatttgagaccagcctgaccaacatggagaaaccccatctcaactaaaaatacaaaattagcctggtgtggtggcgcatccctgtaatcccagctactcacgaggctgagccaggagaatcacttgaacccaggacacggcagttttgg

SEQ ID NO: 124404 - DNA, 242 bp, Homo sapiens
tatttaatgtaactttgctttctttaaaccataaccactatttctctgcatctagtgccttcctcacgctctttgatgtttgcctccctttcagtcacatttcagaacacttcctaatgagagtcattttctaattggagcacttgatatctcgaagtactaaggcagagattcttcccatgtcttcagccactttccagacttctaggttagaaaggtggtgcgtgtagcactgggaacag

SEQ ID NO: 124405 - DNA, 335 bp, Homo sapiens
agaaaatccatgagataatagaaatactatttctattcccatttacaatttggtaaactgaaagaaacaaggatatgaagttacctgcccaaagtaggatgcttataatggttccaaaaatagtgctacatattggagatataaccatggtaagtggggtccagtaaaggaggtgaccagggatcctgccctaactgagttccaccacatgcagggacacagatgagtaaacaggcaactgcaacacagtgtgggaagagccaaggtagggttctgtgtaatatgcaagcatggggaggcagccttttactatcccttgtgatcttgaaatgatt

SEQ ID NO: 124406 - DNA, 465 bp, Homo sapiens
tctcttcaaaatgagttatagtccaggattgcgagactgcaggtcaagcccccagtgcagcagtgctgactgaggcagctgcgctgccagtcctgccttgtctttcaactgccgtcagatgaaacagcgagtaaacagctcatcagatgctccactcttcatagaatgcaacttctaagaatactccaggtgacagaaatcccgcttccacactgcagcctccctccaggccagttctggaacacctcaagaaagcatgaacctgagcgtactactgcgcaggactggcttccctatgaaatcctcaacactccgcaaccccacagctatcaactttgtcctgcggtggctgtcaaagcaccccaccacatctgaatctaatctctttaggaaaacaaagcaaaaggccctgcaccaacatatttgaaccatgtttgtagaatgagttgctaggttccatccccc

SEQ ID NO: 124407 - DNA, 340 bp, Homo sapiens
tcagactcttagatcctggttcaaagaacatcccccagcctccttccagctgagctatttttatgtgaaaaaaaaaaatacctgcctggaagccatgccaaccttgagcacactggaaaaatgggtgccaagcctgacccaaaggcagaaccacgcttggcagccatctcactctgcaaaacaggcaggaccctacaccaaccccagctccaggatctcaggggcaccctgatcccaaaaggaagctggagggaagcagtcaagtccagcacctacaaatagccagtcttaacttagtgcccggcgctgcttggtagaggtccatcagtcctgtctgctg

SEQ ID NO: 124408 - DNA, 247 bp, Homo sapiens
taattttagttaccataggtcttttgcatttccatatgtgtttcagaattttgttcctccaataattgactcctgggattttgatgaggattgcattgaatctacagatcaatatgtgatgaattcacagtttaatattgagtcttctgatccacatcctgtattattctatttatttaggacttttacattttttcttataaatgctttatagtttttagcatgcagttctaacaaatcttttctt

SEQ ID NO: 124409 - DNA, 131 bp, Homo sapiens
ggatttggcagtgatatgagatgtgccaagaaatagattttatgattgatcaaaaacagattctcatatttgtctctccgttgaggaattccccatgtataggagcatgttaaaacatctgaagactcagt

SEQ ID NO: 124410 - DNA, 266 bp, Homo sapiens
caggctgccctcttacagggatgcctccccatcctactcgggctaacatctcgtcaggccacctccatgtgtgcatggtctgatggggctcttgactccctataccaggctgtgcccccacccccatcctgctaatgtttgggcagtagaagggatctcagttttgtttttgttgtcgttgctgttttttgaaacggattcttgctctgtcacccaggcttgagtgcagtggctcaatctcggctcactgcaacctccgcctcctg

SEQ ID NO: 124411 - DNA, 361 bp, Homo sapiens
tgcagtgagccgagatcacaccactgcactccagcctggtgatagagcgagactctatctcaaaaatacaaacaaacaaaaaatgatgcaatggaaagctaagtagccattaaaaataataagatgaatatttgatgaaccaaaggatgctatgagttattgtcaggtatccaaaagttacaaattagtgaatgcagcaattctataaaaatacacctactggccaggtgcagtggctcatgcctgtaattccagcactttgggaggccaagacgggtggatcacctgaggccaggagtttgaggtcagcctggccaacatggtgaaaacaagtctctactgaaaatacaaaaattgtcca

SEQ ID NO: 124412 - DNA, 739 bp, Homo sapiens
gattgctgtggtgtgggagcagaggggggaaaaaagctgttggagagttttttccaaaacaataggagattatttagatttataaaaatagaatcaaagtagattaactgagcacattgtgaaatatagagtagagctgtgtgtaaggagtatatcttaatgtcaagctgacaccaaattgaatgtttgctggaacgttcaaaaatctaagcttcccaaatctgtgaaaacactcaggttagtaaacagtcttatgcaaacagcaagacaatgctcaaagccatttaaggaaaaagaacagtaactgaattctcttatggaaatgtgagatgttgttttagtaagtactgatggtgttatactttttgtttattcgtttgctggtatttcagttcctaaaattccttcaaatatgctgcaaaatacaaaccaagaacttggtggattttccatttgttttcctgtgggaaatgatggaattaaaaaccttgaggattagaccttgagagttaccttccagtgtttatgccaccattatacaaaattctggaggacaaaacccttcccacttaaaaaccagttagtttcagaaaatcacctcatgttaggagactgcatcattatagtatgtgtgttagctttaggtatagatctaaaatatttttaatattttaaaaacttaagcctttcttcattaatttggcctaatacaagttagaataactttaaaaatgagtac

SEQ ID NO: 124413 - DNA, 113 bp, Homo sapiens
ttcccacagagtactgttcataccactggtaaagcaagaatacaacctccttaataaggctgtgttattgggtgtcaggccacctgggtttgatgccctgaaccactcacctg

SEQ ID NO: 124414 - DNA, 602 bp, Homo sapiens
tcacgaagtcaggagatcaagaccatcctggctaatgcggtgaaacccatctctactaaaaatacaaaaaattagccaggcgtggtggcgggcgcctgtagtcccagctacttgggaggctgaggcaggagaatcgcttgaacccaggaggcagaggttgcagtgagccgagattgcgccactgcactccagcctgggtgacagagtgagaccctgtctcaaaaaataaataaataaataaaataaaagtaactcagaagggagattgtttttaaagtaggagatcctgaattctgtatttaaatactgatatgacaggagcttgaacctgggaggcagagcttgcagtgagccaagatcgctccactgcactccagcctgggtgacagagcgagactccacctcaaaaaaaaaaaaaaggattagaattaatggatagatacgacagggagtcctactttaaattgaagagaaggcttttctaaggtagtaagagacttttatgaaataaaggcagccagccatgcaaaaatctgggggataactattctgagcaggaaaacaaactggaatgacccagagaacgtaaagtgtttgcacaa

SEQ ID NO: 124415 - DNA, 357 bp, Homo sapiens
gaaagcttctctttatgctcttgcttgagccataaaacttgatacctggggccaaatgcctttatccccaagaagggtgaagaagatgaaaaggcagcagctctaggcggaagccacacaaatgactgggcagaaaatgcgggcggtggagaaagttacattgcacgattcatgcctctttgaccttatattctactctgaaattaatgttactgtttgcataggatcactggcctttcgaaacctgaattagccattcagaaaacactaggtttaaccaataccatcaatttgattgttgttgttatacttatttatttttgaggcggggtcttgctctgttgcccaggctgaagt

SEQ ID NO: 124416 - DNA, 771 bp, Homo sapiens
gaggttttcctgctccattctcagcacaaggagccttagggcttagagattttcaactggatgaaaatgcagatgcttgtgtttgtttattctaaagcttttttttgcaccttcatttctaattcttcattgataagttgcccacatactgcatttaaaattaatttctttttttgtgtttttgagacagagtttctccctccagcctgggcaacaagagtgaaactccttcttaaaaaaaaaaagaaaagaaaagacttagaataaatttgactttgtaatatgaaaaaaatttgcatgatgtaaataatgacaaaatacaaatatttgcaactcataggtaaagaggtgtaataataaagaacttctaggaattgaaaagaaaaaagttcaaggcccaatgaaaaatatgcgaaagatagcataattcattgaaaaggaaatataacccttcaatatgtgaaagaattaacaatatttatttgatttttaagggtcttactatgtcagccaggctggagtgcagtggtgcgatctcagctcactacagccttgacctcccgggctcaagcagtcctcccaactcagcctcctgagtagctgggagtataggcacacaccaccatgcttagctaatgtttaaattttttgtagaaacctatgttgtccaggctggtcttgaactcctggcctcaagcaatcctcccacctcagcctctcaaattgctgggattataggtgtgaggccctgcacctggtgaacactttatt

SEQ ID NO: 124417 - DNA, 282 bp, Homo sapiens
tattacatattgttttaagcccctttctgatagagacctagaccagaagggggcttaaaacaatatggaagaagtaattttttgttgttgttgttctgtgggttttttgggttgttgttagtctctctctatagtgaaaggcagagaacaagaatactttgtagatttgtctcacatttggtagaaggcagaaactctatgttatgtaaagttagtagaatacaagtgaggtaggcttaagtaaggtaaggcacataataattgctgagatggggaaatgac

SEQ ID NO: 124418 - DNA, 215 bp, Homo sapiens
gactcccaccttcagagtaagcagtaggtctgatagggcctaaaaatttaaaatttctaataagttcccagatgatgtgaatgatgctggtccatagaccatactttgggaatcattcattaaacttattgttttttgttttgagatgcagttgcactctgttgcctacgctggagtccagtggcacaatctcagctcactgtaacctccacata

SEQ ID NO: 124419 - DNA, 615 bp, Homo sapiens
aatcagctcatttaaccgttgaggttggaaagcgtgttactgtcccatttttacaaatgagaaagcaaaggtccagggcctttaagtaacttgccaaagatcacgccgtcaggaagcgacagaccccagatccaatagcagcacgaagcctgagccactgaatgaatggtggaaattacggttccatcttggcccaaacgtgggatgtccccagctggaccccggcccctgtgagatcccgggctcaacccccagcctcctgggactgttttcccctttaaacagtcatgggtgcctcaaacagactttgggtcagagcctgatgacttcctgggatggacaggggcccatggagatgggtgcctaggagccctgaagcaaagctctgcaacccatcccccttcaccagagtgagtagcaggaaccgggaggcaggggtgaggaactcagagtttcggttaaggccaattcaggcagcactcactggaagcagctcagagcaccaagagggcaggagcaaaagacccttgtcctggctcgtcacctccctcctcctcctcaccttccacttgccctctccttaccaccggcttctgaagactcaaagagccgact

SEQ ID NO: 124420 - DNA, 240 bp, Homo sapiens
ctgcctcagcctcctgagtagttgggacaacaggcatgcactaccatgcctggctaattttttactttttgtagagacagggttttgccatgttgcccaagctggtctcaaactcctgggctcaagagatccacccacctaggcctcccaaagtgctgcgtctacaggcgcaagccactgcactgagcccaggttacttcttaaaacgtggccaggtgcggcagctcacacccataatcc

SEQ ID NO: 124421 - DNA, 703 bp, Homo sapiens
ggggttgtcagcatttcggattttggccctcctgataggcgtgtggtggtatctcattgttgttttaatttgaaattcccaaatgctatattatgttggacgtctttacatatgcttgcttaccaaccatattttttctttggtgagttgtctgttcagactttttgctcattcttaaaggtgatttatattcttattgttgagttttaattagtttttgtatattctagataatagttctctatcagacatttcttttacaaatactttctcacagtctgtggcttattgtctgattctcttggcattatctttcacagagcagaagttttaaattttaatgaagcccagcttatcaattatttctttcatgggttgtgcctttgatgttgtatctaaaagatcatcaccataccctacgtcatttatttttttccatgttatcttctaggggttttataactttgtgttttacatttaggtctatgattgattttgagttaatttttgtaaagggtgtaaagtctgtctagattttttattattattattttgcaaaaggatgtcctgttgttccagcactattttttgaaaagtctgtgctttctccattgacttaccttcattcctttgtcaaagatcagttgactatatcctgtggccctgtttctgggctcactagtttgttctgttaatctctttg

SEQ ID NO: 124422 - DNA, 234 bp, Homo sapiens
attttgaagtttgttggctttcttggacctgtgggtgacatggtttggcgatgtccccacccaaatctagtttctctgaggggaatctgcatgactcaggcatgtcctgaccaaagaccgccaaccttatcctggagttcctctttgatttatcgggcagtggtcatggctcttccctacatgttgaagtttcggggatactctcctctgagtccgaccctccagaggcagctg

SEQ ID NO: 124423 - DNA, 807 bp, Homo sapiens
aggcaaactgcccaacagctctaagctatttccttcgtattctgaaaaataagccttaatgggacccatatagggcaactctgagagtaaaataaaggaatatgtgttagagtgtagcatagtcacccacgggaagggcttagatgttagctgctactgctcttattagctgaatgatttggaataaactgttagcctctctcatgttttttctcttgagcttcgaagttttcttgttaatactaaggagatattcaaactagtcatggggttttggaatgacgaagggagatgatgaatctaaagaatttagtgtaatatttcttcatgctcagtaaatggtagtttctgctgctgttatttttattaccatctctttggaatgggagtaggtgctcctttgtggtcagaggctgtgagagctccacagcgccagtttgcccatctgtacactggggtctgttgaaggcagtcccctctgtgatatctctggctgtcagagctcagatgatagatggtatttttgtactcttagttctcatcattttcatgatttcgatcaccatttgagtatgatgatgctaacactttgttgaacgtagaatccgttaattacttccttcctgaacctttggcattaaaaaaaatctattctgctacctctctgctcatttatggttattcaaatttattatcaagagcctggtacagtggcttgtgcctataattgtagctacttgggaggctgaggtaggaggattgcttgaggccaggagtttgagaccagcctgggcaagatagtgagac

SEQ ID NO: 124424 - DNA, 132 bp, Homo sapiens
ggaggtctacagtgacctgtgcagcagcaaatttggcagcagaaagcagaggactccaggcactgctcatgcctacaggctgctgggtgaacaccctcgccaaagaaggagactgcagaaatcctccttgat

SEQ ID NO: 124425 - DNA, 448 bp, Homo sapiens
ctccatctcgccctcccataagttcaccttccagatcattctatgtttacccacatatgccaggaccagctcacagcacaggcccaacatgggacacacctccccccaacacatccacattctcccgaagcccaactcaagcgcacgtcctggaagcagaggcatccctggccatgtcacagtttcttccacaaacctttggatctatcttttgtattttaagtcttggatttcccataagagatgtcaaccatactccctccataccttccagattcacaggcaagagaagccactaggcttcctgcaaagaaatttctcaagatctgagtagggaccaggctctgtcttaaatttctccaagtgagatccacatgcgtggcccttgcacgtactgctatcatctcaaaggccacctggagtgaccagcaaggactgtattcatggg

SEQ ID NO: 124426 - DNA, 407 bp, Homo sapiens
ggccgtggactcaagggaggagagcaaggcccgtagtggctgtccatcttgactgaacaccagccccaacccatgaggagatacctggtttgcatcttcacgcttcttaggaaacagtgatgttaatttggaacacatgtctttgtgtggaatgaagaactgtaatttcacattgaagccccagtcccttccctctcccattcctgcagttcacggaggtgatgtcaccccatgcgtggtggagacttaggccttccttctttctctttctttcgaaagaaagagaaagaaggaaggacagattaaatctccaaagtaggagaacctattatatagcaaacaaacttgtataattaatctctaggagcacgggttctaataagcccaggtaccacaaagatagagaa

SEQ ID NO: 124427 - DNA, 286 bp, Homo sapiens
gtcaagggaacattcaaagtcagccagaattcattagatgccagaggagaaacagctacagatttctaaacaggcatctccaacccaggccagaaagagccgagcacagcctagagctgctggagactcaaagagaaaccattcttctatccctttcagcgggcgcatcttgccgaacttctggacccagctcctgccgtaagcgtgactactcccacgtgtacataatccctgtggaattacaaaaattaggctaaagagaaaaaaaaaaaacctggttgtgggt

SEQ ID NO: 124428 - DNA, 538 bp, Homo sapiens
gaaggttgaattacagccaggttgtatggaaatacaggctgagtgtcttaccttaggtatccaaaagcctgtaatctactcaaaagaaacattagtgagttggaattcaaataatccttttctattgttattttttgttacacacaaggcacatctgaaagcacaagagctcagtgttctagttgtgttataataatgaggtcacaagtcctgtactacgatgaggtaggagtgtgtgaaataccatggtggttaaaagcatgggctttagggtggagccaagatgctgaatacgaacagctccagtctacagctgccagcgtgagcgacgcagaagacaggtgatttttacatttcccactgaggtaccaggttcatctcactggggagtgtcagaaagtgggtgcaggacagtgggcgcagcgcaccgagcgtgagccaaagcagggcgaggcatcacctcacccgggaagcgcaaggggtcagggaataccctttcctagtcaaagaaagggggtgacagacagcacctggaaaa

SEQ ID NO: 124429 - DNA, 390 bp, Homo sapiens
cacagtcacaggtacgacaccagcccaggtgtgctctgctgcctacatgcaggggtgagtgcaagtggagaggtgtggttcacctgtggggtattggaggaaggagcgcaggaggtatgagtgtagacaagcagggatttgagagggagcctgatgtcccagaaggtaagaagtggggaagcaccgtaggctcagtaggctcagcagatggggcggccagtgaggtcaaccagtcaggaaaccagagggtgggcggcagaaactgggttgtataacagagaaaggtggggtcaaggggacaggtggcgctgaggccccggagggctgcatcggtgggcaatgtgaggtccatggctaggatgagagcccgggaggctctgtctgcctgcg

SEQ ID NO: 124430 - DNA, 608 bp, Homo sapiens
tcgtggttagatctagaggatcccgacgctctctctgttggggagggactagggcaaacaggtcaacatctcagagggaagggaggacatggaacgctgtctgacctgcccgcagccaggggaggtgggatccagaatggcaggctatactgggtggaggaatgccacacacatagccttggaggcccaaacggggcagtgtgcttgggaagttaggcccagtttgatagagctgcatggagcgcagggcaagtggcaggggatgagactggaaaagtggatgaaataggatttatgtaacataagaaagtgtaattggctcaaatgtctgattacttatgtgttatttttgtaaagctggtgacccaaccctacattggttttgtataatttaacatctgtgcactttgaagtgacatacattgaagaaccttcagagtgtcagaaaccatgacctggaaagcacatctatcctaatttgggggtggtcttgatctctatgaagtatccaaactgatactgattggactcatttgaggatatcaagtaacatcagacttcactgagaggtgtgccaccgctgtaaccaagggactgctactactttc

SEQ ID NO: 124431 - DNA, 263 bp, Homo sapiens
aaatagcatcctacctgaatgcctagtgctgactggaaaatatggagggagtgttggcattggaaattacagctttgtaactattagggtaaaaactagtctaggcaagaatcattaatggatgcacagtcttaaattgtctcctcagagatggtcttagaaacgaaaaaaatagtaactgtacaaggcagaaatcaggcactaccaaatgtgatatccctcacacaacccccaaataaaacattcagctaccaaaaaggagg

SEQ ID NO: 124432 - DNA, 320 bp, Homo sapiens
acaaaatctacctcttttcagagcagccagcacactgttcacacccaaaacaaatgttctgtttcctggtgagtgtgtcgtcactgaaatgctcagtgactctgcaaggcccacctcacactcattggttatacaaggaattaaaggatgctcacagccaagtctcctccccagaactggtgcaagcacctgggaagggcccagttctgtcaaggtgccatgcatgatggactcccagagacactgggatgaatctaaccaggctggagactgagggctcccaggagagagccaacatccacatcgtctcctaaggttca

SEQ ID NO: 124433 - DNA, 426 bp, Homo sapiens
tgctctgtgtctgtttattcaacaaatatttatcttaactgactctaatcacattgtctcctgtttgtcctgcagtgaagcccttttacatctgcttatctcttttgatccaagggaaggagacttaaccctgacttccagagaaggaaatagtctcagaaaggttaagtcatttatctgaagttgcccttttaatactgagtactggactctctcagtatccgcgtactctgctgccccctaccgtgaacatagcaataggttttaaatcacaaaaacacacagcagaacactacacaacactggaaagactacgacactataaatagtgcttacatttgttcatttagcaaatattcagctggacgtggtggctcacgcctgtaatcccagcactttgggaggccgaggcaggtggatcacttg

SEQ ID NO: 124434 - DNA, 242 bp, Homo sapiens
aaacagatctcatgtttgttaccatcctttattatttttcttctaaacatgtaatctaacattacatagtcatgaacagcaaattatattatctactcatacttgcggaggtaaaaggtgagggaaattcatgtgtttagacttgggtctttactgagttgtctcctgtcctaaggatgatgattgctaaggaatcggattctaaaatgtattttgatatactgtccatgttcagatcggtt

SEQ ID NO: 124435 - DNA, 193 bp, Homo sapiens
gctgggataacaggcgtgagccatcatgcccagccttaaaaatcctattcttagtaaacatttaggagcaaatgtaacaggagtataatttaccttgaccaagtataattactcttaacccaagagtactgctcctgctttttacgcaaagacaatctcacataggtcgataaggggacaatttgaggctagt

SEQ ID NO: 124436 - DNA, 264 bp, Homo sapiens
gaaaaaaagtatagcttgacagctgtagttttcaagaaaagtagaaaagagcatatttttctggaaatgaagatttttttttttgagacggagtctcactctgttgcccaggctggagtgcagtggcgctgtctcggctcctgcaacctctgcctcccaggttcaagcgattctcctgtctcagcctcccgagtagctgggattagaggcgcccgccaccaggcccagctaatttttgtatttttagtggagacggggttttac

SEQ ID NO: 124437 - DNA, 344 bp, Homo sapiens
attgagtatgattttttttttcctaactgcatatatcttatcatagtacttttgagtaccactagtaacagtgttaggagcattaggggatgccctgcacttccctttagcatgggatacatcaaggccttggagcccttttagcacctttggcaaattagaacaagacaccccttcctcagggctgtcatagcccttaccactgcacctgcagctaagagtttttgtgttagtcacaatgcacacaattgcacatggcaggccagcatcaaattctgttaccatactcaacttagtgtctttttccccactagaacaagcaaattctatcaagccaaagattg

SEQ ID NO: 124438 - DNA, 811 bp, Homo sapiens
ggatgtgggaatgttaggaaagccaggctgtgcatgcttggacaaactgtaagccaggacctctcaaacactagcccatgaggtggtgcccatgtgcttggatctgggcatggggatggggagtgggatgggtgaaggtggcactgattgatttaagtggggcccaggcaatgacattagtattgtttccaaaggtcttcactatactctctaaatgactttattcttgcccagagcttcaattacctgccaatgattcacaaattaaattctccagttctcttctgagatcaaactcataaacacaactgcctacacagtgtctcaagacttctcaaactcaacgtatcaaagtgaactgatttttcccttccccaaactgctcctcgcccccagggttccttgtctcaaggaatggtaacattgagccaggtgcacgagtactcatctctgatactttcctctcctttaccaccaccatctcaaatttcctgtgaatttttatctcctaaatctctggaatccagccatttcaggctaactccactgcttccatgggaatccaagcccccattatctctcacctggaccactcatctccatgtatcctcacatgctttattattataattctgttccacacactgaggcaagaatgaccatttcaaaaccaaaactaagccactcctggctgggcacggtggctcatgcctgtaatcccaacactttgggaggcagaggtgggaggattgctggagcccgtgagttaaagaccagcctgggtaacatagcaagaccccttctttagaaa

SEQ ID NO: 124439 - DNA, 222 bp, Homo sapiens
gaggccctggaggattcgccacttaaggctgaagtcgtagcaagtgctgccacgttggggaagatagcggcagagataaccactactggggaagtgtaaatggaaatttcaaatttagattaagcctgagtggcgtgaaaacaaacccagcatgttcaggtgcagtgtccagatgttttcaaaatgccctgattgtgagagctgagaagggagatgtggaaa

SEQ ID NO: 124440 - DNA, 295 bp, Homo sapiens
ggccaactgatggttaacaatggtacagccaagctaaacaagtacagctgggaccaatggcaaaaccttgtctctataaaaaatgaaaaacaaaaagaaggtggtgtagcttattcgacagttccatttttacggtcacagaaagatccagttgggttaggcagcttgactgtgtatatgggtgagaaggtaagactctcttcaggaaagagcttgtatggaagaattcattcctccttgtgggggcaaggagatggggagagctcactgtagtaagaggattgcatatattata

SEQ ID NO: 124441 - DNA, 438 bp, Homo sapiens
gtggtgggctgtggctcccgggttgctaagctggttccttttcctcatttataaaagggtgaggaaattccttataggggtatcttgggcattgcttgggagagtaaaggttaaaggcttcgaaaagcttctgagttctcatgtgcccagcctctgctgatttctttgggagtgtagtctggtgagtcagagcccctgcctgtagggagcctgctggctggcagaggatgcaactgggctaggtgccaggacacgcacacatgtgccggcagcacaggttagatgccacggcctcagtggaggaacccactgtccccatcaaagagaacaggggatcaggaggagccaccatctgacatgggccctggcgggggatggtgggattgtgccaaataaagacagaggagagcctatatcaggtgtaaggatagtggagca

SEQ ID NO: 124442 - DNA, 646 bp, Homo sapiens
taggtcaagttgaggaatttatagtttcctacacaatttttcctttatttaagttgtcaatgtaaaaaattttattatgaaaaagttcaaacatacacaaaagtagtttaatgaacccccatatctcattaccttgtttctgcaattagattttgtcatatatcctttatctgagctttttatttttcttgtgctgaagtatctttaaataaatcttgagattttactcctttatattttggtatgcatctctaaaaataataacattttctttcataatcacatatcattatcacatctaacaaaattagaaatatttcctaggtataatctaatgcacagcatattaacatttctccggaagtctcaaaaatggctgttggcaatgtgttaaaatcagaatccaaataaaattcacacatttggttgttgtgtctcctgtctcttttaatctagagcaatcctgtctttcttttttctcccatccaattatacggcagaaattgaaccatttgtcctgtagaatctttcacattctggtatgtccttttgtttccttttggtgtcatttaccttgttctctgtccctcatatttactataattaaagttagctctaaagtcttaaatagattcagattctcctt

SEQ ID NO: 124443 - DNA, 282 bp, Homo sapiens
cataaatgggaaaaccgacaccccctgagaaaggagccctctgaggtcacacaacaaagcttggatttgtccctgaatcttctaactttccacaacaccagctctgtgagccccctaagttccattgtttcagcagtccagaggacctcccagcaaaaaagatcagggtctcaaatgtcaattgccactctctagagcttctgctaacacaattctggagaggagctctgaggggaggagcacagggcacaccttgacacagccactgacaagtagagactt

SEQ ID NO: 124444 - DNA, 807 bp, Homo sapiens
ggatctctttcttcatagtgtttctacatggtctctccagcatggtagcttcctactagctagacttcttacatggtagctcaggactcctgaggtgcatgttcccagagagagaggcaagtgaaagctgtgttaccataagatcacttccaccatacttcaatagttgaagcaactacaaaggcccactcataaggcaaggttatgtaaactccagttcttaatgggggagtggcagtattctggaaagtctgtgtgactagaaataatgctgtagcagtttttggaaaatacaatctgtgctctctgtgtgttgtcatatatccagaatgttttgaaacatgaaaataaaaaactaaaatgctgggtaaatatcaatagaggtcagcaaatctttgcaaggtttgtaatgtcactttataattcatttaccttatatttgcattggattgttatatgtcattggatggtcataacatctgctgaccaatgaaagactgaaagtaaaattttaatgctaataggaaagaattaattaaggaaggctatgagagggaagattcattttataggtggttaatacattaatatttttatgtcacaatgattttttttctttatgcattgtcatgactgcagttacttggataaataatatttggagaaagaggatttcctaatttttatatatggatagatcagatctataaagtaaatgcagaattcagaatcaagaaaagatttcccagtgacaaggtgaaacaagtaacagctgggaatactgtcaaagtaaatctgaaaaaaaaa

SEQ ID NO: 124445 - DNA, 602 bp, Homo sapiens
tgattacaggcgtgagccactgcaccgtctttttttgtaatttcaataaagacgaggtttcaccatgttggccaggatggtctcaaactcttggcctcaagtgatcgacccaccttgggctcccaaagtgctgggattacgggcgtgagccaccgtgcctgactgtgatcatttacttaaatatttgactttaggtaatgaagaattaaagtggatgaaaatattgcaatgctatcaggatttattgagaattgctaaagctgagtggctagactcttagttctaaagaaacctaatagtgacttggtatatttttaactgaaatgtaagcttgaaaatagcacattaaagtcaaattatgtggcttaagacatcctctcaacagcaacacaaattctagttcctgtctttccattctctttcctgtttgtctgaaaacctcaaatacctcttgttctaattctacgctattcctttaattcctctttgatacattcttgcttaattttatattctaatgtgcttttccctctcagacacgataaccaactattcaagatgccatctaatgcactatgccattaagtattgtggtcagtgat

SEQ ID NO: 124446 - DNA, 151 bp, Homo sapiens
accaggcactcatttattacaactcacattttcagaagtagcaaataacctaactgttaggaatctggaatacaacacgcaatgggagccaatgaagaacacggccggagctccgccctgaagtgcacgccctgagaacagggcttcagtg

SEQ ID NO: 124447 - DNA, 494 bp, Homo sapiens
cagtgagtaggacatgtcggttccaggatacattcagtggttttctggtctgaatctttaagtagttaaatagcacacaaaaggatatatgcttcccttttccccttgtgtctgacgttctcataatattaaaatgtcactaaattattgatagtaatagaaatacatatttcttaataataagaaagaggatagaaaggattggtcctcctctttgaagataaaacttaactatattaacatgctaatagcttacccatgaaactgttttaacaaacaaaagacaagtggacaaaggtcactgaatgcattaatgacctagaataacagtagaacaaagtacaaagccacccctcacatgagctccatctttgtccatgcccaaatattaggacatttgaagagaaaatgctattttgggaatatatttatgttaataaaagtactcccactgaagcaaaaaggacaataaaaataactgatataagaaagta

SEQ ID NO: 124448 - DNA, 347 bp, Homo sapiens
tcctgggttcaagctatcctctcacctcagctgcccaaatagctgggactacaggcgcacaccaccacgccaggctaattttttatattttgtaggaatggggtctcaccgtgttgtccaggctggtcttgaattcctgggctcaagcaatcctcccgtctcagcctctcaaagtgctaggactacaggcgttgccactatctctggccaattcctcttaaatcagtgaagtaggactccttagccccattttacagacgacgagcatggtgctcaaggaggtcaggtgagttgccaaggctacgtagctaggaagtgtctgtccccaaacattgcttgttccgctg

SEQ ID NO: 124449 - DNA, 341 bp, Homo sapiens
tagcgtcgtagttcaatgtatgtcccacaaggtggcgcccacacttaggaagcttctccgggctgaaggaaaagctctctgtgccctctgtgcagccacaagtggaggctctacccagaagcagcggctttacacctaatactcctgtgactgacccacatccgaatacccagggagattaggtggttcatcacctgagagctttgtttttacttcagacagctgcttaaggttctaatgggttcctgtcactaaaagtgcaaggagattaatgtgtctaggttgtcaaaatcaacttgatagacatttcttcatagctaatatttcctttcttatctgtt

SEQ ID NO: 124450 - DNA, 336 bp, Homo sapiens
gttttagttgcctcccttctgttcttatgctgttaattaataatggaaccagtggccaggcatgatggctcatccctgtaatcccaggactttggaggctgaggcaggagtatcgcttgagcccaggagtttgagacaagcctggacagcatagtgagaccctgtctctacaaaaataaaaaaaaaattagccaggcatggtggtgggcacctataatttcagctacttgggaggccgaggtgggaggatcattggagcccacaaggttgaggctgcagtgagatgtgattgtgcctctgcactgcagctcgggtgacaaagccagactctgtctc

SEQ ID NO: 124451 - DNA, 530 bp, Homo sapiens
ttgagattatcagctagaaacacagtaccaaataaaagcacctcagcctggactaagccatcaagaaggcattaaaaacctcttcctaaaacaaaaatgagacaccgctatataactattagaatggttaaaatccaaaacactgataacacccagtcctggaaaggatgcaaagcagaaggagctcttgttcattgcagctgggaatgcaaaatgctacagacactctggaagaaagtttggcagtttcttacaaagctaaacatagtcttatatacaatccagcagtcatactcctagatatttacccaactgatttaaaaatgtatgtccccacaaaaacatgcacacaaatgtttatagcagctttattcctaatcgccgaaaaccaaatgtctttcagtgggtgaacagatatggtacatccgtacgatggaataatattcagtgattaaaagagaagtgagccatcaagccacacagaggcatggatgaatcctagatgcagactcctaggtgaaagaatccag

SEQ ID NO: 124452 - DNA, 247 bp, Homo sapiens
ggcacagcctcaacagccacaggccggcaatcaaagtcaccactcagtcaaggtccccaggagcaggggagactggaccccatctccttccaactgctacagcccaggaggacttggaggtaaggtgagggcatccaggctgggggctctgagtctcagcagccactcctgcctcacgctgggtgcccccatcaattctgtttgaacatcacccagagtgattttgtctgaagaaacagggctgcca

SEQ ID NO: 124453 - DNA, 265 bp, Homo sapiens
gttgccctcttggaagtcgccgccagctctgccaggctcgacatcacctgtccacgtcctgattctcccatctctccctctccttctggcatcatcctgagaggcttcacagaccctaaggactaaattgaccctaaggactaaatcccgtaacctattgagttttgctttattttctatcaatagactatcgccatgaccataaactcaaccatccttctaatcctcctaagactgttcttctacctcgccctctctccacttc

SEQ ID NO: 124454 - DNA, 286 bp, Homo sapiens
tatatgaagacttcataatatagcattttgactttagcctattttttctttttgttaaatctgtacaaatttgtggggtacactgaaatttggctacaagtatataatgtatagtgttaccaagtcattatcttgggtgtccatcacccaggtgcaatacatttttgttaagtatagtcaccctactctgctgtcaaacattgaatttattccttctatcttactttatgtttgtaccttttaacccacttcttttcatcctcgcctgcccccctacacacttacc

SEQ ID NO: 124455 - DNA, 549 bp, Homo sapiens
tactaaactggttaaaactcttcagacttattaacgtcttcagaataaaagtcccaactcctaacacatcacctcaagatagtcccaatctgtgttccaacaataccaacctacatacaggacctccaccccacaaccagatagtcgtttgcctccatcccctctgttcttgttgttccttctgcttgtaaccgccgtcccacatctttcttggctaattccaactaatctatttatattgttcaggtgtcacctcctctatgttcctatgtcccatctacccaggactggtcagttgctctcatgtcatcttatgcaggactccatcgtttaatcaacaaaattgtaattatgtgtccatacagggtgtttatccatactttactacactgtaagctgtttaaagagtagaaatcatgtttttatatacataaacaagctctgatgtttactgaaactaatcaaatgcagaatgaattatgaatcattccatctgtttttaaacttctctaactatatagccaaggactctaagaccaaaattttaag

SEQ ID NO: 124456 - DNA, 311 bp, Homo sapiens
tggaagagtctttaatcagttactgtgagtttagcattgtgttttataaattccagctgggccacattatctgctcttcttctctccttggttgcaacctgctgctggagaaaatcagggcaaagcagtgattaaatccactatagacttactgtgaagcctcgtagttcctgcactcgctcttgcctctgcctaccccagcccttgaagctactgatgatggctcctttggtagactggctcacccatttcctaagccagccccaggaaaggcagaacaagtactaatactaataccctttactctcccc

SEQ ID NO: 124457 - DNA, 241 bp, Homo sapiens
taccttatgcctggggatggagtcccattcaagcacaaatgaacattcacaggactcacctctgctcctcgggcccctcctgaatccccaatcaaaggttctctcccaaaggaagcaaacgtgaaggcagagagcactcgcacaaggctttgagctgggaatgattgacttcgagtttgtttttcccaagtcagaagatcagagagagttaggacagacagagcagactccccccacatcg

SEQ ID NO: 124458 - DNA, 303 bp, Homo sapiens
gagaccctgtgtagaatctgcaccataaattagacttgtactttaattttctgaatgagaagagtatgcagtgggaccactgacataaatgagagttgagaacaaaagatcatcatagcagatgaaggtggaagtaaagtgaactttagaaagcaatgaaaatatctcttgacattcgagtttattctgaaaaacttgtgaccccttgcaaaagtaaggggatcttcagatgtcctgtcccaggacctccatcttgcctggccccctccctgtctcctgcctcctgccttgctctccagcacc

SEQ ID NO: 124459 - DNA, 353 bp, Homo sapiens
aagtagatatgttattgccctaggaaaggatctctgttgaaacaggacagcagcctagggcccacatttaattaggatcaaccagtttaaggaaatgcttcccccaaaaagcccctgatggtgtggggaaggggaatggtgagttgggaacaggtagtgcctacatgaccagattttactcaagtgcatctcatgattctgtgggttttctagcatttttggaaaactagcataggttgcagggttttttcttcttttagactgatgttaatttattttgcaggggaaggacagcaaatggcgtcagaagatttttgtccttttgttatctcttagtatatcaataaattttt

SEQ ID NO: 124460 - DNA, 187 bp, Homo sapiens
cctctctggtgcccagatgtctgtgctaagttacctcttgatcttaacccctttctcttccccctacccttaacattacagatggtcctttagaacactagttcactgtcttctcaattgcctggctttccagataaacctgcctttcctcccaccaactcttgcttcttaagtctggctttcaagt

SEQ ID NO: 124461 - DNA, 592 bp, Homo sapiens
gcagctggggagtcgggagtcgtgtggagcgccgccatcctccctgggagcgagcctccacgtggcctgaaatgcagatggacgccagtgacgggctgctctcagcacaccacacggtcccctcacagggtctcccgcagcctggcgggggcgcagggagcaggatttactcctcctgttatgtagttgaaggcaatggagatgagggaggaccgggccttcccacgatcttaccctgcaccatcaagacattctgtacccagaaaggctgccccaatggcccctccgcgtgacccctgggatgccagtctcagctccttttcaccaagaactacgtgcctggtgtgaactgctgctctttcctggagtaaatcaggcatttatcccagtctttatccacaaggaagcatcacacagcccgagggtggcccatgtttagccagaaggaaaagcccacctgatacacaggacaaagagacgcttacctggtcctcaacacacatgaaccaggccagcagggaacgccaagaggtctcagcacagacaggatgcaggcacttgcaaggcacaacggggcgaggaggagagacag

SEQ ID NO: 124462 - DNA, 368 bp, Homo sapiens
gtcagatttgtgcatccctgcactgggacaaaatgcctccaggacccacttcgcgtgctacttccgcttggcgggggtgctgggcctgtgttttcctttgcctgggcattctcctcatgtttcccacctggagttccgcttttccaactgccccaggtagtcagggtcagggaccttggacttgtctcttactgctgaccagtctgtgctttatgggcagagatgagacccaggcccgtgtctgccagctgaccacctttcagccagccttgttctcctgtcttcctatctttatcatttggcaagtcctcagcttctgtcagtgtcttagggcagataggagggcatttccttgcacaaacccggaa

SEQ ID NO: 124463 - DNA, 447 bp, Homo sapiens
gtaccaggcagaatatatcagcaaattcccaaaacagaaaccaagcaggtcacatctgctgatcccaatgcaatacattaaaacacaaaaataaaaggatcattaaaaataaaaaacagatggatatgtttatggcattaattgtggtaatggttttgtgggtgtatacttatctccaaaattcatcaacttgtatatattaaatatgtacagctttttgtatgtcagtcataactcagtaaagtggtttaaaataaacaataacaaaaatgaagttaatttttgcccaaaaaaggtaataaaaataaagttttcaaattattcaggaatgaatgaccagtgacagcactgcatatcaaaacctgtgggatgcagacccagtacttatatgaaagcttaataaaatctaaactaaatacaaatttttctaagaaaatgtaaatgatc

SEQ ID NO: 124464 - DNA, 504 bp, Homo sapiens
ttggctcaagcaaccttcctgccttatccttccaagtagcttggaccacaggcatgtgccactacacctggcttttttttttcttgagacagaagcgagactccatctcaaaaaaaaaaaaaaaaagaaaaagaaattgaaataatttactactataaattaaaagagaaggtaatatatttatagcagtaatcactgaaaggtattttattaattcagcatttttaataaaataggcctggtagaaggttacctaaatataattatttaactaaatgcaacagcaatttttttttgaatttttttaaattgatgaatgacatttgtacatatttatggggtacatgtgatactttgttaaatacatagactgtgtaatgataaagtcagggtatttagggaatccctcaccttgagtatttatcatttctatgtattgggaacatattaatacatgttctcttctagcaattttgaaatatgcaataaattgttgttaaatat

SEQ ID NO: 124465 - DNA, 277 bp, Homo sapiens
tgatgtttttgtgcttgaggcattaagtgctctcagttacctggaaaaataatggctctccaaaatgattcaaagcttttcctttataatttttaagattcctggccaatgtgctttaaatgaactttctgacttattaataaaactcaatgaccgggtgcagtggctcttgcctgtaatcccagcactttgggacaccaaggagggtggatcacctgaggtcaggagttcaagaccagcctggctaacatagtgaaaccccgtctctactaaaaat

SEQ ID NO: 124466 - DNA, 241 bp, Homo sapiens
agaaatggaaatctatgtaggtcagtactcaaaggaggagcagctttttgtctccatagaggatggaataaaaagtatcttattcctaatactgaagcaaggctgaatggtgcctattcaaaaacaccaaatgtcctgggctagagtcaggaaagtaaacccctcccccgtgctgtccctactcccccaacatacacattttaaacagtaggtggaagccaaagtcaatcagatcaaagtt

SEQ ID NO: 124467 - DNA, 748 bp, Homo sapiens
atatgaagctattgataataataataataatggtaataataacagtagtaacttatatttatggggcatataccatatgtcaggccttgttttaaaaagtattaactaattcagttcttcaagacaagtttataagtacttagagctggtaaaagatgtcaaaaggtaattctcttaaagagctattatcatttctcatgatgccaaacatagtaatttagttacgcagtctcaatatctacttcagttcttctttaatcagcgaattatttataatttttaaaacttaaatacacttattttcgtaattaagttttttaaaatccctgagtaaattggttttgggaatagctagtattaaaatgctacttttaggagcatgtcctgtagaatacgtctgtgcaagtagaaagataattatatttaagttagtacaactttaaagaatttttttgaaggttgttgagtacagtggtgtgtaccctgtagtcccagctatttaggagactgaggtaggaggaacgcttggacccaggagttggagagcaacctgagcaccatagtgagactccatctctaaaaaataaaaataaatttaaaaaatgtttttaaaagccaaaggatagtttttattttaattaattgcttttgatcaattaaaataactcagaaacagagaattctcattgatggtttcaaaaaagatagaggtggcagggtatggtggctcacgcctgtaatcccagca

SEQ ID NO: 124468 - DNA, 427 bp, Homo sapiens
ctctgccttcgtcgatcttacatttattggagaaatggataataaagcaagataaattagtaaaacaaatagtgtgtcaaatagtgataagtgttgaggaaaaaaacaaagcaaggatagaaagtgttggtagggagttgaaattaacagggaacgtgagacaataatgcttctgctaaaagctgcattcctgcgatgtgtttctttgtcagagaaacactataaacagacagagaagtaatagtgaaagcacaacactacaatcctgggtatcacctatgggtctacataaaaatccattaaaaattccctgaaaggttaccacattcacagaaagcataaaatccaaatctcgagttttgaggggcaggatatggattctctggatagcagtgactcaggtaaacaaagtgagcatgacatggaa

SEQ ID NO: 124469 - DNA, 362 bp, Homo sapiens
aaggatgcgaagtcatgggtccccatgcagtcccgagccaggcgagctcagactcagcagggaagctacccagggcatgggggacctgaggtctagggtgaaagcttccccatcttgtgtgacttcgggactcctgcccacttgaggcatcagtttccctatctggccactgagagtgaagagggggtctggccttttgcccactcttagtaggtgatgtgggccgcttcgtgaccctgcccagggacgagggtgcaaacttgctttgcatctgattttcctagcagcagctagacctggtagacatgaggtaggcagcacagagccagtcacactaggagccaggatatctgctccctgcc

SEQ ID NO: 124470 - DNA, 366 bp, Homo sapiens
aactataaatcctgagaatccaatttcttgttctgataaatcaacaaacagaaaaaggttttgcttaaggttgtgtttttcattctatacaattttttaaaaactcaaaatcaaataaaattatactactacatacactgctactcctataggtttgccctgctttaaacaaaggaaatggacaagtatggcaggcagcagaaggggcctacagtggcagagcaggagaagatggtggaagtcctgtggcgcatattcagtcagactgctaattcctatgctctgcatgggcatcaacatcacactgataagagccctttgctttgtgttttggatacattcctatttacagaaatgttgtaatgg

SEQ ID NO: 124471 - DNA, 402 bp, Homo sapiens
aggccctcagccgggaagaaggtgaggctaagctgccttccatgagtgtttgccttaatctcacctgatacactccacagatcactggcttaagtcctaactcaaaatcagcctttccccccaccccaccaacacaggagatatttttatagaaagcaatgaatttttttctttaaagaacttaattttaaaatgtctacccccatgtttggtctttcaagagtgcattgcgtgtggcatgagatgtacatagcttcatgtttgtttctaatgaaggtggggatggaaaaccaaatttgtcaggtggggatttcaccccagccttatgactcagttttagatttaacttgattcatttaaggttggagtttatttctggctggcaaaatatggcttcctggc

SEQ ID NO: 124472 - DNA, 488 bp, Homo sapiens
ctggcaatgaagggggcaggggagtgactactaagtatggggtttctttttggggtgatgaaaatgttctggaattagaagtagtaatggctgcacaaccttgtgactttactaaaaaccactgaatcgtgcattttaaaggggcaaactttataatatgtgacttttagttcgattttttaaaagtaagccagattgtgttcatagttcagtcaaaactctgcagtggttctccacccacaatcaccatggcttccagtcctctgcactgtgtcccctctcacttctcagatgtctcttctcctgctcttccccttgctcaccccaccccagccaccccggctgttgaacttgctcttcttccaggacactccttctttagggccatatatgcccaccccctggtgcttaaatattacctcacaaaatggtcttgagcagcctcattaaaatcgcacaccatccccaactctctaccctctttctta

SEQ ID NO: 124473 - DNA, 568 bp, Homo sapiens
gcgaattcactagtgattgtgagctgagatcgcacctggcctgtttctaaaatttctaccaccaagtctatgaaaaatcatcaccaggaatgagggcatcaggatacatccccttgggaggctgaactatatcagagtgggtattcctcaaactgcttttgtgcatatcactcaagcttggccctgtctcttcatagacgccctcctctgcctccacatacttatttaagcagacactacaggctatacttggtgccagctccctgcagcccgtggccactgtggcccttggcctcagagcttcagaaaacaccccctctccctgagtgccaggctgaactgaaggttcccaccacctcacactcaaggaccctcctcaccggctcactcagtctctttgggctgcaccgaggctctttctgagatggctgaaggaaaagtgtcccttttattagctggcagacagccttccagtttggtggcccaattttcctttttcttttcctttttttttttaaagacagagtctctctctgtcgcccaggctcaagtgcagtggtgggatctc

SEQ ID NO: 124474 - DNA, 444 bp, Homo sapiens
gatgtatacgtacaagaagagtttctctaggtgtacttgctgggtcactgggaatgtgcatgttcatctttaccaggtaatgtcaaacctttctcttattagcaggggaggagagttccacagcctgaaaaacacttagcattgagcaatgtgctagttaaagaagaggctaagctgttataataaagagaaccccccaaacagtgactttaaactagagagatttttttctttctcgggtaacagactggagatgtccaatccaggccagcaggacatctttgccccattattaagtttccttccatcttgtggttctgccattacctagataaatgaacttgtctactctttgaaaccagattttaagtatttcagtgtttcagcttgtaggaaggaaaatcagccttaaggagcacatgtccacggttttcaaacccagcc

SEQ ID NO: 124475 - DNA, 219 bp, Homo sapiens
tgtcaaatctttcaggaatcagtttaaatataacctctcctgaccatcctatctcaagtcgatttcccctattattgtcttggcactgtttgattccttcatagtaattgcaataatgaaaacaaaatttatttatttgttttaaactaacgtctctgtttgaagcaggcagctacgaggtatgttttagccaacactgtatatcctgcacttactagg

SEQ ID NO: 124476 - DNA, 209 bp, Homo sapiens
gaatttagcagcaatgtttctagacacctgcactgactaaacgattccagtcatcatctctttggtttctcctagatgataggaatgatagtgagtggtgaatccttttacagaaaccagacttttacctgactttttctaaactgggtcatcggctcccaagtggacggccacagtggtatcatgccacagtgataaaggagtcaagg

SEQ ID NO: 124477 - DNA, 254 bp, Homo sapiens
tccagagcatattgcatcgcagctgcagaggaaacacaggctctagaacaagcaaccacagcacaacgtggtacctgccaggcggccacatcaacaggtggttgtgagagaatagaaagggaaggagtggctgcattgtgtgtagtctgtgtgccagctcaaaacatccacttcctgttggccaccgatgccccaaggcttctcagcaggggagaaataaaatcatccttgtcttttaataaagtaatccccag

SEQ ID NO: 124478 - DNA, 804 bp, Homo sapiens
gtactcaaagtgtggcccatggatcaacagcatctcatctcctgggagtttgttagaaattcagactctcccttggcctcaccttagacctaggaaatcagccactgtatgttaacaaggtcccctgtgattcttactcacattaagttcagaggagcctctgtctacaaaatacttttacgtgcatcatctcccccgccaatgtagtgcaaacataggaaaaagtgacatcaaccttaccacatgcaggaatcatttcccctgaggtgaagagaataatgataatggtagcaactactgctctttaagtctacactgtgcgccaggcactctacctaagtattcacctcatccttaccacacctcgtgagggaggtaatactagctccactttacagttgaggagaatgaagttcaagagggtaagtaacttgcttaagatcacacagccaggaaatgccagagccagattaaatccttgaccgccaagctcctgctctttgcaagtgtttgagaacatcttggaatgagaaagggattacaaaggtggatttcagctgtggctgcattttggcgttacctggggagcattacaaaacactgatgcccactctcagagattcggatttaattggtctgggatctagatctgacattgggattttaaaaatctttctcagcaatcccagtgtctaccccaaggttgagaatttctggtttatggactggctaacctttagtttgcccctgttaatgggatttccatcgggaacagttcatctgcctcccttcacttattatatg

SEQ ID NO: 124479 - DNA, 502 bp, Homo sapiens
gacctcttttctgttgaccttgctaagtattcctgtgcccatgcacactgttttactttctaaggctttataatatttttaatatcggtatggtattcttttcttatttctttttatatcattgttatggccattctttcctgtttatttttccataggaacttcagaattagctttctaatttgtatttttgacatcatataagtttatagataaatatagaaagaattattctcttgatattgactttctattcaagaagaagatagacctttgcagttgttcctatctcctcctctgtccctcagtagtatttaacattcttctttatgtagatttgttttttttttttttttttttgaaatggggtttcactctgtttcccaggctaaagtgcagtggcacaatcttggctcactgaaacctctggctcccaggttcaagcgattcttgtgccttagcctccccagtaactgggactacaggtgtctgccaccacacc

SEQ ID NO: 124480 - DNA, 454 bp, Homo sapiens
taactcatcccagagatttaggtccagcagagccaggcccacacagttattgaatcagacacgagaagacggaatcgacatggcaatcagcatttagacaggctactaagtgctgccatcaatcaccttctcttcccagaaaagtacagatgtctccctggatttcttactaataaccagaaatacagctgtccaggccctgcacatattttgtatcacttgataaaaatagctaatagcattctatctgtgactcctggtttatctcataaactaaatggatggaaaagagaaaggaatgctacttgaaatcccatctcagcggcacatgaattccaggtagcggctccctggttacaggacagaagtaagtgaagtagcacacacaagagaaatatcggaaaacagaaaataacttctagaggaataatttgttgcacaaaatgcaaacaaa

SEQ ID NO: 124481 - DNA, 1016 bp, Homo sapiens
gtgagccactgcacccggcctaattttttaatattttgtagagacagggtctcactctgttgcttaggttggttcaaactcctgggctcaagtgatccttttgccttggcctcccaaagtgctggatctgtttttttgtgtgtttttttttaattatgcagttccaagttatcctttcactctcctatatttcataacacatatttgaagacctagctattccatatcaaattctttttatcttccaaacctgtcatgatctttctttcctctgcacctttgctaaaactatttccttctgtatctgatgaaatcttatacattcctctattcttggcttttgcattatctcctctatgaagcattttcttaatccttctgagaatgagatgcttactcccttcccttatttaatactctgtgcctctattatagcacttagcacagttcacttgtattataatgaggatctgtttcccccactaagtggtaaactccctaaggttagcaagaactatgcatttaacacagtgccagtaaagcaagaactcaataaatgtttgctgaattgaaattttcattataaatgtcattaaacaaactgtttttatcctttttaacattccctctgagataggttaatgttataattcctttttcattagtttaaaaaaggacagagcagattttgtagtgattacagaatggaaacgtaagaaaatgtaaggtcttcaagcagtatcctgaaataataattagtataaactccaaaatctttaccagtcattaaaacaactagtatgtacctagtcaaatataacttttccagggtcacataactaataatttttggaaccaaaatttgagcataagttgttctttctctaaagcccatactttccttctgttttatactgcccttgctcatttctatcctaaggcaataactatcttattatagaagagttttctatatggaaacatgcatagatcatcattcatgtgtcctttttgtt

SEQ ID NO: 124482 - DNA, 257 bp, Homo sapiens
ttcatgcacaggatggcgtggcgcgtacctctgctgggtccttcccacaagggtggagggctgatgctgctcacgtgaactcccttccatctgtgactggctcttgagcgtggaccttccactcactgccacttcacattacaaaggttctcaccttcaatgtgccccgggcaagtaggattcctctactgactggctgcccactatgtgccaggccccagggagataggggaaccagccaggtagcccccagtctt

SEQ ID NO: 124483 - DNA, 449 bp, Homo sapiens
acagtgacacacaatttaaagaacatataataattgccttcacttatttaatctccataactagtactctgtggcaggtattatcattcccactttaaagacaaagaattaaggctcaaagatccttagatgacattttatagatcaaaagctactaagacactggaatcagggtgtgagcaaagttattaaatcagagcacttaaacttgagggtcagacacatcttgatgagtaaccttgctgctccccagcagtgtgactctggccaagctgtatcacaggtttgagtgttagttccttcatctagttaatacacagcttcttttgaggcttaaatgagaggacacctagttcagagaatcagcagcatgttataaaggagagtgcatttccttgtgtctcctctgctgtttcctctatgcaagagtgccttaaagagcagcagca

SEQ ID NO: 124484 - DNA, 710 bp, Homo sapiens
gggtaagtgtctcgcagcagttccaccactacgggggcctgatttatggctagctctgggagactgtcctccacccagacccctgccaggttgagaaacaattccttatacattgcctcattttcctgctggcaaaatgcatctttacaaattttgcacctctcatagagtctccattcctctgttgtggggatggtaagggtcattatcatgtcttctttgacctaggtttagagtcatttccccttctcaagtaaaggagatttgtgcttgcaatttctggagcaattatcttcctaacagaggaccagacaatttggcaaatataaaaaatcatgttggacttgctgtcctccaatcacacatcttttagatttgaagtaaggcctctttctattattcctgtagctccaattatattgaaataatttttagacagtgaaccaattgcttgagttactactgagtgctctgcaccagtatcaaccataaagtccattttctggccccctacctccattgagaccataggctcctccgggcctaatgaaatggagcctggtctatctcagtcctcataataatcattgattcctgccagtccaattaaatccatgtctgacttctgaaccccttgaccagtggcggtgggttctggccagccgttttttccctgattgttgcctctttccttttctctttctgggcat

SEQ ID NO: 124485 - DNA, 441 bp, Homo sapiens
atttggtgtggaccggagcacaggtgaggcaaggcaggcctcgcagctgaaactttatatccagagcagccagggccactgctggctgcggagtgaggacgcatatccccactgtccttagatgggtggcccctggaacctgggagaatgagggggcatgctgacagtctcattgtggctggaccacctgtacatacacccacaagaccctcacccctaaatcctccccctacacatatgcacacttaagttaccgtatgggtgttgtcgagcattttccctggggtctgtggctccctggaccgacatgccccaaagctgaactcagccttttcaagcttgcggccctgctgcccaattcccctacaccctgccttgtgggttctcgcggggtgggggccttagggcaaggctcttgtaaataaagtataagaaacagtt

SEQ ID NO: 124486 - DNA, 511 bp, Homo sapiens
atttggtgtggaccggagcacaggtgaggcaaggcaggcctcgcagctgaaactttatatccagagcagccagggccactgctggctgcggagtgaggacgcatatccccactgtccttagatgggtggcccctggaacctgggagaatgagggggcatgctgacagtctcattgtggctggaccacctgtacatacacccacaagaccctcacccctaaatcctccccctacacatatgcacacttaagttaccgtatgggtgttgtccagggtccacagttcttaacccccagccagcagtgctcagctaaccttctggagcaagcagtggggttggtgtgggggaagccaggaaccagtgaaaagatgaccgacatgccccaaagctgaactcagccttttcaagcttgcggccctgctgcccaattcccctacaccctgccttgtgggttctcgcggggtgggggccttagggcaaggctcttgtaaataaagtataagaaacagtt

SEQ ID NO: 124487 - DNA, 470 bp, Homo sapiens
tttttgtattttagtagagacggggtttcaccatgttggccaggctggcctcgaactcctgagctcaggcaatctgccccactcaacctctcaaagtgctaggactgcaggcatgaaccaccgcacccggccttagttatttatttataggcattttggttataccttccactttaccgccaatgctgcagtaagcacccgtgtccaaatatatttgtgtacacgtgtgagatgtttgcccactcgcggcagggaaattgctgagcctgatggacttcctccccttggcgttagcttgccgccacttacatctgcgctccattcctactataaaggtgactttccacttttgtcctctcctgaaactacgccgcctccagcaggaccggggccacctcctcgcctccccgacaccacagggccttttttttaccacatgcgtgtccgttgccctaagtccccgtcccact

SEQ ID NO: 124488 - DNA, 432 bp, Homo sapiens
tcgttggcactgcagagtgatgagggcaggattgctgggcatgtgggcatgtgtgccttccctcgctgtggcacttattagatctgtgtgttagagccagcatggatggaagcaagttgactccccagttgtacccgttagggattgtaacagaatggcttcataatcccaggagattattggtatagaggattatagcaggatgtggaaagtggcctggggccactgtgaaagtcaatgtagagtgctgggtgtgtttaggacagactgcttggtttggagggcccacctacttgccccatctgctagcatagtttgtgttcccatccacaccaagcctctggtgagaagggagaggcagctgcacccctacttcggcaagtgagcacaaggaaagtcgtgctggagaggagtagagcgacaggcttcatg

SEQ ID NO: 124489 - DNA, 1459 bp, Homo sapiens
agcgtggggaacgaaaaccaccacagcgtcagaaaggagcgggtttgctgagggccccagaaggctccttccaccgtatcatagtctaataaataattttgtcaagccagagaagctaacaaaggtagagacaaggcttaaagaaaagatagtggcggaaatgacggatctgaacaagcatataaaacaagctcaaacccagcggaaacagctactggaggaatccaggagctacaccgagaaaagttacttgtccaggctgaaaacagattctttctggaatacctgactaacaaaactgaagagtacacagagcaacctgagaaggtatggaacagctatttacaaaaaagtggagagattgaacgaagaagacaagaatcagcctccagatatgcagaacaaatttcagtgcttaaaacagcgctcttgcaaaaggaaaatatccaatccagtttgaagcggaagttgcaggcaatgagggacattgctatattaaaggaaaagcaggagaaagaaatacagacattacaggaggagacaaagaaagtccaagctgagacagcttcaaagacacgggaagtacaggcccagctcctccaggagaaaagattactggagaaacaactgagcgagccagacaggagggctactgggaaagagaaaaagaagagagcttaatatgaaggcccaggccttgaagttggcagcaaagcggtttatttttgaatactcctgtggcatcaacagagagaaccagcagttcaagaaggaattactgcagctaattgagcaagcccagaaactaacggctactcaaagccacttagaaaacaggaagcagcagctgcagcaggaacagtggtatctggagtccttaatccgggcgaggcagagactgcaaggaagtcataatcagtgcctaaataggatgttccaaagaccacacccagtcttccccaaggcaccaaatcaaggattaatccaaagtaacttctaaaataacactgattaaataagaactggagcaagtactcttaagtgctacattaacctggttagaaaggctgttggattccagattgctattgtaaaatctccatcatgatgtgttggagtgaaggattagatggttttatccaacagtcctactagatatttggtaaccagcttcccttaactagctttttctttaaatactcgttaataagctattccacaaacctccagttaacctaacacatgaccctaacctagccatttaccatacatcaaactagctaaaggaaaccaacctaaggaagtgaaaacagttgtgatttatttcatctagctaaattgtatttctttatagagaaagtacctttaaggatagcattccaaatagactttgaatagcgttctgctcatttatcctcattccttttgaccaacttagcagacaaaagcagtttttata

SEQ ID NO: 124490 - DNA, 622 bp, Homo sapiens
taaaggcaaattttacagggaagcaaggaaattaatggaaacaataaatgcatgtgaccttacaaaagggaaacacgagtggaggttgccgttcttggttctgccacttgctgctgggctgtggctgtgattctgacttgcccctctgtaattcatttcatacctccttacctcaggccagccctcagctggctaggctttttggtttgtttgcttgtttgtttgtttagtagagacagggtttcaccatgttggccagaccggtctcgggctcctggcctcaagtgatctgcctcctcggcctccctcaagtgattcccccgtcttggcctcccaaagtgctgggattacaggtgtgggccactgcacctggtctcaagctaggctttttgttttggtttgtttttgcagagggtaagggcgatctgatcttcattcctggaggattgagttctgggtcctgcctggttggaaatgtagtcgtctttcattaacactcccactggatatggcaatataaagaggtgtccagtgtgttcttctgggtttcatgcattcatcttcctgccctcattgcacagcagcaactttatttccccttgaaaattgtggtgaattgtcc

SEQ ID NO: 124491 - DNA, 698 bp, Homo sapiens
gatggaactggaagcactttgtttttagaatttggaatagtcatggacaaaagcagagtgcagcagttgagcaggtaactttggaggcagaatgtgctggaatcttgctttggccagggctactctctgaactctaattctccacctctaaactgatgacaatatttgttcagtaagtatttcttgaatgcctattatgtgcttgtgattcttagtattagttgaaattatcttaagaagaactctgctagcccagtctccaattttacagaagagggagagccccagagagagaaggtgacttcagttagatcaccagctaggaactgtgcagatgtgaataaaacctagtacgtctgactctccatccagggaccttcccactgtacgtcaacagccatttatctctttgactgactgattgtggagagagagagagagagaaagaaaggaagccagctacccagtctgagcaggccttgtgaaaagatcatttttggccttgagaatatatgcagcaaaattgtgttacagggtgcaagagctcaggttggattgtctgctctccatacaattattgtataatcatcaaacatcctcctgagcacctgctgcaacgagacctaatccagaagaaagtggaaaggcatggggaggacccaacatgacactgccctcaagcatcttccaaatgcctg

SEQ ID NO: 124492 - DNA, 243 bp, Homo sapiens
tgaaagagatgtcagagatgggtgatttggttagtcttttgctttgttttcttctttaaaatacactacagtttctggagctagaaatttgctgagcagatggtacaaattctgcaacatggtatttgtgggagattgagtagatcagcgtcccgcgacacaggccaatagtgcattttcgacagcatcataaatgagagtttgtattcccattagtgtctcatgacaggcagcaccttggcg

SEQ ID NO: 124493 - DNA, 380 bp, Homo sapiens
tcctctgagtatagctgtaactctatctcatagattttgggatacatattactgtttcattaaggtttaaaaattactactaagattatgcatttttcacgtatcagtactattggccattagtatttcttcctttatgaatttcctcttctcattcttatgccattttcctatttagatattcattattttcttattgatttatctgttgtgtacattgcaaatacataaccacttttcttttacattgtgttttacttttcagtagaaaagttttacgtatttcttatgtagtcagatatatcaatattatcactttgggttcccctgtctgataacattcttagatagctctttttccttccaagactacataaatt

SEQ ID NO: 124494 - DNA, 426 bp, Homo sapiens
tagtgttctaatgtgtcacacacagcaagggctgggaaacctccctccctggccagcctctccccgcccttcccgtactcccaacccccacattaacagccagagatttcctatccaacacttgagtccaagtccagacagccaagaaaacagagggccaagatttcaatcaggatttctccccagactgtgagccgggggagcctgtaaaactcaacagagccaacatgcctccaccggaaagctgggactgctagggttatttacgtaaaaggtaacatcagtattaattaggtgagaagaggaaaggcacagaaactaaattacagggcccaaaccaacatgagaaaaatacttgctatagcctggaatctttcactcaagttttatttggtgtgagacttgtaaattatagctttgatcctt

SEQ ID NO: 124495 - DNA, 533 bp, Homo sapiens
agggcaatgaacaccacttttttatttcagtagtttgagcccattatattgtaagaactttgggggcacctcttacagtatcaggcttgtagtaaattataactaagtagctaatggctaaatgaattaatagatattataattcaccttgctttagcaaaagagattatggaggagctattctaatatttagaacaaaataattataatcatgttttccttgtctaaacttccttagttgctgactcaatggcttaattgctgatagtctatcagtgatataatattacagaaactgaatacagaaattttttaattcacttggatacaattctgagaggataaagtgaggtgagcccatatcaggatagaaaacaatgtggtaaagatgattgtctcttaataattcatgaggtgagataaaaaattttaggtaaagaatggaataagctatgtagttgtatttctttgattaaaaaattcacatatattaagctgtcttcttttagctacttgaaaggatgtcatgtaag

SEQ ID NO: 124496 - DNA, 333 bp, Homo sapiens
aggctggctggagcggtgttgtgattctacctcactgtatcttcaaactcctgggcacaagggatcttcccatctcagcctcttgagtagcttgggactacagacacccgctaccgagcccagcaacacttagttttaaaggttaaacctttggcagcttacttaatttaacttggagaagttgtaacttgtaaaatggacgtaaccatagtgcttctctcccgggttattgtgtacgttacatatgctaataatgtatgcacttcacataccagcttgcacacaagaaatgctccagaagtggccctgtcactgttaattcttatgatcaga

SEQ ID NO: 124497 - DNA, 148 bp, Homo sapiens
ttaatcctccctatgttcatccaattagaattttaactcaatcgggcctatagaagctggaaatctaggatagcacaaaagtataatcatctgcatactgaagataataagcacgagtaagccatcttttgtttccaatttcaaaaca

SEQ ID NO: 124498 - DNA, 365 bp, Homo sapiens
gtttatatttccttcctcttctccacatgcatgatcataagtaccataaagcaagaacaatacccggcacagagcaggtgttccatatttaatgttaaatgaatgtaccccttttctcgttatctatagactaataaaaaactacctcaaaacttagtagcttaaaacaaccaccaagtcattacatctcatgcttttgtggattaggaaagcaggcaaggagtggctgggtgattcttctgtttcacatattatcaagagagggcatttagtgatatttagcctctggatggatttgtctggagagtccaagaaggcttcacctatatgtccagcaccttggtggggacgactggaaggataag

SEQ ID NO: 124499 - DNA, 249 bp, Homo sapiens
ccttagcctccccagtagctgagactacaggcacatgacaccatgcctggctaattttttattttttgcagagatggggttttaccatgttgcccaggttggtcatgaactcctggactcaagtgatgctcctgccttggcctcccaaagtgctgtaattacaggcatgagccacggtgcctggcctgaagatattcatcaaggcctttggagtagaaatgggtctgcttttcttgtcacaagctaaca

SEQ ID NO: 124500 - DNA, 398 bp, Homo sapiens
tcccaggagagggcacaggaggaacaaagggctcgggaaggtgaagaatggcaagtctgcctgtgaaacacaacaggccctgctatgttaagcagtgtgctcagctatcatgaggagccagtgaaagacttttcagcgtggagagactcggtcagatcgagagttcagaaaacacactgtagagcatggaacaggtgagagaatgagaacagtgggccaagtaggaaaagatttcttaagattagtatggcccatgcactaaagacaaattcacagctgctcattaaacacaagtacatgcaagatgaaatgagccagaaaaataaacaaaccagaaaaataaacaaacacaagtacacaccactgtatttgcattacacacatctacacacttatgc

SEQ ID NO: 124501 - DNA, 474 bp, Homo sapiens
tcagtaatgttcatgagtaaacatcaaaatgtattattatctttaagaattaccaaaaggaatttcaattaaaatcaattatataggctggtcttgaactcctgacctcaggtgatccgcgcatctccgcctcccaatcgctcatttaatcctcacaactaatctatgaggacagtgctctgtcattccattttacagctgaggaagccaaggcacagaaaggtgaagtcgttgcctgagatctcacagcaggttttagcgcccgtgtgcttcgtctgctgcacctctactaccccagctctcaacgtgggttctctgaccagcaggaacagcgcttaggaacctacacaaaatgcagattatcagggctcaaggagaccacgctgaatgggaactctggaagtggggtacagcaacctgtgttgaagaagccctccatccacggtgaggtcagcaacctccgaccctgcaaac

SEQ ID NO: 124502 - DNA, 353 bp, Homo sapiens
acactaccctggactttccatagcacattcacatctgtccccaaatccagtctctggtaataacttttattgatcacttactctattccaggccctgttctaagtgctttaattttcacaaaaatactaggtgaatataagataatagagtcagattttcaaatctgtgtatgtgtgtgtgtgtgtgtgtgtgtgtagatagcttgctgttcttctttgccacattaggatgcatagttgtccagatttaacatatgagggctctaaaaaggacatacatgcatcacttccatgaaagaagctattttctgcattttatattcagataatttttcagctaacactgacatttt

SEQ ID NO: 124503 - DNA, 300 bp, Homo sapiens
ctggtcttcatctgtgaagtacagaaaagcagtgactagaagggctttacatttttttgtccttaagtgcacaaatttctagctatgttactataactccaagaaatatggaagcacagaatgttagaactgggagaagaattaggtatttcatagttaatcttcttccttcaggaagttgaagattatcaagattatgaaataagcaaatttacacagccagctagtggcaacccaggacctgaactcgggtcttctatatctgctattgtactgttacatgtaggtctttgtatatgg

SEQ ID NO: 124504 - DNA, 250 bp, Homo sapiens
aaggatatttttgttgtacatagaaatccaggttggcgtttttttttttccttgcagcatgttaaagatgttatttgatggactctggcttatactgtttctgtggatactgcagtcattctttgttcccttgcatgtaatttatcttttttttctgtattttgcattttctttttcaaaaatttttattttatttcactttatttagagatggggtctcaccatgttgcctaggctggatttgaacttc

SEQ ID NO: 124505 - DNA, 407 bp, Homo sapiens
cttttttatgttcaccaaatgcttttgaataagatgtatcttaaagtctttcagaattttccttttctccagctgaacttagccactttcctacctgtgttaccatgagcaaattagcttcagtttcctcatctgtaaaaggagggttaacaacagtgtctgtgtcggggttgttgggagggcaggtgtggcagtgtgtgcctgtcagtaagaacagtgtcctttccctccctggggcctgtcacacctcctgcctatgttcacccacccatccacccatctacctaattcacttggttagtgtctgcctcaaggggtacaaatttggttttcttccaagggcacagatttctactaagacagacacagaaacataaggaagaagctgtttgctcctctggagagtc

SEQ ID NO: 124506 - DNA, 391 bp, Homo sapiens
tttccggctttgtgcatcccagtctcacttggcaacaggaacagtaccaataccaccaattttgtagacatactggagaggcagacggtcgaggtcctggcagtccactggggaggactttggcttcttctgtgacggagacggggaactctgcagggttttggacagagaagtgacaggatctgacttaggttgaacaggatccccagcgtgatccccctggattgagggcagacactaggggctgagggggaaggaaggagatctccaggaaggcctttgcagtgttcacagcgagaggtgatgctggctgggaccacggggcaggcagtgggggtgctgagcaatggtcagattctggatctgttttgaaggtagagtcgacaggatt

SEQ ID NO: 124507 - DNA, 723 bp, Homo sapiens
gccagtgatgttcataaaatgattccaaggcaccgcagagctctcgaatctctcccaactatcaaagggttatgcttggtttacgtttcaatattagttacactttgctctgagctacttgcaggcatttgtaaccccaggttctggaacctgtaagatgcagccacaaatgtttgctagatgaacattcgaaaaaattattttaacaattttcgaatattttggcacttgtttggaaatgtatggagtggaaagaagtagggtatttgcattctaatccaggtccaggcaccaagggtttggctaatcttagataactgattttttttgtgggcctcactttcctcatttgttaagagagagcattaggctagatgatctcagagggacttttcagtgaggattctatgattatagattgtaaattaaataaaatgtccagttaattgggttatcctacatttttaaaactatgtccgatcacaaagagagtagattataaaagaaaccatcaaccttttcatagcttcaaaggtattggtttaatttggatttactgtgagttctcatgagtttcaatacaatgcagtttacagtataatagaattcatattacaaatataagtgcattgaaatcaatgttggacaattaaacaagaacaagaacaaaaagactttttatcctctagagctgtgcttgctgttcactatggtagtaaaatg

SEQ ID NO: 124508 - DNA, 433 bp, Homo sapiens
aattcatcagtcagttctttggagtgtatatagacacagccttcatgaaaacgttgtaaggacatctcatgatgtgtttccataaatctgctcaatttataatctcttgcgtgtgagtttgcgcctctttccatgtatgtttccagtctgcacacatggatggcgctgcacacatagatgtgtggtggcctcattagccagtagctactctgagaccctggacatgcccgcctgcattgggatattgctatcgtattgaactgcttgctagaaaatggtcttggaatctcacaagggacatctattcctgatggagtgtgcagttttaataatgacttaagtcaatacaatgttgacagggtagaaatgacttatcaaagacacatacctcttaagtgcccgttctgtgcaggcacccagcaagggctgaatt

SEQ ID NO: 124509 - DNA, 251 bp, Homo sapiens
acacgagacggtacgggtctgtgaccttatgggagttcaactctcagcatacaattctttaatataaaacagatatgactgatgtgtaatcccatcaccatgagagaaatgtgtggcaggtaacctgctggtcacaaaagaatgggagacccatagtgtaaacctagacccaatccatagcttaaagccatgccctgcctagatctactgaacctcagctgacccatggacccatgagtgtgagagtacat

SEQ ID NO: 124510 - DNA, 206 bp, Homo sapiens
ccatgcccaccagtgcacctttagtagacaggcttccagcacctcagtaccccatgtgggaatgtctactgagtcaagttcacacagcctaatcttgtgcatgtttgtttgttttgatctccaggtcctctcagtttctcaaatcacttttagtggctgagtgaaggaaacaactatgcagtttcaaaataaagctatatccatta

SEQ ID NO: 124511 - DNA, 488 bp, Homo sapiens
tacagggtacttgcagctgtgatagggagacagaggagcaagcactaggcaattcatgctggaggctggccaggtgtgctcctcccctcccaccaggggcagagaggatggaaattatgtgattgccaagggcagctgagaaaaggagtcatgcctggggttttgctttgttgtgagctgagttgggggaataaagatctgagaggagcggaggaaggctgactatgagtggtgaagacggtgaaggccagcagcagccttccacacctattccattgtcatctgatggacagccaagacaagcacttttcctggctcttacttatgatattgtcttcactatttggagcagttgtgtgacaggaggcctaccaggagcagacaaagcctgatgcaccttgcactgccctttgcctccataccccccagcggaggagaggatttgagccttatgtattattatacttactgtaattcccaagaaagaa

SEQ ID NO: 124512 - DNA, 650 bp, Homo sapiens
ggtttatgtttatgactgagtattcaagagaacaattgagatcacatccccacattcaatcgtcactaagctggtatgcttcagataacatataagagaaggctactgctgttttgaaaagaacaggggagaaataagcatgtgaaaaaaatgctttatgaggcacaaagggaagacctaaaattcagaatcaaacacaaatttctctgtttttgtactgcaaccacaggtatatctacaataatttaaagcccatgacactctgagggtaaccacagtaacaaaaacaacaaaaaatctaaatgcagccaaatccctaatataactcaaactcccatacttaaagcctggcagaggaaaagacatgcccagtgtaagtttaaaaatctacttatttcagtctctactgtactacacaagatgtccagttttcaaatgacaataaaaaaccaaaacacaaagcatgcaagaaggcaagaaaaccacattcagaagtaaaagagcaatcatcaaaaccagactcagaaatgacacaagtgttggcaatagctgacagagaattaaaaagagcagtgattaatatgctaaaagctctaaagtaaaaggtggagagcatgcaaaatgagatgagtaacttcagtagagaaatg

SEQ ID NO: 124513 - DNA, 272 bp, Homo sapiens
gcatgaggaggtgttatgtaaaaaaaaagaaaaaaaattgtctggaagatttttaacagcgattgttgaagattattttataagtttgggaactgttgagttaaaggagtgattcctacggtggcttcacattagcatcacctgggaaacttttgacagctcctgcccaggcaatgctgagtccctcttaggggcaggactcaggaataaatcatttgtaaaactccccaggtaattctaatgtgtggccaggttgaaaggcactaggttag

SEQ ID NO: 124514 - DNA, 388 bp, Homo sapiens
tataataaataatacatttatttcaacactacacatacacataccacatatcactttgtggttcttttacttctttgaactggctaatatatctgccagatttccttactaacaatgagttaaatatttaacatgtgcttattttttaaaaatcaatagctttacacatatttcaaaatttgttattatgcaactatatttctagaggtaggaggacaaagcatttattttattttacaatttggtagctctattttaaatgattaaacgtgtatacctctatttgtattcttgtgccagaccataccaatgtttggaacaagttcaaatgattgccaatttgtgttaaactctatagtaggctctgggatcagcatattgtaccgca

SEQ ID NO: 124515 - DNA, 711 bp, Homo sapiens
agcttcaaaacctctcattaagttgatgaataatggattttctttctccctctaaatcataatggcactcatagttctttgtttttagctagatgaatacctttatttgggggaaaaagagtccataattgagtgaattttggttttgtttttccaaaaggatattgaacaacaaagctatccatgcttgtagcaggtcaggtgggcctgatcctaaccatagtttagctgcttgaaaacatatccattaatgttcctacctctctctttgtgacattgtctgcttttgcatggcacaatgggaagattggatagaaagaagacagggcaagaagagaggaagaaacggcccaaggggaacaaaagaattgggccaaaataaatcattcctactcatcactccataaagttttgctaacgctgtgactaggcttgccagacatagcgccaaaagagtggaacttttccactgatggcaaaggataaaagggatttgagtaggtactagagcacctactcatgcctagtactatttctttatagacagtaactcattcatttaatcaccttaaaaaaaccttttgaggtagaatctaaattgacctcaagtgtatttttttattttttatttctaacaaattgaattctactttctaattcaactcaaaaaatagtttatagtaatagtacccactgtatgccaggctctgg

SEQ ID NO: 124516 - DNA, 455 bp, Homo sapiens
ttccagggtaccacattgcatttattaatagttgtcatgtatctttagtcttctgccgtccatggttacttctcagcctgtttttctgagaaaaattttctggaaattttgaagaatactgttcacatattctaaatatgtctgtttttctcattagattgagattacaggtttttggaaaccacagcagtacaattcacttcacatcctatcgggggtacacatcactggtgatattaacattgatcacttggttaagtctgccaggtttctccactgcaaagttactttttccctttccatactctgttctttaggagtcacttaatctagcccacattcaaaaaggagaagattaagctccaccctatgaaagggggaatatctacatatatttggaaatctttaaggaaattctctcttctccctgtggaagactttttaaactctttggt

SEQ ID NO: 124517 - DNA, 164 bp, Homo sapiens
agatatcttaggcagaggggatcgtaagtgcacatgccccgaggtgaggggagtgggcctgttgagagagtagcaaggagtccactagggctggagtagatgaatggaggggagggtggtaggagatgagtcgagtcaggtggcacaggacctcgtaggctgtg

SEQ ID NO: 124518 - DNA, 401 bp, Homo sapiens
ttgctttaaccattcctcatttacagaatcctctgatttagccccatcccaaccaccttcctcttgcaatggctccagttttttaagtccttcttaaaacaaagctttctaaaatgagcacaacactccagatatctctgatgaagataaaggcaactgaaaccattaattttcctgatctgggtacaatccttctgtaacatagcctcgataccatgttagctttattagtcacataccaaaacatccagctcttttccactcacagtactgagaagccctatttcccccttcaatatctaccaaccaatttttttaaaaacctcaatgcaggacttcacatgtattcgtattaaattctgcccagtttctgacatacacagactaatgataatctttgg

SEQ ID NO: 124519 - DNA, 429 bp, Homo sapiens
gttgtgtattccaagcgcctagcacagtgcctgagcaaatgaacaaagcaatgagtgagtggttctttttctaggatccctcttattctaacattctgtgactcttccagttttaggaattgctggaggaaggtcaggggttaggatggtcaagtgctctcctgctcagatttgaagctgctccaagaaggcacattcagactcggtattctggaaatctctgttttctggcatggaaacagctgcagcagagtagagttttggggccatgccagacttgggggtgtccatttatcaaactggtgccaatctccttcccaggtgaacacatcccagctatatggtcctcagccagtggggtgggggacaggatgggggacttcctgctactctccagtgagatcattccctggaccagtgcggcgtcat

SEQ ID NO: 124520 - DNA, 330 bp, Homo sapiens
gttctttgcctttattattcttactatttttttagagatggggtcttgctatgtcgctcaggctgaccttgaactcctgggctccagccatcctgccaacttcacctctggagtagctaggtctacaggtgtacagcaccatgcccagctcctttgccagtttttgaatggggttgttgtttctctgttgttgcattggaggagttctgtatatattttggatataagttactataagatatattgtatataaaaattctctcccattttgtacgttgttttttcactttctttttagtgtcctttgaagcataaaagttgttaattttg

SEQ ID NO: 124521 - DNA, 495 bp, Homo sapiens
tgcggatcataagtgataccataagtgtcacagcctgatatcttgaaaactctttaaccggttctcattcattcatttatgcaccctttagatttattcatccattaatagtatattgctgttctctgtgtgccaaggactgttctggaatcttagacatacgaagatttcttacatccccacagttgagtgagaatgacagaaatcatgacaccagctggcaggtgctgcagtgaaggtgtatgcagaggatttttgagaacttagaagggaagagtcatttagtagaagagagtacatctgagcttcccatttctgggactctctatgtccagcatggtaatggagtcttacattcatctcctttttcacctgccagttttcactgattcttatgtctcagtataaattccactttggaaaatactttcatgactcctttaagcaaacctgatttattctttaaatttttattatgtcctcactacatgccat

SEQ ID NO: 124522 - DNA, 571 bp, Homo sapiens
tgcatcaacgcgtcgggagctctccatattgtcgacctgcaggcggcgcgaattcactagtgattgtgagctgagattgcaccactacactccaacctgggccacagagcgagactctgtcaaaaaacaaaaacaaaaacccagccacacaccccagcatttttacaaaagggaaaaagggatgcattcaagataatacaatgacattcctatgttttctctgagccagagagcagagaaacattgtggctaaggtggctttctttctgatcaaggtttctgtgaatgggcagtgtccacacatgaattctgcctaaaggctctgtgggagccaggctgcgagctgattgcagcagcagaaggcagcaggtaggagatgacattttagaattgttcaaacagaccccaggcctagaagatatgccagacacggtgttaggagagaaagaacaaagcgacaccagaaacaatcgtttaaaaatttaaaagaccatttccctttatcaactccacagctggctaccattccagtaaatttctaaaacatgaaactggccccagcagggcagag

SEQ ID NO: 124523 - DNA, 565 bp, Homo sapiens
ccatgtgccaagtacagttctaacactgaggatataatatagaattaataacaggcttttttagaataagtataggatttcaagtggtagtaagtattcagaaagacaacatggagtcataggatagagttccaaggtagggttggggtgggtgatgtttttagatcggtggctggtgtaagaacctgaataaagaatattctagtctaaatgagcttgggataaggccagtatgtctgaagggagcacagctggtggtcaagggcggtggttgttagaaacatattgggaaattccggcaagaaccagattggggtaaggtcttaacggtgcaaggagaggagtttgaatttatttatttatttattttttgagatggagtttcactcttgtagcccaggctggagtgcaatggcgcgatctcggctcacagcaatctccgcctcccggttcaagccattctcctgcctcagcctctggagtagctgggattacaggcatgcgccaccacgtccacctaattttgtatttttagtagagacggggtttctccatgttggtcagg

SEQ ID NO: 124524 - DNA, 480 bp, Homo sapiens
ccatgtgccaagtacagttctaacactgaggatataatatagaattaataacaggcttttttagaataagtataggatttcaagtggtagtaagtattcagaaagacaacatggagtcataggatagagttccaaggtagggttggggtgggtgatgtttttagatcggtggctggtgtaagaacctgaataaagaatattctagtctaaatgagcttgggataaggccagtatgtctgaagggagcacagctggtggtcaagggcggtggttgttagaaacatattgggaaattccggcaagaaccagattggggtaaggtcttaacggtgcaaggagaggagtttgaatttatttatttatttattttttgagatggagtttcactcttgtagcccaggctggagaattgcttgaacctgggaggccgagattgcaccactgcactccagtcttggcgacagaggagactctgtctca

SEQ ID NO: 124525 - DNA, 474 bp, Homo sapiens
ttttttttaactcttaaggcccttttatggctgtttcttagcgaaacctcacaacatgcctatggggtgggaattgatgttccattccacagctgactccactgaagcccatgaggaagaaattggcccaaatcacagtcccctctgattacagaacagaaaaagtcagctaaaatctcaggatcacttttttcaggtgatgggaggatttcagaagttctgtggacacctgaaattgggcacaaaatcaggtgtttcatgccagtgggcattttccaggtagagggatcatatttctctcgagagtctaaaagtgtgttgaacaagcccactctttacagatggggagactgagcctggggacagggagtggcctgcttcagaaaagactcagaaattaaatccagtccagtgggtttgatatttacccaaatttccagcctggggagattgatgcacccaagagaagaaccc

SEQ ID NO: 124526 - DNA, 380 bp, Homo sapiens
tgactttttcctccatggagaaaaaggaaagtatcatctcactggggaagcaagcttgggctggaaatgggtcatggtctcccaaatctaagatctggcagaaggttggttttgtatgctttggacttgggccaagtgatatgtttacttaggctccagaagggcctggttctaaggcagccacactgataaatgaatgccttgtatcaagtgtggagaggcttcattatatttaaatccacttaagagaacagctatagaagaatgactgtttaggactgtggctctgttttcttgtttgtcatttagatatttctgccaattataataaatgtggaggaaaaaaaaagccagcaaattgctatagtctctttaaaacc

SEQ ID NO: 124527 - DNA, 1604 bp, Homo sapiens
ctctaccaaaaaccataaatgagacatattagaaacattttctataatttttataatacctgtttcttcaaattttcaacaatgcttagagaagtcggtttcctgggatgagctaagtcctaaaaactatcttaaccagcaggttctttgtgatttttaaaaattatcctttttattatcctaacatgtgacaaaactccccattaattattttttttaaatagttaatcttgctatttgttacatatgtcttcaagagaattatataaaatattttttatgtatatttatatagctgtacctataggtatatatgtatataggtaaggcccagaacttaatgaccagtgtaggattaatgagaacagtgaaactgggctcaggaaatagcaatacgccaacacttcttaattttacctcatttttgtctatttgtctagaacactcaggatatagtatctataggcaaatatttatgtgtttatccttgcaatttgagaaactaaatttaaagctggttaaaaaagagagaagataattgtattcagtataaatgagacttacaccaaattttgtacctccaataaatttgttatagatttaatcagtagattaatttttagaattcctttagaaagttgagtgtttagtgtcacttagggggaagttatttaagttattgttttacttcatttagtaggactcatgatgacatattttaaaattatttttattattttttgagacagggtctcactcttgtcacccaggctggagggcaatggcacaatcaaagcacactgcagccttgacttcctgagctcaggtgatgcttccacatcagcttcctaagtagctggaactacaggtgtacgccagcacacccaactagtttctgtatttttagtagagacaggatttcgccatgttgcccaggctggtcttgaactcctgggcccaagagagccacccaccttggcctcccaaagtgctgggattataggtgtgagccaccacgcctggcctatgacactttattgatttcatatttgaagttccaagaaacaaagaaggaaacaattcacagaaagtagaggttaaggtgaataatatttatgtaggaatttactacaagtttaagcctccttgccaaagtgccacaaaaaagaaagttattgaattttttagtgcatatagaatatgaattaaattgataaatgtcagattacgaaggaccttcaagatcatttagcccaactgcttcttattatggatgagaggctgagatctagacagatgaagtagcttctcaggtcctatgagaatatagctcaggaccctagactcttattctgtgaaatttacaatgcacatgacacctcccaagactgattgttgaaagtccatcaatgtaatgattttattagttctttctaccaaaaaaaattaatagttttaagtcggtttaggaaaacttccttaatatatctagttctctatgttgaaagcactttgaaagtaggattgaataaatgaaatttccttttatataaattacatccatgaattaactcaaatcaagtcagcaagtatttattggatgc

SEQ ID NO: 124528 - DNA, 372 bp, Homo sapiens
ggatacactcagaactgcaggaacacattggtgaaatataatcattgctctgattgccttcatatttacaattaaagttgtcagtgctttcagctaattcctgtttatgccttccaggttcaacatgattttccttgatggcgactgcccaatctctcgaacaggtgaggtcttcaggacttttggttttggggctattgctggtttcattttctttgtcgactgtggaacactagaaatcacaatgtcgggtttaggtgcaataggaggtggggctggcttattatttgccacaacaaacttgggcttgggggccactggtggcttctttatctctaggctgcagaagtcatgattccccggtgcagctcg

SEQ ID NO: 124529 - DNA, 376 bp, Homo sapiens
  misc_feature (368)..(368): n is a, c, g, or t
ggatacactcagaactgcaggaacacattggtgaaatataatcattgctctgattgccttcatatttacaattaaagttgtcagtgctttcagctaattcctgtttatgccttccaggttcaacatgattttccttgatggcgactgcccaatctctcgaacaggtgaggtcttcaggacttttggttttggggctattgctggtttcattttctttgtcgactgtggaacactagaaatcacaatgtcgggtttaggtgcaataggaggtggggctggcttattatttgccacaacaaacttgggcttgggggccactggtggcttctttatctctatgctatgtctggtccgagctgcagctcgcncctgagtt

SEQ ID NO: 124530 - DNA, 200 bp, Homo sapiens
aacaggaaaatggttaaaaaaaactacaggtaatctacccaatggatcattatgcagccacaaaaattccacttagcacagtttataacacgaaaaacccacctgttatgttgttaaatgaaatggcagagtacaaagacataatatgaaaaaagtgactacaaaattcaaaaacatgcattaatttaaaaaaatctatg

SEQ ID NO: 124531 - DNA, 458 bp, Homo sapiens
gcctcaacctcccatgtccaagtgatcctcccatctcagcctcccgagtagctgggactacaggtacacaccaccacactcagctaatttttgttgttgttgttgtacagatggggtctccccagcccaggctggtctgaaactcctggtcccaagcaatcctcccacttcaacctcccaaagtgctgggattataggcatgagccactgtgcgcagctggggccttactttatgtaccctgtagataggatagacagacaacaaatatgcaaaacaaatgaacagacagtgtaatttcatcaagtgtttagtgattaaactaaaacagactgatgtgacagcgagtcagggggtgctactgtggataattttcacgactgacaggaggaggtgatgtttgaagtgggacctacattaagagaagcaggaagccctgcaaggatttgggtgccgtgct

SEQ ID NO: 124532 - DNA, 622 bp, Homo sapiens
cagtataagacattgcttatttctacaatgctgacctcttttgcctagcatggctgaattagctaaacatcatatcctaaggaaaatagtgatattcagaatctacatcacttgaatgaagagctatattcaaccatttcatgaacaattatttagtgattcccaactttgggttaagctccatttggggacatgcacagggttcacagacatgtcaattttcttcctgagaaaattgagaaaagagagaaaatatgactaaagaataatgctttaattgtgaaggcaatcgcacatacattaaacaattagataacaaactattacagggtaaagagctgaactatccactcgaccacagagctcattagagtagattctacctttatttctgaataatgataatattacatggttactgcaaagtgcaaataaacctaatgaacatctacacacacacaaactgccctgcatattgcagtgtaaggcaggcaactcaacaaatagaagctgaataaatgaatgaatgaagaatggtcatatggaaggaattcccatttttctcctcccgaatataacttggtagaatttgaacaactccatgtttctgtttaagtcactg

SEQ ID NO: 124533 - DNA, 838 bp, Homo sapiens
cactgggggtaggcaatgaacccagttgtctttttctgccacttttggggaaaaaaattcttaccagcaaactgtctagaagtgttgaccacttaaatgaaacccacacgattcttattttcttctagaatctaaagtttacagttcttttgtaattttccaaaaagtctttgacagatatatttgaggtgaagcagaactgacaacacacacatacatttgttataagaaactgggaaatatttgacctaaaacccccaatgcattggcatagtattacctacaaggtagatgttcaataatagtgatattcagaatctacatcacttgaatgaagagctatattcaaccatttcatgaacaattatttagtgattcccaactttgggttaagctccatttggggacatgcacagggttcacagacatgtcaattttcttcctgagaaaattgagaaaagagagaaaatatgactaaagaataatgctttaattgtgaaggcaatcgcacatacattaaacaattagataacaaactattacagggtaaagagctgaactatccactcgaccacagagctcattagagtagattctacctttatttctgaataatgataatattacatggttactgcaaagtgcaaataaacctaatgaacatctacacacacacaaactgccctgcatattgcagtgtaaggcaggcaactcaacaaatagaagctgaataaatgaatgaatgaagaatggtcatatggaaggaattcccatttttctcctcccgaatataacttggtagaatttgaacaactccatgtttctgtttaagtcactg

SEQ ID NO: 124534 - DNA, 277 bp, Homo sapiens
gtggtggagccagcagaccacttatcagaccttgctgcgatgagcaaatcccaattacaaaccatccagaccacacgggggaggtcgtgggaagcataagcaaaatttacctacacccccatgtatcataaacatcataaggcggtttgtggcagaattaaccagcaaacaaccccagggtctctctgccccgtataaacccctcattttttaagctcagggctgcctcctctgtctgtaatggagcagccggcaggttgaataaaggtttgcctga

SEQ ID NO: 124535 - DNA, 265 bp, Homo sapiens
gctcttgttaatgcttgataagaacaaaatatttgatgattgaatgaatttagtgtttgtgtgtatatactccatgttaaaaaaaattttctcttctctgaacttttactctccactcagccctgagtctgaatattttcattattttctgggaggtgggaacagtttgcaggaaggaataaggaaaagtttccaatcattctgtgtgtatgagattgaaaaggcgcatgttttgtgtaattatagatacgtcacatgctcacaa

SEQ ID NO: 124536 - DNA, 224 bp, Homo sapiens
agggggagtctttgcttaaatcatgttaatgaaattggaaacacttgaaatagcccattgagggtctgttgcccctgttttttaaagttcatctaaaagttaacctacaaggaattttcatttggggaatttctgcaatgtcaactccactgatcacccacagtgtttaacacccttgctataaatttgggggctagcttggcagctcctgccacccccctgag

SEQ ID NO: 124537 - DNA, 1036 bp, Homo sapiens
gagtgtcgtatgcctgcgagtcgttccatcctgaggcaatgagaagtgctctcctagggtccatttatcaagtgcttctactggcatttgatggaaaggaatttagaagtcatagtttgatacacttcgagcacggccacgttctcctttgcacgtcctgagtatgtatgtatgtgtgtgtatatatcaaccccatgtacatgcttttcagcagttatgtgctgtcaaaagccccacagatgaaacaacaagatacagctgtgcttcgtaatgtaatgagtaaaccgccacagcaattgtgtcaggatcacaattctttaaggcactgcttcctaaaatgattgccggttcatttgcatcagatagggaagatgtgctagataaattcagaatgtcgaggaacagtttgatgttgactgtggcatgatgagggatctttctaaatgatgatactgttagctcgtggctaagacgagactggtctaaacacaacagagacggcagtttcctgttgcagtgagtcatgagaggaaatggataaaatgaacataaattaactgcatttcgttttctaagagttggagagggaagggaaggaggcagtggatggccagtgtgcctgaaaactggaattagatcggtgaactgagaggattggtttctgccctacgttgggtgaagaggggcagtcctcattgctaacagccgcaggttggtgtaattaactaacttccgtaggcaatgcccggtgtacatcttgaaaacccatcagatggggtatttctcactgacatcagcttttaaagggaggagggctcatagttgtatcacagctgcagtacttttctttaaggcaagaaacagtttaaatcagagaaaatttcacaggattctagatcgactacttttttcatctagttctattattttgaccgtatggccgttttttgtttgtttaatggcgtgaattaaagtgtgacatttctgtccatcttttcacgtacaaaatcagcattcgttaattcaggttatgaaa

SEQ ID NO: 124538 - DNA, 164 bp, Homo sapiens
gttttgtgaacagaaacagagaagtcaggaaatcgagggcctttattaagagcttcctccaggccaggtccctgctggggtgtgtgtgggcttaatctcatgtttcagggtaactgttcagtaggaggtggaaactgaggctggacttcggaagaggggaatca

SEQ ID NO: 124539 - DNA, 309 bp, Homo sapiens
tttctactttaaaaagctaagataagaagagcaaatgaaaaccaaagtagtagaaagaaataataaaaagtaaaaatgaacaaaagttaaagtgaatagtgaaaatcgataaaaccgaaacttcactatttgaacagacaatgaaaacaagtaaatctctacccagtctaattaagaaaaagaaaaattattataccaatatcaggaatgagaaaaaagaaatcaccattgatccttaaaacaacaaaagaaaatattaatagaactttggtcaattaaacaattaagaaaacacaatttaccaaaact

SEQ ID NO: 124540 - DNA, 602 bp, Homo sapiens
aattcgccttactactactaacaaattatgcaccgtaagagagaagcaggtgataattggcttgcaacaaatgaaaaggaactggacccttctcacaaaatactgattttcacataatttaatgacttgatgttctgagtatctgcattaaaatgtgatttaaaaaaaaatttaaggtatctgacacctcacatggtcctctaacataggtacaaaaacatattccaaaaggatgtatttaaaatttggctttcaatcctatgataaaagtaaaattctactaggaagaataaaaatatagtactctttgacaaagctacacctatgtgtctaaaagatttatagtgaaaaggtcattcaaagttagataaccagaaaatggctaacacgaacaaagtcacaggttatgttagcagggctgagagattctttattagtaaccaggttaaagactggtatattgactttttaattttgaccccaaagcaggtggcttatccgtgctcttatcacgtataaagaccatctctctggcctgggaatctgagcagcatttggcggctagcctcccaactccatgcacacgcacctctgtgcagctg

SEQ ID NO: 124541 - DNA, 626 bp, Homo sapiens
tatatattacaaatacctattagagatatgtattagtaaatgtcatatacatatttatatatatatacatgtaaatatataggtatttgtgtgtatatgacactatatgaatacaaatcacaggcatatacttacacacagatacggagtcacccaaggattccctataaggccatggacaaaaagcatgtgtctcccatggtggactgaattgtgtcacccccaaaagatacactgaagtcctaaccctggtacctgtgaatatgaccttatttttgaaataaaaatatatttgcagatgtaattatgatgtaggtggagatgagattattctggagtagggtgggccctcaatccaatacggctggtgtccttataagaagaggggagaggaacagagacagacactgtcatccacaaggagaccaccatgtgaagacacagatgcatagggaagggccacgtgaagatgacagcagtgacgggagtggggcagctacaagccaaggaatgtggaggagtgccggccaccaccagaagctgagaagaggcaaggaaggacccttccccacagcctttaggaggaacatggccctgccgaaaccttgatatcacacctctagcct

SEQ ID NO: 124542 - DNA, 333 bp, Homo sapiens
caaagggctgagtcattcatgcagcaccacatggaagtaagtggagggccctggagctcctgatgcctgccattttcagggaggaagttagaggcctgccgggaacaagtttggacgctggcttattacctttcctgttctaaccagtcaggcagttaaattaattgagtgtctatcatgtggaaagtatgcaccggatgctgttgggaggggatgcctgtcttccttgttgaaaagctcatagaccatcaggaagttaggacacacaccagaaaagtcagaacatagaattgacgtttcattactgagtgtatttttatggacacttccttc

SEQ ID NO: 124543 - DNA, 288 bp, Homo sapiens
agcctattgaaggtaaacaaatcgttgggtatttctgaccttcaacaggattgcaaggaaagcattaagaggcgatggttaagccaatgctcaggattttgaattctcagattgaagactttccgaatacgggcgtgagtccatgagaaagtttcctaatctctccttacacttaccaccagggagccagacccaattattcttggccaaagaacaggagccttaatattaatagtagatgagacctggtaggtgtcttagaaacttaaaatgtggccaagtggaata

SEQ ID NO: 124544 - DNA, 429 bp, Homo sapiens
ctgtgtcctaatctgttcttatgaaaaccccagccagacttggttagagcctaccctcatgacctcgtttcaccttagtggtctccttaaaggtcctgtctccatgcatagtcacatcctggagtactgggggttaggacttcagcatatgaatttagacaattcagtccataacaggggtgcggggccaagggcggccttgtggctggctcagccttctgtttccatgctgctcttaggatcatggaactggaagggacatgaggaatgttccagcccaaacccacccacctgcacaaagggggaaaccaaggtttagggaaggaaaagcagctgtccagggccaaggagaggatgtggcagagcccgaacctgagccctagtccccagactgtggacggtgcagatcctagtatttggaacagagac

SEQ ID NO: 124545 - DNA, 202 bp, Homo sapiens
actcacggtaagtatgaaaacaccaacaaagaattccgttaaatcgggagggaggaagggaaggtcgggtagagacacttttaaacacatgcagaacttgatgaggtagtcttgaaaacgcaagccttctgggaagaaggagaaaaagaatgaaagggtaccctctgttggccgggcgcggtggctcacgcctgtaatccta

SEQ ID NO: 124546 - DNA, 712 bp, Homo sapiens
atcaaaaagatatgacaattacatatgtatatgcacctaactacagaataccaaaatatgtcaaacaaaaactgacataaatgaaggtagaaatggaaactgtaataataatagttgaagacttcaatactctgctttcagtaatggatagaatgactaagcagaagatcaacaaggaaatagaagacttaaataatactataaaccaaatgcacctaacagacatctatattaacactctactcaacaacagcagaagcagaatacacattcttcccaaatgcctatggaacgttctctaagacagaccatatgctagcccataaaacaaacctcaataaatttaaaaggacagaaataatacaaaatatgttttctggtcgcaatggaatgcaaatagaaatcaataacacaaggaaagttggaaaactcacaaatatatggaaattaaacaacacactcctcaataaccaatgggtcaaagaagaaatgaaaatggaagttagaaaatactttgagatgaatagacatgaagataacatgaaaacttgtagggtacagcaaaagcagtgattagaggaaaatttatagctataaatgcctatatttaacaagaagaaagatctcaaatcaatacattaaaaaactggaaaaagaagagcaaactaaacaaaacaagcagaggaaggaaataataagtattagagtggaa

SEQ ID NO: 124547 - DNA, 561 bp, Homo sapiens
aacccctagcccctggaaaccacccttctactcaaaagaacaatctagccttgcctgggatgaagtgcaagaaacactcctgtggatacaatctctaccccagccttcacttcctgtttctgcacttcagagcctctcctgtggggcatttctcctttctcctataagttccactcttccatcttctcgtttatttgagctgttaagctcaacattaggtgttcacatatgggtcagggtggtgagcatgtttttgcagtagaaatgagaaaacagctgggcaccggtggctcacgcctgtaatcccagcattttgggaggccgaggcaggcggatcacaaggtcaggagatcaagaccatcctggctaacacggtgaaaccccatctctacttaaaaaaaaaaaaaaaaaattagccgggcgtggtggcgggcgcctgtagtcccagctactcgggagtctgaggcagcagaatggcgtgaacccaggaggcggagcttgcagtgagccgagatcgcgccactgcactccagcctgggcgactgagcaaaactccgtctc

SEQ ID NO: 124548 - DNA, 228 bp, Homo sapiens
agagatcagagtgttcatgatgaagtgagaatagacaggagtgatactacgagatttctttggaaggaggcttagcagaagccggaacaccaaagaccatataagggctaagacattcagtgcattcttgctgatagtgttgagtgctcttgactttccttaatcctaaagatcattgttagaaatattaaatatgtgtctagcacatcaattactatgacccagatc

SEQ ID NO: 124549 - DNA, 436 bp, Homo sapiens
gtaatgttggcagctgacagtgctcagctgagaccctcttcgggattgcctgtggctgaggagaactaggatgcccaaggtaggagcagtagcaacccatatccaaagacaggttgatgctgggacatgaaggcctggacctttcacccggcttggatccactttgaacgcccagccccgttgcagagcatcctcctggatcagtcaggcttttgtttgcagctgcatcagaattcagcctctccctctgccctgttttactgcctgtattccctcacaggtgttgccccagagcactctgaataaacttcctgcctgtgaatctctaccagagagtcagcttcctgcacccagtgctctataaggtttctaggcaacaggaaatgccctaaaggccagaattcctctcgcgggtatagcagagagtaaacagagt

SEQ ID NO: 124550 - DNA, 511 bp, Homo sapiens
aatttaggaaggcagtgctctatctggtgagcaaaaagaaacaaatctccatggtatgcctttcattaaatttttgtctgattttcagctttttctttgtggtataaaattataacaacatatagaaaagagtggagctaaagttgaacacttggccatctcctgtaataatacacagtacaaggtaggagttacttattggctgactgctctgttctttagtgcttgtggtattgcctccaaaattaatgaaacagacgccaacataggagtcccaagatcagttagcaagctgcactacttagccctatgactgtcatcaaataacttaccctctctgaatatagatttttctcatctattataaaatgaaattggaaggaaaattgaacaaattgcacagtatattctttaaggttctttccagctttaaaatgtaattatataatacagtaatacagtgattatttttcttcttaaaccttgttgaaaaatcttaggcctaatgtac

SEQ ID NO: 124551 - DNA, 486 bp, Homo sapiens
ggtggggttattagaggatcttcaagccagagaacgccaatcttgggagacacaggcaggagaacagactagtactatttccactggaaagggaggttcagagtagcttgggagtccaagattctcagtttcagttgagtctgaccaaatatccccatcccaaatctcagggtcacactttttctcattcagtgctttcaaatgagactaggtgtctgtggaattcaacttaagttgtaattctgcaactggcacatttaaatctgatgttagcaaggtgaactccatggctataaaacataaaactttttactggggctaccacggaagttctctggttctctcatggtaaatgtgagctgacagtttagtgatctgaacttgccgtttttattctataagtgctccagtatattcagaagaagccacagcttagcacagtctttgtactcatcatttctgccaaactcaaatgtagccaccatt

SEQ ID NO: 124552 - DNA, 456 bp, Homo sapiens
acgggggaagaatagtgcctgttcccatcaatcagactggaaaatctaatgattcaagaagcactgagtagggcacacagaatggtcttgtgtcagcagtgggtaataaccgacctgagactgagcccttatcaggttctgcctaataaatcttaaaagcaagaccctacaggattaaacggtttcccactagcttaactgtgtctcaaaacaaagctcactatttacagaaatagaagaatatctagcatccaacactgtaaaattctcaatgtctgtaatccaatcaaacattatcaggcgtgcaaagaacctgaaaaatactacctagagtggaaacataaatgaatcagttgaaaccacccacagataacatagatgttaggatagcaaacaaagacattgaaacagttatgaaaaggctgggcacggtggctcatgcctataatcccctat

SEQ ID NO: 124553 - DNA, 552 bp, Homo sapiens
attgggagactgcctttgcctagtagcagctgttattattttagagagagagttaacaaccacctgaccatcacttgatggtcacctgacattcctggttttggcaggggctctcttgccctgtttatgtccaactagctacctacagtaacaaaaccacacagggccaacgggggagttaccagggtcagtcaggaggcagtaggagtggggaaaaacataggcaagatagttttcatggtaaggaaagggtaaggtgaagtaggcaagctaagcaggtttaggattgaatagtttgaataattttggtgggctctgggctataggggtggcccctagttttccagtatctggtcctcaaatgatttagagcaggggtaacattggcttggtgtatgagaattagataaaggaggtggttgcagttatggctggtttgcatatgaaaggcatgctctcggggaagttgtctgttacctctaggaattagcttactatgggagggggagcccttccctgcattcacaatgccccaagatgtcgaagcgtcat

SEQ ID NO: 124554 - DNA, 148 bp, Homo sapiens
ggggttggttggacttgggggacgggcacaggggtggctggattatggtcaggccagcaggaccttctggccagggctttgcttccgtattattaagtatcatgttttaccaaagaagcactgatacagaccccccactcccccactt

SEQ ID NO: 124555 - DNA, 134 bp, Homo sapiens
gcatgtaattttctaccatactggccaatgctaggcaataatcaacgttaacatatttttgccatgctgacagacacaaatagtatattttaatttcatttacctgatcactagggaggccaacacagactata

SEQ ID NO: 124556 - DNA, 391 bp, Homo sapiens
caaccccttaggatccctttccttgtagattcttaaggtttatatctctaatttggcaatatctttgcagggttttcttggggggtgggtcacgctttgtgatttaacctctggattacatagaccttgaaaattaaacactgcctttaaaaaaaaatctcagtcatagttaaaaggaaatagttggcacttatatcattgatatggtttggcagtgtccccacccaaatctcatcttgagttgtagttcccataatccccacatcatgggaaggacctggtgggaggtaactgaatcatgggggcaggtttccccatgctgctgttcttgtggtagtaagttctcatgagacctgatggtgttataaggggcttttcccccttttgctaa

SEQ ID NO: 124557 - DNA, 219 bp, Homo sapiens
taaagcacaaaaatcaaaaccaggaaactgaaattctgtaatgtatgtatgtagttctatgtcattttatcacatgtgcagatttcttttaccaccatgatcaaaatacctaactgttccctttcaacaaaaatccttttattctacccatttatcattacctccacctccttttcagcatccctcatccttggcagctactaatttgttgtccctatc

SEQ ID NO: 124558 - DNA, 532 bp, Homo sapiens
ctgcctcagcctcctgagtagctgggattacaggcatgcaccaccacccccagctaattcttatatttttagtagagacggggtttcaccgtgttggccaggttggtctcgaactcctgacctcaagtgatctgcccaccctggcctcctaaagtgctgggattacaggtgtgagccaccatgcccagctagttttgaattgtttaaggccacccaaacatttaccttatgaagttataggatttggaataaatgttacaggagtaattctactttctcatcctgttcctcacctggaatgtcacataagtctaaacggagaaaaggacccgaagataaaggaacagctagaacaggaagtgcgagcataagaattcaaacccagggagctggcacaatgagtgccccgtgcccaggacaatggaggccacttgtgtctgcttggagccccaggcaagccatccacatttccatggcacaggggtgcagtcgatgagctgcattagtccttcgctgggctgtgtttctatta

SEQ ID NO: 124559 - DNA, 147 bp, Homo sapiens
ttgtcagaaaggaagaaaaatttttggtttcaggaaatagagagggttttaagagtcaagttgatatgtagtcaattttttttctttctttttttattaacctttcctatggtgctgagataaatactcaatttgatgtggagataa

SEQ ID NO: 124560 - DNA, 750 bp, Homo sapiens
atattttcttctccattgcacttttcttctgacttcttagatgaggacaggacttaaaaaaaattgtatttttattttctgctgtttccccaaaatatttttcttgttttgtttcttaaagaccatgtcttgttctgtcacccaggctggagttcagttgctcagtcatagctcactgtggcctcaaactcctgggctcaaaccatcctcttgcttcagcttcctgagtagctgggactgtgagcacatgccaccatgtttggttatttatttatttatttatttattttttgggtagagacagggtcttgctttattacccaggctagtcttgaactctcaccttgacttcccaaactgttgggattgcaggcatgaacgccgcacctggcctgttgatttggggtggagcgttctgaaattgaggcagtaattaatagcctaccaaccaaaaaaagcccaggaccagacagattcacaactgcattccaccaaagttacaaagaggagctggtaccattccttctgaaactattccaaataatagaaaaagagggactcctccctagtccattttatgaggccagcatcatcctgatactaaaacctggcagagacacaacaaaaaaagaaaatttcaggccaatatccctgatgaacattgatgcgaaaatcctcaataaaatactggcaaactgaatccagcagcacattaaaaagcttatccaccacaatcaagttggcttcatc

SEQ ID NO: 124561 - DNA, 3936 bp, Homo sapiens
agcggcggggggcgggaggctgcggcttcgggcagatttgattttcccgcagcccgggcgccccggagccgaagcccgagccgaggaggtggcgctcgcagccgcgtctcagccccgtcgccgccggcgccaagacccagggagaggcggcgcagcccgggcgctcgggctccgcgctgccggcgccccgccacccccgccgccagcgccccatccggcgcctcccgctcctcacgcccctctccctgtcttctgcatcccctctacctctgcccacagacgcgcgtccctctcctggtgcccctctccacgactccgcgtttccctcccggtgccctctccccgagcccctctccccgcgcccctctctgccttccccgctgtgcccccgctccctgggctccttgcccttccccactgggcccctagcctcctcgcggcgtcacccgagccccctcctcgatccgcggcccccgctccctccgccctcttccctctctcacttcccacgccccctcttcgcgctcctctctcctccccttgccgcccagcccaggctctggagttgggggagagcccagggctccagtcgctccggaggaggcgtgaatcgcgcagggattgactaatttggggtggggggtgcggtgggcgatggagcagcctgaggacatggcgtcgctgagcgagttcgactccttggcgggcagcatcccggccaccaaggtggagatcaccgtgtcctgcaggaacctcctggacaaagacatgttttccaagtccgacccactgtgcgtcatgtatacccaagggatggagaacaagcagtggcgggagtttgggcgcaccgaagtcatcgacaacacgctcaatcctgacttcgtgcgcaagttcattgtggattactttttcgaggagaagcagaacctccgttttgatctatacgacgttgactctaagagtcctgatttatccaaacacgatttcctgggccaggccttctgcacccttggagagattgtggggtcccctgggagccgcctggaaaagcccctcacgataggcgcattcagcctgaattccaggacgggcaaacccatgccagctgtgtccaacggtggtgtcccaggaaagaaatgtggcaccatcatcctgtccgctgaggagctcagcaactgtagggatgtcgccaccatgcagttctgtgccaacaagctggacaagaaagatttctttgggaaatctgaccccttcttggtattctacagaagcaacgaggatggaacgttcaccatttgccacaagaccgaggtcatgaagaacaccctaaatccagtctggcaaactttctccattcccgtgagagccctctgcaacggcgactacgatcggaccatcaaggtggaggtgtatgactgggatcgggacggcagccatgacttcattggggagttcaccaccagttaccgggagctggcccgtgggcagagccaattcaacatctatgaggtggtaaacccgaaaaagaaaatgaagaaaaagaaatacgtgaattctggcacagtcaccctgctttcctttgctgtggagtcagagtgcaccttccttgactacatcaaaggagggacccagatcaacttcactgtggccattgatttcactgcctccaatgggaacccctcacagtccacatccctgcactacatgagcccctaccagctgaacgcctacgcgctggcgctgactgccgtcggagagatcatccagcactacgacagtgacaagatgttccctgccctgggcttcggggccaagctgcccccggatggcagagtgtcccacgagttcccactgaatggcaaccaggagaacccctcatgctgtggcatcgacggcatcctggaggcctaccaccgcagcctgcgcactgtgcagctgtacggccccaccaactttgcccccgtggtcacccacgtggccaggaatgcagcggccgtgcaggatggctcccagtactcggtgctgctcatcattactgatggggtcatctcggacatggcgcagaccaaggaggccattgtcaacgctgccaagctccccatgtccatcattatcgtcggcgtgggccaggcagagttcgacgccatggtggagctggatggcgacgacgtgcggatctcctcccgggggaagctggctgaacgcgacatcgtccagtttgtacccttccgggactacgtggaccgcacaggcaaccacgtgctgagcatggcccgcctggcccgagacgtgctggcagagatccctgaccaactggtgtcctacatgaaggcacagggcattcgcccgcgtcccccacccgcagcaccaacccactcgccctcgcagtccccagcccgcacgccccctgcgtcccccctgcacacgcacatctgaacctggtctcagcaggcaggtggctggggcctgggagaggccaggtgaatgggaggccagggccccagactccccgaagttggcctgcccggcctttgggacatctgtgtgcctgggaggctgccagggggtggggcttctgaagacccctcctcaatttcttggcctcacttattgcccaaacccagggagttaggggggtacgggtgaaagaggggtacacagggacccagcccttctcttcttccccaatacctggctctaacccagccaggaaggtgtaaacaataagggtgattggggtccctgtcgcccacccccggcaatcctatttgcttacctgtcaccctgaagcctgggcttggcctcctccagccccccatctccgtcccatcctcccatggtgtctactcctgtccctgagccccgccctgtggtctatcctgtgcccgatttccagtgaaccccatgaagctgatgggtttgcaggaaggcctgaacatgtgcaccctcccagggacactggatgcgctgggagccccggggaccccatggggtgctgtaatcatggaccgtaggccatgtgatgggcctgaagtggaggctgctcagcacagagccctttctggtgcctctcgaactcagtacgatgcaagttctagacacacagatggcctgtggaggcctctccctggtgtgggcccacaggtacttccatggttgactcctggcttcaggaatcccttcctccctccagaggcttcccagggccctcggtgcccacgcctctgcccatctggaggcctgagtaaggagtggctcagccccacgttcccacactgctcctgctctttgccctgtatcccatgaggctaggagacaggagtcctgggtttgagccctgcctccccccactgcctaatgtgggaacccaagcaaggcccttctaccttttgggcctcagtttccatgtctgtaccacaagagggttgaccagatggccccaggttttcctttaggtctgacatcctgagggtcattcatcccatgcccagttccccccatcctactcctaacagatgtgaccctacttgaggccgccttggcttttgggtcaccctgtctcatcccatcaccccaaacataccctagtccttcagcctggggctctggcatctgagcccgagctcctgcccctgctgtgggaaaggtggggaagaaggggatctccctcccgggcccacccagctgcccagcctttgcccactcggggagcagatcatgcatgccaatccctgttgccgcatggagctcctcagcccactgacctctccgtgcctggtgcaggccaggcccccgtcttccgcctgcctctgcttccccgtcatgcatggtggtggtgtttctacggtgtctggttctgtgcccgtctctgagacagtctctgtgtggaatttgccttaaactgaagtaaatttggttcttttagtaaagcacgaa

SEQ ID NO: 124562 - DNA, 2483 bp, Homo sapiens
agcacgaggctcacccagacagaagagaccacggtaaagatcagctgacggcctctgtgggaacaaagacagggaaaggggaaatgagttcaccagaaaccaacaggcagcacaggaggtggtaaacccgaaaaagaaaatgaagaaaaagaaatacgtgaattctggcacagacccagatcaacttcactgtggccattgatttcactgcctccaatgggaacccctcacagtccacatccctgcactacatgagcccctaccagctgaacgcctacgcgctggcgctgactgccgtcggagagatcatccagcactacgacagtgacaagatgttccctgccctgggcttcggggccaagctgcccccggatggcagagtgtcccacgagttcccactgaatggcaaccaggagaacccctcatgctgtggcatcgacggcatcctggaggcctaccaccgcagcctgcgcactgtgcagctgtacggccccaccaactttgcccccgtggtcacccacgtggccaggaatgcagcggccgtgcaggatggctcccagtactcggtgctgctcatcattactgatggggtcatctcggacatggcgcagaccaaggaggccattgtcaacgctgccaagctccccatgtccatcattatcgtcggcgtgggccaggcagagttcgacgccatggtggagctggatggcgacgacgtgcggatctcctcccgggggaagctggctgaacgcgacatcgtccagtttgtacccttccgggactacgtggaccgcacaggcaaccacgtgctgagcatggcccgcctggcccgagacgtgctggcagagatccctgaccaactggtgtcctacatgaaggcacagggcattcgcccgcgtcccccacccgcagcaccaacccactcgccctcgcagtccccagcccgcacgccccctgcgtcccccctgcacacgcacatctgaacctggtctcagcaggcaggtggctggggcctgggagaggccaggtgaatgggaggccagggccccagactccccgaagttggcctgcccggcctttgggacatctgtgtgcctgggaggctgccagggggtggggcttctgaagacccctcctcaatttcttggcctcacttattgcccaaacccagggagttaggggggtacgggtgaaagaggggtacacagggacccagcccttctcttcttccccaatacctggctctaacccagccaggaaggtgtaaacaataagggtgattggggtccctgtcgcccacccccggcaatcctatttgcttacctgtcaccctgaagcctgggcttggcctcctccagccccccatctccgtcccatcctcccatggtgtctactcctgtccctgagccccgccctgtggtctatcctgtgcccgatttccagtgaaccccatgaagctgatgggtttgcaggaaggcctgaacatgtgcaccctcccagggacactggatgcgctgggagccccggggaccccatggggtgctgtaatcatggaccgtaggccatgtgatgggcctgaagtggaggctgctcagcacagagccctttctggtgcctctcgaactcagtacgatgcaagttctagacacacagatggcctgtggaggcctctccctggtgtgggcccacaggtacttccatggttgactcctggcttcaggaatcccttcctccctccagaggcttcccagggccctcggtgcccacgcctctgcccatctggaggcctgagtaaggagtggctcagccccacgttcccacactgctcctgctctttgccctgtatcccatgaggctaggagacaggagtcctgggtttgagccctgcctccccccactgcctaatgtgggaacccaagcaaggcccttctaccttttgggcctcagtttccatgtctgtaccacaagagggttgaccagatggccccaggttttcctttaggtctgacatcctgagggtcattcatcccatgcccagttccccccatcctactcctaacagatgtgaccctacttgaggccgccttggcttttgggtcaccctgtctcatcccatcaccccaaacataccctagtccttcagcctggggctctggcatctgagcccgagctcctgcccctgctgtgggaaaggtggggaagaaggggatctccctcccgggcccacccagctgcccagcctttgcccactcggggagcagatcatgcatgccaatccctgttgccgcatggagctcctcagcccactgacctctccgtgcctggtgcaggccaggcccccgtcttccgcctgcctctgcttccccgtcatgcatggtggtggtgtttctacggtgtctggttctgtgcccgtctctgagacagtctctgtgtggaatttgccttaaactgaagtaaatttggttcttttagtaaagcacgaa

SEQ ID NO: 124563 - DNA, 3922 bp, Homo sapiens
agcggcggggggcgggaggctgcggcttcgggcagatttgattttcccgcagcccgggcgccccggagccgaagcccgagccgaggaggtggcgctcgcagccgcgtctcagccccgtcgccgccggcgccaagacccagggagaggcggcgcagcccgggcgctcgggctccgcgctgccggcgccccgccacccccgccgccagcgccccatccggcgcctcccgctcctcacgcccctctccctgtcttctgcatcccctctacctctgcccacagacgcgcgtccctctcctggtgcccctctccacgactccgcgtttccctcccggtgccctctccccgagcccctctccccgcgcccctctctgccttccccgctgtgcccccgctccctgggctccttgcccttccccactgggcccctagcctcctcgcggcgtcacccgagccccctcctcgatccgcggcccccgctccctccgccctcttccctctctcacttcccacgccccctcttcgcgctcctctctcctccccttgccgcccagcccaggctctggagttgggggagagcccagggctccagtcgctccggaggaggcgtgaatcgcgcagggattgactaatttggggtggggggtgcggtgggcgatggagcagcctgaggacatggcgtcgctgagcgagttcgactccttggcgggcagcatcccggccaccaaggtggagatcaccgtgtcctgcaggaacctcctggacaaagacatgttttccaagtccgacccactgtgcgtcatgtatacccaagggatggagaacaagcagtggcgggagtttgggcgcaccgaagtcatcgacaacacgctcaatcctgacttcgtgcgcaagttcattgtggattactttttcgaggagaagcagaacctccgttttgatctatacgacgttgactctaagagtcctgatttatccaaacacgatttcctgggccaggccttctgcacccttggagagattgtggggtcccctgggagccgcctggaaaagcccctcacgataggcgcattcagcctgaattccaggacgggcaaacccatgccagctgtgtccaacggtggtctttggatggaaagtttgagaaccactggtctggaagcctccggtggtgtcccaggaaagaaatgtggcaccatcatcctgtccgctgaggagctcagcaactgtagggatgtcgccaccatgcagttctgtgccaacaagctggacaagaaagatttctttgggaaatctgaccccttcttggtattctacagaagcaacgaggatggaacgttcaccatttgccacaagaccgaggtcatgaagaacaccctaaatccagtctggcaaactttctccattcccgtgagagccctctgcaacggcgactacgatcggaccatcaaggtggaggtgtatgactgggatcgggacggcagccatgacttcattggggagttcaccaccagttaccgggagctggcccgtgggcagagccaattcaacatctatgaggtggtaaacccgaaaaagaaaatgaagaaaaagaaatacgtgaattctggcacagacccagatcaacttcactgtggccattgatttcactgcctccaatgggaacccctcacagtccacatccctgcactacatgagcccctaccagctgaacgcctacgcgctggcgctgactgccgtcggagagatcatccagcactacgacagtgacaagatgttccctgccctgggcttcggggccaagctgcccccggatggcagagtgtcccacgagttcccactgaatggcaaccaggagaacccctcatgctgtggcatcgacggcatcctggaggcctaccaccgcagcctgcgcactgtgcagctgtacggccccaccaactttgcccccgtggtcacccacgtggccaggaatgcagcggccgtgcaggatggctcccagtactcggtgctgctcatcattactgatggggtcatctcggacatggcgcagaccaaggaggccattgtcaacgctgccaagctccccatgtccatcattatcgtcggcgtgggccaggcagagttcgacgccatggtggagctggatggcgacgacgtgcggatctcctcccgggggaagctggctgaacgcgacatcgtccagtttgtacccttccgggactacgtggaccgcacaggcaaccacgtgctgagcatggcccgcctggcccgagacgtgctggcagagatccctgaccaactggtgtcctacatgaaggcacagggcattcgcccgcgtcccccacccgcagcaccaacccactcgccctcgcagtccccagcccgcacgccccctgcgtcccccctgcacacgcacatctgaacctggtctcagcaggcaggtggctggggcctgggagaggccaggtgaatgggaggccagggccccagactccccgaagttggcctgcccggcctttgggacatctgtgtgcctgggaggctgccagggggtggggcttctgaagacccctcctcaatttcttggcctcacttattgcccaaacccagggagttaggggggtacgggtgaaagaggggtacacagggacccagcccttctcttcttccccaatacctggctctaacccagccaggaaggtgtaaacaataagggtgattggggtccctgtcgcccacccccggcaatcctatttgcttacctgtcaccctgaagcctgggcttggcctcctccagccccccatctccgtcccatcctcccatggtgtctactcctgtccctgagccccgccctgtggtctatcctgtgcccgatttccagtgaaccccatgaagctgatgggtttgcaggaaggcctgaacatgtgcaccctcccagggacactggatgcgctgggagccccggggaccccatggggtgctgtaatcatggaccgtaggccatgtgatgggcctgaagtggaggctgctcagcacagagccctttctggtgcctctcgaactcagtacgatgcaagttctagacacacagatggcctgtggaggcctctccctggtgtgggcccacaggtacttccatggttgactcctggcttcaggaatcccttcctccctccagaggcttcccagggccctcggtgcccacgcctctgcccatctggaggcctgagtaaggagtggctcagccccacgttcccacactgctcctgctctttgccctgtatcccatgaggctaggagacaggagtcctgggtttgagccctgcctccccccactgcctaatgtgggaacccaagcaaggcccttctaccttttgggcctcagtttccatgtctgtaccacaagagggttgaccagatggccccaggttttcctttaggtctgacatcctgagggtcattcatcccatgcccagttccccccatcctactcctaacagatgtgaccctacttgaggccgccttggcttttgggtcaccctgtctcatcccatcaccccaaacataccctagtccttcagcctggggctctggcatctgagcccgagctcctgcccctgctgtgggaaaggtggggaagaaggggatctccctcccgggcccacccagctgcccagcctttgcccactcggggagcagatcatgcatgccaatccctgttgccgcatggagctcctcagcccactgacctctccgtgcctggtgcaggccaggcccccgtcttccgcctgcctctgcttccccgtcatgcatggtggtggtgtttctacggtgtctggttctgtgcccgtctctgagacagtctctgtgtggaatttgccttaaactgaagtaaatttggttcttttagtaaagcacgaa

SEQ ID NO: 124564 - DNA, 2718 bp, Homo sapiens
tcagcgggccatccccgagccagggccctgggctcctccctgacgtgcagggctggctcccacacccaaagccctcagaccctcaacaagcagtcttcttccctcccctccaccctgccggggcctgagatccagggagcaccacactcccacctccccgctcctccacccctggtaaatccacagtgcagctccatgctgagcttatgccccttctgcagtggccaagaagaaggaccatcaaggtggaggtgtatgactgggatcgggacggcagccatgacttcattggggagttcaccaccagttaccgggagctggcccgtgggcagagccaattcaacatctatgaggtggtaaacccgaaaaagaaaatgaagaaaaagaaatacgtgaattctggcacagacccagatcaacttcactgtggccattgatttcactgcctccaatgggaacccctcacagtccacatccctgcactacatgagcccctaccagctgaacgcctacgcgctggcgctgactgccgtcggagagatcatccagcactacgacagtgacaagatgttccctgccctgggcttcggggccaagctgcccccggatggcagagtgtcccacgagttcccactgaatggcaaccaggagaacccctcatgctgtggcatcgacggcatcctggaggcctaccaccgcagcctgcgcactgtgcagctgtacggccccaccaactttgcccccgtggtcacccacgtggccaggaatgcagcggccgtgcaggatggctcccagtactcggtgctgctcatcattactgatggggtcatctcggacatggcgcagaccaaggaggccattgtcaacgctgccaagctccccatgtccatcattatcgtcggcgtgggccaggcagagttcgacgccatggtggagctggatggcgacgacgtgcggatctcctcccgggggaagctggctgaacgcgacatcgtccagtttgtacccttccgggactacgtggaccgcacaggcaaccacgtgctgagcatggcccgcctggcccgagacgtgctggcagagatccctgaccaactggtgtcctacatgaaggcacagggcattcgcccgcgtcccccacccgcagcaccaacccactcgccctcgcagtccccagcccgcacgccccctgcgtcccccctgcacacgcacatctgaacctggtctcagcaggcaggtggctggggcctgggagaggccaggtgaatgggaggccagggccccagactccccgaagttggcctgcccggcctttgggacatctgtgtgcctgggaggctgccagggggtggggcttctgaagacccctcctcaatttcttggcctcacttattgcccaaacccagggagttaggggggtacgggtgaaagaggggtacacagggacccagcccttctcttcttccccaatacctggctctaacccagccaggaaggtgtaaacaataagggtgattggggtccctgtcgcccacccccggcaatcctatttgcttacctgtcaccctgaagcctgggcttggcctcctccagccccccatctccgtcccatcctcccatggtgtctactcctgtccctgagccccgccctgtggtctatcctgtgcccgatttccagtgaaccccatgaagctgatgggtttgcaggaaggcctgaacatgtgcaccctcccagggacactggatgcgctgggagccccggggaccccatggggtgctgtaatcatggaccgtaggccatgtgatgggcctgaagtggaggctgctcagcacagagccctttctggtgcctctcgaactcagtacgatgcaagttctagacacacagatggcctgtggaggcctctccctggtgtgggcccacaggtacttccatggttgactcctggcttcaggaatcccttcctccctccagaggcttcccagggccctcggtgcccacgcctctgcccatctggaggcctgagtaaggagtggctcagccccacgttcccacactgctcctgctctttgccctgtatcccatgaggctaggagacaggagtcctgggtttgagccctgcctccccccactgcctaatgtgggaacccaagcaaggcccttctaccttttgggcctcagtttccatgtctgtaccacaagagggttgaccagatggccccaggttttcctttaggtctgacatcctgagggtcattcatcccatgcccagttccccccatcctactcctaacagatgtgaccctacttgaggccgccttggcttttgggtcaccctgtctcatcccatcaccccaaacataccctagtccttcagcctggggctctggcatctgagcccgagctcctgcccctgctgtgggaaaggtggggaagaaggggatctccctcccgggcccacccagctgcccagcctttgcccactcggggagcagatcatgcatgccaatccctgttgccgcatggagctcctcagcccactgacctctccgtgcctggtgcaggccaggcccccgtcttccgcctgcctctgcttccccgtcatgcatggtggtggtgtttctacggtgtctggttctgtgcccgtctctgagacagtctctgtgtggaatttgccttaaactgaagtaaatttggttcttttagtaaagcacgaa

SEQ ID NO: 124565 - DNA, 2908 bp, Homo sapiens
acagagtttcccaaagactggattttgctggctgcatctcctgtggtgtcatttaatgtgttcctctgtcccttgtatttcctgtaactaactagacagctctggagcctcaatcagaatcaggttcaattttttggtaagacaacttcatgggtggtattctattctttctttaggagatgcataatgtctatttgactctcttttttgtcaaatgagttttcgtcctgaatctcactccaaatttgagtcagcaatccaatgagacccaacctcacccagcctacacaggtgggcccagggggtagggtttgtggaggaaataagtgaccatagccacatgcccacacagaacacaatcatcttcaaagagctttcctactgcataactcttctgatgctcattaatcctgtaaggggggcatagctggcattactatctcagctctccagaactagaaagagatgaatgacttcaccaaggccacacacctggcaagcagcagagccagggtggtagccaatgtctagcactgtcccccctcccacagccctgcctccctccaggtgactcccctgctgttctccctcttctaggacccagatcaacttcactgtggccattgatttcactgcctccaatgggaacccctcacagtccacatccctgcactacatgagcccctaccagctgaacgcctacgcgctggcgctgactgccgtcggagagatcatccagcactacgacagtgacaagatgttccctgccctgggcttcggggccaagctgcccccggatggcagagtgtcccacgagttcccactgaatggcaaccaggagaacccctcatgctgtggcatcgacggcatcctggaggcctaccaccgcagcctgcgcactgtgcagctgtacggccccaccaactttgcccccgtggtcacccacgtggccaggaatgcagcggccgtgcaggatggctcccagtactcggtgctgctcatcattactgatggggtcatctcggacatggcgcagaccaaggaggccattgtcaacgctgccaagctccccatgtccatcattatcgtcggcgtgggccaggcagagttcgacgccatggtggagctggatggcgacgacgtgcggatctcctcccgggggaagctggctgaacgcgacatcgtccagtttgtacccttccgggactacgtggaccgcacaggcaaccacgtgctgagcatggcccgcctggcccgagacgtgctggcagagatccctgaccaactggtgtcctacatgaaggcacagggcattcgcccgcgtcccccacccgcagcaccaacccactcgccctcgcagtccccagcccgcacgccccctgcgtcccccctgcacacgcacatctgaacctggtctcagcaggcaggtggctggggcctgggagaggccaggtgaatgggaggccagggccccagactccccgaagttggcctgcccggcctttgggacatctgtgtgcctgggaggctgccagggggtggggcttctgaagacccctcctcaatttcttggcctcacttattgcccaaacccagggagttaggggggtacgggtgaaagaggggtacacagggacccagcccttctcttcttccccaatacctggctctaacccagccaggaaggtgtaaacaataagggtgattggggtccctgtcgcccacccccggcaatcctatttgcttacctgtcaccctgaagcctgggcttggcctcctccagccccccatctccgtcccatcctcccatggtgtctactcctgtccctgagccccgccctgtggtctatcctgtgcccgatttccagtgaaccccatgaagctgatgggtttgcaggaaggcctgaacatgtgcaccctcccagggacactggatgcgctgggagccccggggaccccatggggtgctgtaatcatggaccgtaggccatgtgatgggcctgaagtggaggctgctcagcacagagccctttctggtgcctctcgaactcagtacgatgcaagttctagacacacagatggcctgtggaggcctctccctggtgtgggcccacaggtacttccatggttgactcctggcttcaggaatcccttcctccctccagaggcttcccagggccctcggtgcccacgcctctgcccatctggaggcctgagtaaggagtggctcagccccacgttcccacactgctcctgctctttgccctgtatcccatgaggctaggagacaggagtcctgggtttgagccctgcctccccccactgcctaatgtgggaacccaagcaaggcccttctaccttttgggcctcagtttccatgtctgtaccacaagagggttgaccagatggccccaggttttcctttaggtctgacatcctgagggtcattcatcccatgcccagttccccccatcctactcctaacagatgtgaccctacttgaggccgccttggcttttgggtcaccctgtctcatcccatcaccccaaacataccctagtccttcagcctggggctctggcatctgagcccgagctcctgcccctgctgtgggaaaggtggggaagaaggggatctccctcccgggcccacccagctgcccagcctttgcccactcggggagcagatcatgcatgccaatccctgttgccgcatggagctcctcagcccactgacctctccgtgcctggtgcaggccaggcccccgtcttccgcctgcctctgcttccccgtcatgcatggtggtggtgtttctacggtgtctggttctgtgcccgtctctgagacagtctctgtgtggaatttgccttaaactgaagtaaatttggttcttttagtaaagcacgaa

SEQ ID NO: 124566 - DNA, 2586 bp, Homo sapiens
agcacgaggctcacccagacagaagagaccacggtaaagatcagctgacggcctctgtgggaacaaagacagggaaaggggaaatgagttcaccagaaaccaacaggcagcacaggaggtggtaaacccgaaaaagaaaatgaagaaaaagaaatacgtgaattctggcacagtcaccctgctttcctttgctgtggagtcagagtgcaccttccttgactacatcaaaggaggggtatcagtttcctcctctgtacacaaagagaacggaataggacccagatcaacttcactgtggccattgatttcactgcctccaatgggaacccctcacagtccacatccctgcactacatgagcccctaccagctgaacgcctacgcgctggcgctgactgccgtcggagagatcatccagcactacgacagtgacaagatgttccctgccctgggcttcggggccaagctgcccccggatggcagagtgtcccacgagttcccactgaatggcaaccaggagaacccctcatgctgtggcatcgacggcatcctggaggcctaccaccgcagcctgcgcactgtgcagctgtacggccccaccaactttgcccccgtggtcacccacgtggccaggaatgcagcggccgtgcaggatggctcccagtactcggtgctgctcatcattactgatggggtcatctcggacatggcgcagaccaaggaggccattgtcaacgctgccaagctccccatgtccatcattatcgtcggcgtgggccaggcagagttcgacgccatggtggagctggatggcgacgacgtgcggatctcctcccgggggaagctggctgaacgcgacatcgtccagtttgtacccttccgggactacgtggaccgcacaggcaaccacgtgctgagcatggcccgcctggcccgagacgtgctggcagagatccctgaccaactggtgtcctacatgaaggcacagggcattcgcccgcgtcccccacccgcagcaccaacccactcgccctcgcagtccccagcccgcacgccccctgcgtcccccctgcacacgcacatctgaacctggtctcagcaggcaggtggctggggcctgggagaggccaggtgaatgggaggccagggccccagactccccgaagttggcctgcccggcctttgggacatctgtgtgcctgggaggctgccagggggtggggcttctgaagacccctcctcaatttcttggcctcacttattgcccaaacccagggagttaggggggtacgggtgaaagaggggtacacagggacccagcccttctcttcttccccaatacctggctctaacccagccaggaaggtgtaaacaataagggtgattggggtccctgtcgcccacccccggcaatcctatttgcttacctgtcaccctgaagcctgggcttggcctcctccagccccccatctccgtcccatcctcccatggtgtctactcctgtccctgagccccgccctgtggtctatcctgtgcccgatttccagtgaaccccatgaagctgatgggtttgcaggaaggcctgaacatgtgcaccctcccagggacactggatgcgctgggagccccggggaccccatggggtgctgtaatcatggaccgtaggccatgtgatgggcctgaagtggaggctgctcagcacagagccctttctggtgcctctcgaactcagtacgatgcaagttctagacacacagatggcctgtggaggcctctccctggtgtgggcccacaggtacttccatggttgactcctggcttcaggaatcccttcctccctccagaggcttcccagggccctcggtgcccacgcctctgcccatctggaggcctgagtaaggagtggctcagccccacgttcccacactgctcctgctctttgccctgtatcccatgaggctaggagacaggagtcctgggtttgagccctgcctccccccactgcctaatgtgggaacccaagcaaggcccttctaccttttgggcctcagtttccatgtctgtaccacaagagggttgaccagatggccccaggttttcctttaggtctgacatcctgagggtcattcatcccatgcccagttccccccatcctactcctaacagatgtgaccctacttgaggccgccttggcttttgggtcaccctgtctcatcccatcaccccaaacataccctagtccttcagcctggggctctggcatctgagcccgagctcctgcccctgctgtgggaaaggtggggaagaaggggatctccctcccgggcccacccagctgcccagcctttgcccactcggggagcagatcatgcatgccaatccctgttgccgcatggagctcctcagcccactgacctctccgtgcctggtgcaggccaggcccccgtcttccgcctgcctctgcttccccgtcatgcatggtggtggtgtttctacggtgtctggttctgtgcccgtctctgagacagtctctgtgtggaatttgccttaaactgaagtaaatttggttcttttagtaaagcacgaa

SEQ ID NO: 124567 - DNA, 2228 bp, Homo sapiens
agcggcggggggcgggaggctgcggcttcgggcagatttgattttcccgcagcccgggcgccccggagccgaagcccgagccgaggaggtggcgctcgcagccgcgtctcagccccgtcgccgccggcgccaagacccagggagaggcggcgcagcccgggcgctcgggctccgcgctgccggcgccccgccacccccgccgccagcgccccatccggcgcctcccgctcctcacgcccctctccctgtcttctgcatcccctctacctctgcccacagacgcgcgtccctctcctggtgcccctctccacgactccgcgtttccctcccggtgccctctccccgagcccctctccccgcgcccctctctgccttccccgctgtgcccccgctccctgggctccttgcccttccccactgggcccctagcctcctcgcggcgtcacccgagccccctcctcgatccgcggcccccgctccctccgccctcttccctctctcacttcccacgccccctcttcgcgctcctctctcctccccttgccgcccagcccaggctctggagttgggggagagcccagggctccagtcgctccggaggaggcgtgaatcgcgcagggattgactaatttggggtggggggtgcggtgggcgatggagcagcctgaggacatggcgtcgctgagcgagttcgactccttggcgggcagcatcccggccaccaaggtggagatcaccgtgtcctgcaggaacctcctggacaaagacatgttttccaagtccgacccactgtgcgtcatgtatacccaagggatggagaacaagcagtggcgggagtttgggcgcaccgaagtcatcgacaacacgctcaatcctgacttcgtgcgcaagttcattgtggattactttttcgaggagaagcagaacctccgttttgatctatacgacgttgactctaagagtcctgatttatccaaacacgatttcctgggccaggccttctgcacccttggagagattgtggggtcccctgggagccgcctggaaaagcccctcacgataggcgcattcagcctgaattccaggacgggcaaacccatgccagctgtgtccaacggtggtctttggatggaaagtttgagaaccactggtctggaagcctccggtggtgtcccaggaaagaaatgtggcaccatcatcctgtccgctgaggagctcagcaactgtagggatgtcgccaccatgcagttctgtgccaacaagctggacaagaaagatttctttgggaaatctgaccccttcttggtattctacagaagcaacgaggatggaacgttcaccatttgccacaagaccgaggtcatgaagaacaccctaaatccagtctggcaaactttctccattcccgtgagagccctctgcaacggcgactacgatcggaccatcaaggtggaggtgtatgactgggatcgggacggcagccatgacttcattggggagttcaccaccagttaccgggagctggcccgtgggcagagccaattcaacatctatgaggtggtaaacccgaaaaagaaaatgaagaaaaagaaatacgtgaattctggcacagtcaccctgctttcctttgctgtggagtcagagtgcaccttccttgactacatcaaaggagggacccagatcaacttcactgtggccattgatttcactgcctccaatgggaacccctcacagtccacatccctgcactacatgagcccctaccagctgaacgcctacgcgctggcgctgactgccgtcggagagatcatccagcactacgacagtgacaagatgttccctgccctgggcttcggggccaagctgcccccggatggcagagtgtcccacgagttcccactgatgctgcccctccatgtctgaagctgcctgcccacagctggccctggcttccttgttcctgacaagacgcagaatggcaaccaggagaacccctcatgctgtggcatcgacggcatcctggaggcctaccaccgcagcctgcgcactgtgcagctgtacggccccaccaactttgcccccgtggtcacccacgtggccaggaatgcagcggccgtgcaggatggctcccagtactcggtgctgctcatcattactgatggggtcatctcggacatggcgcagaccaaggaggccattgtcaacgtaagcaaggagtgtgcggtggg

SEQ ID NO: 124568 - DNA, 855 bp, Homo sapiens
agcacgaggctcacccagacagaagagaccacggtaaagatcagctgacggcctctgtgggaacaaagacagggaaaggggaaatgagttcaccagaaaccaacaggcagcacaggaggtggtaaacccgaaaaagaaaatgaagaaaaagaaatacgtgaattctggcacagtcaccctgctttcctttgctgtggagtcagagtgcaccttccttgactacatcaaaggagggacccagatcaacttcactgtggccattgatttcactgcctccaatgggaacccctcacagtccacatccctgcactacatgagcccctaccagctgaacgcctacgcgctggcgctgactgccgtcggagagatcatccagcactacgacagtgacaagatgttccctgccctgggcttcggggccaagctgcccccggatggcagagtgtcccacgagttcccactgaatggcaaccaggagaacccctcatgctgtggcatcgacggcatcctggaggcctaccaccgcagcctgcgcactgtgcagctgtacggccccaccaactttgcccccgtggtcacccacgtggccaggaatgcagcggccgtgcaggatggctcccagtactcggtgctgctcatcattactgatggggtcatctcggacatggcgcagaccaaggaggccattgtcaacgctgccaagctccccatgtccatcattatcgtcggcgtgggccaggcagagttcgacgccatggtggagctggatggcgacgacgtgcggatctcctcccgggggaagctggctgaacgcgacatcgtccaggtgaagcccaggccttgcctgccccatgg

SEQ ID NO: 124569 - DNA, 3466 bp, Homo sapiens
gatcatggtgaggatcagtggggaaggcgctttacctcgaagaaacttctggtgctacacgtgtgtgtgttgtggtctgtgcctttgcagcgggggaaactgaggccctaagagacggtgtctcaacatgtggtatttggacggctgccatcagagacataatagggggatctctggcggccacttggataaacatggcctctggagccctgcttcagacctacacagccagacttggaacagagcccaaggaactgccattttataccccggggcaggggtgagccccagaagtgcgaggcccattgttcacggggtgaagccacccgtccaaagccaaggaacctcctggacaaagacatgttttccaagtccgacccactgtgcgtcatgtatacccaagggatggagaacaagcagtggcgggagtttgggcgcaccgaagtcatcgacaacacgctcaatcctgacttcgtgcgcaagttcattgtggattactttttcgaggagaagcagaacctccgttttgatctatacgacgttgactctaagagtcctgatttatccaaacacgatttcctgggccaggccttctgcacccttggagagattgtggggtcccctgggagccgcctggaaaagcccctcacgataggcgcattcagcctgaattccaggacgggcaaacccatgccagctgtgtccaacggtggtgtcccaggaaagaaatgtggcaccatcatcctgtccgctgaggagctcagcaactgtagggatgtcgccaccatgcagttctgtgccaacaagctggacaagaaagatttctttgggaaatctgaccccttcttggtattctacagaagcaacgaggatggaacgttcaccatttgccacaagaccgaggtcatgaagaacaccctaaatccagtctggcaaactttctccattcccgtgagagccctctgcaacggcgactacgatcggaccatcaaggtggaggtgtatgactgggatcgggacggcagccatgacttcattggggagttcaccaccagttaccgggagctggcccgtgggcagagccaattcaacatctatgaggtggtaaacccgaaaaagaaaatgaagaaaaagaaatacgtgaattctggcacagacccagatcaacttcactgtggccattgatttcactgcctccaatgggaacccctcacagtccacatccctgcactacatgagcccctaccagctgaacgcctacgcgctggcgctgactgccgtcggagagatcatccagcactacgacagtgacaagatgttccctgccctgggcttcggggccaagctgcccccggatggcagagtgtcccacgagttcccactgaatggcaaccaggagaacccctcatgctgtggcatcgacggcatcctggaggcctaccaccgcagcctgcgcactgtgcagctgtacggccccaccaactttgcccccgtggtcacccacgtggccaggaatgcagcggccgtgcaggatggctcccagtactcggtgctgctcatcattactgatggggtcatctcggacatggcgcagaccaaggaggccattgtcaacgctgccaagctccccatgtccatcattatcgtcggcgtgggccaggcagagttcgacgccatggtggagctggatggcgacgacgtgcggatctcctcccgggggaagctggctgaacgcgacatcgtccagtttgtacccttccgggactacgtggaccgcacaggcaaccacgtgctgagcatggcccgcctggcccgagacgtgctggcagagatccctgaccaactggtgtcctacatgaaggcacagggcattcgcccgcgtcccccacccgcagcaccaacccactcgccctcgcagtccccagcccgcacgccccctgcgtcccccctgcacacgcacatctgaacctggtctcagcaggcaggtggctggggcctgggagaggccaggtgaatgggaggccagggccccagactccccgaagttggcctgcccggcctttgggacatctgtgtgcctgggaggctgccagggggtggggcttctgaagacccctcctcaatttcttggcctcacttattgcccaaacccagggagttaggggggtacgggtgaaagaggggtacacagggacccagcccttctcttcttccccaatacctggctctaacccagccaggaaggtgtaaacaataagggtgattggggtccctgtcgcccacccccggcaatcctatttgcttacctgtcaccctgaagcctgggcttggcctcctccagccccccatctccgtcccatcctcccatggtgtctactcctgtccctgagccccgccctgtggtctatcctgtgcccgatttccagtgaaccccatgaagctgatgggtttgcaggaaggcctgaacatgtgcaccctcccagggacactggatgcgctgggagccccggggaccccatggggtgctgtaatcatggaccgtaggccatgtgatgggcctgaagtggaggctgctcagcacagagccctttctggtgcctctcgaactcagtacgatgcaagttctagacacacagatggcctgtggaggcctctccctggtgtgggcccacaggtacttccatggttgactcctggcttcaggaatcccttcctccctccagaggcttcccagggccctcggtgcccacgcctctgcccatctggaggcctgagtaaggagtggctcagccccacgttcccacactgctcctgctctttgccctgtatcccatgaggctaggagacaggagtcctgggtttgagccctgcctccccccactgcctaatgtgggaacccaagcaaggcccttctaccttttgggcctcagtttccatgtctgtaccacaagagggttgaccagatggccccaggttttcctttaggtctgacatcctgagggtcattcatcccatgcccagttccccccatcctactcctaacagatgtgaccctacttgaggccgccttggcttttgggtcaccctgtctcatcccatcaccccaaacataccctagtccttcagcctggggctctggcatctgagcccgagctcctgcccctgctgtgggaaaggtggggaagaaggggatctccctcccgggcccacccagctgcccagcctttgcccactcggggagcagatcatgcatgccaatccctgttgccgcatggagctcctcagcccactgacctctccgtgcctggtgcaggccaggcccccgtcttccgcctgcctctgcttccccgtcatgcatggtggtggtgtttctacggtgtctggttctgtgcccgtctctgagacagtctctgtgtggaatttgccttaaactgaagtaaatttggttcttttagtaaagcacgaa

SEQ ID NO: 124570 - DNA, 2545 bp, Homo sapiens
agcacgaggctcacccagacagaagagaccacggtaaagatcagctgacggcctctgtgggaacaaagacagggaaaggggaaatgagttcaccagaaaccaacaggcagcacaggaggtggtaaacccgaaaaagaaaatgaagaaaaagaaatacgtgaattctggcacagtcaccctgctttcctttgctgtggagtcagagtgcaccttccttgactacatcaaaggagggacccagatcaacttcactgtggccattgatttcactgcctccaatgggaacccctcacagtccacatccctgcactacatgagcccctaccagctgaacgcctacgcgctggcgctgactgccgtcggagagatcatccagcactacgacagtgacaagatgttccctgccctgggcttcggggccaagctgcccccggatggcagagtgtcccacgagttcccactgaatggcaaccaggagaacccctcatgctgtggcatcgacggcatcctggaggcctaccaccgcagcctgcgcactgtgcagctgtacggccccaccaactttgcccccgtggtcacccacgtggccaggaatgcagcggccgtgcaggatggctcccagtactcggtgctgctcatcattactgatggggtcatctcggacatggcgcagaccaaggaggccattgtcaacgctgccaagctccccatgtccatcattatcgtcggcgtgggccaggcagagttcgacgccatggtggagctggatggcgacgacgtgcggatctcctcccgggggaagctggctgaacgcgacatcgtccagtttgtacccttccgggactacgtggaccgcacaggcaaccacgtgctgagcatggcccgcctggcccgagacgtgctggcagagatccctgaccaactggtgtcctacatgaaggcacagggcattcgcccgcgtcccccacccgcagcaccaacccactcgccctcgcagtccccagcccgcacgccccctgcgtcccccctgcacacgcacatctgaacctggtctcagcaggcaggtggctggggcctgggagaggccaggtgaatgggaggccagggccccagactccccgaagttggcctgcccggcctttgggacatctgtgtgcctgggaggctgccagggggtggggcttctgaagacccctcctcaatttcttggcctcacttattgcccaaacccagggagttaggggggtacgggtgaaagaggggtacacagggacccagcccttctcttcttccccaatacctggctctaacccagccaggaaggtgtaaacaataagggtgattggggtccctgtcgcccacccccggcaatcctatttgcttacctgtcaccctgaagcctgggcttggcctcctccagccccccatctccgtcccatcctcccatggtgtctactcctgtccctgagccccgccctgtggtctatcctgtgcccgatttccagtgaaccccatgaagctgatgggtttgcaggaaggcctgaacatgtgcaccctcccagggacactggatgcgctgggagccccggggaccccatggggtgctgtaatcatggaccgtaggccatgtgatgggcctgaagtggaggctgctcagcacagagccctttctggtgcctctcgaactcagtacgatgcaagttctagacacacagatggcctgtggaggcctctccctggtgtgggcccacaggtacttccatggttgactcctggcttcaggaatcccttcctccctccagaggcttcccagggccctcggtgcccacgcctctgcccatctggaggcctgagtaaggagtggctcagccccacgttcccacactgctcctgctctttgccctgtatcccatgaggctaggagacaggagtcctgggtttgagccctgcctccccccactgcctaatgtgggaacccaagcaaggcccttctaccttttgggcctcagtttccatgtctgtaccacaagagggttgaccagatggccccaggttttcctttaggtctgacatcctgagggtcattcatcccatgcccagttccccccatcctactcctaacagatgtgaccctacttgaggccgccttggcttttgggtcaccctgtctcatcccatcaccccaaacataccctagtccttcagcctggggctctggcatctgagcccgagctcctgcccctgctgtgggaaaggtggggaagaaggggatctccctcccgggcccacccagctgcccagcctttgcccactcggggagcagatcatgcatgccaatccctgttgccgcatggagctcctcagcccactgacctctccgtgcctggtgcaggccaggcccccgtcttccgcctgcctctgcttccccgtcatgcatggtggtggtgtttctacggtgtctggttctgtgcccgtctctgagacagtctctgtgtggaatttgccttaaactgaagtaaatttggttcttttagtaaagcacgaa

SEQ ID NO: 124571 - DNA, 2780 bp, Homo sapiens
tcagcgggccatccccgagccagggccctgggctcctccctgacgtgcagggctggctcccacacccaaagccctcagaccctcaacaagcagtcttcttccctcccctccaccctgccggggcctgagatccagggagcaccacactcccacctccccgctcctccacccctggtaaatccacagtgcagctccatgctgagcttatgccccttctgcagtggccaagaagaaggaccatcaaggtggaggtgtatgactgggatcgggacggcagccatgacttcattggggagttcaccaccagttaccgggagctggcccgtgggcagagccaattcaacatctatgaggtggtaaacccgaaaaagaaaatgaagaaaaagaaatacgtgaattctggcacagtcaccctgctttcctttgctgtggagtcagagtgcaccttccttgactacatcaaaggagggacccagatcaacttcactgtggccattgatttcactgcctccaatgggaacccctcacagtccacatccctgcactacatgagcccctaccagctgaacgcctacgcgctggcgctgactgccgtcggagagatcatccagcactacgacagtgacaagatgttccctgccctgggcttcggggccaagctgcccccggatggcagagtgtcccacgagttcccactgaatggcaaccaggagaacccctcatgctgtggcatcgacggcatcctggaggcctaccaccgcagcctgcgcactgtgcagctgtacggccccaccaactttgcccccgtggtcacccacgtggccaggaatgcagcggccgtgcaggatggctcccagtactcggtgctgctcatcattactgatggggtcatctcggacatggcgcagaccaaggaggccattgtcaacgctgccaagctccccatgtccatcattatcgtcggcgtgggccaggcagagttcgacgccatggtggagctggatggcgacgacgtgcggatctcctcccgggggaagctggctgaacgcgacatcgtccagtttgtacccttccgggactacgtggaccgcacaggcaaccacgtgctgagcatggcccgcctggcccgagacgtgctggcagagatccctgaccaactggtgtcctacatgaaggcacagggcattcgcccgcgtcccccacccgcagcaccaacccactcgccctcgcagtccccagcccgcacgccccctgcgtcccccctgcacacgcacatctgaacctggtctcagcaggcaggtggctggggcctgggagaggccaggtgaatgggaggccagggccccagactccccgaagttggcctgcccggcctttgggacatctgtgtgcctgggaggctgccagggggtggggcttctgaagacccctcctcaatttcttggcctcacttattgcccaaacccagggagttaggggggtacgggtgaaagaggggtacacagggacccagcccttctcttcttccccaatacctggctctaacccagccaggaaggtgtaaacaataagggtgattggggtccctgtcgcccacccccggcaatcctatttgcttacctgtcaccctgaagcctgggcttggcctcctccagccccccatctccgtcccatcctcccatggtgtctactcctgtccctgagccccgccctgtggtctatcctgtgcccgatttccagtgaaccccatgaagctgatgggtttgcaggaaggcctgaacatgtgcaccctcccagggacactggatgcgctgggagccccggggaccccatggggtgctgtaatcatggaccgtaggccatgtgatgggcctgaagtggaggctgctcagcacagagccctttctggtgcctctcgaactcagtacgatgcaagttctagacacacagatggcctgtggaggcctctccctggtgtgggcccacaggtacttccatggttgactcctggcttcaggaatcccttcctccctccagaggcttcccagggccctcggtgcccacgcctctgcccatctggaggcctgagtaaggagtggctcagccccacgttcccacactgctcctgctctttgccctgtatcccatgaggctaggagacaggagtcctgggtttgagccctgcctccccccactgcctaatgtgggaacccaagcaaggcccttctaccttttgggcctcagtttccatgtctgtaccacaagagggttgaccagatggccccaggttttcctttaggtctgacatcctgagggtcattcatcccatgcccagttccccccatcctactcctaacagatgtgaccctacttgaggccgccttggcttttgggtcaccctgtctcatcccatcaccccaaacataccctagtccttcagcctggggctctggcatctgagcccgagctcctgcccctgctgtgggaaaggtggggaagaaggggatctccctcccgggcccacccagctgcccagcctttgcccactcggggagcagatcatgcatgccaatccctgttgccgcatggagctcctcagcccactgacctctccgtgcctggtgcaggccaggcccccgtcttccgcctgcctctgcttccccgtcatgcatggtggtggtgtttctacggtgtctggttctgtgcccgtctctgagacagtctctgtgtggaatttgccttaaactgaagtaaatttggttcttttagtaaagcacgaa

SEQ ID NO: 124572 - DNA, 2434 bp, Homo sapiens
agcggcggggggcgggaggctgcggcttcgggcagatttgattttcccgcagcccgggcgccccggagccgaagcccgagccgaggaggtggcgctcgcagccgcgtctcagccccgtcgccgccggcgccaagacccagggagaggcggcgcagcccgggcgctcgggctccgcgctgccggcgccccgccacccccgccgccagcgccccatccggcgcctcccgctcctcacgcccctctccctgtcttctgcatcccctctacctctgcccacagacgcgcgtccctctcctggtgcccctctccacgactccgcgtttccctcccggtgccctctccccgagcccctctccccgcgcccctctctgccttccccgctgtgcccccgctccctgggctccttgcccttccccactgggcccctagcctcctcgcggcgtcacccgagccccctcctcgatccgcggcccccgctccctccgccctcttccctctctcacttcccacgccccctcttcgcgctcctctctcctccccttgccgcccagcccaggctctggagttgggggagagcccagggctccagtcgctccggaggaggcgtgaatcgcgcagggattgactaatttggggtggggggtgcggtgggcgatggagcagcctgaggacatggcgtcgctgagcgagttcgactccttggcgggcagcatcccggccaccaaggtggagatcaccgtgtcctgcaggaacctcctggacaaagacatgttttccaagtccgacccactgtgcgtcatgtatacccaagggatggagaacaagcagtggcgggagtttgggcgcaccgaagtcatcgacaacacgctcaatcctgacttcgtgcgcaagttcattgtggattactttttcgaggagaagcagaacctccgttttgatctatacgacgttgactctaagagtcctgatttatccaaacacgatttcctgggccaggccttctgcacccttggagagattgtggggtcccctgggagccgcctggaaaagcccctcacgataggcgcattcagcctgaattccaggacgggcaaacccatgccagctgtgtccaacggtggtctttggatggaaagtttgagaaccactggtctggaagcctccggtggtgtcccaggaaagaaatgtggcaccatcatcctgtccgctgaggagctcagcaactgtagggatgtcgccaccatgcagttctgtgccaacaagctggacaagaaagatttctttgggaaatctgaccccttcttggtattctacagaagcaacgaggatggaacgttcaccatttgccacaagaccgaggtcatgaagaacaccctaaatccagtctggcaaactttctccattcccgtgagagccctctgcaacggcgactacgatcggaccatcaaggtggaggtgtatgactgggatcgggacggcagccatgacttcattggggagttcaccaccagttaccgggagctggcccgtgggcagagccaattcaacatctatgaggtggtaaacccgaaaaagaaaatgaagaaaaagaaatacgtgaattctggcacagacccagatcaacttcactgtggccattgatttcactgcctccaatgggaacccctcacagtccacatccctgcactacatgagcccctaccagctgaacgcctacgcgctggcgctgactgccgtcggagagatcatccagcactacgacagtgacaagatgttccctgccctgggcttcggggccaagctgcccccggatggcagagtgtcccacgagttcccactgaatggcaaccaggagaacccctcatgctgtggcatcgacggcatcctggaggcctaccaccgcagcctgcgcactgtgcagctgtacggccccaccaactttgcccccgtggtcacccacgtggccaggaatgcagcggccgtgcaggatggctcccagtactcggtgctgctcatcattactgatggggtcatctcggacatggcgcagaccaaggaggccattgtcaacgctgccaagctccccatgtccatcattatcgtcggcgtgggccaggcagagttcgacgccatggtggagctggatggcgacgacgtgcggatctcctcccgggggaagctggctgaacgcgacatcgtccagtttgtacccttccgggactacgtggaccgcacaggcaaccacgtgctgagcatggcccgcctggcccgagacgtgctggcagagatccctgaccatcaaggtggaggtgtatgactgggatcgggacggcagccatgacttcattggggagttcaccaccagttaccgggagctggcccgtgggcagagccaattcaacatctataaagtaataaacccgaaaaaaaaaaa

SEQ ID NO: 124573 - DNA, 1432 bp, Homo sapiens
  misc_feature (1411)..(1411): n is a, c, g, or t
agcggcggggggcgggaggctgcggcttcgggcagatttgattttcccgcagcccgggcgccccggagccgaagcccgagccgaggaggtggcgctcgcagccgcgtctcagccccgtcgccgccggcgccaagacccagggagaggcggcgcagcccgggcgctcgggctccgcgctgccggcgccccgccacccccgccgccagcgccccatccggcgcctcccgctcctcacgcccctctccctgtcttctgcatcccctctacctctgcccacagacgcgcgtccctctcctggtgcccctctccacgactccgcgtttccctcccggtgccctctccccgagcccctctccccgcgcccctctctgccttccccgctgtgcccccgctccctgggctccttgcccttccccactgggcccctagcctcctcgcggcgtcacccgagccccctcctcgatccgcggcccccgctccctccgccctcttccctctctcacttcccacgccccctcttcgcgctcctctctcctccccttgccgcccagcccaggctctggagttgggggagagcccagggctccagtcgctccggaggaggcgtgaatcgcgcagggattgactaatttggggtggggggtgcggtgggcgatggagcagcctgaggacatggcgtcgctgagcgagttcgactccttggcgggcagcatcccggccaccaaggtggagatcaccgtgtcctgcaggaacctcctggacaaagacatgttttccaagtccgacccactgtgcgtcatgtatacccaagggatggagaacaagcagtggcgggagtttgggcgcaccgaagtcatcgacaacacgctcaatcctgacttcgtgcgcaagttcattgtggattactttttcgaggagaagcagaacctccgttttgatctatacgacgttgactctaagagtcctgatttatccaaacacgatttcctgggccaggccttctgcacccttggagagattgtggggtcccctgggagccgcctggaaaagcccctcacggaaaagctgttactctgaagcgggctctgggatgaggaatccaaggcttctcacagtggagcctgatgatgtcttcagggaccagccagggctggccgtgtggtgagggtgacctctcttgtccctatttctcaggaagtaccaggggcagggcccttgcctgtataaacgattcttacctttccccacactggggaacactggtcaccattctttggtgtccatatttctctggacggccaccctcacactttgcatttaaataaactaatttaactggacattaagacaaaaaaaaaaaatgtagggcgaccgcaagattattcccactaatcaaactcaccgaaaagtntggcagggtttgatcaaaaaa

SEQ ID NO: 124574 - DNA, 103 bp, Homo sapiens
tgctgggattacaggcatgagccaccgtgcccggccagagaagggttttcaacaggaagcaagtgcagagattgagattctttgaagctattgcttggagtta

SEQ ID NO: 124575 - DNA, 638 bp, Homo sapiens
cacatatatatttccacagggggaaaggatcaaaaaggaagagcatcaaggtgtcatctattatgctatattttatttacttataaaatgaaaatgattgggaaattcacgtaagatagcagtggtggttgcaacatagctttgggacattcagaaatccttacataaaatgaaaagactaacttgatagcaaaattaaaatcacatggataccatttattagactggtgcaaaagtaattatggtttttgccaattaaataaaacaaaactcagtcaaaatgtcatcctcattaacctcaaagcagaaatgagagagagcacaccaccaatggtcaatctacacactatcagcatgtgtgcagaagaaacagagggaagcaatgcagcaagttaaagccatgaaaacaacagaacccacaggatttattgaaaatcaatgtgaaaacagcagagaactgtgaacatttatgcccacactaataatgggtggatgcaagggctctgttataaggctaaaggaaataaagtctctgaaacctgctgaactcttgaagcttaaaatctgccaagttttcttaccattcaggatgaggggattccacatacaagagtaactgctgaccctgtggaaaagta

SEQ ID NO: 124576 - DNA, 592 bp, Homo sapiens
cgggtctctatcatgttgtatctatctatctctatcactgaaatgattcgtgagagtgctcctctaaaatcaatgtggggtggctgcatacttgtggggtacattgacatatccttacgtcgtgagtgaaaactaacttgatagcaaaattaaaatcacatggataccatttattagactggtgcaaaagtaattatggtttttgccaattaaataaaacaaaactcagtcaaaatgtcatcctcattaacctcaaagcagaaatgagagagagcacaccaccaatggtcaatctacacactatcagcatgtgtgcagaagaaacagagggaagcaatgcagcaagttaaagccatgaaaacaacagaacccacaggatttattgaaaatcaatgtgaaaacagcagagaactgtgaacatttatgcccacactaataatgggtggatgcaagggctctgttataaggctaaaggaaataaagtctctgaaacctgctgaactcttgaagcttaaaatctgccaagttttcttaccattcaggatgaggggattccacatacaagagtaactgctgaccctgtggaaaagta

SEQ ID NO: 124577 - DNA, 458 bp, Homo sapiens
gcttcgataggcccctgtgtctgttgttctcctctttgtgtccatgagttctcaccacttagctcccacttataagtgaaaacatgcagtatttgattttctgttcctgcattagtttgctaaggataatggccttatctcaaccttttctaagcctacttttatgttcaggctggcctatctcctaggataatcatctcctaagttccattcccatcaagaaaagcagcactacacgaatgcaaccctaataaagccaagatacatattgttcagtccccatataggtcatattttaaaaaggacagtctgaggggaaaataagtctcaaagaaattcatgtgtgaagtgaaataggccaaacacaaaaggacaaaaatattgtctgtgtccactcatatgaggtacctagaataatcaaattcatacaggcagaaagtaaaataatggttacgggg

SEQ ID NO: 124578 - DNA, 599 bp, Homo sapiens
gaggaaggggacagaaggggaggggcccagtaagatctctaactgcagagttatcaattcattctttgtattactaggtaccctttaaacaacccagttttaaacctccattctcaatgatacttactctttcataataaatgcctatcctgacactgtactttattagcttagcatattcatatgcaattaattgattcagcaatttcacatgctttaaattgtatgctctactagtctctgccaatagcacctgaccacatggcaggggcagcctcctgctcatcctagcaggcattcagcattcagtggttaaaggagttgtctctccaccaacataagagctggccccgcctggctcctgacgctccacagtcacaccagagagcaagctccccggcaggaagggacattccttcctccctcatgatggaactccaactccctcaaggacagttcacactcatctcctctgtgaggctgagatttaatgggttccagccaggcatggtggctcacgcctgtaatcccagcactttgggaggcagaggcaggtggatcacttgaggtcaggagtttgagactggcctggccaacgt

SEQ ID NO: 124579 - DNA, 567 bp, Homo sapiens
gaaggaaggaaggaaataaaatattttccattgattacccatgctttttattttgaattaatagtgttcgatgcgttattaaaaaatagaatttaaaataaattgtagaaaatatggagagaaatatttatgtttcaaatttcccaagagtagggctttggtgcattataatcccctgatagctggcatgatccactttgttggttacttttacagggtccttctactctcttccttagtctccaggcttttaataatcacacagaatattcttttcactacagaacatacctacctacattttggctgtttctcaagctgacttatttcccagacatattcatcctttaagtacgcaaaaatgactttcataatatttccattgataggcaatacacaaatatgtttaaatgaaggaataatttattgcattgtactttaaaatccacattccttgctatacataatctgaaaccactataaaagtacacttttttaatgcaacagcaggcatacattttttccagtttgatgtaggcaggacctcagataatgtcacagtaaaga

SEQ ID NO: 124580 - DNA, 350 bp, Homo sapiens
ataggccatcatcctgtttgtgaataaagacagttttactgcagtttgcacaccttgtatttctggatctccactccagattgagtggaagtggtgaaagcaaacatctctttgccatgctctctctcggggggaacatatcagcctttctttgttacgtgtgatgtcacttgtagtttttgcatggctgcatttgaccagtttgtagaagtttctatctatgcaagtgattttgtgggtgttcttagttttgttcatatggtgtattgcatcagttagtgttccagtattgaaccacccttgcattcctgggagaaacctcacttggtcattttgtattacagtgttta

SEQ ID NO: 124581 - DNA, 400 bp, Homo sapiens
actaaactgctccaggatctcaatctaaaagtactttcttttcatttaaaaagaagtgttgctattttcttcttatgtaagcaataaatgttcattatggaaatattagaagatgcagataagcaaaaagaagacattaaaatcacccataattctatcacccaggaataactactgctggtgttttgacttaccaccttctgggttatctaacagtgtgctgtgtttatatgtgcatgcctgtgacacatgtgtatatcctgcatacgtacagcttttacaaactgtacacatctgtcctcttcacttaaaaacacatcttggccaggtgcggtggctcacacctataatcctagcactttgggaggccgaggcgggcggattacctgagttcaggagt

SEQ ID NO: 124582 - DNA, 365 bp, Homo sapiens
aagttaatcatagaagtcaaactttgcttattgttatgagtctctagggagtacttcaactcatttgcatctgtttcctcatcttcaaaatgggacagtgtaattctggacctgggacatagtaaggattcaatgggtggcagctgtgacaagagcaacaacaaaaatattgtgcgtctttcttttttttaataatggcacaaaaaggcaaaaccatagatacagtaaacggatgtgtggttgccagtgtttggcggggagagggttcaataagtgagcacagggggttttttagggtgaagaaatgtgggtatatgactgtgcattggttgatatccattaaacttaatagcacaaaaagtgaa

SEQ ID NO: 124583 - DNA, 391 bp, Homo sapiens
gaacagctaggggcttggcagacacataactaaggctagcacaatgttctaactatgtcagtaatgtggccctatgaggtgttactgtcagtcaaactacatgaaagatatccagaattcaatcagatatccttttaatagctgtacctacgacttgtactgacctgagaagcataaaagaatggagaattcctcccaagttcaaagattactggagttaggtggaaagatatttacttattttaagaaatgaaaactctaatcacctgcatgggaatgtaaagtacctgggagggaactgttttccttaatgaacagacatctctcaactcccaaatcatttagagggatgcttaaaagcagcaagaccactgaatacattttccatgtt

SEQ ID NO: 124584 - DNA, 537 bp, Homo sapiens
gggtgatactggcttcatagaatgatttagggaggattctctctttctctatcttgtgaaataatgtcaataagactggtaccaattattctttgaatgtctgatagaatttagctgtgattccatctggtcctgggcttttctttattggaaattattttttgttaccatttcaatatcactgcttattatcactctgttcagagtttctatatcttcctggtttaacccaggagggttgtatattttcaggttttctactttatgcacataaagatgttcatagttgcattgaatgatcttttgtatttgtgtgatatcagttgtaatatttatcattttgtttttaattgaacttattttgatcttctctcttcttttctttgataatttcactaacggtctatgaattttgtttattttttcaaagaaccagctttatgtttcatttatcttttgtgttgttctttgtctgtcacaatttcatttagttctgctttgatctttgttatttcttttcttctgctgcattcgtgt

SEQ ID NO: 124585 - DNA, 327 bp, Homo sapiens
ctgtagcacaaggattataaattatctttctctagggatgtgtcagagttatactttataaactcataatcacgaagttacagataatctagtcctgtcatatgcatcgtgtcatactactatataccttgcctatttatttttattggatatataaccatccaatgaatggactaatcctaatttactcagctatttctcttcacataatattgttcacttccacattttcattgttacaggtaacagtccatattttttatcattttccataagctagagccccttatatgaaattactgaattaaagattatgaactaacattt

SEQ ID NO: 124586 - DNA, 931 bp, Homo sapiens
gagccaccgctcccagccctaagcttcgtttgtaagtgaactacttcaaaaggttccaattaaaagtttgcttttaacttttcctcctagattttgctctctcacagcctaatttcacagtttctagtgttcccttcccgaggagagcatgaagcaggagctgcagaacctgcgcgatgagatcaaacagctggggagggagatccgcctgcagctgaaggccatagagcaccaggaacccaggcctggcttctctcccagcagcctggggggcagggcagagcctccagtcggaccccttcctcacactggcccctatgcagaagggcagacagttcttctggggttggcagctgctcattcatgatggcctcctccttcaggcctcaatgcctgggggaggcctgcactgtcctgattggccgggacacacggttctgtacaaaaattaacacaaaacaccaaaacaaaaaaaaaaaaaaaaatctttgggccgtacagggccttaaaaaaacttttaaaaccaattcttttatgggggaggggggacccaaaaggagaacaggaaaaccgggcgacaaggtcgtaagccaagagagacccgtcgacactcagaactcggagtggagattccacagcaaaaaaaaaacagcccggggggaacaaccaagattcgtgaccacaaccgagagggaggatccggggctcacaggggactctacaacaggggacaagagaatcgataaatagcccgacgctggcgaaaaaacgaacaacaccagacaccaagtaagaagcaaacaaaaaaaaccatccgcagatgacacaacgcacaaacacacagaataccgagagagaccagccaaaagcaagaaacagacaacagagcacataccaaagcaacagagcaagaaaatcagacaacaagaaa

SEQ ID NO: 124587 - DNA, 280 bp, Homo sapiens
ctgacacaaagacctacgtggtgcctgtgacacggctaataattactgtgtaatgaacccgttgccgcagacaaagatttccttttcttttcctagtttgtccttccttccttcctttacctcccttcctccctccttccctccttccttccttcctccatgaatctgcatgtcaagtaagtgtttttattcagaaaggccagcctggtgatggtgggatgtctcagcccctgtgtggtggaaacagagtccatgctttctgctaacagcccagagatag

SEQ ID NO: 124588 - DNA, 885 bp, Homo sapiens
agagatggggtctcactatattgcccaggctggccacaagctcctggtctcaagccatccttccacctcagcctctgttgatacacaaaagtctttcattttgttgaagtccacttgtttgttattgttgttgcctgtgctttggtgtcaaattcaagaaatcattgccagatctaatgtcatgaagctgctaagagttttatagttttggctcttatgtttaggtatttggtcattttgagttatttttttttttttttttttgggaaagggggtcccgcccggcacccaggggggggttgggggccggaaatctcgcccggtctggcacctccaaaaggtgcggcacacaggagtggaagtctcgcgtgttcctaaaaaacaataacaaggcaacaacaacacttgttttagaagcacggcttaggcaagggggtcacattgtcgtgtatccccagcactgtgggggaaggccacacggggaggatctctctggagccccggggagttcacagaacatacccggggacaacactttttcactatgcactattatataccgcttatagaattaaaatacgtcttttacctttagtgccgcttataactattatgaccatttattgcacgtttagtaacctatttttgattaaccgttttttcgccattttttcactaataattgcgagattaactgactaagtagttgtgagaaaatgtcaccgatcgtagtcggccatggttgtcaacgcttggcgggaacatgcgcatacatgttgggacaaaatcatgataatataccgcgcagcgctaatattagagcaagaggtgacatactacccaggataggccaaagatgagaacacgtgaaacaggcacactaga

SEQ ID NO: 124589 - DNA, 359 bp, Homo sapiens
cagtccatcttataagatatcttactgtaacctagaagatatcgtactgtatcacaacaatctcctagtaggagacagtgtaccgtatcctaggagaggggcacagtccatcctaggaggtatcttaccgtatcctagaagtctcctagtgggagacagactactgtaccctaggagagggccactgtttaatttatttgcatttcctgccagcacctggcgtaccaacaacgggtattcagcaaagatttgcggaatgccagggtacgaatgaatgtccagcactctggacaactcggaacagggggtttccgtgaagagcaagtctcatcacctgccacctccaagatcccaaagcc

SEQ ID NO: 124590 - DNA, 471 bp, Homo sapiens
ccacacacaatcagggacacaaagggacacgtgtacatttacatactctcctagcaggcagttcatacatagtcacgcctaatcatacacagccacgggcactcacacaacacagacacacagtacagtaacacttggacacttaaattctccctgtagtcacatgtaggacaaaatcaaacatatgcttatacagacacacatactaacaccttgtaattgcacataatcacagccaagtacacaaccacaaatatgaagctgcaaaaactctacatcagacatgaccacggtcacacacaaccatcaatccgcagagacacaccaacacagacacacgatcacacatcatcaattacagccccacacacccaaccccaattaacagccatacactgtcaaccactcatctggtctcagcccagtgttcgcgagacgcaggggttgagggctacttccaggctctgtaga

SEQ ID NO: 124591 - DNA, 461 bp, Homo sapiens
ttctggccctggctgcacctaggagtcacctgggagcttaaaaacacactgatgattgaggtctccttacagatcttgattgaatctggctgaggcatactgtgggtatctggacttttaacagactttgattgaatctggctgaggtatactgtgggtatctggatttttaacagctcttgattgaatctggctgaggcatactgtggttatttggatgtgtaacagctcttgattgaatctggctgaggtaaattgtgagtatctggatttttaacagatcttgattgaatctggctgaggtatgctgtgagtatctggatttttaacagatcttgattgaatctggctgaggcattctctgggtatctggatttttaacagatcttgattgaatctggctgaggtatactgtgggtatctggatttttaacagctcttgattgaatctggctgaggca

SEQ ID NO: 124592 - DNA, 720 bp, Homo sapiens
ttaggtttggttttgaaagtgagtgcttgctgtctggaggtgagctttaagactcgtctgccctgcttatgagatgaggaagggtggcctcttcctcctgcatttctgttcttcgcttccttctctgtctgctcactctgtggaatgcccaccccagcacgggtggggtggaacctgtcagatcagtctcttgtttctggggtcttgaggcattataagatctagttgttagaagtgtgggattaattcatcttttcacattcttctaagttcctgcttttagctgccacacccactttggctaagtgggggtcttgccatgtaattagcgcctccatgccaagtggcagaattgcttcaatggtgacagattgtccccattcaagagttcacttttggcaactcatcattgatccaggaaggtgacatggatgaaactggctaagacttcagacaggcttgtgtccagactcttgagaaagctctgttggcttctggtctggcactgtgaagtttgctgtgatgctggcaccacaacctggtgtttcctaatttgtttctcccacattttgctttggttttgtcttttgggcagcttccagctccagtagagcaggaccaataggcatttgtggttctatattcaccctcctcacgtgcttcctggctcctcattgcccccagatgatgccacaggtccctgggcctgctgccagtcgt

SEQ ID NO: 124593 - DNA, 151 bp, Homo sapiens
ttctatgggacagttgattacagaacattgggaccttccctgattcaggttagtggtcccaggtgacccaggatagctgcttcactctggacattttctcttacatacatttgaaatgtgacggctttgccaaatgagacacattatcttt

SEQ ID NO: 124594 - DNA, 352 bp, Homo sapiens
gacagagacggccctggtgaggctggggaaaggggaagatgacacactacatggggcaccctcatagcttcatcctgtgccgggttctcatcatttttttgaaatctcccaaaaaagaagcttcttagaaagacagggcaatagataccagtaaattgcatgtaccgtggcctggcgattaagggtttttccattccctttgcttatttctggaaagctgctgatgtgagtggcagcagagattgagaagggcttgtccctatcacgtgatggtctgaattgaataggataatgcttggctgagcctccttcccacattttccttcaaataaaataccaaccctttcttgac

SEQ ID NO: 124595 - DNA, 251 bp, Homo sapiens
cagtcccataacttcccttgactccttattttactgttacttttataattttaactattaactcacctttaataaatgatgatgttgtgcagtttatataactggtattatttgtatagtagttctcttcattcacaaagtacattaccattaccaaagatatttctaaatatatgagattattttactcctcagtacaatttctatttctgcccagattaccagattaccaatcatttctcagtttctca

SEQ ID NO: 124596 - DNA, 238 bp, Homo sapiens
ttaatcagggtcaaaagaaatggatccctacatctgtgagttcctttagcatgataagcagcacattagaatacttagctagtagaatatgtttgtatcctctgtctcctgaaatcaaataaaattagaaaatcaaatacaccttcaaaattctggagtatgtgaaagctatgtgaactacattgaaggctcattcatctttcctgaaaacagaattcatgtgctcacagcaaggtcg

SEQ ID NO: 124597 - DNA, 596 bp, Homo sapiens
atgtagccaagagaaaggataaaggctgagctgtttgaagtttccagagaggactgaggaagtcaacctgggtccttcttgtgtggaggtcacacttcgcccaagatagcagaggccgtttaaactgagatggatatatttaccctttgtttgatgccaggagtatgtgatcatgaattgttatgtggctgtgtgtactacataccggtgtgttcacaagggtaggtataactgagctgtgtgcataagtgaacgagtggcctttgggtttagtgtgagcatctgaatggtttggtgaagggatgtgcacgtgcatctttaaccatttacccatcaagcctctcattaagttaagacaggttacggaaaagaattccactaggtgagagtatctgcagacaggcctacagcccacaccagaaaactgggaatcctcaactcgccccactccctgatccctcatcatccactgaatccatgctgccactcccaccatcagcccccatcaactctccctgggctgctgctcagccttcaatggcctcccccaaaacccttctgaatgaactgcagcaatagtgatgacggtaaaatga

SEQ ID NO: 124598 - DNA, 341 bp, Homo sapiens
caggactagcttagaaatattgttaaggaaaaacttcctgtagaatgaggtcatcacaattcctgcatgcccccaggtggaagcccaagggggaaaacaggtgttttttttgagacggagtctcactcttgtcacccaggctggagtgcaatggtgcgatctcggttcactgcaacgtctgcctcctgggttcaatcgattctcttgcctcaggctcccgagtaactgggattacaggtgcacaccaccgtgcctggctaattttgtatttttagtagagatggggtttcaccatgttggccaggctggtcttgaactcctggcctcaagtgatctgccca

SEQ ID NO: 124599 - DNA, 929 bp, Homo sapiens
cctgtagtccctgtagtctcagctagggagactaaggcaggagagtcacttgaacttgggaggtggatgttgcagtgagccaagatcacaccactgcactccagcctggacaacagagagagactccatctcaaacaacagcagcaacaacaacaacaacaacaacagaacaaaaccaaaaaactagtattaaatacctagtagtaaaatatctttttaatcaaacaagttaaaaatctctacaataaaaacaataaaatattgacaaaagaaattgaagaggacacagacaaatggaaaagatattccatgttcatgatttggaagaatcaatattgttaaaatgtccatactacccaaagcaatctatagattcaatgcaatccctatcaaaataccaaggacatacatcacagaaacaacaacaaaaaaatcctaaaatttatatggaacaacaaaagacccagaatagccaaagccatcctgagcaaaaagaagaaaattggaggaatcacattacctgactgtaaattataatacaaagctatagtaaccaaaagagtgtggtattggcataaaaacagacaaatagaccaatggagctgaatagagaacacagaaagaaatccatacatctacagtgaactcatttgcaatgaaagtgtcaagaacatacactggggaaagtacggcctcttcaaaaaatggtgcttgaaaaactggatatccatatgcagaagaatgaaactagactcctatttcttaccatgtacaaaaatcaaatcacatggattaaagccttaaatctaagacctgaaactatgaaaatactagaagaaaacattgggaaaacactttaggacattggtctgggcaaagatttattgagtaagaccttaaaagcacagttaaccaaagcaagaaaaaaa

SEQ ID NO: 124600 - DNA, 930 bp, Homo sapiens
tgctgggattacaggtatgagccactgtgcctggcccagagcctgtttttctgacagtcacaccgcttattggttgctggatagaatgaaaaagcaaatggaagtacctctccccaccagtagtttttctgggtttcttttatgggggagcgagggtagagtaacatgtgggtagagggacagtgtttcaggaacccatttggatatttaagaacaggactaaatacttaaattacttctgtgacaataaaaagatacccaggaagctacactcttttttagttctatattttttgcatcatacgtttaaaaattggttgctcctaaatgaagctttagaatcctttgcaagatagtactactgcttcaagcagctaaccaccaatgaacaagaattatgagttcaaactctggcatagaccaaccccctaacttggatctcctaactcataatccagagttcttttccagagaactgctccgcttttaaaaaccagtgccaggattcagatctcaaatgataccattaaacactgataggcaagaagcatttgtttctatgagtaaataactctttcccggtctattccaaggttccttattggcggtaattataatggttggtaatatatcatatgataatttggccacgtgcttattcagtgcttaatatatgtcagtcttttcttacattatatgtagtttttcttattgaagacagagtttcttgctctgtgcctgccaagatcacgccattgcactccagcctgggtgacagggcaagactctgtctcaataaaaaacaaaaccaaaccacagtttatcccttaggaaaacaccaaaaagcttcttatgtacatgaacttgtattagggtcacactttaaggtggctctagaaagtataatgagagacttacagtaagactgct

SEQ ID NO: 124601 - DNA, 616 bp, Homo sapiens
gggggtcagttgcttctatcagtctcaatgccccagaaactgagcgaaaacccaagtattcatggcctactgaacgcaaagtctgagtctgaccctggtattctattccttggtttttagaatgcccccagacaaagatgagggctgaaggctcagaaaggccgggtcaggccaggtgaggtggctcacgtctgaaatcacagcacttttggaggccgaggcaggatcgtttgaggccaggagtttgaggccagcctgggcaacaaagtgaaaccctgtctctacaaaatattgtaaaaattagccaggtgtggtggcacacacctgcggccccagctattcaggaggctgaggcgggaggaacccttgagtccaggagctgcagtgagctatgattttgccactgaactctggcctgggtgaccgagcgagaccctgtcttcaaaagaaaacaagaaaggtagggtgacctgcctgggaatatgtggtaggaacagcagagtggagagagagcgcttgataaggtgtcttgttgggagacattccccacaccatggtgccatgggaatcacataagcaggtcaagtgtgcctcactcaagcactcaagaaccaag

SEQ ID NO: 124602 - DNA, 595 bp, Homo sapiens
ggaggaggaaaagagtgtgaagaggactggaagagcatggatcaggaaaatgagagatgatttctttaaaataacagcatactttgagactctgaagtcacgagaagtttgaattttgatttgctaaaaatcttaatcacaaaacaacagtgattccttcatttatatgaattaaaagcttgattagtattttcttttcttttcgagacagtgtcttgctccatttcccaggctgagtgatcacggctcactgaagcctcaacctcccagattcaaccaatcctcccacctcagccactcgggtagctgggactacaggtatgcgccactatgcttggctaatttttgtattttttgtagagatggggtctcaccatgcaagcccagctggcccacgtaggttttaaagcaaggggcgtgaagaaggcacagtgaggtatgtggctgttctcgtggtagttcattcggcctaaatagacctggcattaaatttcaagaaggatttggcattttctcttcttgacccttctctttaaagggtaacaatattaatgtttagaatgacaaagatgaattattacaaataaatctgatg

SEQ ID NO: 124603 - DNA, 282 bp, Homo sapiens
tcacacagtgaatatgatcagattacctccctgcttctgtaaggtatggaaacacaatgtatgaacacagaggcttccctcaacatcagaaaactagaggcaagggtactgttctgaagtgttggtgttacttccacccccttcagaatgaggatatggccctgcagatgccaagtttggctcaaggagaaaaggaatatttctctgtattcagaaatattccctagggctgggtgcagtggctcaggcttgtaatcccagcactttgggaagcctaggcaa

SEQ ID NO: 124604 - DNA, 507 bp, Homo sapiens
atagctagatttaattattttgggggttaggaaccaagatatatatatctctgtgtccctgacaatgcctagtagattgcattgttcacaataactactcagtatttttgagtttatttgtatttgctttatcaatttgccttaactgtaaccatgttcaaaccattgtttgttttgctaacaacagagggcaccattagggcacttgtacacccaatagtcctatcccagtccctggtagcttttttgagccgcacttttccttttcctaagtaatgtcatagaaatttggatgttatactaactggcagtggcccatttctacttatagagaaatcctggcctcagtttatttgaaaaagagtatttgttacattttgatcctttgtagttttcaaactttttattctcctcattattctttatccaagtgaaatcttacccaggatcttactgtattaattagatccatttgttttctgaagggagaagatagaggtgaaggca

SEQ ID NO: 124605 - DNA, 318 bp, Homo sapiens
gataattccagaacactagtagacagctctcctgagcacataattttacataattatgtaattactggcagcaaatgggtatttactgcattcaagcaggaaaacccagcttcaccacagactgattcttctaaaacgtttaaaaataagtatatgaaaatgtgttctgaattaagaactgggtgagaaaattcctaattaaaaaaaaaaaaagccttagctgggtgtgttggcacatgactgtagtcctaactactcggtaggttgaggtgggaggatcacttgagcccaggagtttgagaccagcctggacaacat

SEQ ID NO: 124606 - DNA, 687 bp, Homo sapiens
cattgtggcctctgcgctgggtctgtctcaaattctcacattcctaaagcactttgttttccaatggcattaaagtatccattgttaaagccttgggttttatttacatttagtgtggaattatataggacagaaattgatggggattattttggatagaaggacttttgggtcacaatcttcatagtggtttcctgtttttaagagttttttctgagatgcaaatatttatttcataggctattgaagaccttttttgagattagtcattctttgactattttaaagactatatagtgatgataagcaactatctgttatcaaagaacctaaataattgtagtaattgaaattcaagatcacagtgaaaactcatcagtttatagatatttgtctagaagagtgttcttcctataggtaggtagattatatatttatgcaagtaatgagttattctagttgacatattgtactgatttacaagtaagattatttctgaatttctgtaaacgtgaatttgaatctgtgatagaaccaccagcaaattacatatgctcttaactcagttttcaaatcagcaaaaatacacgtaagtaaaatggaaataaattattctcttagaggtaaatgtgacacacaagtggcaagcaaaagtaaaatttgtacatagagcaaagaccccaaaag

SEQ ID NO: 124607 - DNA, 296 bp, Homo sapiens
tatatgtgtttagttcagcactcacatattttaaatgagcaatctcttaggttttcagagaagtagaacattgttgtgtctcttacagcagaatattcattattgaatgtagtgtcaacctgaatttctatcaggttttgtcttaactatttaggaatttggtaaggtaatacactcttgatgatgaagactttctgaaaaatagtttttaggatgttgagctattaaaatatcctccaagatagttttaaaatgttttatttaaatgaagctattacagttatgcgtatattatt

SEQ ID NO: 124608 - DNA, 212 bp, Homo sapiens
ggttgggagaggacagcaggagtccctagtcgcatctgtggagaatgcagccattgagctgcggtcccagtgaagggtctcgagcatgtggccatggggttcactcaagaacttactgagaagtcaaactcgggctacccaagacgcaggagctgttcaggaatcaagagggtgtgcatggagtttgcacttagggcatacatggaacagtg

SEQ ID NO: 124609 - DNA, 334 bp, Homo sapiens
ggagtaggatattttttggtggggggaggggctatggctgtggaggtgagtggcattagctgctgagttttgcatacgttaagcaatctttattagacattcaagtggaggcatcaagtaagcagttagatacctgagtcaagttcaggaaagagggctggactgaaatacacaattgtgagtcatctgcctgtggatagtgaagtcaggagagtagatgggatcactaaggggaaagtgtcattaaagaaaagactaagaactgaaccttgaagcattctataacattgaaagatcaggaaaaggaaaccaagctagagcaatcagagaggta

SEQ ID NO: 124610 - DNA, 456 bp, Homo sapiens
caataaatagcaaaagattaacacaaatagaccacacaaaaaacattctgcttcatctgtccagaatgcacatttccttttgctcttcctggaaggctgtgggccatccttaatggcccaactcaaatgccgcatcttctgtgaagctttaggaattgttccagattgttattaatcataatctctgccccaaaatcattcttcttatgactctctgatgctttctgttacagctgtgtttgatagtcttccccagagcgtgtgaacatcttgaatggcaatgttttattcaactatctgcaggacttaggacaatatactgtaggtattcaataagtgatcattgaatggaaattcatcctttaggaactttatggagcaaaagtgagtgtaaaacacatttgcaaatattctttaaagttattatttacctttggctaatacgagtaaagatta

SEQ ID NO: 124611 - DNA, 588 bp, Homo sapiens
attatgcatgactcaccaaagaactaaaatccaacataataaacaatgccgtaataatttttgtattattttatgttattaataatttagtaggtattttagttttctgtcctgtacaataccagtcatcaccatacttgacagataacagataatttcccaaataaactttatatcataagcccttatcagtctcttttaaagacagaaagtgattaactctgttaatcaatgctggctaaaaaaaatacaggagcactaaccattttgtaaccaaacctgaacacacaatccctgatatagagacataaacttaataatgacccaacatttagagagaaaagagaaagtaaagaaagaggaagacagagaaaccggggctactttctaaaatagtaatcactaggggaatgaataacctgaaattgtacctttataattgagaggaaggggttaaaaatgtacaattaataaattactggtttttatgaatgaccagtgacatcttctgagaagaccccaatccagctaagcaaagataacctatttctttcaaactgatttgggatatattttcccacagaaaca

SEQ ID NO: 124612 - DNA, 573 bp, Homo sapiens
atacgtactgcgtcgaccaaaagggaattttaaacagggagtgaaacttttgtgttttacagagatgatgttgctgcaaacactcattggagtgagagagaccaaaggcaaagaagtcaagtaggaggtctctaggtgaagaattatgaggccctgaatcagggccacagcagtaggagttggtggaagacatttaagagggggaatttataggttgtggtgactgattggatgttaaaaagaaactctagaaagacacttgctggttgggcgcagtggcttacatctgtcatttgagcactttgagaggcccagcactttaggaggccaaggcatgaggactgcttgaggctaggagttctagactagcctgggcaacataatgagacccctatcgctgcaaaaaaaatttttttaattagccaggctgggcatggtgacccacacctgtaatcccagtactttgagaggccaaagcgggaggatcacttgagcccaggaggtcaagactgcagtgagctgtgttcgtgccactgtactccagcctggatgacagagtaagaccctgtctca

SEQ ID NO: 124613 - DNA, 329 bp, Homo sapiens
agagatctcttggtgcagctgggctggttctcctcttcccatcccctcattttccatttctttgggtcagggcccctgagccttgagaagaataaggaccgttgttttatctcttttttctcttttgtagagacatggacttgccatgttgctcaggctggtctcaaactcctggcctcaagcaatcctcccacctccccaagtgttgtcattatagcatgagccactgtggttggccaggacccttgttttcctacatggccccagcatgacaaccagcccccattactcaggccagtcactttgtgatggcgatgttgtcccagcaa

SEQ ID NO: 124614 - DNA, 573 bp, Homo sapiens
gagcaaacagtgaagtcgggaaccctgtataggcactaagggcagggattcggggcacaagagcaacctgctccccttcctgtgtgcctggaccagatacagggcaggaggtggggcaacgggtagacaagtggcctgccccaagaagggggccgcctggacccctgcctacccagaatcagcacagctgctatgggtggcatcaatgggccagccgacccaacagaaccccttctcaggaactgagcagtctcggaggagttcagcagaggcggggcgggtcggggaagaggccaggatcactgacagccattcagcccaggggtgtggcctcacctgccctgagggggcaagcagggcttcttagccttgctaggtggccactgcacatcaaacccaggtgagcacccaggccaccatcctgctacagggacacatggcatcttctcccaggagcagggccggcagaggtcagcataggccaggtgtagggttgggtgcaggcatggcctgcactgccccaggagggaaccccatacctcaagactgctggtgtcgccgaaaccagaaccc

SEQ ID NO: 124615 - DNA, 491 bp, Homo sapiens
tcctgacacacagaaaccttccataaatatatgcccaagtttgaatggataggtaggtagattttgaaaagggatgcagaagtgccgttgtaaaatcctctctgaagaagtggaaaggtgcttttccagaaatggtggaaatgttctactgatgagtgtggtgaaatggattggctgacctcttaacagctaggaatgaaggcaaaagtgagaaggagggcagtgttttacccagagtagtgtcactctctgaatgtctatatgctgtgatggatagaagaacactaggcctgagaggtgaagccagctggtcttcctgggtcgagtggggacctggagaatttttctgtctagctaaaggattgtaaacgcaccaatcagcgctctgtgtctagttaaaggattgtaaatgcacaagtcagcactccgtaaaaatgcaccaatcagcactctgtgtgtagctaaaggattgtaaatgggccaatcagcac

SEQ ID NO: 124616 - DNA, 395 bp, Homo sapiens
aaaaggaaaaagtaaccatattcaaatattcccagaacattctgttatccttaacaaaggactgaccttaaggaaaattattttaccagaggctaaccaacagcgggtatatcaaagcctgaccaagtggaataaggaaaatatccaactagggttctctctctagctttcttgttccacctaaggggggtaaaaaagctgagaagcatttgtaaaggtgaaagcccaggggcactgtcccacaaaaaacctgagcctaatcacaggactacatacagactattctccccgctccacaacactcatcttactacaatcaacagagctcctgtaaaacaggaaatcacaactgaaagaatggtaaggctcaggctctatttaaaaaggagtctcat

SEQ ID NO: 124617 - DNA, 447 bp, Homo sapiens
cccatggctccccttgggtgtctcacacagggaagaccaactcagctggcaccgcagaaactctctttcccacagtgatcagtatagctgcccaaaagatactgtggatggaagggccagctgccacataccctcctgatggaagtaccgagtacattggcctgagactggagtcctctccaatagcccactgtccagcccctggccttaccaacgctcaggacagattagaaatggaccgtaagtcaacagcaccctcctttcctcaacttgccacttgggtgggcattagctcatccagagaatttgatttggcagataccatgcttcttttatatcatttctttgccacctaatttgtacttatgattgtagaaatataagaaaatataaagaagtaaaagaagaaaataaaaagaaattatatttcaaagataaccagttaag

SEQ ID NO: 124618 - DNA, 698 bp, Homo sapiens
agcggaagcgcctggaagcggaagcgcctggaagcggaagctggacagacgaggagaggccttgggtgtgacatcaacggaacctgagggaagcaaaactcagcaaggacgcacccggtctgctggactggggctttgggttggtgacgtggacgatgagtctaattttggggcatccgcgcagttgtgcagcggtcagtggggtgcaggggtggacgtgaggtcaacccacgccggcctcagagccccagcgacctgcaggcaggtcaggagccagagggtggggcgggggcggaggaggccaagggaggaaggaaaggtcgggggaagcacaggcgggcccctctttccagattccctcctttaagagggcggggagaagaaaggccccagcaggcagcgagctcaggtgccctcgcctcgccgcctctttcctcttcctgtgaagagcgagacaggggaaggagcaggaggattccccgctggctccaggaggtggggcagcaggggcctgggagtgaaggcgctgtggggccctgacaacctcctttctgcccagacacgaaacccgaaccttcccgaaccttcccacacccgcctgtgctgaggtgctgcccccacctgaacagggaggaggatggccaaggcctgggaggcaggatggagcctccctttaggggagtgagcacttcctcctg

SEQ ID NO: 124619 - DNA, 314 bp, Homo sapiens
tatcatgtggtctaggttgactgtttttttcaactctgattttttttcaattatcacggggcttttttggggatttttatctccccgttttgacgtcaaacaaaattcaagcacatcctacactcaagctaaatcaaggctaaatgttaatctgttgaatcttcctgaaatataatctcatttagaaatccacagtatttcctcagtttacttcaaaatgtggatgtaagttttacttttttccctcccattaatttttttaatttttatttagagatgaggtcttgctctgtcacacaggctggaatgcagtg

SEQ ID NO: 124620 - DNA, 171 bp, Homo sapiens
ctacatcctcggcaacccaagttctgcaattttttactcaaagtttctagaatgtgcctctcccaggccccgttttctctattcctgactcagtccaggccattttcctcgtgtacagtccttgggatgtttcttctccattctgcccatgtgagcttttgaaacctttgt

SEQ ID NO: 124621 - DNA, 343 bp, Homo sapiens
ccatgtctgtgctgtgctcaccccatgtctgtgccgtgctcagtcctaggtctgtgctgtggttaccccatgtctgtgctgtgctcaccccatgtctgtgctgtgctcagtcccaggtctgtgctatggctgcccaaggtctgtgctgtggctgcccaacgtctgtgctgtgctcagtcccaggtctgtgctgtgcttgccccagatctgtgctgtgcttagtcccaggtctgggctgtgctcagtcccaggttggtctggtttcaaagccccagttctttccactatccctgtactcatgatgactcccccaaaacagaggtttttgttccacaggtgagac

SEQ ID NO: 124622 - DNA, 259 bp, Homo sapiens
tggtgttggacattctgtagggaaaggacagctctctcttgtccctccacaaagagttactccacgcaaaatgtccacagtgctgaggttgagaaaccctgccctagatccttacagaggagtccttcttggccatgtgcatgcagcgtgagtttgctggaacacatgtaggacctgcttccaggatggtgctcacacaagctctgtccacaaagctggggcccaagtgagagagactgtggtgacactgagggagccg

SEQ ID NO: 124623 - DNA, 523 bp, Homo sapiens
aaactgcagataaggaacaaagaagatagtaagtctgactcaagcaatctgtgccaataacatttaaaaacgactggaaatgcaagaaataaatagggtcaataatcatttctaaaagaaatctatgccctttacccatattttccgtggcatttctcttgtgcctcctatgatttgaatagtggacaagacattggtcattctttttgggccatcctatattgaaaaatccttctatgtttagggaattcccaacatcaccattttctgactccccaagggaaaagacagaaatatactttctcagagtttattacacttaagggcacaggcatgtgacccagtctccgtcaacccggtgtagaaaggcccgttttcattcagaaactactgatgtgtagaagcagattcctcaagaaaaacattcagatgaggtggttataggtaattaataatccattcacgcaaaactagtgtcagtgtttagggtcaatgggacttgcagtgtaaactatgtggtcat

SEQ ID NO: 124624 - DNA, 395 bp, Homo sapiens
atgatcggggctgctttttattaaacagaaaagcctttccaaggactcccatgtccttgctatctgcctaagggatttcttcttaactcctgcatcactatggaaggggactggagttaaatgtaatgtcgcagagcaacaactttgtgctacatattatgccttacaagttgaggacattacaaagagggtctcgaggctcgtatgcaccccgtacctcacagcaggttggctgaagggtaccttccagaaaccaaagtctatgaatgcccagactggccaaatgtgaagcctgccttcaacagaggagcacatgaactaatagccccttgattgcagagctccatttgatgcttggacctgtcacttatgttacaactgaaggacagtcttca

SEQ ID NO: 124625 - DNA, 879 bp, Homo sapiens
gataataacagatcagtagcaggtaggatttgttgagcctggatgttgtacctctgtgctaagggctttgcttctttttgtcctatttaatccttacagcaatgttaagaggtagctccgtataatatcccattcattagtgaaagaaactgaagcacagaaagtttaagtaaattgcccaaaggctcacagctggtgtattacctgcctctagttagctctaacaccggtagcctctaactaataaatctattggaattatcataccaagttggggatggcgagtgatggggaagcatattttattattagtcatgctctcctcagagtgtctttatttaattggagagtgcttagtgttaatttccagataaagtaggttgggggggcttttgctgttagttaaccctgtgtacgtctccagaaatgcattctgtgttttctttttcttactgtttaaaaccagatctctctgtcctttccaaagtgctgggattacaggcgtgagccactgcgccggcacattcagctcttatcaaagaaataacccagacttaatcttgaatgatacggattatgcccaatattaagtcaacaaatataagaaaggtatcttaaatagatcttacggcaaatacagtgatgaaggatctgatgcttcatctgtgcagtcatctccaaaacagtaaaataacacttgtgtggcatttgaattttaaggggtgattccatgttgaacagaaggtgatggaattgatctaggggtcttcaaaggggtccattggatatgtgtttgaaagggggagtgagtgaattattcaatggtgtgtgaatactttgggcaaaaaaaagggggcgtaagaggggaaagaagtgtag

SEQ ID NO: 124626 - DNA, 379 bp, Homo sapiens
agcatcccacaagagagctggaggcagcagccctctgtgcccagcccgagatccgcaacgcataggtgccatgtcagcacacaacttacaccagctcaaagctggatcgacagcagcgcccagggttttggtgattataaccaccctgcaggggttcttctgagtacgtcttcaggtttcttgtgtagttttgttagaagggattttagtggctccagggccttaggaccctagtgtgcagcgaggagtgtccacagagaccctgcccagtcaggccctactttaggctggagcctgtgggcttatcttcaaggattttacaaacacttctgacaggaggccttgcagggagatgatgctgagttgggactgcgcacag

SEQ ID NO: 124627 - DNA, 174 bp, Homo sapiens
aacctcaataatagccaaagaaaatgcatcaagagacatcagagagactcatttttcacctatcaaattagcgaagaataaaatgactgtcaagaccccatgttggtgagaacatgggggatccaggagccctgaaaatacctttctggatagcagtttggcattaggtaccaa

SEQ ID NO: 124628 - DNA, 479 bp, Homo sapiens
atcaattatacttcacatccaattatacttcgcatccaattatacttcatatacaaagtataagctctccagtttgctgtagtcctcatcactccctatccttttttatacgcaactcatctcacttccttatgttatgtttctggcttctacaataggcatttggatttggtgccccccggggtcttgatcacagcttctcaaacttaaatatggatacagcccacctggtgattctgatttaaattcacggggttgggtcgaagaattcagttctaaccagcttccaggtgaaaccaatgttgctgggtcatggatcacactttgaatgacaacattccaggtaagaatattatttatttgaaaaccactgctagtctacttaaggtatgtgttcgatctattagttactactgctaaaactcagaagatatagatttatgtgacactggcagggaagtatcaaagggtatcagact

SEQ ID NO: 124629 - DNA, 170 bp, Homo sapiens
atgaatggggcccagcccacacggggctctagctgggaccagataggcaggtgctggccaagctttccattagcccagtattctgaagctcacaccaggaagacaccagcagggacgccagccgctactcttctgctgcagatttacatgtaatacagaggctctcagag

SEQ ID NO: 124630 - DNA, 286 bp, Homo sapiens
cagcaggaacgtctcatgctcactctgttaattacttcaaggtttcttctgtgtctgctttgtgctcactgacactcctaggaccacaatggagctggctgctgggtgacagaaagccaagcccctttggaaagaagaggggcttccaaagccctgagaaggaaggaaggcccgaaccagagggtcttccctccaaaggccagggagtgaagtttggagccaggctgacagggccggcctggtttaggaaaggagaggctggaaacagacacagcagtggtccctg

SEQ ID NO: 124631 - DNA, 792 bp, Homo sapiens
aaaaatcttcaccctttcctcaacttatttagctttttgtgtccttgtcttcaacactataaaatagttttaatacaggtggtacagatcctctgatatgtataatatgagctgtattatatggtgacatgagaaaacctgcatggtggcaattcagagccagtactatggtttttagaataagtgaatatatcaaagtttttcatttaatgggagaatctaagagtttgtgtctactggattttccctaatttttggatgtgaatgaagaaagaatgaaatctctatatttttgataaattgtatctgcattaaactaggcctgtccttatttgtttttgtgattagttaaattcaaatctttggttcttttatgtaagtggtgattctgccccccagggaacattggcattgtctgcagtgggtgtgagtagcatctagttaggtcagacatgcttcaaaacatcctacagaacacagaacagccctcacaataaaaagttacccagcacaaaataccaatactcattgtattattcatgtttaataaaaattaagttgaggctgaatgcggtgtctcacgcctgtaatcccagcactttggcaggccaaagcgggtggatcacctgaggtcaggagtttgagaccagcctggccaacatggtgaaaccccatctctactaaaaatataaaaattagcttagcgtggtggcacatgcctgtagtcccagctacttgggaggctgaggcagaagaatcgcttgagcctgggaggcggaggttgcagtgagc

SEQ ID NO: 124632 - DNA, 207 bp, Homo sapiens
cagtagagaagcaaatatttttgtccagtaggaaggggaacctcaaatgttacagtttttgttgtcccatagaacattaaccagttttgtttttgacttagcaatcttatttcagtcttctgactctaatgaacaacatgtactttgatttcttgtacattctgttgaatcatctttacaatatactgattcccccattaatgagct

SEQ ID NO: 124633 - DNA, 176 bp, Homo sapiens
tgcttttccacagggggaaaatactgtttactgcccatctttgaaaaacattttacttagagcataaacttgaagctagatccttttaaccacttaattgctggacacttagtaggtattcataagtatatttgtatgaataaagtaaatttgagatcatcctctgtggacaagta

SEQ ID NO: 124634 - DNA, 504 bp, Homo sapiens
ggcgcgaattcactagtgattgtgagctgagatcgcaccactgcactctagcctggatgacagagcaagactctgtctcaaaaaaaaaaaagaaaaagggaaatttagacacacacacaccctgggagaataccgagtgaagatgaaggtggagatggggtaagccacttacaagtcaaggaacgccacgatttcgagcacaccaccagaagccaggcatggaccagacccctccctcagccatagaggaggaattaaccctctagatgcctatgatcctgcacttccagcctccagaagtaccagacagtcaacatgtgttgctttaaaccggtccgtggaacttcgttatggccaccccaggaagctagatggtgctcagtaaggaggtccctattggggccatcttgtagttgtcaggcctgcctctcattttaaggtgctttgagccaacacttcagaatcctcacagatctcatgtaaaactcggatttctggtttccc

SEQ ID NO: 124635 - DNA, 545 bp, Homo sapiens
aagcccacaagcacctcacattcaaatagctgaaacagcctatcacctttcctcagacctgaatctcctgcttctgttttccctgtctcatgatgggagatgtgagacagggaaaccattgtctcatgatgggaggctgtgaggctaatggaattattattctcctatcatttaaaacagaaagcgcttgagttgtccttgatgcctacattttgcctacacagtcaattatccttaaaccctaatccctgtttctcaaatctaactcctcctctccttctctcaactctcgctggcctagatgtctctcacatagtcttttggaatgtcttctcttctcgcatagtttcacttccttgagtacactgatcacatatagctactcttacctttctaaaatataaatctgacttgaattctttaatgtcctctaatacttccaccggggcataaaaagctgccaatgacctggcctctgcctatctgtaatggtttattgcctagtcttttcagaaagcatttcctttctttcaagggaactgctc

SEQ ID NO: 124636 - DNA, 164 bp, Homo sapiens
aaggacactttgggataggaaaaactcaatcttccaagtcattgatagctatgtataccccacacccaagttctgttgaaatttcctttgccaatacaagttacattaattatattcattgattaaagataggcttttcagccaaagttatagctttaataatc

SEQ ID NO: 124637 - DNA, 289 bp, Homo sapiens
caaggaagtctgtatggaagcagatatatttaactctgctattatttaagacttaaagatattactaaggacagttctctttttatctttgtatacatatttgtgatggctgttatcttaaaactttgtagccaatgggtataaatgataaataaatcatttgaggatggcttttggtcataaaccaaaaattgaatataaatatttaagtaaaatattgattgtgggctggtgtggtggctcatgcctgtaatgccagcacttcggaagtttggggttggaggattgc

SEQ ID NO: 124638 - DNA, 387 bp, Homo sapiens
gggcttttagctgaaatgaagaaattagaaagaatctgtctgttcaatctgctgctattataggttgatgttaaataataataacaataggtgagtagcatttcccaatagtttaccaggaaggatatttagctcagaaaaggcgagaagaacatgcataacaagggtgctgatcagttaaaagaggcagaaggggcaagctgtgatacttagctaagatgtataaatataccaaaaaataactcctaaagaagaaagaagggagaaaaaagagataaagaagaaagatgttgggtttgaattcaagagcaaagaccccaaaagcttttggggttctttgctcatgtcctgaccccaacgagcacttctgacaatgagaccagagac

SEQ ID NO: 124639 - DNA, 598 bp, Homo sapiens
gcactctcacctcaaattgacgggggcacttccctggagcgactgacggagagaagagatgaagacaggctccattctcagctagagacctttaataaaatggtggccttcagagatttctggcatataaaacttacctccccattttcatgtatgtagcaggcagcatgaatcttgggctatcaagattcaagagactggctcagaatgaaggacagataatatgagaagccgaagacagactgaagtcatttattcacttgtccgttcattcatttatcaagcattcggggcctcaccagagtaccagaggtactagagccatcagcaaaatagataaatacaaccatgaaacaataggctgaaatttctgttctcatggagctttaattctagggaatgggaagacagttaaataagtcaaagttatagtttatcaggaggtgataagtgcaaagagaaaggacaaaatagggacagggcacagaaagggcaggaatggagaacaacagacaatgtgcatagggagacttccatgaggaggtgcccttggcacacagatctgagaagctgaaagtgcgtcatgagggtatctaga

SEQ ID NO: 124640 - DNA, 557 bp, Homo sapiens
cctcattcccctccatactccgaagaatgtctttaatgtttgaaccactatgtcacattgcatctcagatttaccttctctggctttggatgctcctgaatgggggtgattatttgcatttcctttgctcctcttggaggactgggtcacatttagtttaagggttactattagtgagcaaagagaacaaaggcaccaggagctgagaatgcccttttctaggtgactttttccctctatatctgacctaagttgtgcacttcttcagtaatcagagactataattacatgctaatgttatagccctgtcagtatctgtttctacaagatctttatgtattccaaggcatcctgtgtagggaagcatacaatatattgttaattttggacaacttaatccatcccaattctataggctgatgataagcttgaagatgacaaggccaggtgacagaatactggaggattagtttctgagtagttcaagattgtctttgttgattaaaacttcactgtgtatcagccactctgatttggacttttgttgaatatgaata

SEQ ID NO: 124641 - DNA, 405 bp, Homo sapiens
ttttattgtcagaaactccaaaaagtcaatcgtactaatttatcaccatttgctttattaatttatactttgcttatatggaattttgcccaacagacctcattacaatttctaacttgttttgttttttttctgagacagggtctccctctgttgtccaaggctggagtgtagtagtgctatcacagctgactgcagcctcaaccttccaggctgaagcgatcctcccatctcaacctcccacgtggctgagactacaggtgcttgccactatgcccaactaatatttggaattttcctatacgtggattccagaggggtgacagcaaaacgtgggaccatccagttgcaggaaaacaagcttaacacgcccactgattctacattatggtgagttctataatt

SEQ ID NO: 124642 - DNA, 430 bp, Homo sapiens
tcatagtttgattgagaccccaggctcaccttgcttatctgacataggtctgacccacctgtctcgttagcccaccactgcctgacccagcaaggatttcgctcccaggttcttgcacatgcgtggctaacccaggcccaggctgcttctccattccttccatttgcttttcacccctgcccacctcactgatgatcagcctcactggccagcccaccagtgctgccatctgcttcttggatgtattccttgctgccaggcaaaccttgcttcctggattatttggaggcagagaggtgctttgtccttttctggtaacaattaatgacacaaaggcaaggtgaaaaggcgctgtgctttttttctaatccacttgtatggatttcagaccaaatttttaaataaatgtacaggtaattaagtatccctc

SEQ ID NO: 124643 - DNA, 810 bp, Homo sapiens
gggattataggcatgagccactgcacccagccaactaggttacttcttatttgtttatttgaaagagtgcttgttgaattgttctttccacagattatgcttctaataactttaaatattaattatggaggaaacgggttaatcattttaaggattctttttggttgatataatgattctattaattaatatttgtcttatgggagccataagcgtaataggcataatgagagcacacacttgtaagtcagagtggttcttacaggggagacaggaaaaatggagtccaaaaggcctttctgtaagttccttgggagcagggactaggtctttcttgttcaccattatgtcagtatcaggcacaatgcttgacgcctagtaagtgttccataaatagttgaatgaatggatgagtttctcattaagcacttttagtagctcatatttcttgtactgtggataatcaagatcaattatattcatctaaggttaagagcctttgctatactcagttttctttattaatgtaaatttaataaactgatttttttaaaaggcatgcatctatgtatacacacacacacacacacacacacacacacacacacacagacacacacacaaaacaagtgaaaatttattgtttcttcccctgagccccattctccagaattagctactattaatggcttactatattttttctaggtattttctcttcatatacattttctttcttttctttttgtgagactcctctaaaaaaaaacaaagggggctttaccggggactttctaagggggaaaaaac

SEQ ID NO: 124644 - DNA, 128 bp, Homo sapiens
tccctgtgggtggaggcaggtggtcctgagccctctggggagagtccatgtcctccttaactcctgggatcgcacagcccccagcacaggaggacgtctggatttactgaacataaacttgttcagct

SEQ ID NO: 124645 - DNA, 378 bp, Homo sapiens
tctgttctgttcaggtcttcaattgattggatgcattctgtccgctttagggagggccatctactttactcaggctaccaattctaaagttaatttcatccagaaacaccctcacagacacccccagaataatgtctgttcaaatatccggtctggtcaagttgacacataaaacatcacaacctccaagaaaggaattggtattctaaaagggattcggagagaggcctatagcattttgaatgaaaaaaggttacttctggctgcgtggtgtagaggagttgatattcgaaccttttttttttccataattgcagctgtaccatctaccaagaacctgcccattctagaggaaaggcctgggtttaagtctcattc

SEQ ID NO: 124646 - DNA, 344 bp, Homo sapiens
tgttgtagagacaggatctctctatgttgcccaggatactctttaatttctggcttcaagcgatcctcctgcctcagcctcccaaaatgctgagattgtaggcatgagctaccacacctggccttgaaataaagcctttgaaaaaaagtactccttggattgttgcaagactattatccagagttctgaaaatgttgattttgaccatttttgccacttctcctcattgcttttgagaggtgaagccagctgggcttctgggtccggtggggacttggagaacttttctgtctagctaaaggattgtaaacacacaaatcagctctctgtgtctagccaaaggt

SEQ ID NO: 124647 - DNA, 474 bp, Homo sapiens
caactccggaggtgggactggggcaccataccaaatttaggaccagctaaaacagggtgggaggtggggaagcagttttctgtaagacacgcagaccgagaatttctgcataagctaccccttaatttgcatgtaattaaaagtgggtataaatatgagtgcagaactgcctctgagaacctactctggacacattgccgatggggtagccctgctctgcaaggagcagtgcctctgctgctgctctgacactgctacttcaataaaagttgctgtctgactcaaccaactctcccttgaattcttttcttggcaaagccaagaacctgcctgggctaagccccaattctggggctcacccgtcctgcatcagttagattgcccttgcttatccatccaggcttctcccttgtttcagtacgtcaagggaacctcacatgagaactcactggaaatacaactggcacagcgtta

SEQ ID NO: 124648 - DNA, 334 bp, Homo sapiens
ctattgaaaacattcttctcctggctcctggggctccatgccgtcccatttttctcctacctctctgagtgtttctttccagtcttcttcgcacactcctgaacttcctgaccatcctttagtgctggggttcctcagggctctgtcatatcactccatctctctagcccagatgtctctccagagcttcagacttatacattcaacagcccactggaccacactcttctaggactacctgcaggcacctcaaactcaatatatttagaagtgaatttgccatcttcctcctaaaccagcccctatctcgtgtgtttcaaatcgctgggaatgg

SEQ ID NO: 124649 - DNA, 448 bp, Homo sapiens
gaaaaatgggcactttgtctttggtgaacaattcttgttcccagccttgtttttctcggcagttagaaggatgctgatttggagcccttaatttatttcatagggtatgatattctaagaaagcattatatatccaaagctggattttaggagtagagaatttgtggggaaatccagagtaaaaatacgatgtctgggactgaccctggaatagtacaagttactctgcttaggaattcaaatttcccatcttaactaatagcaatgtatgatgcacaaacactaataagagaaataagcaatcataaaccaatatttctgtgattgattgacctttccatacatatatcaagcatttactaatctttcgggttaggggctgatagactgttctcttgaagatgcatcctcttgtttataagcactgatatagggaacttttatggta

SEQ ID NO: 124650 - DNA, 475 bp, Homo sapiens
caactagcctagccatcacatcccatattacaagtgtcggaatctaagactacttgaagatgagcgaaagacaaggtcaattttctttgaagtaatgttcattgaaagtttcccgcaagttttctttctgttcatatattatcggtgagaccttagttacacactttatttttaaacaaattatgtgtccagggccacgcatggtggctcacacctgtaatcccagcactttgggaggccgaggcgggtggatcacgaggtcaggagatggggatcatccttgctaacatggtgaaaccccgtctctactaaaaatataaaaaaattagccaggcgcagtggcgggcgcctgtagtcccagctactcgggaggctgaggcaggagaatggcgtgaacccgggaggcggagcttgcagtgagcccagatctcaccattgcactccagcctgggcgacagagcgagactccgtctga

SEQ ID NO: 124651 - DNA, 278 bp, Homo sapiens
cacaaatcccatcttgattaaagaagagaaaacaatggtgtctttgtttggagcccaaagggaaggattgactagattgggaaaaatgcagattgggagatgtttggagtgggccagatggagaagaaagagtcaagtcacctccacccctagtggcctgaatgctgtcatgcggaattgcctggtccagttaacaaaccctcgcttcattgttttatttttaatttgtattttatcttaatttactttttagctaaaaaggtaatatgttcattagg

SEQ ID NO: 124652 - DNA, 622 bp, Homo sapiens
tgattatctactctatttcccctgctaggagacaattaacgaacatactttatccttttcatgatttttggcacccacatcagtgacattttaattaaagttcataaacttcataagctccactttgcaatgtcagttccagtgctactattgtttctaattttacagctgttgtaccaaattcatgcagctgcttgtttttatattaatctttatctttcccctaacccataaacatactacctctggcacgaagtcatcctttaatatagtcttattgaaaacaaataataatggagaccatatagtacaatgattatgagtagaggctatagctcctgatattatatcctagctctgcaacttactagctgggtgacctcagttatgtcatttttctgtgatttgggtctcagataataaaatgaaactagaagaatctagcccagcaaacctggtaaaataatattgttatgaggattaaggcaaactaattcacataaagatacttagcttttatttggcaatgaattggaattgagtaaatgagtgatttattgaggagttattgcaacaatctagaacagagatgataatgactttgcccaaggtgatggcagtg

SEQ ID NO: 124653 - DNA, 406 bp, Homo sapiens
tactctatatatgcttatgtatgcttatatatataaacatacacaaccaaacacattgttgctattattttgaataaactattatctgttagatcaattgagaataagaaacatattctcaattgcttattcctctccaatgcctttcctttatgtagatctggatttctaacctagatcattttcattctctctaaataatttcttttaacatttattacaaggcatcaaattccctcaatttttgtctaacaaagtctttatttctccttcacttttaaatgataactttgcacagtatagaattctagattggattttttttcttgacactttaagtattccactttcttcttgcttacctggtttctgaaaagaagtagggtgtaatttttatcattgctct

SEQ ID NO: 124654 - DNA, 678 bp, Homo sapiens
tcaggggacaggacttgtttgtcttgctgcctttatctgctcgtgggcagggaggtctctttctttggataggtatttgttctaccctaggttctttgttgttctccctggatcagggtgccaggcccagtagggacacagcctctcttggcagtctcttacatatgtccctggatccaaccactgaagactggtccctgcagtagtttttgtacagtcctttatagaactacatataatagcttaatgtttgcatgaggtttacatggctcttggtgattaaatcaaatgccctactcagtgatgtggcgatgctatcccagtcttcgtaggttgtctctggtctcctgccaagcggaacgtgccaggtgaacacttgggcacagtgagccccgatgctttcaggagcctgagtattcaaactaaacacagcaaatccttcaaagcccttccagcttcatctttagaatactgaatgcgggaaattccacagtgactcctaggaaacaattcttatttctaactgggctcccattaaaacaagatgattttcctgattctaacctgacgtctttgtgactgattctttagtgctcttcttattctttccctagtgagtcagtaacataattattcaacaaaggaatgtgtgtgtgtgcacgcacacacgtttgcctg

SEQ ID NO: 124655 - DNA, 279 bp, Homo sapiens
gtgatatgccacgtgacatagctcctatgtgatgtgactctttctcattcttggcctctttccactggggttactggaacataaagctgagcccagctcctaggctgtgtctctcctttctaagccctacccacaaaggacattgtgacgtatctctaggcttctcacctaggtaatattacttttttacctaggcccacccctcaggggtattgtgaaatactgctggaccaacatgctagatgataggagtctctgctactgcttggggtgtgatta

SEQ ID NO: 124656 - DNA, 736 bp, Homo sapiens
gtctctgtctgaagcagctgactaaggtaatactctcactcctccttccacaagcaaagaaacagacctgacatcaatcataaaaacaactactgtttattaagtacttattacgtgccaggtactttttgttaggggctggtgacttaacagcagcaatgataatgaccaccacatactggatatttaccgtgtgcaacacaccacagtaggaacttacatgaattgtctctatatggctgtgacacattccctgaggatccaggtatattttttaagtcatttcatgacctgatttctcccaagtacttcagtttctgagatctctctctcccgggagcagggaccccagccccttttagcactagacagcaaacccacaacttcacaaactctaacttcaccccaacaggcagattccctcaggaaaaagagtggtaaatgaataaaccctccaaacagaaaagggctgagcacctaagagattcaggatggcatttttggaaatgttcacttcaggttgaaaagaaaacttttgaaatgattagtgagttatttagaacctcaatattctaaagtttgagaagataacatactgaggaatttaatttagatttccttaacatgctctcttatgataagagagcattcagtatataaatgctatgcaacagtactgccaaattgcaacacagtatgggagaaatttgtcattttgaaatgctaagggagttct

SEQ ID NO: 124657 - DNA, 239 bp, Homo sapiens
gcctattttagtcaggttacttttatacgcgattaatggtcacctcagagtcaccccattcatcgcgtataaaagtaacctgactaaaatgtgttcattttgtccctctctagttcatgactaccatttttttcatttttaatccagcgatttttttagagtggttctttaagcatcttgtattagccatttcaatggtcattatatatgtttggatttctcttattttgttgaactag

SEQ ID NO: 124658 - DNA, 336 bp, Homo sapiens
atttcctcacatctgccatgctccttcctgccactaggcctttgtgtactaggcaattctttctgcctggatgttcctcctttccttttgtacctccttgacttctcctcccttctgtctcagcttcagtttcacctcctcaggaagtactccacgccctcctgatgacatcgaatttccctctcataagatctaagcactgagtccttctcctttgcagcactcgcagcaattgaaactgtatgtttgcttgtcttcctcaacatctgttttatttgtttgtttcaccgttttatccacaatatataccctagtgtcaaacatatagaaagagct

SEQ ID NO: 124659 - DNA, 261 bp, Homo sapiens
tgaagggaaagttagagacaagatggcaacaggaggcaacagaatcaggaggcttgatcttaaaatagctgagacttaaatatgcctgtagaactaaacttgaatatacataaacttggatgtgtttaggaatcacttcaggtgcttgttttttttttctttttttgagatggagtctcgctctgtcacccaggttggagtgcagtggcgcgatctcggctcactacaagctccccatcccaggttcacaccattctcctg

SEQ ID NO: 124660 - DNA, 741 bp, Homo sapiens
caggctggtctcctgtctcggcctcctgaagtgctgggattacaggcgtgaaccaccatgcccagcattgtagattcttttgtatttcctatatatgcaattacatcacctatgaataatgatggctttgtttctccctttccagtgtgtaaccctgtttttccttcccttactgtgcttgctatgacacccagtgcatgttgaacagaaatagagatagcagatgttttgccttctttctgatttctctctccaactttttacctcacataatgattgttgctatagttttctaaaatctaccttttatggaatcaagtgtccatctagacttagattgctaagaggtgtttttttaatgatgaacgactataggattttaagagcttcattttcttcatctattgagacaatcatgtatttctcctctattctgttaatgtgacagattatattgattgatttttctgaaaaatcattcagattataaactacttatactttgctagtataaaaccacgaagtaacagggtggtcagagcataaaagagctagccatggtaagactcggggagaaattttttttttttgagacagagtcttgtgctgttgcccaggctggagtgcagtggcgcgatctccgctcactgcaagctccacctcccgggttcgcgccattctcctgcctcagcctcccaagtagctgggattacaggcgcccgccaccacgcccggctaatt

SEQ ID NO: 124661 - DNA, 156 bp, Homo sapiens
gcaagcgataggcatcgaagacgctcgcttcagaagtgattgttccccgctagcggggaacaatcacttcaatataccaatttagcaaaaccacaacctatgtaaaattcaactctccaaatactctgcacctgcatcctccagctgacataggct

SEQ ID NO: 124662 - DNA, 506 bp, Homo sapiens
ggccacagggtaaaccactgtcccctaaatgggagagacaacaggcagatacagagcatcccaacttcttagtgcagaagcctaggaatggaagtttctgtgggaaaccagtattgagttgctttaaccaatacagcatatccagctttgaacaaaaaattacacggcagaaatgaaagacaaaaaccacattttgaagaaacagagcaagcattagaaccagattcaggtatggtggaggatgttagaatgatcaaaccagcaatttaaaacaactatgattatatgctaagggtcctaatgggaaaagtggggaacatgcagcagataagtaatgtgcacagagagatggaaactttaagaaggaatgaaaaagaaatggtagaaataacactaacagaagagaagagtgccattgatgagcacatcagtaggccagacatagctgaggaaagaatcagtgaactggaagaaacatcaatagagtcttcagaaactataataga

SEQ ID NO: 124663 - DNA, 193 bp, Homo sapiens
atcagtgttctcttgctaaaattggaggtaaataaataattaaaattcacatatggaatacctataattaaaactatacatacagcaatagacacaagtttcctttgaaagcaacagataagagaatcacagctgttgttaaaagctgttttgcaaagaaatatgaaggaagcttgactgataatatttaatg

SEQ ID NO: 124664 - DNA, 115 bp, Homo sapiens
tggaagcagtgagctgagaaaatgcagccgagtcatttattgtgccttcttagagactggccagatagccagtgaagagtcttccctaattcatattgattaggaaaagcttggt

SEQ ID NO: 124665 - DNA, 660 bp, Homo sapiens
aatctcggctcactgaaacctccacctcccaagttcaagtgattcttgtgcctcagcctcccgagtagctgggattacaggcgtgtgccaccacacccagctaatttattttttatttctttgagccagagtctcactctgtcgcccaggctggagtgcagtggtgtgatctcggctcactgccacctctgcctatgggttcaagcaattctcatgcctcagcctctgaagtagctgggattacaggcacatgccaccacacctggctaatttttgtatttttggtagagatgggatttcaccatattggccaggctggtgttgaactcctaggctcaatggatccacccaccttggcctcccaaagtgctgggattataggtgtgacccactgcgcctggctctgccctattttttaacctcaataaattatattactttagtaggtacctgggtactctctagtattaactaattgggcctcctttttggctagaccattcttattttaaactcagtagtgatctgatttttttaatcaatgactttaattccaacaacaaagaaaaggtggataaatctgccttggttacagtaataagctgttaaaggcaaaattatactttttatacttttcaccaataatgtctactactagat

SEQ ID NO: 124666 - DNA, 307 bp, Homo sapiens
tcttactcaggaaacaaaatttagctcaattaaaaagatcttaaatgttaaggttgagagattttaacttaaatctgaaggagtttggtctagttagattgccgaagtgcatgtagcttgagttaattccctgagtctatagtcatgcttagagaatttttgactgcaccatcaccctttcatcaaagtgggcagagatgacccctctggtagcaccggattctccaaggcaggggatggggctttttacactgcaggcattaggcaagctgaagaggtgtggtcactccctgtaggaaagaacatt

SEQ ID NO: 124667 - DNA, 442 bp, Homo sapiens
aaatactacgtatgtgctcatgattcccaaatatacttctcagggagctctgtcaccaccctgaaactccaaatttaaatatacaactaactacgtgacaccttcactttgatgtagaatatggatctcaaactttacaaagtcaaaacagaattctcaactcctctttccccagcaccaattcatttttccccagtctcttccatttcaaactgtggcactgctgcccactccagttgttgcttgagccaaatatctagggattaccttcgattttcctttttctcttttccactgctaaacaaactatcagtccattttattaatttttaccttccaaagcataacccaaatatatttacttgtctccatgtctactaccagcaccctgctctaaatcactgctatagcttcctccatttccagctgtgtcccctgcaat

SEQ ID NO: 124668 - DNA, 193 bp, Homo sapiens
agatgacatttggacatgcctgttggatgctagggaaatacaatctcctgaatctaagctcgcaacagccaaggaggtgtaattggctccacgtgatcaaaggaagcccaggctctcatcctgcaaaaagtgaggagctggcccggctcagtggctcacgcctataatcccagcactctgggaggccgaggca

SEQ ID NO: 124669 - DNA, 134 bp, Homo sapiens
atgatgagtatgcgcagtgctgatgatttgtccagtgtcctcctagtttggagatgttggtaaaataaaattaattgaagggaggaattaacatgagaatcaagcccattattagtttaagaatgaatttatcc

SEQ ID NO: 124670 - DNA, 490 bp, Homo sapiens
aagacgcctgccacagtggaaagagcctggttctgccctcgttctgccacttagctgggtggtcttgggcaagttgtttaattgttttgtgtcccagcatatcatctgaacgatgggcataatcatacctactttgtaaagatttcagaaaacatgtagcaaaggccaagttcagtaaatgatggtgggtttcaccaaaagaaaaccaaattacccacacacaatctactctgaaaaaccaacagtccctttcatgcttcagtgaaacaaagggcaaagggcagttggggaaagcatgaaatataaagactatcactcataatctggctttacttcctatcacctaacttgcctcattccttcattaattaagtgacccctgggcaacaaagcacaataaggctgctgttattctgttaattatactttataattatatgtgacataaccagtctcaagctatttttacctttatcttaatcttcacaaa

SEQ ID NO: 124671 - DNA, 242 bp, Homo sapiens
gtgcttagtgtggggcctgacacagtctgtgttcagtaagcaatggcttcctctctgcccctccatcccaggaggatgcttgacacagaagcccaggacctcagctcacacctaacttcccctcacctagaaacccccttcaacagtcctgctggaagctctcagaggagggagtacagaagccctggccttcctggggaccagtgcaaacaagagaaaactttccaagggtcagagagagt

SEQ ID NO: 124672 - DNA, 316 bp, Homo sapiens
agatagaagttcattatcagttttatttaataagcagttgttcctgataatcaaagtgattcagatatcacttaaggtcaccatgctcattaagtcaagagattatgtgctggagtccttacatgatgacctaaggcaggtctatccatgccttcaacagcatgtctacaaattcccaagcttgtctttctccaagtcacctctggctgtgatttctagtgaagatgaactctcatctctcattctttactctgttatcagtccaaacatgtaagagccctttctccttaatcacttaaccttaacccacatatcg

SEQ ID NO: 124673 - DNA, 639 bp, Homo sapiens
tattttctagataccaatctcttaggagatatatgatttgaaaacattttcaaccattctgtgggatgtcttttcattttcttgatagtaccatttgcagtacagagtttttaattttgatgtagtccaatttataactgatctgttttaatctgatggtctttgtgaatcttgtcctgtccttggctttccccactattttggctactgggatgcttagagtcaaatttgtggctattggctttatttttatttacctttgtgcttcaatttccaagcatatttattttactccactatgtttcatgtatactgtaactcacgccaatccctcttagatcaaggtgagacatacatgaatgtatgttacatggccatatgggatactgttggttgaaagctctccaagttaagttatatgaacaataaaaggtcttttttagttaatgctccagttagccaatgagctggtggaactgagactccaatgtgaaaataacaaaataaactcacttcctgtgaatcaataagaataagaaactctaaaaagttggctccaactttacctttgttctcacacattactgaagatttctatcaactttggaagtatcaatcaatggtcctatcttgattaaa

SEQ ID NO: 124674 - DNA, 347 bp, Homo sapiens
aataagtcaactttgatgaccccatttaatgataatggagacaattgagacagatgatatgagaatttttaatatatatgcatccaacactggagcacccagatatgtaaagcaaatatgattttagatatatagaaaggtaaactttaatacaataatagctggagatttcaacactttactttcaacattggataggtccacttgacagacagtaaacaaagaggctgggtacagtggctcacacctgtaatcccagcactttgggaggccagagtgaacagattacttgagctcaggagtttgagaccagcctggcaacatactgagacaatgtttctacccaa

SEQ ID NO: 124675 - DNA, 125 bp, Homo sapiens
cttaagcacaggaggtcgagtgagccatgatcgcggcactgcattccagcctgggtgacacagtgagatcttgtctcaaaaacaaacaaacaaccctttgcttggcttttccttattgaaattgt

SEQ ID NO: 124676 - DNA, 734 bp, Homo sapiens
ggtgtggagggagtcctagctcagagctcaggcaggcgctgtgtttgcagcaaacatagaggtgtttcctccttgcaatggagcaggcagctctggaggagggattggaggcaggccagaagcggaggtggctgattaagggactgtctgcagaatggctgtgtggtttgtcagctccaggatgaactcaggcaattactctaaggatattgggcagtttgccctggggaaggggctagggctccatataaggaatgacacccacaggaagggggcacagggcactaacttctctgcccttccctgcccataccctaaaaagtggagggagggacagccacttgacaagtcttgccatgtgtacggtgtcctaggccaggcttcctattcaggggcgaggcttgtagagaaagcagtttactcggcagcagaggagagcctcaccaggcacctgtattaccagcctagttgattttcaataggaaatcagtctactgaagaccccaagaccgtagaggaaaacgagcagcataaagcaggaaaaggaagaaagaaaagaacaactgtcatcagaagaaataattcaaggaaaagaatgaacacattttaaattagcatcctcagattgaggttattttgtctgcaacacaagaatgggtcatgacagaggagcaatcagaaaagcaaagaattaatgaaaatttaaagtgtggttgcctccactaagagagttc

SEQ ID NO: 124677 - DNA, 344 bp, Homo sapiens
cctctctccactaattattacttagctctgtgttcaaaaagactcagccttctcatctataaatatgggggtaataatacccacttacatggacgagtgccagagtatataaaagcgctactgtaatgactggtacttactaactgtgcaacccatgttaattcctttccctgtgatatgttccttcccctcttaagaaaacatttcagttgtctgatgatggtgcaggtctctagaccatcccttttcctccagagttgggctcatggaccgtttgaatcttaagatcctggggcctcgttcttatctgaaaaatgcagctgcatcaccaccagtagggggtc

SEQ ID NO: 124678 - DNA, 641 bp, Homo sapiens
agcctattgctattttttggtagcacttttagtactatttgaattttaaaactacatattactgtggtataaatacaatttaaagctcaaacaagattctgaactggccaaagcaaatgtctcaacggctcattcagttttaaatctcagaaactggaaaaatcccaccagtcaatcagacacctgggttcagctctagatttgctggttaactaactggtcaatgtatgcttgatcacatgacttaaccactgttcctccattttttcatctgtaaaagtaggttataatctctctcatctgtgaaaaagctctctgagctacaaataagtggaattaaccatcctctagcattctatagctaaatatattgagggctgggcagggccaggcattctgatgcttacgctaggggaagatctttgaacacctgacttccctgggagaccaagagcgccacacagtgacttgaaagggccaggactgccctgtaacatggatgcccacaatgcagggtctctatcctgcatcccctgccctgctaaggggaaaagtcgttcagagcgggccacactggaaaaagggggcgtaagcgaatctgaattccatcaatggggcgtcgacatgttgaggccattgct

SEQ ID NO: 124679 - DNA, 554 bp, Homo sapiens
gtctgcattgttgtccatgtgtatctgtgtgtgtgtgtgtatgtgtgtgtgtgtgtatgagaaccttcacttttagaataatattacattccaaatcaaattctgcctcaaaagagctattcttccacaattttctgcatttctgtacaggttacaaaatgtcacaattcaatggggccaattattagattttcatttaatgggcagttttaatattctcagagaagctgaatagtaataacattttaaaccactgcattccatttaaagactcacaaccagttcttctctctttgagcacacctagttatatttttgggtatcatttaaattcaggctcccaatctgtagaaaaaatcaatgagttaatgaatagcttcattttgaaaacttttaaaatattttatcctaattataaggcatatctagtgacattaatttggcgaaatcccaaatcatcagattgtgcagaatagcccttaccaaggagtaatttagagcattttcagtttaacaaatgtgctgtttttaggaccagatcatggctttgctta

SEQ ID NO: 124680 - DNA, 220 bp, Homo sapiens
tacataatgataaattgcttatgttctgaaacagttgtctctctcctacctttttttgctacgtagtctctagtagttctgtaacatcttaggtaatttaaagagttttgtttcgttttgatcaattcatgacatgtagatgcataagagtgggtcagaacataagagtgggtcagaacataagggtggttcagaacataagggtgggtcagaacataag

SEQ ID NO: 124681 - DNA, 320 bp, Homo sapiens
ccgagagcaggtgcagtgatctcagccaagcttccctgtcccttagaaaccataacttgtgtcacgcagagaccgcagacagggaagtagcagagggaaggctctttctggatctgtgatgtttggttcttgatatcccgcccagatcccttttagactaagctcatgtcagaacttaacacttaacagatgcagatgtaagtgaatgtttacatttccaaatgtttaggtctcttagtctttgaatgaactcatccagagggtgaaagcagaatgggttcctaggtgcccctgaccaacacctctctctctctccagat

SEQ ID NO: 124682 - DNA, 501 bp, Homo sapiens
gttgtcttgggggcagcgccagccaccagagcccgagtcagcgcggccaggactctgcaggggcaggtagcgacccttagagacgcaacgtggcgcagcggactcggctgcgtggggcaagggccggggccggacacaggagcagcggggatgccgggtgcgctccgagggtgtggcccccgggctgtgcggggctcagagctgcttgctgggcgcggtgcccgacaaaggacagagaggagtcctgggaggcggctcatcattgctgaagatcaaggcttggaggagctactggacttggaggtgcagtcccgatgcctggagtccattcttgctgttcttgctgagaagatgttagagcaccacaggcttgttggccaaggtcctggaaaggtcttgctctgacacccaggctggtgttcagtggtgtgatcacagctcactaccgcctccacctcctcaaactcaatcaatcctcctgcctcggccttctgatgttta

SEQ ID NO: 124683 - DNA, 1172 bp, Homo sapiens
gttgtcttgggggcagcgccagccaccagagcccgagtcagcgcggccaggactctgcaggggcaggtagcgacccttagagacgcaacgtggcgcagcggactcggctgcgtggggcaagggccggggccggacacaggagcagcggggatgccgggtgcgctccgagggtgtggcccccgggctgtgcggggctcagagctgcttgctgggcgcggtgcccgacaaagttatcctggatcctatctttggtaccaatgtgacccatcctgagtgaaggctccatttctggcctttggtctctttctcggaaagcaggcctcagtggcctcagtttcttcccagaacctgcaatgccccaccaaggtgacaagaagtgcaaggagtcggttttcactgccaaccaaagaggtgacccccgcaaagcaaccatgttgggacagtccatttgctgcgttttgattatttgctaagagcaaataccttttctgtttgggttttgcttttagaaaaaaaatgtggcagatggtggtggctttccccgtcattgaaagaagaaaggtagtaactctactggtgcactcctctgagttgtgctaacaaagaagaatgctgaaagaaaagggaaatgaacaccattttcaggcagcttctccaagtttttttgacagtgttataattttcctttagcgactgttgaagcaaatatctgtatttatgttcagattaaaccgagagagcaaagactgctaaagccagtaatttctgggctgcaaatgcaggatagctccagtgaatttcagattcttaaaggtttttgctgtagcgaattcatgacacaaagcatttggagggaaacctattagagaagaaacacatcctaaatgagaattactgaggacgggaggctcttgtcatttattggattagttatagcactttacacaagcctgtaatatttgttctgctgctgtggtgtgactggtaaaatgaaaaggtatgtcaagggagtgcttgactgacgttcttatttcttccgtcttcttatattgctgggaggattctaccactgcagggctagaaattaatatcacactcatttgataggaagagcaaaagcaaggttatgagtcagagacattttggtcccagaacaataactctattgattg

SEQ ID NO: 124684 - DNA, 378 bp, Homo sapiens
tgagctgaaggaaacaaccagtacagagtaagcagtggatggctgcctttggaacgtggtcagatatgggttctcagacctggagaataattttagaggacctctagggatttatttactgactttcagaaaagtaccgtaaagactgaagagttaatcactcgactcttaggatgtaaatgccatagaaacacccggcttcaggtcttcataaacatatctgtcatgttgactactgtaacctagaatagtgtctgccacctaataagcatgagtatttgctgaatgaatgaagagtcacatactgcttttcattatggctaactcctttatgaggtatgcccaatcctgtcttgttttgcctcttactgtacactc

SEQ ID NO: 124685 - DNA, 137 bp, Homo sapiens
caccttgtttctggtggttaaatgctgccacttggcctttgtcaccacaaagtaccatttatttaatttagcccactgccatggttgggcctacagagaatagccaccagtgagttctcaaggatgccagatctccc

SEQ ID NO: 124686 - DNA, 647 bp, Homo sapiens
tgcatacccaggagagtaagggttcttcacaggcaggtcccttggcctgggcagagctggctcagtgtgtgtggactgcgcaaacagtgcagttctgctgaggggtatgctggctgtgcctcatttgtttttggcagttgtggaccctcatgtccatctctgtggggtcctttctgatctatttaaaggacatatggagaagcaggatagctagggcacaggggacaacctcacgaccgtcacctacttatggcagcccccaccggggtgccctctctcctcacacactccacctgctgccagaggaccctcagacccaagcatctgcctgctctgtgactgagcgctttctcatgatttaatctctgagggcgggtaaactgcccactttcccgtgactttttctttacagctctttctgtcaaccagttaacgagttccctgtctggctctatcttgctactgtccccatctgtggcttgtcttttcactccacgctgtcttttggtcacaggtaatgtcctaatgtttcttactatctaatgcaatcacttttttttttggagacggagtctcgccctgtcacccacgctggagtgctgtggcacaatgtcagctcaccacaacctccacctcctgggttcaag

SEQ ID NO: 124687 - DNA, 168 bp, Homo sapiens
ctcgtgatccgcctgccttggcctcccaaagtgctgggattacaggcgtgagccaccgcacccggctgaaaattgtccctatttcttaactacaatagtgaaaaacagaatcgcagaagtggttatgagttaagactacttagaaataagaatggaatcagtgacaga

SEQ ID NO: 124688 - DNA, 1114 bp, Homo sapiens
ccgggaggcagaggttgcagggagccgagaccgcaccactgtactccagcctgtgtgacagagtgagactccatctcaaaaaaaaaaaaaaagaaatacaaaatctgtaacaaacgaacagctgatggagaacaggacagcatttacttctgaatctataaagtacttaagaacttatacttgtggaaaatcacaatgacaatgaatatttcaccaaatagatggtggcaaatagtttggcaacacatattagaaaggtgatttctatactacacataaatgaaagacaaaccgaaccacaattgatgttttactacattaatgtaatttacactatgcctatacccacatggcaaattcagttataactgaaaaactagagcagtccctttttttttactatgatttgcatattttccagtatcctaatacatgcatacttatcttttatagattataataatctacatttaaaattccattttaatattgtggcatgaaaaatacaaacaccaatacagtatgttttatgcttactcaaagttaactggctcagagttttaaaagctttcccggataaagcagagtcaagtctaccctatatccccatcctataaattcctctttgtcgaacctggcaatctcagtgagctatgattgcaccactgcacttcagcctggacaacaaagtgagactctgtaactataaaaaacaaaaacagacaaacttggctatctacctcaatccatcaatcaccctcatgcctttgaacttgacaacatcactcctcatcttagtttttaaagtaaaagataggaatagtaatgtaaagcattcaaaacaaaaatgaaacctgcatatttgtttatttatttatctgagatggagtttttgctctgctgtccaggctggagtgcaatggcgcgatctcgactcactgcaacctccgcctcccaggttcaagcaattctccttcctcagcctccccagtagctgggattacaggcacccaccaccacgcctggctaatttttgcattttttggtcaagatgaggtttcaccatgttggccaggctggtctctaactcttgacctcaggtgatccacctgcc

SEQ ID NO: 124689 - DNA, 1067 bp, Homo sapiens
ttagaatgatgttatgattaaattttatttttgtctggatacagtggctcacacctgtaatcccagtgctttgggaggccgaggcagatggatcacttgaggccaggagttccagaccagcctggccaacacggcgaaaccccatctctactaaaaatacaaaaaattagccaggcctggtggtgcacgcttgtaatcccaggtacttgggaggctaaggcaggaggatcacttgaacccaggggaggctgcagtgagctgagatcgtgccactgcactccagcttgggcaacagagcaagactccatcttaaaaagaagaaagaaagaacttctattttttaaatgttttttcctttcattgaactccatttatagcctttccattcagagcataaagattaaattttaaaacaaggcttggcaccctggcttatgcctgtaatcccagcactttgtgaggccaaggtgggcggatcacctgagctcagaagtttgagtccagcctggctaacatggtgaaaccccatctctaaaagagtacacggtcctagagcagtggtgtgcgcctgtagtcctagctacctgggaggctgaaccaggagaattgcttgagcctgggaggcagaggttgcagtgagccaagatcgcaccattacactccagcctgggtgacagagagagaccctgtgcccctcaaaaaaatgttttttttaaacaagaatctctcaggcatactgaaatgttgaagaggaaattatattaatatctgggacttgtttccaaatttggaattggggcagggtgtaaattgttggcaatatcaaagaaacgaggagttggaatgataattgtagaagctgcatgatagatacacattctttatacttctgtatatgttgaaattttttatcaaattataattgtgtataatgactaattatgctttcattgtctattctgtgtggttatgttacttgctgaaattaatacataaagagtcttcaacttaaatgacttatcaagcataaatattaaaatactggatgttactacaaatttgactcc

SEQ ID NO: 124690 - DNA, 128 bp, Homo sapiens
aactacagaagcttactgtctcacagttctaggggccagaagtccaaaatcacggtgttggcaagcttggttccctctgagagctttgagggaagagtctgttccagggctctcccttggacttgtag

SEQ ID NO: 124691 - DNA, 291 bp, Homo sapiens
ccgttttggcctcccaaactgctgggattacaggcatgagccactgttcctggccccttttttctttctttttcaaatttttcttcctaatacagcagacttccatacctgtctgtggttgaccattagttttccctgttctctgcttggtgattgatttagtgatttctcagcaggtagtaagctgtaaagcgtaagcataattatcatcttgttcagtacttactctcccaaatgcaccataatcatgaactgtgaaattctcttcgttcatggctgagtaagtgtggg

SEQ ID NO: 124692 - DNA, 212 bp, Homo sapiens
atcacagtttatctgttaatcacttgttggacatttgggctgcttctagcttttggttagtacgaataaagagtctggacattagagtgcatgtctttgtgtaatgtgttttcatttgtcttgggtaataacttaggaatgatattgctgggtcatatggtaagtgtgtgtttaactttataagaagtatatgtttaacaaactgcccagct

SEQ ID NO: 124693 - DNA, 648 bp, Homo sapiens
gatttgagcctcattcagattcaggttcagatttcatgaattatcctgtacatctatgtccccagacggtgccgtcccattagggcccctggttttacagctcccagcccctctgcctgtaactcttactctctgtcctgggcaggggtaaagtgggtgcctcagagccctgttgataaacggcagagctgggcttgaacttcggaatccaagtccacaggaattttcacattttgtagcttcctaaatggctttatcatattttcacccttccataggtgatatatccctcatctaggaactttaaaaactttaacaatttaatccaaatgaccctaattaataacaagtgaatacctgtcctcagaatctcctgaataatctggtattcaacaggtgcgctctttggaggcagagagcagatgaataacttcctttaaaaaataacaatgccctggagaagtacatagttaatttatcttatctgatgtctacactagcatacacaggtaactgtcctcccaagaaaggtcattcccaacatgttcccagaacaaagcattatccatatcacgtatcaatcgttgccttttgcattcacttgtggtatttaatcagttactttgacaagcaaggtttgaataatta

SEQ ID NO: 124694 - DNA, 705 bp, Homo sapiens
ttaccttttaacatagttctaggaatttctcttaagggaataatgtaaaatgtgaaaggttgtatgcatgaagttattttttatagaattatttataattgggcaaaattagaagttgtttaaatatccagaagtagatgaacaattaaattatggaagctctattagatgaaacatgatgcattcatttaaaaataatagtgaaaagaattcgaggttgcagtgagctatgattgcgtcactgcagtccagcctgggcaacagagcaagaccttgtctgtagaaataaaaaaaaattaaaaataatggttaagtgtaagcagcagcgtggaaaagtgaatgatgcagtattatagtggaataaaagcaaattttattatgatcaaaactttataagataatacatatcctttcatccttaagggaaaaaagactgaaaaaatttatcaaaatgtttgtgatgtgaggtttttagtgatattttcctccctcttgctaatagaattatctacattgtatatggtctcataatgtcccttctaaaacacagatttgactatgtcattcctttgcttatcgctcacccaccctaacacatacaacaattactattaggcagattcaaaattgattagcttgatattcaagacctatcacagcctttttctccagacaactatctagcctggacccctacataacttt

SEQ ID NO: 124695 - DNA, 479 bp, Homo sapiens
aacagactaatatagtaataatatgtaaatacatcacgggagacagaattgttaagtatattttgaagttattagataattgaacagttctatcagcattgtacataacaaggaattttttgaggtattaaaaataactcagctaaattctcctccttctacagttaaaaatataaaaagattttggacttttagagatcctagcatacattttcattttcatagtgtttttaattcatgaaatagattattattatcaataatataacaataaggaaactgtggttcagaaacattgtttatacaagattgtatacctatggacttgacagagtcagaccttgaacctaggtttttcaacttgaagacataatgatttttctcttcaatccatagtatacagtagagataaattggtagttttcatatggcctgaaatttcagagatattcaactttctgtgtcactaatataatttc

SEQ ID NO: 124696 - DNA, 130 bp, Homo sapiens
aaccaggtacacagagtccataaagaggacaaccaaaagggagaggtcatgtggtcatgaagcacccctttgaatgtggaaatgtgaagaaatgagggcaaatcataaagcagcagtgactttcttgcat

SEQ ID NO: 124697 - DNA, 415 bp, Homo sapiens
gggggaaagttgggcatgtgctcgggttgtttgtgaggccataagggaggcccatattgtttggaggcttgggggaatcaggaggatgttcattcctaatggaaccaggtagtgggttgggggtgagggtggtggctctcttcactgagaggtatggcatgtgagcaagcttcaaaggggagaaagagggataaggagaaggacctttaagaggagggcatctgccaggtgcagtgcctcacatctgtaataccagcactttgggaggccaaggcaggaggattgcttaagcccaggagttcgagactagcctggacaacataaggagacctcatctctacacaaaatttttaaaaaattagctgggtgtggtagtacacactggtggtcacagctacttgggaggctgaggtgg

SEQ ID NO: 124698 - DNA, 291 bp, Homo sapiens
tactattttataaatgagaaaatgtagatgtagttaataaattcaccctaaaagaaatgagtaataatgataagggtgagtaaaaactaaacattggttaaattcttccccacattgattcagctccagttaattttagagaattagctcgtgaatatttaacaagatttatgtgggatgaaagaatctgctgcattttaaatactactctagccttcctcaagtattgtcagatgaatactttgttagctaaagcaaattggtgtcccatatatatggcatttacatttt

SEQ ID NO: 124699 - DNA, 639 bp, Homo sapiens
ggaatgtctcagtgtaaaacctgattgtatattccatctactgagataggagaaaaccgccttagggctggaggtgagacatgctggcggcaatactgctctttaaggcattgaggtgtttacatatgtgcacatcaaaagcacagcacctttttctttaccttgtttatgatgcagagacatttgttcacatgttttgctgctgaccctctctccactattaccctgttgtcctgccacatccccctctccgagatggtagaggtaatgatcaataaatactgagggaactcggagaccagtgctggcacgggtcctccgtatgctgagcgctggtcccctgggcccacttttctttctctgtactttgtctctgtgtctctttgttttctcaagtctctcgttccacctgacgagaaacagccacaggtgtggaggggcaggccaccccttcatctggcgcccaacctggggctaagggatctattctatttatttgcgctgactgaattttttcttccactaatttaatttcttttgttgcctctggggttaatattcttttaagtctggttctcctcttaagatagagagcaaatttgacatggcataagtaggaatgcctaaagttggccgaat

SEQ ID NO: 124700 - DNA, 413 bp, Homo sapiens
agacctaagatcctacaaactaagcatgtgggaccatcaaatgggcttttctaggctgggagtccacataaaagcaagactaacgcattctttttaagaaagaacagaaatctttcagtgatagataaaaattagatacggaaagttcataaactgggttaagtgaatcattagatcgtgctgttatttgctaaaaataataaaaacacacactgaatagcaaatggccatgaatatttaaccatcacagattccttttttatgtgcagtgcattgtagctgttctaatgtacaacaaagaaagaacagtgggaaagtgctgtagacctaatggggatttttgttgtctttctaccgtaaagaaatgaatctctcgtcttgtggtttcaaaataccaatctttggcaactaag

SEQ ID NO: 124701 - DNA, 749 bp, Homo sapiens
ggacaatttagcagacgtcttgtaaatccctgaaaggatatgtgaaattatctgtgtaaatgtttgtatcaagggatggtaatatatgtattgtcttgatagagttctatagatgacctcattatgctcctatgaaagtaaacttgtgtgtcccaaatctgattataaggaaattatgctttcttaccacgttagattagagctggtaaacattatttaggagagatagataataagcaaaacatacatacgtacatatatagagagagaaaaagaatatataaacatatattctctagagagaataaataaaacatactatatatatacaactgtatatatatagtatacttatattcaattatagtatatagtatgcaattatagtttatagtataagtgaaaacttaagagctaaaggttgttggtgatgatagggtagcatagatgatttgttctcctgttactgccaattaacatatttgtgtatgtgtcttttcacatatgcatgagcatattaatgggattaaattcttggaaaactttctaaaggaatataggcatgtaacactttcatggtattgccagattgctttaatttctcctttaaaaaaaagctttaggccaggcacggtggctcacgcctgtaatcctagcactttgggaggccaaggtgggggatcatttgaggtcaggagttcaagaccagcctggccaacatggtgaaatcctgcttctactaaaaatac

SEQ ID NO: 124702 - DNA, 519 bp, Homo sapiens
tgcaaataattcatttgacagaacgcccaagaattcgtcctttaccccgtaagaatacagcagttccccctcatccatgagggatatgttccaagacccctggtaggtggctgaagccatggagagtaccgaaccctgtatacgctacattttttcctatacattggtgagtgggtagtgtatacagtgtggatacacatgctactcagaatggtgtacaatttaaaaattaggaattggctgggtgcggtggctcacgcctgtaatcccagccctctgggaggccgaggcaggtggatcacgaggtcaggagttcaagaccagcctggccaacatggtgaaaccccatctctactaaaaatacaaaaattagctagttgtggtggcgcacgcctgtaatcccagctaattgggaggctgaggcaggagaatcacttgaacctgggaggcagaggttgcagtgagccaagatcgcaccactacactccagcctgggtgacagagcaagactccatctca

SEQ ID NO: 124703 - DNA, 419 bp, Homo sapiens
ttaccatggccatcttcaccatgcagtgacagtcctagtgtatctcctggccacaggccttggtgagcacattcagctaccattgattctgtgtccaccacgttcgttaacctgtcattagaatacttcctgatgagttcccctctttgtgtgagtgtcatgtccccagccagattgtttttagctctttatgagctgggatcacatctcctattttattttctgtccctttatcagttccctgataatagcaggtcacttgatacttgtttaattaacagggcagaacagactgtgtaacttgagtaaagggatgctgggtaagtgtttctggaacacaggttgattttcttcccccaacacatctgcagtggctattataaaatgttctgtaggatggtcaatgtgctagccattca

SEQ ID NO: 124704 - DNA, 432 bp, Homo sapiens
gtacgaatactttaatggaaatttattggagatgagaaattatgaaattcacagtctttaccattcaaagggaagttgttcatctcttacaatatgtgcgattagatcattgataccagtttgttttttcaacagaaacaatcaccttaaaactttacattcggggtaaaacacatctggtagaaaaatcaacttagtttcattgtttagggttccaattagatgattaaatactttctctggatttgcaagagtcaaagaaacaggttacacagagggtaagaaaaactccttcctgttaataacacaatgttagaaggtcccttacaatgtaactaaaaaatgctcaggcaagaaccatcctaaataatatatcagtcatttcttgaagtagcaagtgttgccttaaaataatgttttatgaatacccat

SEQ ID NO: 124705 - DNA, 459 bp, Homo sapiens
caccccacctctcccactcagcccctgcgcccaagccctggctcatgcctgcctgctgcccgctcatggctgtgcgcagcccgctgccatgctcccttggaaagccctctcttctctccatctagccaagctgactccctcagctcttttctttcccctgtgtcactgaagccctgcttggcggaaggccctggagctacggagaggaaggaaggctctgcggcgctcccagtcttgggagggataggggcaggtgagttaacttctggttatcatagctaaggtatccaggggcagtaagtaggggccagggcaaacggtttatgcttattaattcacgtcatcctctcaagaaccctgggaggcagttattatgattctctccattcctcagataggtaagtggaggcatagagtccaaggtcacaaaactagtcactggtgaagctgggctttgaa

SEQ ID NO: 124706 - DNA, 478 bp, Homo sapiens
gttcaagtcaacagaagtccgtaagggagcatggtacacagacagggaaaggcactaactgcgtgccggatattgagagcttcaggagaagggaagccatttgagggtcatagccctgatgcttaaggacagatgacacgggacactgaccactggttcggagtgattgagtccaggtcagtcatacttttgctgggatctccattccattttgcaatcatctcactggaaaggtccacccaagtagccagattgtccaaggagcttgaaggcattccacagtcactcctaattggaacgtgctgggctcaccctcttcccaagaggccatggagataacaaggacataactcagggacatcatgtgaaaatcagtggccctctctcatgcatagcagtaagtgaatgggcctgattctctctttattatatgtctttcttatcaaggtgagttatcttatttgtgcctttctcccac

SEQ ID NO: 124707 - DNA, 443 bp, Homo sapiens
cctcaggtctcacctcataaggaaagcttcactgaccccctttatctaatgtgagtggcttccccaattaccctctaatatagccctgtggcatttatcacaatctctaatgatcttgttcctttatgtatctacttatttatgatctgtcttttttttttctcttgagacagtttcactcttgtggcccaggctggattgcaattattcacatatctggctgattattcctcaggtctcacctcataaggaaagcttcactgaccccctttatctaatgtgagtggccttccccaattaccctctaatatagccctgtggcatttatcacaatctctaatgatcttgtccctttatgttatctccttatttatactctgtcttctttttttttttttttggaacccgcttttcagggaaccctcaaaactccaccctgcggg

SEQ ID NO: 124708 - DNA, 442 bp, Homo sapiens
tgtgctctattcgtgtgagttgtagtctgttcgtgtgtactgtcgtcgaagtgtgtactttattggtgtgcgctgcagtctactcatgtgtgctgtagtctatcagtgtgcacaagcattctgtctaaagcaacaacgtgcatcccttaatttaaaaacactttactgctaaaaaatgctaacaatcatctgagccttcagtgagtcttcatctttttgctggcagacagtctgcctcgatgtggatggctgctgaccaggcacagtggcagctgctgaaaacggggtggccgttgccaattcctaacacaacagtgaagcttgccgtatcgatggactcttcctttcacaagatgtctctgtagcatgtgatactgtttgatagcattttacccacaacagaccttctttcaaaaccggagtcaatcctcacaaatgctcc

SEQ ID NO: 124709 - DNA, 751 bp, Homo sapiens
ggtcattaattaggaggttttctaccctggttggtgatgatataaacttcctgcctttgtgtatgctgtagtgatttttcagcctattctttttcactggtcttttcctaaccttgagtgattctcttatatgcttatacaggtcagtactcaggagacccttctgcagatctccaacattttatatcagtatagctctttcttcgctggcatttactcccacaaattctagttgccagggcttccttaaacatccaattttgtcacatcagcttgccaagtctgccaggctctgttttggtattctttttccgctctggtttggcaactctctcacaagtagcctgtgataatcatagggctcacctcattgtttctctactttcaaggatccctgtctgcactgcctcttggctaaaacctaattaccattttttatattttgtttggttttttagttgtctgttatggaaatcagttccttttaccctgttacagccagatatggaagtccttatgaaatctcttcctcaataaccaagacattggccattttagaattttatgttacttaggtgtgcagttcaggggttcaaggagattgatcatttatgagaataagaaaatgttttttggccaggtacagtggcttatgccaccgtactttgggaggccagggtgagacgattgcttgaggccaggaattcgactctatctttacaaaaaaactttaaaaaattagccgggtatg

SEQ ID NO: 124710 - DNA, 402 bp, Homo sapiens
ggctggtcttgaactcctgacttcaggtgatccacccgccttggcatcccaaagtgctgggattacaggcatgagccaccacacccagcccttgttttgtttttaaatcattgtcctctctgctgttgaccattacactcatagcaaaggctgcctttctaattagtgccagtttcactaacgtggctaagcagcacgttttctgagtctgcatgtgctggccacacttgccgactgacacacagctgagatggaggacttcagagttcaatgactgccatttcttgggttttatcaccctatgtgtaatctggtatacctggttaataaatccaattaatgggaagtgtagccttctccttgttttcttcttaagttctttggaaagaatatttgtattat

SEQ ID NO: 124711 - DNA, 263 bp, Homo sapiens
tgcattttaaagagtagtagccaatcagtcagtaattaatcaaggcctctcctttcggtgaaggaggaaggcccttgctggttgtggtggggaatctccggaatctggtagtctgggttaaatggctcatgttggaaaagagaagtggtgggagaaatgccttattaattgtgaacttgattgagctttattcacctttaaaataaaattttcaggtcggggcacaatgactcacactggcaatgttagcactctggaaagtg

SEQ ID NO: 124712 - DNA, 495 bp, Homo sapiens
attactcaacaaaaggttttaaatccatgtaaaagaattcaagaggttgtgaaatagttctaggcttgctaagaatatcctttggctattttgaaaatgaagaaggccaataggatatatcttagcatccaagattaggaaaaattagtgtggaagagagcactttgatttgaggctacttgatttaatacaaaaagtagcttatttaaaagtaagatctttttaaaacaagtaactcatttgaaatatgggaagctataataggagaaaaataggggattttagtttcttctgaaatctaaaattactgagcagtataaaaacagtatattagaatgatgtcatgcaagcaatatatgcatatgttcttgaaaagattcagacaattcagaaatagagtaaaaattaagagcccctatcccatttatctcgagcagtattagatttttttaaaagagcagaattgtcctttttcccctagaaattaaaaaaaaa

SEQ ID NO: 124713 - DNA, 310 bp, Homo sapiens
cctatcaggtgcgccgatgtggtcagcactagggctcacctcactctgcgtggaggtctctggctatttattctcagtttggtactctggttttgttattgattctcatttgtctggcatctctagtggaatcaggccattctttttatcccttttcactgtattttgtgttagtgtttagtgttgtgctgtcaaaaagtgctgcttgtcataagaaggaaaaccgtaggaaaggacacaggcatggggctcataagcctcttgtttgagccagcctcgcagctcatgatttagcagttctcatcacacc

SEQ ID NO: 124714 - DNA, 455 bp, Homo sapiens
tcttagagatctattttgagctgagcattaaaggatggatataaggagaaaactcagagttcagatttgatgcagcagtgaaccaacgaatttcctttgctcatcccatttatattacattctatcctggtcattataaattaacaacatagctttacttgcccagtaacatatcattacttgcagaatgctatttatttcacagaaattgatatactgaaaggaactaaaaatatctttcttattctgtgaacatgtgtaaccaatattatgtccttctaataatttgaagcccttcattcaccaagtgctatttgtaacactttactaaatgttaatagaagaagccctctattattttacttctctgaagatagcaattatgaaattgtccctgctgaatagcaaactatgttgataatatgcaattaagatgcatcatcagaaaaagaaaa

SEQ ID NO: 124715 - DNA, 139 bp, Homo sapiens
tgtgaccccaagctgatgggaagaggatgaccataggacttcaaaatgtccttgagctgtaaattctgtaatagggtcaggcccaccagtggccttcaggcatttgtccagtggtgtatggataagttctagcacttga

SEQ ID NO: 124716 - DNA, 168 bp, Homo sapiens
tgctgtcacctaagactgctgaacaactagttgtatcaataacaacttttgccttcatagctctttatcattttcatagctgagttcagtgggtatcaatacccactgaactcagctggtcaaagaccagcagcaccaagaaccaaccactttcctctaaaagcagtt

SEQ ID NO: 124717 - DNA, 236 bp, Homo sapiens
aaaacattatgcctaacattaataaaagtccatttcaagtgctttacagcctaatttaaatggcatatacttaaagtactttaatttgcaactctgtggaataatagcaactattatttttttgtgccacttatgttccagacattttcctaagctttttatttcattagtcccctcgacaactcagtgagttatacacaattatcctgcaatcacaagccatgggaagggattct

SEQ ID NO: 124718 - DNA, 278 bp, Homo sapiens
tcttctggctggacaggggagcttttgttgggcactttctgtgtttgtgccccactggcattttcaggtggtcagcttctttctttggctccaagtctgggatatataaagcaaagtaaacccaaggaactcagtactgtgtcattcctcgagtcccaagatccctggttggtctgcctcatcctttttcagaggctccctgtgttttccttatgtatagcccaggggttttagttgtagttagaagaaagaattaggaaaagtcctattccatcttc

SEQ ID NO: 124719 - DNA, 554 bp, Homo sapiens
tttactgcttgtcgactctagagtatacctgagtcgcgctaaaagcgctcaacgtagattcctatttaacgctttaaaggcgaacacagtgccatcttactagagctctactcagcaatcctgtattcttatctctggtcattatctcaccgcgtcttgacttggagaaccctcgcgacgccgcgaaccctaacctggatctggttaataccttcatttcacctcatggtccacaaacttgtgggcatctttgccttcttgaaatggcccccaaggccatcctggcttatggcacctggacttctacagttctgccccctgcctgcttattctcctcctccctctgattcattctctgcacagtgggcattgctctccttttacaggtgttcatcagatcatgtcagccctacacttgacaagactttccagtgagttctcattgtgcttggagtaaaatccagccactttatggcccataggacaatggtctggctctgctttcctctgatcccatcaacgatcccatcaacgactgctccccactctgacct

SEQ ID NO: 124720 - DNA, 459 bp, Homo sapiens
tttccatttctgaaccacccttaaagaaaatcatttatgggatcactatcctcatgatagtccaacagagcaaccatgccatctggattcatgttttcaccagtaaagaactagtagcttttgcaatcagcaaggatgtgcagcctctgtcgcaaaaggttttactttttctggtctctgttcttcaagtttgcctttgattgttttcatgtaatctttgatgtagttcttgtaggtgttttttgtgaagctggtttcttgcaagtgatagtctgtgacagtatcaacagtgataactgtggttttggtacctttgccctcgggaccttcagcagaggcatttccgccaatgagcaagtcatcagtgttaccctctgtcctactgaccatattcccctccaccaccaggcacagcccatctgcaatctcccaaatctcataaatgtggaataacaccta

SEQ ID NO: 124721 - DNA, 208 bp, Homo sapiens
tatgtctgtagtgcctagaagtacctaacaggcaggtagtagacattcattaatattttttatatgaatgaatgactacaagtagggtgggccctgaacaatttgtgataaagagggtgcactttgtttcagtgcatttctagggtttttgtttgctggttgaaacaataaccccactggagagagaaaaagcagggagtgaggcaga

SEQ ID NO: 124722 - DNA, 224 bp, Homo sapiens
gaagtggcacttccaggccgcatttagttagctatctcatccactctcttgagagttacttttaaaggatattagtacaattgtcatccaggaatctaatattacttgaaatttacctgtttttaattgatccatttcatttgctgaaggacatgtattagaattttacagaatcataaaatttcagagttaagggaaatcttggacttgggggtggggaggat

SEQ ID NO: 124723 - DNA, 163 bp, Homo sapiens
tatttctagggaataactagaaatagcttaagagggaggcagtgtggtgttttagttaagatgtgagaaagtgcgttatctagtgatcactgttacctttctagaacatctaagcaacataaacattctgaaccgtagttttattctcatctagaaaaattct

SEQ ID NO: 124724 - DNA, 485 bp, Homo sapiens
tggaatggagcgggcgggctgggcttggccgcgaagcccatcggaggttttccaagtgcaaaaagatacattgtttgcaggttggaggccaagtctggatctcagatggctgcctcagatgaggtcagcggcaagtgttgagtaggggactcgagggtttctatctaggggctgacctcaatgtctggggacactaccgcctcattaacaagtcagtatccacaaggggtagggcaaggcctcagcctggaacatttctggcctccttctaactgggaccaccactaaaccgactggtcccaactacccagagggcacctggtatacactgaatgcaatgtcctagccagtcagtgcccagcctggtggggacaaggtccccagggcaggctgggccggaaggcacggccatccctgcttatcctataggcaggcagagctgggacgggcaagcacaggctcagacttccccaaggtcactcggc

SEQ ID NO: 124725 - DNA, 562 bp, Homo sapiens
tcattgcctggatgaagcccctgcaacaggagagcttttgcctcctctgcctcacctcagccccctagacctctgtgtgcaactggagtatggtgttaagtgagcctggagcagtcttaggaaaaggcttcaagtgaggctaggtgggaaggcctgggacagaaataaattcaaaacaacaaccaaagaactgataggtggaataaaagaagtgggacagaaaagattcaaaggtgggaattgaaagagagaggtacagtaagaatagctggcgtccagtgaacatgtacagtggaccatgcacagttccaagcacgttcgatttattatttcatctaagactcacgagaactctataagacaaaggtctgacattctcatccctgtgttagatgtgaggaatctggagcacaaatgtgtaagtaatttttctgttgagaaatggacctatcaggggttgaacccaagcagtttgcctccagttaatgtccttcgccactttatattccacctatcagttctttggttgttgttttgaatttatttctgtcccaggccttcc

SEQ ID NO: 124726 - DNA, 534 bp, Homo sapiens
gcgaattcactagtgattgtgagctgagatcgcaccaccatgtccagctaatttttgtatttttagtagagacagggcttatcaccatgttggccaggctggtcttgaactcctgaccttgtgaactgcccgccttggcctcccaaagtgctgcaattacaggcatgagccactgcacctggcctggacagggactttttaagggaagaagggaagcaaagaggtagagaagagaaacactaaaagggcgctaagaaaaaaaccactcaacgtggtaaagacactttggaaaactattggcaatttctttttttttttgagacggagcctcactctgttaccagactgaagtgcagtggcgtgatctcggctcactgcaacctccgcctcctgggttcaagccattctcctgcctcagcctcccgagtagctgggactacaggtgcacaccaccacacccagctaatttttgtatttttagtagagacacggtttcactatgttggccaggatggtctcgatctcttgacctcg

SEQ ID NO: 124727 - DNA, 855 bp, Homo sapiens
ctctgcctttgcctcttttaaaatgttctaagttgctagccaatcaggacaaatacagaatgtgaggtcctgttccagccaatggaaactggacacagcagtaaggtggacgcgtcaacttataaatgaccctgcctcctttgttcggtgtactatcgtggcaaaactgctggcaagtgtaccctttctgtagaaagtaaaaatggccttgctaaggaaattaaatttatgttcaagtgctatttctttattgcaccgaggaacaagcatttctaacagtaggttttagtatatagtttagatgttccttatgttgattgacatttgatggctcttcagtggttcgaagatgccagaaaagaacaatgagaatggccagaaaaatctagaaactatggtgaaagtacttacaagttgaatatagccataatagaactggattgtgctagaagtgactaaggttggcagtggaattgggagcttagtaggcccaatcaactgtgtggctttcttcacttaggcagggaaaatgtggtatcttaggatcctcttgcagtaatttccaaacataagagctgcgaaataagttataattggaaaaaaatcttcaatgatgttgaaaatatttttccctctggattagccttctcttttattctcagtcataattttagtagggagttttgttgtcactttaagggtattcattccatttcgacttgtcacccagattctcttcgaggatgacaagaacagccagtagtggctggcttgtggctcttctgtgctgttgctggctgcagccaaacaggaaagggctgttcggagtttctattggaaccatcaggaatactg

SEQ ID NO: 124728 - DNA, 702 bp, Homo sapiens
gtgtctcaaactcctgggctcaagcagccctcctgcctcaacatcccaaagtgctgggattataggtgtaagccaccatgctcagccttatgtgctcatttaaaataattcaattttattcattaactcagcctctttcaggcaatgctcggttagacttgtatacatttaactttatttactagaaagtaaatcatttatttaaaaaaatccctgtgattaagactgcataccagggccttgacatgagttgcaaatgattgattaataaatgagtgattgagggagctggcaggtagagaaccagcattattatagtttctgagaagacatgagataatttcaatgaggaggaaatggtcagtgaagtcaaatacactgagaagttaaagtaagtgagagttgataaaaatctgtttgatctggctgagtgcagtggctcacacctgtaatcccagcactttgggaggccaaggcgggtggatcacaaagtcaggagttcgagaccaccctggtcaagacggtgaaactccttctctactaaaaatacaaaatttagctgggtgcggtggtgggtgcctgtaatcctggctacacaggaggctgaagcaggagaatcacttgaacctgggaggcggaggttgcagtgagccgagatcacgccgctgcactctagcctgggcgacagagcaagactccgtc

SEQ ID NO: 124729 - DNA, 571 bp, Homo sapiens
ctgtatttagttcatagctccagtgttattcattgatttattaaacgtccccgcttcagacagaacccctaccgtccagttacaaccggattgaaaacccagctccttcccgtgaggacctcatgaccagctgacagatctaagcctataagcagataaatcatcccacagggtagctgtatccatgcaagaaacatgccagaggctgcgagtcgggtggagtggagaatgggaaggctttctaggaggtggatccctgggctgagttttgagggcttaggttatactgaggcaagaaaggagggcaggagaaatgagagctattttcgggtagaacagccaccatgaaaaatatctgaggaagctaaaagtagttaagtttctgtctgtgtggcaagatctgagactggagaggttaaagataactttctcctataaaaaatggtaagctattaaaagattttaagccaggtagtggtcagatttgcaatttagacagatgactttggccactttttggaggacggattaaccagagaccagtcaaaagcagttgaatagacccagtaaa

SEQ ID NO: 124730 - DNA, 332 bp, Homo sapiens
aaaatataactcttattatttcagcaaaaaaagtaatcaagtgtactgaaaattaagattattgaactggagcagacaaagtaaacaagccaatgaatatagcatattatctgttgctcaaatatatactctgcaacaagaagaaagaggcaaaatgtaaaaatgattttcaggggaagaacaaattataagttgcattgatctggagcaggcatactcacataagaaaattgtggcaagtaaaacctgccatgaaattaaaggaagagaaataaaactagaacaaaagtggcatgaaaaccatccttttcttcttacattagtgagcattg

SEQ ID NO: 124731 - DNA, 202 bp, Homo sapiens
agaggaaggatgccacagcctctgctgaaacaggacaggccacgtctgatgactttttatgttcagcatggtccattacaggctagcggtcaaaaaatgttaaatggctgagttttgccctctacctttctcctacttgatctccttccagcttttcctctcacttttcttaattcccttccctcttctttcccctttttct

SEQ ID NO: 124732 - DNA, 793 bp, Homo sapiens
cacggtggctcacgcctgtaatcccagcacgttgggaggccaggcgggtggatcacctgaggtcaggagttcgagaccagcctggccaacatggtgaaaccgtctctactaaaaatacaaaaaattatctgggcgtggtggcgggcgcctgtaatgccagctactcgggaggctgaggaaagagaattgcttgaacccgggaggtggaggttgctgtgagccgagatcgtgcaattgcactccagcctgggcaacaagagtgaaactccatctcaaacaaacaaacaaacaaaaagaatatatccatattagtaaaaactctttccccctttttactaacctactcccaaaacagggataacctaagctcaataaaataaaggagcctactatcagtgggtttacctcaaggggtttaatcattgtcctggtaaaaagctcttctgtgcttcccaaataagatctggctagatatacagattcagggccccattcaagagatggtatttcagtgggtctcaagtcaggttcctagaaatgactatttttaacacgtgtaccaggtgctgcttggtttggtagttatcacaggccattctactctttacctgtcagtttaattttgtccactctgagataggttttctaatagcatgtgtcgaataaagtatccagcctggtggattatcagtgaacaaacacaactgagcacaatagttaagtgttcattaggtaatacgcagatgttcttgtcccagtgattcgtacagagccatctgtctggaggtagata

SEQ ID NO: 124733 - DNA, 406 bp, Homo sapiens
tgccacttccctgctgaatttcagtgttctgtaaaaatttttatttgtttttaaaaagtcttatgtaactatagaattgaaattattaatggaatagaaaattaaatgtaagaaaaagcaagaaggaagcaagaccaatatttaggaggcaatcatctctccagatgactcacagaagaggaaatctcaaggagtagattatttttaagaagtttctggtacagttcctctgaggtcctgtgactacccctcccccaggaaataacttttttatttaaccactacattgacatctacagaagttgacacctgtaagttttagacataaaattgattcaacttacagtgcaacaatttaaatgtatgcatcactgctatattgaaaatataatatgtcgttagactt

SEQ ID NO: 124734 - DNA, 567 bp, Homo sapiens
ttctacaggggtttatttttacttaatgtattagtcttcaggtatcagggttgaaattattaccctgccatttaatgtataagaatttattttcttcagtatgatctcattctcattccctgttcttaataaaaggaggacctgtgtgattataggtccttggatctcacttaacttaaaactgttgtttggatggactcagctcatttaggtaagctaagtattcagcttattcaaagtttaaagcttcctcacagcttttggagacctcctctttcccttatgctcaagatagtacttgcatgttctgtcagaggactggagtgactgatgtaattcctcttacccagtctttgggtgatagtctctgttcttgctgtagcctagcatgggtttccatgcatgatgagtgctgccaggaagcctttctatcttaaccactatgctcccacctctgctgtcactggggctactgattctccaggacctaatttcagcttccatttgctcacctgcctgggcggtccaccttgaaatcatctgtatctcaccctgtgactcttccct

SEQ ID NO: 124735 - DNA, 264 bp, Homo sapiens
acgtgatatcacttatctgctgcttcatctccttggcatggggcagcagccagtcctgcagttagcttctccacctcctcctggatcttccttcagcttttctaactcttgagccggggagtatttagctccaagacaaagtgtgccagcttctcctgtagacacccacatcatcaaagttagaggtaagagagactgacacaggatccatccatctttctgggttctggttggtggttctaggattcagcttgttcctcctcc

SEQ ID NO: 124736 - DNA, 537 bp, Homo sapiens
ccaaatggcgattttctatcttcataattccttctaccattattagttaaaattcttctacgcggaagttttcccttaccccccacttacttactttcaattatttatgtatatcagtatggactcgtgggtatctgtttcattctgtgagctataatccattacaactgatatttattttgttgctcaaattgtccacatttgaccattggaagccctttaagttggctcttgtgccctttcttcatatcaccatcatttttgaacattcttcttttctggtaccacaagacactctaggctcttcttgtactccatttgatccagcccatgagtcaatcattttctaaagacaccagatttctgttattaaagaatagaatttagaaaccaaaaatctgggtgttacttgtgcttattcacaaaagaacgtatctccttttttctacagtctatttacttatttgcttaaatcttccatacacataaagtactttcagaattgttcatccatacttctgtgaaaaatatttacta

SEQ ID NO: 124737 - DNA, 483 bp, Homo sapiens
aaaccttatgttctgacccaccctggatttggaagacaggaaggaggtgaagatggttctgaggactctagcttggtgggcctagtggagatggacattttaaactaagatgcggcagccttgggtagaaatgggatgttcagctttagacaggagacttttgagacgcttggtccaggaggtaattggaagtccatcagcatgttatactagcccgccagttgagcatgaaggcttttctctttcagttctttctgagttgttaatgatctcttatatccaactggctttccttatttgttacacaatcgaatagtcaatgttccctggtgactgcagagtttctacagaagtacttaaagatgatcgtctggctggaaggagacttctcttgaagtctccattgcataggaagcacattgcttttaactgaattgtgtattatgggtcctaaaaaggtgggtcagaacataaggggtaccg

SEQ ID NO: 124738 - DNA, 434 bp, Homo sapiens
actccactgagatctagtatcctacatctaactgcctgcttgccatctccacttggaaatctaataagcaactcaaactacagagatgtgaaagccaactctgggttcaccctcctcctgtacaaccaactccattgtagtttcaccctccacccaaatgctcaggctacaagtctaggagttgagcttaactcttgtcttacctaaatgtaatctatttgcaagttctaacagctccacttccaaaatatatcatcaagacgaccaattctcatcacctccacagctaacatcttaccatcagtcattatccagcataagtcatagatagaagactctaactgatctcctacttccactcttcacaacatctacggtggcctttgaaaaacaaactggatcatgttcaaaaggttcctactacacacagaaca

SEQ ID NO: 124739 - DNA, 834 bp, Homo sapiens
  misc_feature (592)..(592): n is a, c, g, or t
  misc_feature (598)..(598): n is a, c, g, or t
  misc_feature (633)..(633): n is a, c, g, or t
  misc_feature (635)..(635): n is a, c, g, or t
  misc_feature (649)..(649): n is a, c, g, or t
  misc_feature (651)..(651): n is a, c, g, or t
  misc_feature (653)..(653): n is a, c, g, or t
  misc_feature (671)..(671): n is a, c, g, or t
  misc_feature (677)..(679): n is a, c, g, or t
  misc_feature (681)..(681): n is a, c, g, or t
  misc_feature (688)..(688): n is a, c, g, or t
  misc_feature (712)..(713): n is a, c, g, or t
cctctattcctttcctcttgctcagtgtgcatcaggcatctgggcttcttttctgctcctgtaaatgaatgccaagtggtttccctcttcaggacctttgcacatgctctcccctgcccgaaatggacttcccatacctcctgccatagctggatttttctcatgtttcagacctcagctcgcacatcatctctcgagaaatcctccctcatcctgtgaagagaaaatcatcgtccttttcattgcctcgtcctgcctggttctctcaaagcagataccacgctaaaaaatcagcttgttatttattgaactgcttgtctgcatatcctcctcccaaactcacggcaaatcagaacagaggctccttgtggcaggagtcccatcttgttcattctcagaacctaatatagtacttggcacatagtaggcacacaacaaatgtcattagaatgagtaagtatcaaggggtcgggcgcggtggctcgtgcctgtaatcccagcactttgggaggccaaggcaggtgaatcacctctggtctggaactcccgactcgtctgatgcactgtcttgcctcccaggtgctggattacnggcgtngcacctcgccggcaagaataacttttagaaataancnggtgtccaggtgcngngntcatgtctgtgtccagcntggagnnngnggggcgntcactgagcgggttggacagctgnngatggtgagggcctttccctaattcaaattgtggctgttgggggcccgttgccctattcgggggggcggtcttaccgggatttggggcatgtgcccggggaaggctttaaaggggggcttc

SEQ ID NO: 124740 - DNA, 270 bp, Homo sapiens
tcctgcctcagcctcatgagtagctgggactacacgcatgccgctgcacctggctaagtttcttgcattcatagtgaaatctttttgaacaccactaccattactgcccctcaactttttatggcccagggaagccaaaggcccatctcagaacctttttttttttttttcaacattctcagacttttgatcccagcccagcatcttccctgtctcttccggacggtggtgtgggcggggcccaggtcgagggggtcagaggatcactgg

SEQ ID NO: 124741 - DNA, 364 bp, Homo sapiens
acaggggtggtagggggaagacagctgtccggtaggataaccagatttctggcttgtgtgactggatagaagcagcatcattctgagccaatgaagccagaaaaggaccagccttggggcaaagattgtaaggtgcagaaggaggcaagcaggtggctggataatatggcccggggtccagagggaggttcaggccggtgagagaaaattgaattacttgggaggaaatggtttctggagttgtaggcacaatgagataacccagaagagaaacaggttgaagagagaaactcagagggattccaacatttctccatcctacacatgaggacacagggctcaaagagcagcagtgacttttcag

SEQ ID NO: 124742 - DNA, 228 bp, Homo sapiens
attaacagtccactcctcctcctccgcaagagactcagaaagaaattcatgactcccgcattcctttccactcacaaaacatgctttgtgaacagccagagaaagacagctcgttacaaggacaactgtggtcacaccctctcagcaaaccgcagccacacaccagggcctcctgcctgacccctggccagccggcttccctgatgagctcagaggcaggacaagcag

SEQ ID NO: 124743 - DNA, 467 bp, Homo sapiens
  misc_feature (18)..(18): n is a, c, g, or t
  misc_feature (77)..(77): n is a, c, g, or t
  misc_feature (89)..(89): n is a, c, g, or t
  misc_feature (101)..(101): n is a, c, g, or t
aaccccataggttgagcnagaaagggttacagccaaaatttttggccccccccccggaaattgcccagaagaaggtncaccaatgggantgaggagaatgnacgaattttgcgccggctgctcagaagataccgtgaatctaagaagatcgatcgccacacgtatcacagcctgtacctgaaggtgaaggggaatgtgttcaaagacaagcggattctcatggaacacatccacaagctgaaggcagacaaggcccgcaagaagctcctggctgaccaggctgaggcccgcaggtctaagacccaaggaagcaggcaagcgccctgaagagcgcctccaggccaagaaggaggagatcatcaagactttatccaaggaggaagaggccaagaaataaaagctccccctttgtctgtacatactggcctctgtgattacatagatcagccatgaaaataaaacaagcc

SEQ ID NO: 124744 - DNA, 134 bp, Homo sapiens
aaaagaagctcagaggccactcttgtgtcctgaatactttgcctgctgagatcgccctcctgggcttgcagtttgtcttttgggagatgtagttaaacacatcctccagggagtgccctcagcagctagagtga

SEQ ID NO: 124745 - DNA, 466 bp, Homo sapiens
gggaaacgttataatgtgttatcaatttaaaacccccttctagttatttttttgagacagtctcattctgtcactcaggctggagtgcagtggcacgatcttggctcactgcagcctccgcctcccgggttcaagcaattctcctgcctcaccctcccaaagttctggcattataggcgtgagccaccatgcccagcctactttgattctttctccacagttttctttaatacttcaactttttggggattcattatgtgaacaatagggaaaaataagagcttattgtgaaaggcactgtagaaacttgttcagaataaatgaataatagcagagaatggccacttgtccctctcttagttctagcagcagttaagatttgttgatatatagtgaacttttgaaaagcctaagtgtgagtctgacattataccaattcagaatgtaactcgaaaatgtactcatg

SEQ ID NO: 124746 - DNA, 177 bp, Homo sapiens
cttgttccgaccggttctgatcccatggcagggcttctttggggccaggacagagcctggtgtcccccttcagtggcctgttcacggctggctttcaaatctaaatgtggtttaaaataaagcccacatttggaagctcctgataatgatgtgggagcacctctgagcagtccctgc

SEQ ID NO: 124747 - DNA, 155 bp, Homo sapiens
ttgaacctttggctccagagagtctactctcctgaaggcaatgctaagctaataccttctgccacagaattgatttgactttagttcatacctctaagtattttttaaagatcagttatttactcaatggtctggcagttgctttctctggtttg

SEQ ID NO: 124748 - DNA, 450 bp, Homo sapiens
  misc_feature (433)..(433): n is a, c, g, or t
  misc_feature (444)..(444): n is a, c, g, or t
cacctcttcctctctcccaaccacagaaacagccacgactcctatgacaaacttggtaaccaccaccactgagatctcctcccacagtactcccagcttctcttcatcaaccatctactccacagtcagcacatccacaactgccatctcctcacttccccctacctcaggtactatggtgacttccacaaccatgaccccatcttctctgagtacagacatccctttcacaacaccaacaactatcacccaccattctgtgggctctaccgtttcctgactacagcaacagacctcacattaacattcactgtttccagttcctcagcaatgtccaaatagtgtcattccagtcttcccccagcatccagaatacagaaacctcatcccttgtcagcatgacctctgccaccactcccagtttggagaccanactatcacaangtactg

SEQ ID NO: 124749 - DNA, 279 bp, Homo sapiens
  misc_feature (221)..(224): n is a, c, g, or t
  misc_feature (240)..(240): n is a, c, g, or t
cacctcttcctctctcccaaccacagaaacagccacgactcctatgacaaacttggtaaccaccaccactgagatctcctcccacagtactcccagcttctcttcatcaaccatctactccacagtcagcacatccacaactgccatctcctcacttccccctacctcaggtactatggtgacttccacaaccatgaccccatcttctctgaaacacagtnnnnccgtctgttgatcatnagtaatatttagcacaactctgtctgcaggggggtccta

SEQ ID NO: 124750 - DNA, 298 bp, Homo sapiens
ggtgtctctccctcatacaaaagcatttcactccttctgtcccacaactcctaaaccccaatttatcaccacctcttctgcttaggtatctttctaacacaaaattctcctcagaattctttaatgatttcttattgcccaaaggatataaccaatactcatttgtctgttacacaagcctctgcctgcctatttagtctcctcccttcacttctccccttacactctaggtttcaacaacactcacccacttgtaggtcaagaggcttgtcaacatgatctgtggttctttgctatt

SEQ ID NO: 124751 - DNA, 441 bp, Homo sapiens
gagagtacagtaagatacaaatggaaacaacaaaaagttgaaaagcatgggaggaagggtgaagttaaggcatagaaattttattagttttctttttgcttgtttgtttatgcagagttgttatcagcttaaaataataaattataagatagtatttgcaaacttcatggtaacctccaaccaaaaaccatacaatgaatacacaaaatataaaaagcaagaaactagatcatatcattagagaaaattaccttcactaaagggaagacaggaagggaagaaagaaggaagagaaaaccgctaaacaactggaaaacaaataacaaaatggtaggagtaagttcttatcagtaataacaatgaatgtaaatgaactaaactctccaatcaaaagacatagagtggctgaatgggtgaaaaacaagaaccagtgatcccttg

SEQ ID NO: 124752 - DNA, 151 bp, Homo sapiens
tatggtcaaaaaactaaaataactttgtatattctaaagaggactcaaaccaagcagtcagcccagcagcaattctgagtctttaagtcattctttgagcatataaaccagaagttaccagagcctcctcctttaggcaaaaacctatttg

SEQ ID NO: 124753 - DNA, 325 bp, Homo sapiens
caagggaggtggatgcggcttgtccatcagcatgccagatgagggggctcctcccaaagggacagaggggatggagtaagggccggggacaccggagacagagggagggtacccggcctttgctgctttccctgcttcatacactgtggagggagatcaagagcaagagagattacgtcgtcccaccctccacaaccctcacaccaaaaatccctgaggatgcacttcagggagctcctggatgtgtgtatgtgcatgtgtgagcgtttgttcttctaaaactgaactgattcatcagaatcactctcccccactccctcggact

SEQ ID NO: 124754 - DNA, 695 bp, Homo sapiens
ctgagcagctgtgacatagccaggtggcctgcaaaacctaaaatatttactaattggtgccctaagaacaagtttgccaatcccctgatcattagatcatctagtccatcctatactgtacaggtgagtaaactgaggtccacacaagaatgacttctctatggtccaaactcaagttaagtaagaagcaaggaagactccatttccatggtactttccaccacttggccaggaaactctcaaaacagacatcctgctgtttgggaggtaaacctcagggtctcatatcacatcgcaagtgagtgtatttgccaatacattgatgagaagaggactttgggcctagtcagtatccaagaacaactgctaaaggtctgagtaaaccttagtagactagaaaaagttaatttaaaaaccacacaggccaggcgcagtggctcacgcctgtaatcccagcactttgggaggcccaggcgggcggattgcctgaggtcaggagtttgagaccagtctggccaacatggtgaaaccctgtctctactaaaaatacaaaaaaataagccgggtatggtggcatgtgactgtaatcccagctacctgaaaggctgaggcaggagaactgcttgaaccagggaggtggaagttgcagtgagccgagatcacaccactgtattcccgcctgggtgacagaggga

SEQ ID NO: 124755 - DNA, 257 bp, Homo sapiens
aaggcatgataaagcgtggtgtgttccctatgtcagttgcattccctaaggaatcaggtggttggtgagatcggagggtttgggaaggtgatggcagatcgaaaagtaggtaggagctaggtcatgaaggatttagcgtgctgtgccatgccaaggagtttggccttttctggaaggcactgaaaatccactgacagtctcataaggagaagactgaccaggtcatactaatcagtcctcagtgtagaaaggtgagt

SEQ ID NO: 124756 - DNA, 439 bp, Homo sapiens
aaaaaaaaaattgtcctgaaaacattacttcttgcttcagtggtcagtagtggtggtttatccctctctttttctctcccccaagagttgagggttacactagggcaggctggcgatactgaaagcagttgagtttctgccttgagaagaggcatgtccagtagaaactggatgggtaaacagactggagaaaaatataaagacttgaaattcagctagatagaataagcactgtgttcagaatccagtcaggaccaggttgtacaagaaataggttctaagtttacaggacaagaaataggttctaggtttcaggcaaatgcaacatctaggaatttagagtagcaaagtaggatgcaggtggtaggacacaggtaaaactagccaggtaagacgggcaggcaaggcagataagtggaagtggaggctcaggaaatga

SEQ ID NO: 124757 - DNA, 253 bp, Homo sapiens
ccggttcctctactccggttgcctctactctagatagaataagcactgtgttcagaatccagtcaggaccaggttgtacaagaaataggttctaagtttacaggacaagaaataggttctaggtttcaggcaaatgcaacatctaggaatttagagtagcaaagtaggatgcaggtggtaggacacaggtaaaactagccaggtaagacgggcaggcaaggcagataagtggaagtggaggctcaggaaatga

SEQ ID NO: 124758 - DNA, 583 bp, Homo sapiens
ccaaaataaaaaaagaatttataaaagcctctcatttgtaattgtttacattcacaaacatcaaacagtaaagacgacacatagagaatttcagtgacaccgtatatgcatatatatcttaaacttgcaataatatgtaaaaataatttgttttccatcccttgttagaaactttccttttctcaatttcagtgagaagataatatatttatattgctttattgcagataatatgtttattagggggctttttttcctgtacattcctctatgtaattgtttaatactatcatgatttaatgacacaaatcattgactattgtctctatagtcccactgtatctcttggaatacttgaaatagaaaatgttctaggaaactttatttaaccaatccaattcactgtagtatttcccaaactccttagttctcagagttatatggccttggcccagactagaatcagtacatgttaatgtacttcagaaccatgagtgaaaactcttacttggctgtcacctcttaatcggcttagctccctctgcactaacagatgttggcaggcagttctgagcctgtacag

SEQ ID NO: 124759 - DNA, 738 bp, Homo sapiens
atgtaaggtaacattcacaggttctggagattaggacatagacacattgcaggggatgtcattattcagcctgccataccatcctgacttagaactctgaagtcatcatttgatttattttcttgtttttcagttgactcccaacctaacagttgccaaatacattttctcatgaagattatttttttattattgcaccatcctagctgcccagtctgttgcatcaacctactagttgagttttccttatctccattcccttcttcccatgtctcttccatcccacacatcagtactagattgatcttcctaaagctgtactcaagtcattcattgccacatattgtatgccacattataggtagagtcctcaccctaaatgaaggctgttgtgattacagacatgtctgattttccatttttaaattccactacttctctgtatataccgtttacctaaaactgaggtgttccattttcactaatctcaccacattggccatgttttcctgcttcaatacatttccttaagctttcctccacatataattcctgtgttcctgtcttgtcacccatctttttaggattatcccaaataccattcattacttgaagcctctcttagtaacaatataacttctttagtctgagccctaataacacttttaaaattctcttcttattctatttatatttgaacataaattataggtagttgtatacttgtatacttacctc

SEQ ID NO: 124760 - DNA, 325 bp, Homo sapiens
aaggaatagtttaggtctggtggccaggtggactgggctaatactgaactccagaatcaagagctgttgagttgcaggctgcactgggctaggggcaagccctggagagaacagcagataatgtttttcccttaggggtctgtctccccagaggaagaaggcaatgaagctgagcccaatatgctcagttaccctgctcagatggactctacattatcagaggggaatgacgaaggcactgaaagaggccaggaaatagtccttttctttttctttttttttttttttttttttttttttgggcaaaaaagggaaactccttctc

SEQ ID NO: 124761 - DNA, 271 bp, Homo sapiens
agggatgacaatttttttggggcacagtctaagttggtctggtgtctggaatgagactggggcctaataaaaaggagcatctatacaggagcttaaatgggctgtaccttgtagcattctgaggacaggtctgacttctgagaagggaaagtggtaaaagtattgtccagtcctttttaagttggtggctgagcttggtgaggtgtgtttttaaaagacctttagtccattctacttttcttgaagatggaggaccgtaagggatataagg

SEQ ID NO: 124762 - DNA, 251 bp, Homo sapiens
tgtgtgccatgtacctacactcctaaacctgtagccctgctgcagacacagcaagggagcctccagtcatctgtccaaccagcaaaaagcactgagtaactaccacatgctgtactgagcaaggacctgcagggaaaacaacagtccagactccacctgccaaaacctttgctctctgaatgcacattaagaatacaataaggggtcagcacggtggctcacgcctataatcccagcattttgggaggccg

SEQ ID NO: 124763 - DNA, 353 bp, Homo sapiens
ggctaagcaagataggcttcttctactaacacagcttagtaatcctctaacttggtgacattagttaataaaccagtactaaagtaattctgtagcacttcagttactataattactttctatgtttgagccttattaggaaacataatccagaagctgtatcattttggcttaaatgatataaatcccttggggaaaaatatcacagcaagcttatatactacgtagtatgcaaacaaacttaaaaatcaaaagcaattctgcctcgactctatgtcaagcactgtctgatgttccttctacacaggatgtctcccttaatcttccaaaccatcctgtgatctatcttgtga

SEQ ID NO: 124764 - DNA, 271 bp, Homo sapiens
gaggggagtgagggaatgcaaccaggatggagacagaaacaaaaagagaagggaaaaatcaagaaggcaaacaggggagggcaggaaagccaacagagttgtctgttcacgcacaaaagcctgctggtgcttcctccagtgcagggagcctgccccaccgcccgccacgggactaagacagcgcctcctcaggtgtggtccagggacccatacaaagccttcacaaccccacaggcatgtgccagcacacagcaggcaggtgcagcaccat

SEQ ID NO: 124765 - DNA, 259 bp, Homo sapiens
ggagacaggaaggaactgaatagtaatgaacaacgatgcaaggggatgtctctgaatcctacccactgtcagcgtccccatggctgtagagttgggagtcagagagacactggactccttcaggcatttgcacaaaaaacatgaacctaaacctcagtgtttaaagaagccttagtttttcttatctctccgacagagggaaatatgggtggaggatttcccaattctaggctttctcctcctgtgtgcctgattttaa

SEQ ID NO: 124766 - DNA, 417 bp, Homo sapiens
tcaaatgccacagggtgaaccactggatgagttgggagattcctaatgccctgaagtagagtttcagcaaagagaaaaagctaccagccagaagatgatactatgaggaattaatgtggaatggcttcgtgaagaaattagtatagactatttttccagaatttgctcgagtacaaaaaacagagatagaccaatctactgatttggacatatacttgaggaatcctttttgtatgtttttgttcacattgtttttaggatgaaaggttggtatctgtagcccagaaacgaaaagtttaaaaaacgtatttagcatgacaagaaaaaaaaatgcttcctagaaagattaggtcaagaagtcatccttttatggctgcatagtattccatggtgtatatgtgccacattttcttaatc

SEQ ID NO: 124767 - DNA, 101 bp, Homo sapiens
agtccagaatgtgctaagagcacagtcagtagttccttcaatcatctactttaaagtgcatatgaatcacctggggacttagttaaagtgaaaattttgat

SEQ ID NO: 124768 - DNA, 176 bp, Homo sapiens
tttacaaattaaaaatatttataagaaacattgttttattaaaccattgaaagcattatgacagtagtatttcattttaaaaatatacaaaattgagctgattattccaagcccatttatttaaaaaaattttaaaatatagcacatggcaggccttcataaaaattccttcctct

SEQ ID NO: 124769 - DNA, 1579 bp, Homo sapiens
gccaagcttggcacgaggtggcacgtggtggcttgttgggatccgttgagtgatgggagagtgtgctctttaacttcggagagagatgcgctctcgtgtagccgtcagggcctgccataaggtctgcaggtgcctgttgtctgggtttgggggtcgagtagatgcggggcagccggagctgttgacggaaaggagtagccccaaaggagggcatgtgaagtcgcacgcggagctcgaggggaacggcgagcacccagaagcccccgggtctggagagggaagcgaggcgctgttagagatctgtcagagaaggcatttcctaagtggaagcaagcagcagcttagccgggattctcttctgagtgggtgccaccccggcttcggacccttgggcgtagagttgcggaagaacctggccgcagaatggtggacctcggtggtggtgttcagggagcaggtattcccggtggacgccctccaccacaaaccaggccctttgctacccggggacagtgccttcaggttagtttctgcagaaactctacgcgaaatcttgcaagacaaagagctgagtaaggaacagctagtagcatttcttgagaacgtattaaaaacttctgggaaactacgggagaaccttcttcacggtgccttggaacactatgttaattgcctggatctggtaaacaagaggctaccttatggccttgctcagattggagtgtgttttcatcctgtttttgacactaagcagatacgaaatggtgttaaaagtattggtgagaagactgaagcttcgttagtatggtttactcctccgagaacttcaaaccagtggcttgatttctggttacgtcatcgactccagtggtggagaaagtttgccatgagtccatctaacttcagcagcagtgactgtcaggatgaagaaggccggaaaggaaacaaactttactacaattttccctggggaaaggagttaatagaaaccctgtggaacctaggagatcacgaacttttacacatgtatcctggcaatgtgtctaaattacatggccgagatggacgaaaaaatgtggttccttgtgttctctctgtaaatggggacctagaccgaggcatgctggcctacctctatgattctttccagctgacagagaactcctttacaagaaagaaaaatcttcatagaaaggtacttaaacttcacccttgtttagcccctattaaggttgctttggatgtaggaagaggccccacattggaactaagacaggtttgtcaagggctatttaatgagttactagaaaatgggatttctgtgtggcctggttatttggaaactatgcagtcctcattggaacaactttattcgaagtatgatgaaatgagtattctcttcacagttttggttactgaaactactttggagaatggattaatacatctgagaagcagagacaccacaatgaaggaaatgatgcatatatccaaattaaaagactttttgattaagtatatatcatcagctaagaatgtatagatttttatatttgtataataaatattcttctctcct

SEQ ID NO: 124770 - DNA, 1558 bp, Homo sapiens
  misc_feature (1156)..(1159): n is a, c, g, or t
ggtttataaatggtttgtagctaacaaaaaaaggaatcctttctttttcttacactccacttccaaaccatcagcaaatcctgtttgactctaacttcaaaacgtatcctgagtctgaccacttcctagcctgtctactgctaccaccctgctataagccaccgccactcctcctcccctgatagagtggccctgttaaaaggtgcatgttgtgttgctcctttgctcagaacactccaggaaagcttctcatctcactcaggaaaaaccgaagccctctttttgatctgctgttctccacctcactcagtctgctccagcagcactgaccttgctatttctagaacatgctggagatgctgccagctcagagccctgtcatttgtattccccattgcctagagtgctctttcttcatcatccatgtctcgtccccccaccttctttcgagtgtttgctcaagtgtcaccatagggagagaaccttttctgaccaccttaaagttgctgaaaacctcccccagcctgcctcttgccagcatgttccatcttcttccttttttagcacctaccaccttcacatatattatttacttatttttattgtctgtttctccctgccacgagagacggagatttttacccctagcacctggaactgttcctggtatcagaggcattaaaatgtttgttggatggactaatgaatgagaagagaaggctgggctgaatggctcacgcctataatcccagcactttgggaagccaaggtacttaaacttcacccttgtttagcccctattaaggttgctttggatgtaggaagaggccccacattggaactaagacaggtttgtcaagggctatttaatgagttactagaaaatgggatttctgtgtggcctggttatttggaaactatgcagtcctcattggaacaactttattcgaagtatgatgaaatgagtattctcttcacagttttggttactgaaactactttggagaatggattaatacatctgagaagcagagacaccacaatgaaggaaatgatgcatatatccaaattaaaagactttttgattaagtatatatcatcagctaagaatgtatagatttttatatttgtataataaatattcttctctcctaannnntgtcttatgttcacttagatttatttctagcccctttgcacttataaaggggaccatttgtggtgcttgctttcattcaggttaatatttttaatgtctttcattggtattcaggaatatgcttcagttccaagaaaagaaaaatctattatactgtagttaagccaaattgggggttgttttctttacatacaagaagctctaggggtaaactgtcccaaggtaagtattatgttctataagttagcgacccaggagtttcctttggttcgccagttaggaagcggggtataacggggtcggaacaaggggggggggttcagcaaaatattttgtgaggaagttagaaaaggttgagattctttataggggaaatgcaaacggggagtatcgtgggaa

SEQ ID NO: 124771 - DNA, 1045 bp, Homo sapiens
ggtttataaatggtttgtagctaacaaaaaaaggaatcctttctttttcttacactccacttccaaaccatcagcaaatcctgtttgactctaacttcaaaacgtatcctgagtctgaccacttcctagcctgtctactgctaccaccctgctataagccaccgccactcctcctcccctgatagagtggccctgttaaaaggtgcatgttgtgttgctcctttgctcagaacactccaggaaagcttctcatctcactcaggaaaaaccgaagccctctttttgatctgctgttctccacctcactcagtctgctccagcagcactgaccttgctatttctagaacatgctggagatgctgccagctcagagccctgtcatttgtattccccattgcctagagtgctctttcttcatcatccatgtctcgtccccccaccttctttcgagtgtttgctcaagtgtcaccatagggagagaaccttttctgaccaccttaaagttgctgaaaacctcccccagcctgcctcttgccagcatgttccatcttcttccttttttagcacctaccaccttcacatatattatttacttatttttattgtctgtttctccctgccacgagagacggagatttttacccctagcacctggaactgttcctggtatcagaggcattaaaatgtttgttggatggactaatgaatgagaagagaaggctgggctgaatggctcacgcctataatcccagcactttgggaagccaaggtgggtggatcattcaggtcaggagttcgagaccagtctgtctgggcaacatggcaaaacttcatctctacaaaaaaatactaaaactagctgggcgtggtggcgtgcacctgtagtccctgctacttaggaggctgaagtgggaggatggcttgagcccagaggtgggggttgcagtgaggcagtgagtggagcattctagcctgggcaacagagccagaccctttaaaaaaaaaaaaaaagcaaatttcatttaaaaatttttttcattcaaaa

SEQ ID NO: 124772 - DNA, 1153 bp, Homo sapiens
ggtttataaatggtttgtagctaacaaaaaaaggaatcctttctttttcttacactccacttccaaaccatcagcaaatcctgtttgactctaacttcaaaacgtatcctgagtctgaccacttcctagcctgtctactgctaccaccctgctataagccaccgccactcctcctcccctgatagagtggccctgttaaaaggtgcatgttgtgttgctcctttgctcagaacactccaggaaagcttctcatctcactcaggaaaaaccgaagccctctttttgatctgctgttctccacctcactcagtctgctccagcagcactgaccttgctatttctagaacatgctggagatgctgccagctcagagccctgtcatttgtattccccattgcctagagtgctctttcttcatcatccatgtctcgtccccccaccttctttcgagtgtttgctcaagtgtcaccatagggagagaaccttttctgaccaccttaaagttgctgaaaacctcccccagcctgcctcttgccagcatgttccatcttcttccttttttagcacctaccaccttcacatatattatttacttatttttattgtctgtttctccctgccacgagagacggagatttttacccctagcacctggaactgttcctggtatcagaggcattaaaatgtttgttggatggactaatgaatgagaagagaaggctgggctgaatggctcacgcctataatcccagcactttgggaagccaaggtacttaaacttcacccttgtttagcccctattaaggttgctttggatgtaggaagaggccccacattggaactaagacaggtttgtcaagggctatttaatgagttactagaaaatgggatttctgtgtggcctggttatttggaaactatgcagtcctcattggaacaactttattcgaagtatgatgaaatgagtattctcttcacagttttggttactgaaactactttggagaatggattaatacatctgagaagcagagacaccacaatgaaggaaatgatgcatatatccaaattaaaagactttttgattaagtatatatcatcagctaagaatgtatagatttttatatttgtataataaatattcttctctcct

SEQ ID NO: 124773 - DNA, 617 bp, Homo sapiens
tttttttggagatggtgtctcactctgtcacccaggctggagtatagtggcacaatgtctgctcactgcagcctccacctcctgggttcaagtgattctcatgcctcagcctgctgagtagctgggattacaagcatgcaccaccatgcccagctaatttttgtctttttagtagaggtggggttttaccatgttggccaggctggtctcgaactcctgaactcaagtgattcgtccaccatggcctcccgatgtgctgggattacaggcatgagccactgctcccagcccagtttatcttattaactatcagttcgacgataactgtgtgaaatacaactggtagaatagagtcccaggtatcagaaagtttactgcctttgagggcaaattcttgtgaatctttaaagtatcatatgcaattcaaataggtttaaaatgtcagtacatatatgtattaatgaagactgtggttgatcatgaataattaacagaagctgaggatttaaatttgtggggttttctctcttttttttttgttctgtgactctagctaaaggtggttatttaagtatttttaaaaattacatgaatatccaggtgaacaatgatttaca

SEQ ID NO: 124774 - DNA, 1491 bp, Homo sapiens
gcctgcgccgtggcctctccggattctgttaacggtagtggtggcttgttgggatccgttgagtgatgggagagtgtgctctttaacttcggagagagatgcgctctcgtgtagccgtcagggcctgccataaggtctgcaggtgcctgttgtctgggtttgggggtcgagtagatgcggggcagccggagctgttgacggaaaggagtagccccaaaggagggcatgtgaagtcgcacgcggagctcgaggggaacggcgagcacccagaagcccccgggtctggagagggaagcgaggcgctgttagagatctgtcagagaaggcatttcctaagtggaagcaagcagcagcttagccgggattctcttctgagtgggtgccaccccggcttcggacccttgggcgtagagttgcggaagaacctggccgcagaatggtggacctcggtggtggtgttcagggagcaggtattcccggtggacgccctccaccacaaaccaggccctttgctacccggggacagtgccttcaggttagtttctgcagaaactctacgcgaaatcttgcaagacaaagagctgagtaaggaacagctagtagcatttcttgagaacgtattaaaaacttctgggaaactacgggagaaccttcttcacggtgccttggaacactatgttaattgcctggatctggtaaacaagaggctaccttatggccttgctcagattggagtgtgttttcatcctgtttttgacactaagcagatacgaaatggtgttaaaagtattggtgagaagactgaagcttcgttagtatggtttactcctccgagaacttcaaaccagtggcttgatttctggttacgtcatcgactccagtggtggagaaagtttgccatgagtccatctaacttcagcagcagtgactgtcaggatgaagaaggccggaaaggaaacaaactttactacaattttccctggggaaaggagttaatagaaaccctgtggaacctaggagatcacgaacttttacacatgtatcctggcaatgtgtctaaattacatggccgagatggacgaaaaaatgtggttccttgtgttctctctgtaaatggggacctagaccgaggcatgctggcctacctctatgattctttccagctgacagagaactcctttacaagaaagaaaaatcttcatagaaaggtacttaaacttcacccttgtttagcccctattaaggttgctttggatgtaggaagaggccccacattggaactaagacaggtatgatgaaatgagtattctcttcacagttttggttactgaaactactttggagaatggattaatacatctgagaagcagagacaccacaatgaaggaaatgatgcatatatccaaattaaaagactttttgattaagtatatatcatcagctaagaatgtatagatttttatatttgtataataaatattcttctctcct

SEQ ID NO: 124775 - DNA, 1131 bp, Homo sapiens
gcctgcgccgtggcctctccggattctgttaacggtagtggtggcttgttgggatccgttgagtgatgggagagtgtgctctttaacttcggagagagatgcgctctcgtgtagccgtcagggcctgccataaggtctgcaggtgcctgttgtctgggtttgggggtcgagtagatgcggggcagccggagctgttgacggaaaggagtagccccaaaggagggcatgtgaagtcgcacgcggagctcgaggggaacggcgagcacccagaagcccccgggtctggagagggaagcgaggcgctgttagagatctgtcagagaaggcatttcctaagtggaagcaagcagcagcttagccgggattctcttctgagtgggtgccaccccggcttcggacccttgggcgtagagttgcggaagaacctggccgcagaatggtggacctcggtggtggtgttcagggagcaggtattcccggtggacgccctccaccacaaaccaggccctttgctacccggggacagtgccttcaggttagtttctgcagaaactctacgcgaaatcttgcaagacaaagagctgagtaaggaacagctagtagcatttcttgagaacgtattaaaaacttctgggaaactacgggagaaccttcttcacggtgccttggaacactatgttaattgcctggatctggtaaacaagaggctaccttatggccttgctcagattggagtgtgttttcatcctgtttttgacactaagcagatacgaaatggtgttaaaagtattggtgagaagactgaagcttcgttagtatggtttactcctccgagaacttcaaaccagtggcttgatttctggttacgtcatcgactccagtggtggagaaagtttgccatgagtccatctaacttcagcagcagtgactgtcaggatgaagaaggccggaaaggaaacaaactttactacaattttccctggggaaaggagttaatagaaaccctgtggaacctaggagatcacgaacttttacacatgtatcctggcaatgtgtctaaattacatctaaaggtggttatttaagtatttttaaaaattacatgaatatccaggtgaacaatgatttaca

SEQ ID NO: 124776 - DNA, 1142 bp, Homo sapiens
  misc_feature (740)..(743): n is a, c, g, or t
tggtagagagaagttttcaccgtgttgcccaggctggtctcaaactcctgagctcaaggaatccacctgcctcagcctcccaaagtgctggaattataggcatgtaccaccatgcctggccaaattaatttctttctgccaaacatctaagtggagaaatctggggggcagctgaatatgttactacatggtgtttttatgacctcagctaacttctgttttcacacagaaaattataactgttaagaaactgtttgttaatacttgtgttatatttaaacttgtgttatatttaaacaaactatgctttttcccctttcctgtcttctccctcccccatttaattgccttaggtacttaaacttcacccttgtttagcccctattaaggttgctttggatgtaggaagaggccccacattggaactaagacaggtttgtcaagggctatttaatgagttactagaaaatgggatttctgtgtggcctggttatttggaaactatgcagtcctcattggaacaactttattcgaagtatgatgaaatgagtattctcttcacagttttggttactgaaactactttggagaatggattaatacatctgagaagcagagacaccacaatgaaggaaatgatgcatatatccaaattaaaagactttttgattaagtatatatcatcagctaagaatgtatagatttttatatttgtataataaatattcttctctcctaannnntgtcttatgttcacttagatttatttctagcccctttgcacttataaaggggaccatttgtggtgcttgctttcattcaggttaatatttttaatgtctttcattggtattcaggaatatgcttcagttccaagaaaagaaaaatctattatactgtagttaagccaaattgggggttgttttctttacatacaagaagctctaggggtaaactgtcccaaggtaagtattatgttctataagttagcgacccaggagtttcctttggttcgccagttaggaagcggggtataacggggtcggaacaaggggggggggttcagcaaaatattttgtgaggaagttagaaaaggttgagattctttataggggaaatgcaaacggggagtatcgtgggaa

SEQ ID NO: 124777 - DNA, 358 bp, Homo sapiens
gcccacctagacctcccaaagtgctgggattataggcgtgagccaccaagcttagccaacatctgtctttatgctgtgttaacgttattactactattaatgtgtctattgacaaaaatgatttgggtttgtggactagatgtatacaatgattgatttatcttttgacaggtgccttggaacactatgttaattgcctggatctggtaaacaagaggctaccttatggccttgctcagattggagtgtgttttcatcctgtttttgacactaagcagatacgaaatggtgttaaaaggtataaaaagtggcaaataacttggccttgtatttaaatagtcaaaaaccagtcatttcc

SEQ ID NO: 124778 - DNA, 1592 bp, Homo sapiens
gcctgcgccgtggcctctccggattctgttaacggtagtggtggcttgttgggatccgttgagtgatgggagagtgtgctctttaacttcggagagagatgcgctctcgtgtagccgtcagggcctgccataaggtctgcaggtgcctgttgtctgggtttgggggtcgagtagatgcggggcagccggagctgttgacggaaaggagtagccccaaaggagggcatgtgaagtcgcacgcggagctcgaggggaacggcgagcacccagaagcccccgggtctggagagggaagcgaggcgctgttagagatctgtcagagaaggcatttcctaagtggaagcaagcagcagcttagccgggattctcttctgagtgggtgccaccccggcttcggacccttgggcgtagagttgcggaagaacctggccgcagaatggtggacctcggtggtggtgttcagggagcaggtattcccggtggacgccctccaccacaaaccaggccctttgctacccggggacagtgccttcaggttagtttctgcagaaactctacgcgaaatcttgcaagacaaagagctgagtaaggaacagctagtagcatttcttgagaacgtattaaaaacttctgggaaactacgggagaaccttcttcacggtgccttggaacactatgttaattgcctggatctggtaaacaagaggctaccttatggccttgctcagattggagtgtgttttcatcctgtttttgacactaagcagatacgaaatggtgttaaaagtattggtgagaagactgaagcttcgttagtatggtttactcctccgagaacttcaaaccagtggcttgatttctggttacgtcatcgactccagtggtggagaaagtttgccatgagtccatctaacttcagcagcagtgactgtcaggatgaagaaggccggaaaggaaacaaactttactacaattttccctggggaaaggagttaatagaaaccctgtggaacctaggagatcacgaacttttacacatgtatcctggcaatgtgtctaaattacatggccgagatggacgaaaaaatgtggttccttgtgttctctctgtaaatggggacctagaccgaggcatgctggcctacctctatgattctttccagctgacagagaactcctttacaagaaagaaaaatcttcatagaaaggtacttaaacttcacccttgtttagcccctattaaggttgctttggatgtaggaagaggccccacattggaactaagacaggtttgtcaagggctatttaatgagttactagaaaatgggatttctgtgtggcctggttatttggaaactatgcagtcctcattggaacaactttattcgaagtatgatgaaatgagtattctcttcacagttttggttactgaaactactttggagaatggattaatacatctgagaagcagagacaccacaatgaaggaaatgatgcatatatccaaattaaaagactttttgattaagtatatatcatcagctaagaatgtatagatttttatatttgtataataaatattcttctctcct

SEQ ID NO: 124779 - DNA, 1997 bp, Homo sapiens
  misc_feature (1595)..(1598): n is a, c, g, or t
gcctgcgccgtggcctctccggattctgttaacggtagtggtggcttgttgggatccgttgagtgatgggagagtgtgctctttaacttcggagagagatgcgctctcgtgtagccgtcagggcctgccataaggtctgcaggtgcctgttgtctgggtttgggggtcgagtagatgcggggcagccggagctgttgacggaaaggagtagccccaaaggagggcatgtgaagtcgcacgcggagctcgaggggaacggcgagcacccagaagcccccgggtctggagagggaagcgaggcgctgttagagatctgtcagagaaggcatttcctaagtggaagcaagcagcagcttagccgggattctcttctgagtgggtgccaccccggcttcggacccttgggcgtagagttgcggaagaacctggccgcagaatggtggacctcggtggtggtgttcagggagcaggtattcccggtggacgccctccaccacaaaccaggccctttgctacccggggacagtgccttcaggttagtttctgcagaaactctacgcgaaatcttgcaagacaaagagctgagtaaggaacagctagtagcatttcttgagaacgtattaaaaacttctgggaaactacgggagaaccttcttcacggtgccttggaacactatgttaattgcctggatctggtaaacaagaggctaccttatggccttgctcagattggagtgtgttttcatcctgtttttgacactaagcagatacgaaatggtgttaaaagtattggtgagaagactgaagcttcgttagtatggtttactcctccgagaacttcaaaccagtggcttgatttctggttacgtcatcgactccagtggtggagaaagtttgccatgagtccatctaacttcagcagcagtgactgtcaggatgaagaaggccggaaaggaaacaaactttactacaattttccctggggaaaggagttaatagaaaccctgtggaacctaggagatcacgaacttttacacatgtatcctggcaatgtgtctaaattacatggccgagatggacgaaaaaatgtggttccttgtgttctctctgtaaatggggacctagaccgaggcatgctggcctacctctatgattctttccagctgacagagaactcctttacaagaaagaaaaatcttcatagaaaggtacttaaacttcacccttgtttagcccctattaaggttgctttggatgtaggaagaggccccacattggaactaagacaggtttgtcaagggctatttaatgagttactagaaaatgggatttctgtgtggcctggttatttggaaactatgcagtcctcattggaacaactttattcgaagtatgatgaaatgagtattctcttcacagttttggttactgaaactactttggagaatggattaatacatctgagaagcagagacaccacaatgaaggaaatgatgcatatatccaaattaaaagactttttgattaagtatatatcatcagctaagaatgtatagatttttatatttgtataataaatattcttctctcctaannnntgtcttatgttcacttagatttatttctagcccctttgcacttataaaggggaccatttgtggtgcttgctttcattcaggttaatatttttaatgtctttcattggtattcaggaatatgcttcagttccaagaaaagaaaaatctattatactgtagttaagccaaattgggggttgttttctttacatacaagaagctctaggggtaaactgtcccaaggtaagtattatgttctataagttagcgacccaggagtttcctttggttcgccagttaggaagcggggtataacggggtcggaacaaggggggggggttcagcaaaatattttgtgaggaagttagaaaaggttgagattctttataggggaaatgcaaacggggagtatcgtgggaa

SEQ ID NO: 124780 - DNA, 2025 bp, Homo sapiens
gcctgcgccgtggcctctccggattctgttaacggtagtggtggcttgttgggatccgttgagtgatgggagagtgtgctctttaacttcggagagagatgcgctctcgtgtagccgtcagggcctgccataaggtctgcaggtgcctgttgtctgggtttgggggtcgagtagatgcggggcagccggagctgttgacggaaaggagtagccccaaaggagggcatgtgaagtcgcacgcggagctcgaggggaacggcgagcacccagaagcccccgggtctggagagggaagcgaggcgctgttagagatctgtcagagaaggcatttcctaagtggaagcaagcagcagcttagccgggattctcttctgagtgggtgccaccccggcttcggacccttgggcgtagagttgcggaagaacctggccgcagaatggtggacctcggtggtggtgttcagggagcaggtattcccggtggacgccctccaccacaaaccaggccctttgctacccggggacagtgccttcaggttagtttctgcagaaactctacgcgaaatcttgcaagacaaagagctgagtaaggaacagctagtagcatttcttgagaacgtattaaaaacttctgggaaactacgggagaaccttcttcacggtgccttggaacactatgttaattgcctggatctggtaaacaagaggctaccttatggccttgctcagattggagtgtgttttcatcctgtttttgacactaagcagatacgaaatggtgttaaaagtattggtgagaagactgaagcttcgttagtatggtttactcctccgagaacttcaaaccagtggcttgatttctggttacgtcatcgactccagtggtggagaaagtttgccatgagtccatctaacttcagcagcagtgactgtcaggatgaagaaggccggaaaggaaacaaactttactacaattttccctggggaaaggagttaatagaaaccctgtggaacctaggagatcacgaacttttacacatgtatcctggcaatgtgtctaaattacatatgcagagacactcacctacataactacaatccagtcatcaaaatcaggaaattaacagtaatccactattgccacagagccctacaaattgaactgattatctcaataatggcatttataggtccaagatcttgtctttcatgtagttgtcatatgcctttacactccttcaaatgaacaattcctcttgtcttgcgtgaccttgacatttttgaagagtacagtctagttaatctgtagaatatgccttggctgggatctgtctgctgtttccacgtgatttatgtatttttgtcgggagtactacagaagtggtagtactgagaagctctcttctcagtgtgtcatatgaggagtgttactggtgatgttaacttttatcatttagttaagatggtttctactagatttctccagtgtaaagctaataaatagtttgtatttattaattaacggccaggcgcagtggctcacgcctgtaatcccagcactttgtgaggccgaagtgggaggatcatgaggtcaagagattgagaccatcctggccaatgtggtgaaaccccatctctactaaaaatacaaaaattagctggatgtggtggcttgcccttatagtctcagctacttgggaggctgaggcaggagaatcgcttgaacccgggaggtggaggttgcgatgagccaagatcgtgccactgcactgcagcctggcgacagaacgagactctgtctcaaaaaaaaaaaacaaaaaaattaactagtaattaataagtgttgtgggcagatactttaagatgatgcagacaatttctttgtcaccaaattttgccttactggttgcagcatccattgatgattcttgcccagatcagttagtaatgtgaggtttgccaaatggtgatttttttttttctttatttgagacaggatctcactctatcactcaggctgaaacac

SEQ ID NO: 124781 - DNA, 176 bp, Homo sapiens
cccctttatgtaaaacacagggctccccactttgagaatcaccaccctcggcgattcctgatcaagtttggagacagcccaaagcagaatggcagccttaggggcctggccacagaaggcacctggttcgtccttggtggccagagccgcctgatcgtgttccttctgtgctgtgg

SEQ ID NO: 124782 - DNA, 307 bp, Homo sapiens
tcctcattctgcacaggcttcaatctgcgtccctgcccccaacccccgactccatcctggttggtgcctggaggggctccctgcctcagcctgcctccttcagccggggggatctgagctccacatgttcctgcagggagccctctggaataggactcagccaggaaaagaaatgaggctgacacgggcctcagcatggatgagccttgaggacgtcacgttcagtgagagacgccagacaccaaaggccacacagggaaggtttgaccccatttctatgcaatgtccaggacgtcgacgcggccac

SEQ ID NO: 124783 - DNA, 416 bp, Homo sapiens
ggggcttactcccacgatcacaatattgatgaatgtctgacttatcttagaagtcctgaacacccctctcttcttcctcatttatttacatctcatgactggtcaggtgagaggtagctctgtgctgtgtcatcctaacacaggaatccagaaggaaggagggaccgtcaagatccccattgctatagaaaagagaaaaaagcatgcggaatagaacgctgtttcttggagatttctcctgaaaaagtcacatgttatttcttctcacctccatcggcaaaaaaaaaaaaaaaaaaaaaagtcatgtggccatgggaaaatttaagtaggtgggatggaacagtcagaatgcattcataaaaaatgaactgaaaatatttggagaacagcacggggttgtaagggatgcttgtggg

SEQ ID NO: 124784 - DNA, 601 bp, Homo sapiens
tcagcgccgtcttttaaagttgagtttcttgttattctcacctgatgtaccttatttatcccacacccaccccaataacatatcgtgctcactgttatctttgaggcaacccttgaattttactcagcctggagcgctcttcacatgtcttgtccagagccagttcggactcattcttcagccgtgcatcagtcagtgggggctagcttaaactgtggtgacaaacaacctccaaatttcagtggctcaaaaatcttcttcctcatttatttacatctcatgactggtcaggtgagaggtagctctgtgctgtgtcatcctaacacaggaatccagaaggaaggagggaccgtcaagatccccattgctatagaaaagagaaaaaagcatgcggaatagaacgctgtttcttggagatttctcctgaaaaagtcacatgttatttcttctcacctccatcggcaaaaaaaaaaaaaaaaaaaaaagtcatgtggccatgggaaaatttaagtaggtgggatggaacagtcagaatgcattcataaaaaatgaactgaaaatatttggagaacagcacggggttgtaagggatgcttgtggg

SEQ ID NO: 124785 - DNA, 704 bp, Homo sapiens
aactgcctgaggacaagcagcattctaggaagtggagttgcattaatttgtctcaccccggacatccatcccctaacatttgctctatgccctgcctatgcataacacctagcacgtagtactcttacgtactctctgcactgtcttcactttgttacataggaggaaaccaggctcatgtaagttaagtaacttgcctgagatcacatagctgataagtggcagaaccgggattcaaactcagaggttggccttattgaagaattcatatttctacccgtcatgccatgctgcctccattgaccctcttaaggggctcttcaagcagtattgctttcagggtctgcgtggcctcagttagttagatttgcttgttaaaaggaaatggtgacacgtattaaaatgcttctgaattttaaaaatcatggtgtaaaatccctgcgatcacattgctctaaatgtatggacttgaggtttatttttgcaattcatcgtgtagcatttacataggaatcctgtcctgtccttagcagatcaggagtaatacttaaaaacacagatagaaggctgggcccggtgtttcacgcctgaaatcccagcactttgggaggctgaggcaggcagatgacgaggtcaggagatcaagaccatcctggccaacatggtgaaatcctgtctctactaaaatacaaaaaagccaggtg

SEQ ID NO: 124786 - DNA, 563 bp, Homo sapiens
agccctgttaaccatccctccatcacgttacatcactgtaacactttaaatccagctactctaccacctctccctgctaatgaagagcttcactccatttctcatcattgccttaacactgtagaaatggtctcaaagccacgagcaaacctcttagctacccctttggacaacccagacttacttctgttttgtgatggctcttgtagatgaaattgccaaggaaacataacaactggctagttttcccacatgaaacacttgaggtgtgctctttgctcattgtaagatcagcccaagctgctgaaccgatagctgtcactcaagtttgcacactggcaaaagaaaaaatggccactctttacaccgactccagatatgcctttggagtctgccatactgttggcataatctggaaatgccttgaatttttaacttctgctggtgcttctattgccaatgggcatataattgttgatctattacaggctattttcctccctactaaaattactgttgcttattgttcagcccatactaaggagtctggtattgtatctctt

SEQ ID NO: 124787 - DNA, 442 bp, Homo sapiens
ttttgcagctggttggtggaggaagcatcagtaacagatttatttctgagaaagacaagtggttaatttggaaaattctaaaaaattcttcctaagcattaatcctcaattttaagggatctgcctgtataaatatttgctttggtttgataaattgtgctctgttcatttccaagcaagttattaagaacataaaatagtcttcttcattcattcctgctggccagacactgtgttcaccagggtggtgaggggatgagtaggaggttgaaagatatattctgaattctgaggcacaacttggaattcacttctcgtaaaaatcataaaaaataggttcttaggtgttctgtgtgggaaatgcgcgcgggaggagacacacacacaatacctttaagggtaaacaagctttatcccaaatggcagtgcagatataagcaaa

SEQ ID NO: 124788 - DNA, 728 bp, Homo sapiens
ggaaaaaaggacagtgattcctgagagatgacaacaaataacatgagccctccaattgccccagcttaatgctttgagagagtttctaggctgcaagacagggagggagaactgaagtagagtccagccaacttcctgagttaaggagatagaactgagagtccagggaggctatggcagttagagtccacaggacagactgttagagaggagagagctgcttagagagagaaccttagagatctgcattgagtcaccttgactgtttggcagagtatggatatgttcctgtatgtgaggaaactatttgaggccagggaaagaaccatgtgaaaaggaacagaggaacagttcctggcaatcacacagcactgggaatagtacatgtccctaccagccagattggagacatttatggttcatattttatggtgccttgtgtagaatactcaggaagatatttaaaagtggggaataattacccctagcaggagcactacttcacacccacctaacaagtaataaaaccaagacctgaagggatcaaactgtttccaagtaacataaagtctaagaagatttatggaaatccagaaatacccagcacccaacaagttaagattcacaatgtctagcattcagtcaaagatgaccaagtgtgcaaagaagtgagaaaacgacctctaacaagaataatcagttgagaccaaactgtagcttaaatagat

SEQ ID NO: 124789 - DNA, 299 bp, Homo sapiens
cagatgtcttaatgatctccataataagtaaaatttcaggtttttgcccaatgtcttggcattgggtaggtcaaccccaaagtatgattttataatcaggtttctgaagttgccactttacttggtgactatgactgaagtacgttataatagccagtacaataggcctccttaccaaatcgcaccaggaaattaagcctcaaactggctctgtgttgtgtgtactacaccatgatcatgtttaattttctaattagaaagaccttctcttaatgagtcagatgttaagactcatggaa

SEQ ID NO: 124790 - DNA, 362 bp, Homo sapiens
aattcataccttataaatttccattcaataaattatatgctgcacagaaggcattttacacgaatgaaaatatgcaataactatttgctaaatcagaaaataaacaacaaacagaactaccacttagcccagcaatcccattactgagtatctatccaaaggaaaataaatcattctaccaaagagaatgagctttttaaagagtttctcatctctcaatctaactagaaatcctgttaacatccagtgaatataataacatgtgcccggagctacacatgttggctggttgactgtgaattatggtcatttttgcactgcctcgttcactgctggcctccagaagcctaaatgttgatcca

SEQ ID NO: 124791 - DNA, 303 bp, Homo sapiens
agacaagatgtacatggaaaacaagatgtacatagataacaattcttgacaagttgtgctaatagccaagtggatgaaacttaactaacaacgctgctccaggacagagtgtggaaggtcaccactgtatcatcctcttccatttcaacgataaaattcctgaggaggatcactccagtctggaacctggcttgtttcaaatagagtattaactggcatgccttctcccttgcaattggtgttgccttcttgggagactgagtctgttgaagtttgaagggtttttgcttctggctctgcctg

SEQ ID NO: 124792 - DNA, 119 bp, Homo sapiens
cctgttatttttcttatctgtaaacaaggaataaaacctagactgttagcaggattgaattcactaagataatgcacataataagcactcaacaaattataatcatttgcatttttaat

SEQ ID NO: 124793 - DNA, 168 bp, Homo sapiens
cattttaccttcatataagtctgtgaaatgacaaggctgttattttcagatactacactcatagtgctcaagtgtgacatttattgaaacttcaaaagtttagatttaagaattaatttaatccaaataaactaaacttgcaattctaaatatggccaccaggtggtg

SEQ ID NO: 124794 - DNA, 309 bp, Homo sapiens
tggaggcagcatagtacctcactaaaagcacggactgcatggctttgaatccccactccactccttactggctctgtgatcttgaacaggtaattgacctcagtgcctcagttttttcatcggtaaataataatagtacctatctcataagaattaaatgagaagatgtgtggagctcttagaatagtgcctgacaggcaggcagtattatcatttttagaagccattcccagttgtggccagcaaaatgtaggatggtctcattgtgtttaattgaaatacctctcatagtattccagagtgagaaag

SEQ ID NO: 124795 - DNA, 312 bp, Homo sapiens
actcctgattcagcatttcctgctgtaccatttctctctctctttctgtttttttataatagagatggagtcttgctatgttactcaggctggtccctaactcctggcctcaagcagtccttcaacatcagcctcccaaagtactgaaattacaggcatgagccacagcacttggccctactttttttcatagtgcttttaaaccttatctgctgggcgcagtggttcacgcctgtaatcccagcactttgggaggctgagacaggtggatcacctgaggtcaggagtttgaaaccagcttggccaacatga

SEQ ID NO: 124796 - DNA, 213 bp, Homo sapiens
caccagattgtggaatgccattaaagcagtgccaagggggaaatttgtagcactaaatgtctattcagttgatcctacaatcttacagtgtagttacatcccaagaaacccatcataagttgaatataccctaagtcaaaaatgcatttgatacacctaacctattgaacttcatagcttagcctagcctaccttacatgtcctcactacatg

SEQ ID NO: 124797 - DNA, 119 bp, Homo sapiens
taaacacattagaagagaaccatatacgcatctattttgccccaaattctgatcacttgatatatcaggtattcaagtgtcatcataaaatctccaagttagaaggatcatctaggtca

SEQ ID NO: 124798 - DNA, 395 bp, Homo sapiens
tgggaattggataaaaggcacccatagagggaaaagagagacacgaaggacatcctcatctaaggcacctgggtggaaatggaattaccctgctggaatggcctgaatttcttgtgtcctcccaaatccctatgttggatcctcacccacaggtgatggtgttaggtggtgtgtcctttgggaggtcatgagggtggagtctcatgaatgggacgagtgcccttataaaagggaccccagagagatccctcaccccttccaccatgtgaggacacagtgaaaaggtgccatctatgaaccaggaagcgggtcctcgccagatactgaatccaccgtgtcttgatcttggactttccagcctccagaaccatgaggcaaatgtctgtcatttgtaa

SEQ ID NO: 124799 - DNA, 305 bp, Homo sapiens
gcttccctacacagccttgacgttctcaagtggagggaccacatctgattcattctgaattattgatgcagagtgcataaggtcttgtaatatggagccgaatttctgaaaggacctttgccttcatttttctgaaaacttagagaatgcaattcaaatcgaataagattgcttggaaacaaggctagagtgaggcaccctcacaaaccactatgtgtaaaatctgctgtttcagaggaccatggatgtgaaaggctcagccatgaccagatcccttctcacactgtccccacaggcaagagact

SEQ ID NO: 124800 - DNA, 183 bp, Homo sapiens
attctcacagctgtggagccaacgccacctgtaacagcttccctgaccccagccccatggggtcactctggacttcagggtttctaaccagccggcccttcagggccctagcccagcctgctccctccacctcaagctttacccagggcagcccccactgtcaatcataactctgcctaaaca

SEQ ID NO: 124801 - DNA, 576 bp, Homo sapiens
aaatattaacaactacatttcaagttctttgtcagcattcttctttttacaaatgaggaaattgaggctcagagagattaaatattttttccatagtcctattataagtgatagaaaggagttgaattaattttatttgatcccaaagcccttggcttttctgctttgtctgtaatatagcctgccttaagacttattttaacattgtctttttggtaagattagaaactttttgatgaaagccattttccactttacctagtgtttaaaaatgtacgtgaggctggcgcagtggctcatgcctgaaatcccagtattttggaggccgaggcaggaggaccgcttgagcccaggagtttgagaccaacctgggcaacacagtgggaccctgtctctacaaaaaatacgaaaattagctggacttggtggtgtgtgcctgtggtcccagctactcaggaggctaaagtgagaggatttcttgagtgtgggaggttgaggctgcagtgaaccatgatggcaccattgcacttcagcctggtcaacagcaacagaacgagaacctgtctcaaaaaaaaa

SEQ ID NO: 124802 - DNA, 331 bp, Homo sapiens
gtctagaacacccttccctacctagtcacatggcctgatccttcacctctcttgggtctttgctcaaatgtcccccttcagtgaggccttctcagatcaccctagtacttcccagcaatgctccattccgattcatctttcctacacacctgtctccactcagtgctctaaatattttgcacattgattatgtttattgcctgctccctgcaatacctgagaatacaaattccatgatgggggacattcatatgtgtctgggtctctgtgtccgccattcacaacagtgcttggcacataacagcccctccatcattactgaacaaacgaa

SEQ ID NO: 124803 - DNA, 758 bp, Homo sapiens
gggttggacctctggatgcaaagtgtcctcagaaccctcaggcatcccgctaggtcagtcggtcctcacattttgacagccccattttacttgtaagaaaactgaggctctggagaccaaagtcacctgggaaatgagtagcagatacagcggactctgtgcagagacctcagctgggctaggccagggcagagagttgaaattgctcctgcttccttgtccaggactgttcgctccgttcctagtggccaccgggcttggctcttggagtctgaaatgaaatctctggttgtgtgtgcagcaccaactatgcacagggcaccctgctgagctctctctaaaccggtctcattgtgtccttctgcagccttgtgaggtgggcactgttatcctcctcatttgacagatggggaaactgggactcagcagaggccacccagttaatgtggaagagcctcagcccggagcgggggctgactgggagctgttgcgctcagcaccacagcctcagctagcagcaccccaagtccaggctcctcaagaacagcactcctgtgtcatctgtccgtccatcccagcaccccgcacacagtcagcagggggtgggcagtgatggcattttgtggaattgagtggaaactgccagcctcacccagtgcagccacgttttagttgtagaccacgtcactgctgcgtacctgtctgaatgtctcacacatgcactcactgcaacatcgacactttgcacaaacacacac

SEQ ID NO: 124804 - DNA, 455 bp, Homo sapiens
tggacatacatgcatggtgtgtgtgtctacataagcacacacagatgcatactccctagctctgtaattctatctactgagagcgccttggagcagtgatcatcttccctccccagtggtatgaacgtttctagcacctaacacttggcccctaataccattctccaataaaaggaaccagacatctctggagaattgtaattcactaattacagcacaggggtagaaaaagtacaggatcaatctggaatatcttgtggtagtaagcaagaaagtgctcaaggaatgctaaagaatgtcaaaaagacataggatcaagcttgaaggagatcccactggccaaacagggtaatttcagcatcaataccaatagtaatagcaatggattataacctactgaacaaaataagaaatcatgaatcaatatagatataaataaatgagtgaataaatgg

SEQ ID NO: 124805 - DNA, 576 bp, Homo sapiens
tggggaggctgaactaacttgtactgagagtaataggctggatatcatggaaatgggaattggcactaatagctgctctcagataaaacttttcctgtgccttcttttgtatatcacatgatactatgtccaatgtacagtcaaacttaaaatagaaaaaaaatcaaatacatggtagtgagttttcaaactcatataacctgggctactttcacttaacacatagttactcataaaatgtcacttttttatgaattcaagaagttttttgggggtaaacttagtgcctcatgccttgggccatcatgtaggttacactctagtctctgtagtgaatcttagttactctctgactttggaacacttggtctttgcctccacgtgtgaaatacatttatagcttataaacaatagctttccctttaaaaataacatgtggatttgaaaaaacattgagatcttttctgtatttctgcctcagtgtcattcattgacattttactgtgtcatttctgtgttgtgttttgtgactaaaccccagctattccctatttttaaactgatagatgggttttg

SEQ ID NO: 124806 - DNA, 511 bp, Homo sapiens
tcttcagccataccgaccttccttctctttcatcttagggcctttccattggctgctcccttcaccttaagcgatctccatggctaataatcttgcctccttcaagtgttttcttataggtcatcttcccaaggaggtctactctgagtgccttatttaaaattgcagcctatcccctccttccaatcctgatgggccttaccttgctttacatgaattcttcttttcctctatagcactttataattttccagtatggtgcataagttacttattaatatatacattgtttacggtggttctaccttcgctaaaatctaggctcttaggctccatgagggcaggaatttttgtcgtcttgttcacagttgtattctcaacgcctaaaacagcgcttgcaatagtatgtgctggattaaaaattagctgactgaatgaatatatgaatggatgctgtagagaagaataaaaagaatgggtcaggaggcgacaagagcaagactccggtctc

SEQ ID NO: 124807 - DNA, 154 bp, Homo sapiens
aaaaataaaaaaagactccaccagtgattcctgtgtgtaaccaggatcgaaaaattctgctctaaagaatttctgtctcattctctccctttcccctcccctcttcctagggttggggattggaactggaggaagaattattttggaacaggtg

SEQ ID NO: 124808 - DNA, 276 bp, Homo sapiens
caacactccaggcattgggaccatgatgatgaagaggacagaccagccctgtcctcaggaagctgacttcccatttggggcagcaagcagtaagcagataaacagatctgttgtataagaaaaagtgcgggctgggcgcggtggctcacgcctataatcccagctactcgggaggctgaggtggggagactgcttgaacctagaagtttgatcattctgggcaacatggcgaaaccccatctctattaaaaaaaaaattacaaaaactcgccaggc

SEQ ID NO: 124809 - DNA, 362 bp, Homo sapiens
taagggaatggacccggggcaatgaggcattgcaggctggcatcaggggtattttggtcattgtaaaagcaggagagatccccaccccaaatttggtttggatattgaaactaatgatggtacacacacaccaagagggtaggaagaggcttattagttatataagtgaaatttctagggagcagagcaggcttctcacacaattccagaatgactagagagccaggaaaagagactggtgtgggtttttactgtggcacgagagtggggccagagtgagagtttccacactcaggcaggactttcatggttagaatcctcagccaacaccaaaggagggagcgtccagtcattcctaccag

SEQ ID NO: 124810 - DNA, 382 bp, Homo sapiens
tctcttaatgtgccatatcccaaggatttgggtgtcctttgtggattcattaaaggatactgtttggagggtgggacatttccatgatgattgttcccctaaccttttcattggtcttacaatcttagacaaagcttgaaatatttagctaaatgagaagtacttcctcattagtttcataaggtaaatccaagctgttgtgctgtggagtagaacacagggtattcttcctttcattcttgagactggtaataaactgcagcagttcagattatactgttaaatttttttttaatgaattagttttggaaatacaatattaccagtgtttgcaacagattttggtattcttttccattttattgtgtcatctttgtaggat

SEQ ID NO: 124811 - DNA, 323 bp, Homo sapiens
tggtggcatgtgcctgtggtcccagctactcaggaggctgaggtgggaagattccttgagcccaagaggcagaagttgtggtgagccaaaatcatgccactgcactccagcctagatgacaaagtgagaccctgtctcaaaaaaacaaagcttttaaaataaagttaatagaattagttgatcaaaaagggaataaaaataaaccaatgccacctactatttttagactggcgaaagtacagattaggagaggcaaggtggctcatacctgtaatcccagaactttgggaagttgaggtgggaagactgcctgaggccaggag

SEQ ID NO: 124812 - DNA, 428 bp, Homo sapiens
ctttggggtctttgctaagattaaaattacttacaaaactttccacagtagcttttattttgaatagatgaacctagccaggatagtaacgtgtagctgattacacgtgagaagtcttcttcactatgacccaccatttaaacaaaatcctataatttccctttaaaatccacaggtatcagccaggcacggtggctcacaactgtaatcccagcactctgggaggccaaggtgggcaggtcactggagttcacaagttcaacgccagtctggccaacatggagaaaccccacctctactaaaaatacacaaattagctgggtgtggtggtgcacacccagaatcccaaccacttgggaggctgaagcaggagaatcgcttggacccgggaggcagaggttgcagtgagccgagatcacaccactgca

SEQ ID NO: 124813 - DNA, 503 bp, Homo sapiens
aaaaaatttttaaggtatctttgaggaagagaaaagaaaaacacttgcataaccaaaaatgtattctttttttggtttgttatggaaaagctggagtaaagatttgaattgcattccatagattttattttttgtgtactttgaaaatgatgctgagctgacacaggatcaggaggtggcccagatttatatggattacaaatggagataggatgagttaggaagagaaacctgataggtcattcttgagccatccagggatcttttcaaaatctccatataaagggcctaattggagaaagaaagggagggaaatgatcttcaaatatattagaaaaaatagttttgattgaatataaagaacttagggcactaaaacttgttagtagaaagagtgtcaagaagattctggtatcatctctggaaatatttcaagtattaggtattcttggagagtttggtatgaccctgttatcaaataaaagattgcatcagtgagtgga

SEQ ID NO: 124814 - DNA, 346 bp, Homo sapiens
tgtcatagcaaatgtcagtatgtcattgtttttcgtggctaatacctcatggtttatttatcaatttatggatgtttggggtttttccactttggggctattatcaataatgctgctgtgaacatttgtgttaaagtttttgtggtggtgtttttagttctcttagttacatacctgggaatagaattgcagttgctggaccatgtggtaagtccatgtttaactttttgaggaactgccagacattttcacagtggctacaccattataccttcccactagcaatgcacagtgttccagtttctccacatcctcaccaatacttgttttggtttttttttttttt

SEQ ID NO: 124815 - DNA, 866 bp, Homo sapiens
atagaacattattctgctcagggcaaaataatgtgggctgcacagtctggcccaggcagccctcagtgttgtgccctcaagtgttgagatgacaggaggatggggtcaggccagtgatcctcaaagtcagaagaagaatactatgcctcaatcctactcatttcctttccaaactctccctagagggcctctaactgtggctgaggggaggggcggcactttttgatacacggtgcaacttgcccactttgaccctgacctttgctctgtccccttcaggtgaccctggcaagtagctttttagagcagtggttctcaaacttgagtgtgtgcagaatcccctggggttggggggcagggctttgaaaatacagattgctgggccccacccctagagtttctgatacagtggctcagggatgggcccaataatttacatttctgacatctgggttcctggatgctgctagtggagagaaccggtgatttgatagcattggtgagctggctcaactctctgctcaggaaagtgacaggatgcctcaaatgctgagtgctgcgtattcaaattccaaacacaaggcaactaggatgggagcccttctagactctgtgtattcaaggaccagggagaggcttagcagctctcagctctcctggcacagagagagttctctgaagcttgctgtttttctctctcctactttgatagtttcctccatttgtatgggcggaggttgcaaaggccagaatagactcagcgagagtgggagatgggggtgagtgagtgtgttcacttttgatgaggagcagatgtgacaagcactaaaatggagtgggcaataagaattattactagctgaggc

SEQ ID NO: 124816 - DNA, 304 bp, Homo sapiens
tgtcatcccggctagaatgcgggggtggtggggggcaggatctctcctcacagcagcctctgtctttcagactcaagcgatccttctacctcagcctcctgagtagctgggaccacagggacataccaccatgcccggctgactttgtaatttttagtagagccagggtctcgccatgttgcccataataaataacaactaagacctcatagttgtcagtcatgtaatattattttccatttgctccatctctattcccagtttcagttagtagagtcctgatatacccagtagtcaaggcaga

SEQ ID NO: 124817 - DNA, 466 bp, Homo sapiens
taagaatgataaaaagtttaatcataatcatacattttaacaagcatagatggaacatcaaaatcctttgggaatattttgatattatatatctatccgtgctttttgtttctgaaatgcaaattttttctaaaaagattaacatagagcaggtaaatgacagttaacaaatgtaaataatgtggcataataatattaactgagcctcataattctttgagtctgatggttttcaaataaaaagtcttgaatttaaaattgaaacagtgtttttgaatcgcaactattacaatataagaaggcaggaaagctaatgacataacctctaaatggcatgttcagaaagttttatacttccaaatttgggtgaagggagaactatttctactttctttacccttaaatctaggaagcagtatcaagagaggcttgctctcttgagcagtatcaagaaaaaggagcagta

SEQ ID NO: 124818 - DNA, 208 bp, Homo sapiens
caggcatggctccacggaagcacttcctggatgcggggaagtggtacaagggggagacttcccagaggagtggataatagagcacagccttagacactgagtcagggttcactgcggggaggggcacgggcagcagcaaggaggagagactgaggggcagtccagggaggaggtccccagggaggggaccgatcacaggtctcacatg

SEQ ID NO: 124819 - DNA, 985 bp, Homo sapiens
ccaatttacagattaggaaattgaggcccagaaaagttaagtggcttatttcagggtgctcaactaataatctctgacttctgtctccaaactccacactctttccacagccttaccttgttggagatcacttcccaagtgtactgggtcctctaaagtggcttagaggtcactcattggaattagttatcagtgcataattggacactttgcaactattaaccccatttacaaagatcttctttactttccatcaccaagttttactgctgaattgtattctatttaaactgatttatgggaatgcattaaaaatatctgactaaaatttctattttgtctataccagttctaataatcctttcttattcagttaaaattatttaaacatttataaatctaatttaccttggtacccacatattttacacagaaataatctaacagtgactattaagctgtacactgaaatcatctataaatttctagtattcaatttctttaaaaatacattatttagaaaagaagctattaaaaaatgagtatgccctaaatataagatcagattagcccaaagattttgttctgatagctcaccttcacagagtgacatttggggaatttttttctccctttatttttttatttcatgcagcaggatatgaccggttactcagcaaaggacctcatttggtattgtgaagcctacctgagaccacctgtatttgatgattatgtaaacatactacttttctgaagaaccacaggtggtcaacacttgagattttgcaaaacatcgtaaatgggaaatgaagtctctaaagaacttaacaattcaagcaggcgtgtccattcattcattattcattcatttatctaactctatctgggggtcaactatgtatcaaacccaagaatagtaatagtaagacccattctctgcctccaagaagcacagtctcacatggggagacagagccacaac

SEQ ID NO: 124820 - DNA, 367 bp, Homo sapiens
ttcacattgagggtctttcagctggtgattcagggaggagctgataatcttgattgagggtcatggagctggagacccagacaggagttgatgttctagttagtggatcttccagctgcagacccagggaggagctgatgttctagtttgagggtcgtgcagctgaagacccggggaggagctgatgttctagattgagggtcgtggagctgcagacgcggagaggagctgatgttctagtttgagggtcgtgcagctggagacctggggaggagctgatgttctagtttgagggtcttgtagctgcagacttggggaggagatgagattctagaacatcagctctccccgagctgaggaccatcgt

SEQ ID NO: 124821 - DNA, 856 bp, Homo sapiens
  misc_feature (692)..(693): n is a, c, g, or t
  misc_feature (696)..(696): n is a, c, g, or t
  misc_feature (699)..(699): n is a, c, g, or t
  misc_feature (707)..(707): n is a, c, g, or t
  misc_feature (710)..(710): n is a, c, g, or t
  misc_feature (714)..(714): n is a, c, g, or t
gactaccgtaagaagtaatccaaactgggtgacttaaaacaacagaaattacttctctttcatttctggaggccacatatccaaaatcaaggtgtcagatttgtgatttcttcagagactctaggtatccatttcttgcctcttccagcttctggtggctgtgggcatcccttggcttgtggccacgccatgccattctgtgcctccatagttatgttgctttttcttctctctctaaacttcctctgcctttctcttaaaaagatgcatgtgattacacttagggtccagctggataatctggaataaactcctctcaaaacctttatcttaatcacatcttttccatataagataattttcactcatttgtcatagaaagtaatattcacaggtcccaggaattagaaagtgaatatctttgggaggccattttttagcctaccacaccattcatcttttgatttctttaacagtggcaagatgtcttcctctgtcagttgtctccactttgcaaatactggataggcagaaacatgaaaactaaaaacaggttaccaaaatggtgttttcagtcttcttttatactttctggaggtgacatgatactttggtacagcacagtaaagaagctcaacaatgataagtattgcatcatcctttcagatcatttcttatttaatttcttttanncanggnatattggnagnatgnggaatatcctaggtggtaaggcacacgtcggtcggattaaaatggacctatattaaatgaagcttgccccggggaaaatattttgggacacaccttgacgaaaaaacgttcatggcggaaaaaagccccgggttcccaacac

SEQ ID NO: 124822 - DNA, 484 bp, Homo sapiens
aggaccttggaaaattaaattggagtcggcaataatatttattttcaaagacatctatgtataggcaggatgaaaatggggagtgagcatggagataaagaaaaaataataaaataacccaacaagatgtctttcatgggcttatggtaagggtgtgccctgaattgacaggaataatgaactcaagttttggaacctgacattccccaaatctgcaagagttaagcctaaaacaaacagaccaaagccccaggttatgaatctagtcactgttgagcagtgagctttcgccatcttccttctgagaaggagctcagtggttatatggtttttgtagtgttaaacaatgctgctaggccgggtgcagtggctcaagcctgtaatccgagccctctgggaggccgaggtaggtggatcacttgagcccaggagttcaagatcaacttgggcaacatggtgggaccccatctctattttaaaaaac

SEQ ID NO: 124823 - DNA, 162 bp, Homo sapiens
tcgcctcagcctcactagcagctaggactataggcaggtaccaccgtggccagcaacatgtagcttaatttagaatcctagaatttcagaagagcccttagagaccaattctctcttttaagacatgagggaactgagccacagagaggctagccactggct

SEQ ID NO: 124824 - DNA, 203 bp, Homo sapiens
gaagcaagggagtgagccatgtggctatctggaggaggaataccccagacagtgggaggtcccgagtcaggaatatgcttggcattttgagagaagcacaagcaggccagtgtttttgggatggaataagtgagagggaagagaggtgagaggacaaggttctagctacctgtagacacaaatgtgggagtcatcagtgcata

SEQ ID NO: 124825 - DNA, 194 bp, Homo sapiens
ttgacttgctttgaccaatagaatgtggagaagtgacactatttcaatttcagaactttttaattcgcccttgctctcttgaaaccctgatgctgtaatgaaaccatactgcaatgtagcccaggaggaaaagaccacaaagagagaagatgccaagccataccagctgtgtacctgagcccagcctgcagcta

SEQ ID NO: 124826 - DNA, 475 bp, Homo sapiens
aaatattctgaaccctattgagctcccagttgtatctcctgttccttacctcacatgcatacactgcttggtgtttagctgaagacttaagggaaacccaatattctgccctgcaaatcttaccttggctcccctaaattctctacccagggaggttcccttccctagccttagtgccacagcttagaaaccccatgtagaagcttgcgcaattatagggctttctttgttttccatctctcaggagtcactgtcctgcactggcttttgtctaacatctgaaaaacttccttgtatacattttatataggttttaatttaaggtggagaaggtaaatcgtgcctctgctactccattttgactagagtggaagttaactttgtatttcctaaatgttaatgaggctgagcatcttttcccatgtttattattcattccttattgctctctgaaaagcttgtttcatgtcttttg

SEQ ID NO: 124827 - DNA, 402 bp, Homo sapiens
aaatattctgaaccctattgagctcccagttgtatctcctgttccttacctcacatgcatacactgcttggtgtttagctgaagacttaagggaaacccaatattctgccctgcaaatcttaccttggctcccctaaattctctacccagggaggttcccttccctagccttagtgccacagcttagaaaccccatgtagaagcttgcgcaattatagggctttctttgttttccatctctgtgcccatatgttctcattatttggctcccacttaataagtgaaaacatgtggtatttggtttcctgttcctgtgttcatttgctggggataagggcctccagctccatccatgtcctgaaagggatacgacctcgttctttttgtggccgcgcagatatt

SEQ ID NO: 124828 - DNA, 600 bp, Homo sapiens
gggttagtgccagaactgaattgcagtataccaattgatgttggaatatagtccctcaaacactaaaggcaaatgaaccaaagttcactccttctaccttttggtttataactagttcatgaaacagaaaagaaagtttagccaaaagctttctagttaatagatttattaataactggattgacaactgtggcttagatctaagggagaatggaagcttctagtcttctcatacttctagatcagcactactcaaaagaaatataagcctcaaatctgaaccacctatgtaattttaagtttttcagtaatcaccgttaacaaattcaaaagggtaaagctaatgttccttatatattttatgtaaccaactatgtcttagatattagcctaagttataatcaacactaaaaaattattaatgattttactttttcacattaatttatgaaaatgtagtgtgcatttcacacttataacacatctcaaattcgactaaccacatttcaagtgctatcaataaccacagtggtaagtggccaccatattggatgcatagttctaaacatttgaaactaccttggggaaaaatagaccaac

SEQ ID NO: 124829 - DNA, 713 bp, Homo sapiens
tactcaaaaatgggtaagatggcaaattctatattaatatatatttcgctacagttttaaaaataaataatattatgttccaaaaaccactgaattgtacacttcaaatgggtgaattgtatgtgaattatacctcaataaagcttttcaaaaaataaacagggtaacaattttctcacccaccattttgttttataaactgttttgtcaaattgaaaagtcctgaaatatccttttgctttactagtataactgaaaaagtaattaaaagattttttaaaaggtgaatagagagttcataatgacctgttttgctatcaggaaccttgatcaatgtgttacatagcagtatttcccattcttaatctaatgtactttgatccaaacaaacaaaaagctaccaggagatccattctaagggctctgtattgccagttatccatgttctatgcctgccacatatggaaagcatacagcagattgattatcttgggggctcttggggcagtattattgatctttacttttcttaatacctggtagttaaccatttattattatagactagattaatttctcctcctatttttaaagttttttttaatgtggcaaatacacataacatagaatttattatctttatcatttttaggagtacagtttagtgtatttaaatgcatttataatgtgcaattctcaccatcatccatctc

SEQ ID NO: 124830 - DNA, 1008 bp, Homo sapiens
tgatatgctgtctccaaaaaaaaaaagaaaaatattaaatgcagttgtgttgccagacaggctgtttacatatagtttcatctgagagacagctaaaaaatgaactaattagtatatagagttcctacaaagcagtaaggaaaaactcattaggaaaagggcaaaggatatacactcaccaacatggtgaaaccccttctctagtaaaaatacagaaattagcccagtgtggcggcatgtgcctgtaatcccagctactcaggaggctgaggcaggataatggcgtgaacctgagtggcggaggttgcagtgagccgatatcacaccactgcactccaggctgggcaacagagcgagactccgtctcaaaaaatatacacacacacacacagacagatgttcacctgcatttatgataaggaaaaatgctaataaaactgtagtaaggtatttttcacccattagattggaaaaggttttttatttttatttttatttttatttttattttagtagagacggggtttcaccgtgtttcccaggctggtcacaaactcctgagctcaggcagtctgcctgccttggcctcccaaagtgctgggattacaggcatgagccaccaagcctggccggaaaaggtgtttaaagtttgttacacactgggttcagaaagatgttgagaaatgggaacatttatgcattgctagtgggagtataaattgaaattaactccaggaaggacagtttaacaatttatcttgtggatcaagtgtacatttggtgcatagttggaaataccaagattggaagcagcttaagtgttcctcagaggaagctaaataaataattagggtgcccatacagtagaatactgtacatatagtgttatatatagaatgaggcagctattaaatatatggacatggaattatctcagagcgcttactaaatggaaaagctaaggtgtagaataatgtgtagtgtgctaacatgagggagaggggaaca

SEQ ID NO: 124831 - DNA, 305 bp, Homo sapiens
cgcctgtccgagagtcagtatcaaaaaaatgttgtcaagtatgctgaaaaatcttagaatataaaagtgtacatttggtgcatagttggaaataccaagattggaagcagcttaagtgttcctcagaggaagctaaataaataattagggtgcccatacagtagaatactgtacatatagtgttatatatagaatgaggcagctattaaatatatggacatggaattatctcagagcgcttactaaatggaaaagctaaggtgtagaataatgtgtagtgtgctaacatgagggagaggggaaca

SEQ ID NO: 124832 - DNA, 189 bp, Homo sapiens
gagctaatagttaaaccaagatttttctgacactgtttttgaactcacaaaggtgagacaactatttttggcatatccttttccattaaaaagttatgaggctgggcacagtggctcacgcctgtaatcccaacactttgggaggctgaggcgggcagatcacgaggtcaggagatcgagaccatcctc

SEQ ID NO: 124833 - DNA, 158 bp, Homo sapiens
tcaacaagggagttaagagtggggaaaaccaagtgtctaatttcaagctgaggaacaaaaactttcattatctaactcaagaacaaataatataaacaccattttaaacatagatatgttatacttttcaggaactttccaatccattgcctcgttga

SEQ ID NO: 124834 - DNA, 258 bp, Homo sapiens
aaatatccaaatgatataagcacgcaaaagacatgacattattcttaaaccagcaattgctcaagaaaaactatatgaataattgaaatatgaggtgtgcctacaatgacataaggtcaaattctttttaaaggaatgtatcacatcttctatatctaaacggttgtttgttcctatcaaagtatttgccttgagaaaccgaagttatttccacatctacttctattgctcaggcttgtttcgaagtccacttcgtgc

SEQ ID NO: 124835 - DNA, 674 bp, Homo sapiens
tcatcctgtccgaatctgggaaattttgctctggagtattttcaagaaagcgcattgtgttttaatgaagtatttttcagggttccaatgttattttttataaatgcagcattttaatggcagattcaatatgaaggacatgtcttcctgggctctatatttgattttggaaggcagcatactctaggagaaaaaaagcatagggctgaggctctgaagacacagcttccagccctggctttgtctccgagggggagtcatgttccccactcagtgcctcagtttccccatctgtaaaatgaggggctttgactagatgagctctgaagtttcatccagctcttacactgtagggctttcattccctgccagcacctgctctccccgttcctccccacctccactgagctgcacacatcccacaatgcctgccccacagcgatgtcctcagatgtcctgggacagccaccgcactcctcactagagcctggggtgggcctgatgggctcggccacccagggatgccctcgtacctgaagtttaagggcctaaccattcaataggtcaccaactgtgtgccatggaagccctcttgtaaagacacacctaaaccatcctaagtgactgtggaattctggggaattctgagtttggagtttccatttggatacggt

SEQ ID NO: 124836 - DNA, 759 bp, Homo sapiens
catggtggtacgaacctgtaatcccagctactcgggaagctgaggcaggagtattgcttaagcctaagaggcgaagttgcagtgagtgaggatcacaccactgcactccagcctgggcaacaaagcgaggctgtctcaaaaaaaaccacaaagaaacaaaaaaatatgtacacaatcaagtactgggtggtaatgtgagcaaataaaaatatagctttgatgagattatgggcaatctgttatttcaatattatttttgcaataaaataatgtcttaaaaagctaaggaaagtatttgcccaagttctcattcacagttgagaaaatgaggcccagatttgacaaggatcacgtaccaacactgagggaatcagctacaatatttagtcaacattttacttacagaggagtaatagattataaaaaacacagctttcaactccaccaaaagctacagttgagctattttgccattctcaaaagcacaaattagtattaggttaaggggaaagatttttttacatgctttagaatgaaaagcattggggcaattcaacaaacacttattgatcaacttataactataaaactcttgttctaaatgctacgtaacatgcagagacaactagtacatgggctgttcttcaagaatttacaatttattgaggaagaactcttatgataagctagaatgaaataaaagcatgaacaactaattctaacttgggacacaaaagaaaaggtcatagataaaatatt

SEQ ID NO: 124837 - DNA, 732 bp, Homo sapiens
tcttccaaatgctggcattaggaaaacagagcctgtgtctctctagaagaggcacactcttttctggactttatatttctccagtctgcaaaatatccagtaatttgcacctcctccccaactgccttgtgtgtgtgctgtgtttgtgctgttcagttaagagcatttgtagaaagaggggtgttgggattatctttcccagatggaaggaaagaagcagagaggagactcctgttgtttaagcctcacagaatctgacacttttaggaaagaatgattctctaaaaaccctattcatcttccccagataccactgcaatcaaagaggcttcactgcccaggaactaaatagctcttccaagtaaattaggagcttctttcagatttccagtttaccaccatgggcttggacatcttaggtttctgacagtaaatcaaattgaattgaaatttctctcctaatttgcctcgtatctattgacctatgtctgaaagagacacaagtggaaatttcttccacagcagctacatatattatctaaactttgacagcagctggttgcagtcccaaagcaacaggatgtttctgttcttagcactacacagacacataatgggaaaaagagacatacatcacagcattgactcaagttcagctcacagtcagctaaatactttttcctcattaaaaaagcagactgtggctattccattaagaatagcctgttcatg

SEQ ID NO: 124838 - DNA, 311 bp, Homo sapiens
atcctgtgcctactccaccttctgctaacttgcttttcttacttaatacgttgtgactctgtcaaaaaatacaggactgtatgatcacgtttatggcttcactatattcccttgtatatagatggactataatttaattcctttaatgctggatatatgggttgtttctattttttgctatcataaacagtgttagtacttactgatttattgtggattaaaacagagaaaggggttttaaaacccacttctaccaccctaacctgtatgattccagtgattttacatatgcttaaaaacaaacatgtggt

SEQ ID NO: 124839 - DNA, 287 bp, Homo sapiens
atgtataatgaaaggatcaacaatggatgagcaaaaggctgaggacagctgttctctgtaaagtcaccacaggaacttcttaacaattaaataaggtagtattcatgaaaaatacttcagaaaactgtaaaataacttataatgggaatgaaaattccagttgcttttatgataagtgctctactttggggctctaatatactctaatattatttctattacagtacgtaaatgccacacctggccaaattccaataacttatcactcctacccatggttattctaa

SEQ ID NO: 124840 - DNA, 481 bp, Homo sapiens
agaagtgacttggcacagagagaaagctagcagctgggtttcagaaggggtggaagctaacaataagtaagtctttgacctgctcgactctgagaaggtccagtactttggaggcacaaagtactacagagagtaaagggttaaaaaagaagagattggctgaaagtttatatttagaatgattagctactcctgtcccccactaggtgatatctcctaccctggtagccaagcaactatcccattactgcttcctttcaccttgcctgtcctgccagccgactggagatctattctctgaagacatcaagaggatcaaggctgggccaggggagaaagggcagaggctgaggcttgcctccatttcctgtccctattccatgcttacatattgcaggcaggagactactgaattcctctttggaaaaatggaatggcctaaaagaaataccatcagagagtgacgtttgggagttccata

SEQ ID NO: 124841 - DNA, 129 bp, Homo sapiens
tgtatgagagttctggtttgtccatgtctttgatatgtccacatctcgatgtggtcagtctctaattttagacactctcatgtctgtagtggtatctcattacaattttaatttgtatttccttaatga

SEQ ID NO: 124842 - DNA, 727 bp, Homo sapiens
ggtaatgtatataaaatacatattaacatagtacctgacacatggtaagcatcaaaaaatgttaactacttttattactattattattacgtatttttaaataattagagagcagtatcaaaaattagctgggcgtagtggcatgcacctatagttccagctactcaggaggctgaagctggaggattgcatgagcctgggaattaaaggctgcagtgagccgtgttcatgcccctgcactccagccttggtgacagagcaagaccctgtcttgaacaattaaagaaggcattatgccgcaacgttagcttagaaatgatccacatatatcaccagtaactgtcaacaggattggaaccctagttttgggtattatgatcacaaggtattattaatagcttattaataataaagcgttggctaggcacggcgactcacatctgtaatcccagcactttgggaggccgaggtgggtggatcacctgaggtcaggagtttgagaccagcctgaccaacatggagaaaccccatctctactaaaaatacaaaattagccgggcgtggtggtgcatgcctgtaatcccagctacttaggaggctgaggcaggaaaatctcttgaacccgggaggcagaggttgcagtgagctgagatcgcaccattgcactccagcctgggcaacaagagcaaaactccgtctcaaaaatataattataataaataaataa

SEQ ID NO: 124843 - DNA, 343 bp, Homo sapiens
gccgtttgtgaaactattagagccagttaagtgctattattcattagaagttaaagaggttagaatgttgcctggcatatagtaagtgctcagtaaatgctagttgttaccaatggacagagatttgtagcatacctattatgtagcaggcactgttctaggttctgggaatacaggagctaagactaaaacaagagtcaatgatattattttacattcctgatataaagacaaaggccttaaagagaactcaaaaacagaaacaagttttggtgatggcctggcttaagttgactaaaggagagggtaaagaagctaagctttccctatgggacgatacttt

SEQ ID NO: 124844 - DNA, 1700 bp, Homo sapiens
aatgagacaccatctctacaaaaaatgcaaaaattagctgagcatggtggcacgcacctgtagtcccagctacctgggatgctgaggtgggaggatcacttgagcccgggaagtcacagctgcagtgagccatgatcgcaccactgcactccagcctgaacaacagtgtgagaccctgttttttattttttatttttatttatttattttttaaagacataggtagctagagtaatacagagatgaaagggagagtattcacacacgcttcttaaaatagaaattactaaattttattttacttaaaataaaatttagctgtgaggattctccacaaggctgctcatgacatggcagatggcttccccttgggtggaatgacaggagggcgagggccaaggtgagggtggtacggagagagaaaaaactaccaagatgaaagctgcagtgccttttataacctaatcttggaagggacatatcactacttgtgccttatcctttcagtcacacagaccaaccctgatatgttatggatagggacttggagactgctccaaagaccaggaggtgacgatcactggggtcctctgggagactggccaccacagttgccttttccttttcaggtcacttacaagggtctttgtgctatggaggtggatgtgggcataatcaaagggtacatgttgtacaggcctttattatacaaacctctacaataaaacaatgaataacacatcactgccaagacagttatacagtgttaaattggaatggaaaggaaggaatcagaatttcatgtgatagaacacttaaaagtctgcctgtgcacatgtatgaatatgcattagggagaagtaaaagagtgacctgaaaatcttcctaaagtaatattatctagaaagtttgagaggtttaactgtggctaacaagatttcctgaagataaaatgttcctggggccttaatagttacaagaactttaccaaatcaagaaagcaaatatataggagtctaaaaattatttagttttgcatattcatttcagagtaccaattatgattttatttctttttaatttttaaaagtttagaaaaacaaacgagaaccaattacaatgttaaaaggaaacaggaaggatagacttggggccaattatattaccgtttgggtttttgttactataaaaatggaaatattaaagattttaaaaaatgagtggtaatagagtacaaatctgcaaatgatgaatcagcaattatatttttataccaaatggtatgtttgtgatattgatatagtattaatgcactgtgaatttatttatttattttgagatggaatcttgctctgtcgtgcagactggtgtgcagtggtgcgatctcagctcactgcaacctctgatatggtttagctgtgtccccacccaaatctcatcttgaattcctatgtgttgtgggagggacctggtggaaggtccatgaatgatgggggcaatcaattctttcctgtgctgttcttatgatagtaaataagtctcacaagatctgattgttcggcaccggtgtttccccgggtcgcagaattcccactctttgcgcccgggctggtcgtgaaagctggggccaatcgtccgctaccttggcggacttcgggcttgcccgggatgccggtggacctgtccggtctaaggctcca

SEQ ID NO: 124845 - DNA, 170 bp, Homo sapiens
tactggagttaattaaaacaaaaattgaaagtagtccctctatacgaaaggacaatactcatgataattttggctttcttgtactctctttccaagaacagatgacattatgaaaaacaaaggaagaaagccaaacttattcacatctcatgaaaaatcatagaaagata

SEQ ID NO: 124846 - DNA, 130 bp, Homo sapiens
ccttctcacatttgtatgcatgcatatatgtttatagtcgtggtttttaatttagcattggtgatatcatactgtacgtgttatagtgtgtttttctttttcatttaatggtgcattttgggggctgttg

SEQ ID NO: 124847 - DNA, 655 bp, Homo sapiens
aaccccacaaccagaaagataactattaacatttttaaaaatatttacctctagtaactctgctatgtgaatctctttatctacacacatggatgcaccatagttgggtttttggtttttttacccattcctttatatatagttataaggttatttccagtctctgctattttaaattatgctgaaatgatcagaaattgatcacttccttaaggaatattcctaacagtaaaatttgggggtgaaataatatgaacattttgaggttttcgacacatattaccagactgctttctagagttctatccatttacttttctaccagtaaaatatgaagtacctgtctcattacaacttcaccttagaatagttttctcaaactttagcagaattacctagaaggattgttatatttgagttctgggcccctactacaaatttctgattttagactgtggtggggcttgagaatttgcacgtaattaatttccagatgaggctgatgctgccagtctagggaccacactgtgaaccactggcttaaaatattattgcttttaatctttagccatactgataggtaaaaagttgcatcttgtttattttgtgtttctttaacagtgaaattgaacagtttttcacatatttagacact

SEQ ID NO: 124848 - DNA, 631 bp, Homo sapiens
cgcggtggctcacacatgtaatcctagcactttaggaggccgaggcgggcggatcacgaggtcaggagatcaagaccatcctggctcacacggtgaaaccccgcctctactaaaaatacaaaaaaattagccaggctttgtggcgggagcctgtagtctccgctactcgggaggctgaggcaggagaatggcgtgaaccctggaggcagagtttgcagtgagccgagatcacaccactgcactccagcctgggcgacagagcgagaccctgtctcaaaaaataaataaataaataaaaataattggaactagacaatgaagactcatgctggattttcagtttgttagaattcaaggaaaaaaatactgaacaattggaggattttagtattgtaatttgaatgtaataatctacagtctttttaagactcaaaggcaaataacttcctgattgttgattctaatttaaaaggctctgtggaggaggaccagttgtaaatgatgtaaaatgaaataggaatattactaatcacaggaaacatattaatatgaaccaaatgctaaatgatcttttaaaattaattattttaaactaatttttagttcacatgtttccattctacagtatata

SEQ ID NO: 124849 - DNA, 329 bp, Homo sapiens
cagtcttaaagttttcagtttctcaactttcctttttgtctggacccattctagggtcttttatttgttggtggttttgttttagaggcccaggtgtggcctttacccatactccgggccttgctcccagtctcgaactcctgacctcaggtgatctgcccacctcggcctcccaaagtgctgggattacaggcatgaggcaccatgcccagctgaatgccttaattttaacaagagggggactgttgatggtacccacttcacagcgttgtcctggggattaaatggcagaccagagcatactgcctggaatataagaagggctcaat

SEQ ID NO: 124850 - DNA, 415 bp, Homo sapiens
caagctttccctctccaggaaaggtgtactggtctgacagcacactgcacaggatcagtcgtgccaatctggatggctcacagcatgaggacatcatcaccacagggctacagaccacagatgggctcgcggttgatgccattggccggaaagtatactggacagacacgggaacaaaccggattgaagtgggcaacctggacgggtccatgcggaaagtgttggtgtggcagaaccttgacagtccccgggccatcgtactgtaccatgagatggggtttatgtactggacagactggggggagaatgccaagttagagcggtccggaatggatggctcagaccgcgtggtgctcatcaacaacaacctaggatggcccaatggactgactgttgacaaggccagctcccaact

SEQ ID NO: 124851 - DNA, 523 bp, Homo sapiens
gaccactgagagatttatctttggcaaggggataatttttggtaccatcttaaatcacatgcaatatgtaaccctctatgtatagagcttccctaaattctgaagttgaggaactcccacaatcacctgggatgcattttctaaaatagagatttttcaaggaacttaacagaggattttattcactaggttatggcagattggcatcctgtactttaaaagagatcactccttcccccagaagatctaatgcccagtcactttgtgactagtgctatcaactcattgatttgacctttgacctccaaaagctgaggacttaatcttcatggtgaggatttttgttttttccttgcagtgacatgtacaacttgataactcacctcataatgcttctgcattgaaagactttttttgataataaaaagaataattattaacttgctttaaaagaagttgctccattatgaaaggactgaaaaaaaatgtagttattctattagatctacccttcatccctgaa

SEQ ID NO: 124852 - DNA, 260 bp, Homo sapiens
gtcaaaactagaagctataactttggagcacagagaatagtattgattcagttggggtgggtgtgtgggctggtcagaaaatattccacagagtaggtaactaggaggcctctccgaatcatagtctctacagtcagtgccatctgttatttcctctcagagtcattttcttcttagcacttatgacaatgtgtaagtaaatatttatttctatttgtttattgtctgtctttcctgtgagggcagggagcatgtctgtt

SEQ ID NO: 124853 - DNA, 110 bp, Homo sapiens
cttccccatctgtaaaagagggataataatagcatctaacttacagggtgctgtgagaactgaaggggtttaatatgtataaagtgctagaacagtgcctggtatatagt

SEQ ID NO: 124854 - DNA, 202 bp, Homo sapiens
tatgcagttgtcgtgaggcaccatgtgagaacatttgttcattgtctgtctcccacctttacaagtacagagaccttatatgtcctatttaccacaatatcaccgacacctagagtgccaagttcctaggaagtgccaagagcctgaaatccagcaagtcttctaatgacccagtgcaggggcagctcacgacaactgcagc

SEQ ID NO: 124855 - DNA, 378 bp, Homo sapiens
cctatcctgcaggttgtcaaagacaaagccacagagtcagatgaactattcaggatggaacaagggaaaacatacaaagtgggcttgcttttttaatggtttccaaaagagcagacattcaggagagattaattctgtgggtgaagtctcagctactacaaagagagtaacacctcccctgctcccaccctgttccatctcctgctggggttgtggcaatagcttcccaaagggtctctctgcttccactttatccctcaatgacatacctattctctagccagaagacagagagatcctattgagtcataattgttatctttgtgttcctgtgtctgagaccctgacatggcttcatagccatggcctaagtctagt

SEQ ID NO: 124856 - DNA, 440 bp, Homo sapiens
gttcttctgtaaaatgggggcaaaagaataactatcttcaaagggctgtggtgaggaataagtgatatcatgcctgtaaagtctcagcacagtccctggcacagagtgattcctcaataaacattagctataattattagggtctaaggcccttgctggatgacagtgctgtggcctccgcccttatgaatcaaaggagcagcaagaaatagggcaacactatggttttggctgaataggagtagcagccatgggtgggcacagtggagggggctggtggggagccttgcaggtacctggctctctcaaagggctcctctgcctgcaataaagttagaaatggaggatgtggtttttggttccactgagccaggccacaggcagcatgttgtagccacaaaaggccagatgctgtgatctcctgctgtagggaagaaggg

SEQ ID NO: 124857 - DNA, 378 bp, Homo sapiens
taaaacatacatgagacaaaatctcacaaaacggaaagggggcacaaatccacaaagagtggcagactttaacacacctcctacaggaaaggaaggacttcaggcacaggactgagatggtgggttctgcattgagatcacggctgcttctgccttactggagaaggactgagggcagagactaaacccaaggagaccaagaggaagccgccgaacaagctcaggtgggaatgatggcagcctggaggtcaacaggaagaagcgaagccacttgtgaaacagacgcaacaggacctggccactcacaaaagcagagacagggaacgaacaccaagtgtgggttttctggcctacacaagagcagcaagcaaagcacca

SEQ ID NO: 124858 - DNA, 313 bp, Homo sapiens
ggcgaaagtggaaatacagtgggaacaggtgactgccgatagcagaccaggcctgtttggaatgtggcatctgcaatgacctaaatcttaagtctgcttttactttcttttaaaattttaagtttttaaaaataataaaaagtggtcaggcctggtggctcacgcctgtaatcccagcactttgggaggccgaggtgggtggatcacaagatcaggagtttgagaccagcctggctaacatggtgaaacaccgtctccgctaaaaatacaaaaattagctgggcgtggtggcgcacgcctgtaatcccagcta

SEQ ID NO: 124859 - DNA, 725 bp, Homo sapiens
gatgctggctattttaggctgcatggctttctgactactgttttagactccttcccccacacctacccagttcatttttgcttggttttcttttgagcttggcatcttccttaaaggggattcttcaaatatatgcagagaggctgctgattgaaactactctcccaccttattctcttcctctgctttccaggggcgaccttttaagttcccttcctttgcctctgtctgccttctctgaattttcagggagccatttttggcagtttccatgtcttttttgcagccctgggagataccaacctcaaagatcagtttcaaaaactcagcagcagtgctttgggtaccctttctgtgcatggtgctctcagagtagtagtgtttgtcattttaaagttcagaaagttctcaatgaaaaatgcactcagaggtcagatggcctggacacacaaaaaaagtgtttgaaactgagtctgccatgatattttaaagggagctatgtcaaaatgtggtttattaaagggtatacgagagagagtaagagagagagagaaagacatcatggtaagtaggtttccaaggaggaaaaaaccaaatgttcatagaactgcctggagggctccctgacaaaacaaaagagactcttaaaaggaaaaggtatctttagagaaggtacaaaaggaggccgggcgcggtggctcacgcctgtaatcccagcaatttgg

SEQ ID NO: 124860 - DNA, 421 bp, Homo sapiens
gacctgaagagcgaggggcactctgcatggctggccagggcagccccgcccagggaggccttggtgagcaggagagaggccatgtggctgggcctaagggtgttggggagggtggcaggatctgacctggggctgggatgtggcagtcaacgtgtctgatgggtgttttaaatggatgctctggctgctttgtggaatattctggagggtgggtttggaggagcagaagtaggggaggctcatgcaatgagcaagtgagagctggtggtgtctcaatgaggatgatagagaagacatggtgagaagtggttggatttggctgtatttgaaggtagaacacagaattttctgaagaacggaccgtgggatgtgacagaaatgcagacgggggcaaggttttgggttgagtgtccgggtagct

SEQ ID NO: 124861 - DNA, 701 bp, Homo sapiens
ggggactcggttaagcttattagcagctttagaaacttcactatatcagtaaatcagcatcaactagatacttagagctaacttacaatatcatgataaccaaataaaaagagttttcaccatggacaagattcatcaacagtgactgcgctatttaagctcttaactaaggcacgagctctacctggtttcagaatcctcgggaagctggattcgtcatctggagggttgcttgcagaggatgacattatgtgaaaggagctgcattattctaaagggtatttcatgttggcctttccaccaagattaggttcattttctcaaatgtgctacctgcagctctcttcttccttcaaaaccatgtcaacatgaaacacaatgaaagatatataaatcgcaaatggcaaaaaaccattcacaagcttcaatattttaacttttattggtgccagattacctggaaaacaccttacaaatgatcccaaagtgctgggattacaggcgcgagccatcacgcctggccaaatcagcatcataatttaaacataaatatataatttctttaccatatacaacagcagtaaaaatgttgcttaaaaagttggtacaggttcacatttttcttcagtgaactttttctggtttctgtaattagtcctattaagacgtcagcccattgtccctaattatcatttcctttc

SEQ ID NO: 124862 - DNA, 159 bp, Homo sapiens
aatctccctcaaatgtaatgtctcactgagccctgcgcctttaaaacacacggacacatactcatgcatcaagctgctaacagctaataaaaatgaactattaacattccagactctgctaggtgcctgtaatcctaacactttgggaagctgaggtgg

SEQ ID NO: 124863 - DNA, 130 bp, Homo sapiens
atgtctttgtgctctgaaaacttcttcatcttcttggaaattaggaagtgtggccagacaccctactaagggctagtaaatcacagctggctttttacagtgttccacactggagagatcctacatcatg

SEQ ID NO: 124864 - DNA, 136 bp, Homo sapiens
tggggaacaatttttttttgttttctttgtgcatggaaaagttctttagtggtgatttctgagatttgttgtacttgccatccaaacagtatacactgtatccaatgtgtagtccttttttttttttttttttttt

SEQ ID NO: 124865 - DNA, 388 bp, Homo sapiens
ttcccatgtgcatttccaaatgtgaatagctggaattccaaaaattcattaatttaattttcatttcagttgaccctcgaacaacaaaagtttgaactgtgtgggtccacttatatgtagggcttttttcaataaacatattggaaaatttttttgggaattgtgacaatatgaaaaaactagcagatgaaccatgtagcctagaaacataaaaaaaaaaaaatcaagaaaaggttaggtatgtcatgaatgcatagaatatatgtagatactagtttaagtatgggattaatcaattatttatgttatcaataaggttaccagtcaacagtaggctattagcagttaagttttgggggaatcaaaagttgtacttgggctgggcagg

SEQ ID NO: 124866 - DNA, 486 bp, Homo sapiens
atgctctttgaccagtcaaggatccccacacctcggcccactattcatccaaaccccttaaaatccctacttccaaactccttggggagatggagttgaggtttccttctgtctcctcatttggttgctttaccatgaaacctctttctcagctgcaactgggtgacttagcgtattgccttgctgtgcatcgtgaaacaaacttggtcctgttacatgggttctccttgagtaaaaccaaggacagaggaggcagggaagcatggcttagtgaaggaaattcatcaggggccccaactgattcaaatcagggcttagactatctgaagaaatagattaactgagtagtttttaaagagcctttctgaagtggctacgttgtctggggtaaatacccggggtttgttctctcagtcctctcactccaggaaaatttaggacaaggacactcatgaggagtttaggagtggaggtttaataggcaga

SEQ ID NO: 124867 - DNA, 574 bp, Homo sapiens
aggacaggaaattaacataacctggtgaggctcatgaatctttcagccttagtatcagaactactcggtaacctgtaatttaacccatggcagtacttggagggcaggaagttagggtttgtgcctggtctgagaaagcctattttcacctttttatgagacttgtgctcttaaaagacagagaatgaaattatctaagacatttgacaaccatcaatttagtcattttcttccttctgtcaaataaattgtactattcttttaaacattttagagccctgttgaaaatttgcaccttttttatatagtaaaacatcaatggatggaaaatcctgttttctggggtagccctctttattgaacttctctaacacccacagatcccgtttataaagaagaggcacatttagtatgtttaaacaatagtgaactctttccttctgtgaatttctcaggatgtgttaatggtgtctaaagtttaatgctgctaaacccacacaggaattttcactggttttaaatgccacaaaaacagtttttttttaaccctttttttttgggtttgaatagctgg

SEQ ID NO: 124868 - DNA, 338 bp, Homo sapiens
gttgcaggaaacaggaaatcattaaaatatttttgagtggggagcaaggattggcctttgagggcaggcagcttgggtttggggtgctgccaagaacagatcaggatttcttggagagtgcaaggccctggatctctggccggcattcttgtttttgtcattctcatgctgtggccagcctccaccccagtgcggagccaagcagggctcctcaggaactgcacgatcattccagtcagggtaatttcctgcctctcagcctctcctgcctacttcttggctgagaagggagaaagaaggaggccagagacaccaaaacaggcaaaaaggcctgtctt

SEQ ID NO: 124869 - DNA, 286 bp, Homo sapiens
aagagtgaaactccgtctcaaacaacaataataacgacgacgacaacaacacctttgctgtcaaaaataaccaaagtcaaaagattgacatcaaattggaaaaaataccaataacatcagaaaggactattttcctcaacatataaagagcttccataaataagtaaagctcagcctggaagaaaaatgagcagagggtatgagcaaacaattcacagacaaggaagtacagatgattcttaaatttgaaaggacgctgagccttgctaatgatagattaaaacaa

SEQ ID NO: 124870 - DNA, 289 bp, Homo sapiens
agctctatgttgcttgttttttagttgttgagttgcagtagtctttatatattttggatattaaccagttgttaaatatatgatttgcaaatatttttttcctttccatggattgcctttttactctgtgattattctttttggtacacagaagttactgagttttgagattttttttttttttttttaacgtattcaggatacagattctttatcaggtattattttgtaagtatttttttcccattctgtgatttgccttttctttctcttaatgacagtgtctttt

SEQ ID NO: 124871 - DNA, 328 bp, Homo sapiens
atcttaagagccagaaaggatggatatatggggacagataaaaggatggaatgtaacttaactttataatgagacgattctctttcagggaccttgtttttgccactgagattgtagtttctgtattaggcttgtgtgtagtgacagggtggcagagctccatgttaccaaattgaattcacttgagcctgactggtttaaaaaaagtctgtcaagagaagacctaagtagaaataatacagaccccacagagagagcgtcccccacagagagagcgtccccacagagagagcgtcgacggggaggagtgcccccacagagagagcgt

SEQ ID NO: 124872 - DNA, 258 bp, Homo sapiens
aaagtcctgatgctgaggtgatctaaggatcccgggcagtacggatgtggacatatgtaattgaagggttcctggaagctcaaatccccatggccaggcaagtcctagagcccgaacttctgtatctctggctggcttcccaggccatccagtgtgagaagacctctcactctcaccaagaccaccctctgggggcagggtgggcagtgacacctgtgagccctggattttccccaccccccacatcgagcagggcag

SEQ ID NO: 124873 - DNA, 811 bp, Homo sapiens
ctcccaagtagctgggactacaggcgcccgcatctacgcccggctaattttttgtatttttagtagagacggggtttcaccgttttagccgggatggtctcgatctcctgacctcgtgatccgcccgcctcggcctcccaaagtgctgggattacaggcgtgagccaccgcgcccggccacatttcacttcttaagtcttctgtgtttttgggtcatcaaatattcccggagagatgctcttgaggatctaagatccagctgtgggatgaggtgtacttcccaccctgccacaatcactgggcctgcccatacgggcagaggccctgtgcgccccacctgcctctctcacggtgtgacctcatggcgtgagctcaggaagcttgcggatgggaggtggtggccgtcgatgcttggcgtccttgcatgttgtgtccatgggccagcggttcatgtcacgcaacaagcgcaagggctggacccaggggaggttccttttgacagatgcggatcggggcctctcgtgaccaagctgtccttggtgtggacgggctcgtcggctaacgtggcagtgagggtcactcccaccgttgcgagccatgtttcccatcttgtggacggcttccaactaggggccttggtccgcccccttcaattggccccccgaattctttccccaagaataaggacctcgtgggggcttctgggtagagacactcttcttcataaaccgttacaaccacgaggcttgacccttgctgtttggtcggggcgatagtgggcagggagtactttggcggaggggaccttggg

SEQ ID NO: 124874 - DNA, 350 bp, Homo sapiens
aaatatgtacgtgccgaggcttttcctccccacacctacctcaactctttctgccgacacactgcacttttcaagggaacccaagtttgggttcggcaagaattgtacgttgcacaccgtgtgtgataattccagggaatttcaatcgcatcttgtcttccttcctaagcaaattcggtgggaacctggtgtggtgtgatagaaaaagccccgagttctctgtggtagaccacatcaatttcatgtgccagtctctcagactccggcttgcctctctcaaggaagggaacaatggtttgcttggcttcactcctctctttccccccaatttccacatgggtatctggcta

SEQ ID NO: 124875 - DNA, 959 bp, Homo sapiens
gcacagagtcagattgtccaaaagttttaccctgtcaaccttcaggagtgctatggggttctcccatgcactctgtcctgagaaaatgccactaacccactttagatttgcacctaattcttctggtggacacttggcctttcactgtgaattttgtcataaggaaaataacgacttgaatgtatttaacggacaatcagtgtgactacatagtatatgtttagagctggagagggatatcagagagatccggtataggctcccaaactaaagagctgagtttcactagggagagagagacctgtacatgaacagcacaaatcacagaatcccaagtttctcctatgtgccacttccataagactgagtccactggagtgggaatgattcctaatttatactgaattattcttttgattattttcatggctatcacatatggtacatatcctaggccatttaaggttgctcaattatattggctgcctatttttaacatagccatttatgtaactcaagagtcaggaagctacctttgaacactgtaaattgtcaaatggtttttgatttcctaggttccttatcacttggcaaatatgtacagcagaccttttccagagaatgagtgcactgggacttatcccccagacattccttctctttgttaaacccacagtctcaggcagggactccagcaaccctttcctcgggaggaagaagcctctagatttcaggagtgccctccagtggctgctctgctaactaatcctctactgatctccccaaggctgactggggcagcacttcttgcagagctaaagcccagctgaaaactgaggtaggatcttctcacttagaaatatccagcagtaggaaaaggcctcgatcattgcatagacaggctaaaattgacgagtgctttctgtcagaaagtttgtggggtttggtgcatttttttt

SEQ ID NO: 124876 - DNA, 655 bp, Homo sapiens
ggatgtgcttaatgtctccagcgatgaacgttttctgccagagaaactcatctgagcctaggaatgcagggtttttatgggagccagttacataggcacattggcctagccaaattgcagccctccagaagaaaggcaagttttcagcataaaccacattgtttgtacagacagtttaggcatagtacatgacccttatcagatagggaatggtgggaacacaccgaaaatccaaggttgcaagcacaagccaggggccaaacttgtaacaggcctttctaaggatagcagtctcagcctgctatggtatctcttttatgcacactgctaatagagacaaaacaaatcttttaaaaagctaagaaatgggctgggcgcggtggctcacgcctgtaatcccagcgctttgggaggccgaggcgggcggatcacgaggtcaggagattgagaccatcctggctaacacggtgaaaccccgtctctactaaaaatacaaaaaattagccgggcgtgatggcaggtgcctgtagtcccagctgctcgggaggctgaggcaggagaacggcatgaacccgggaggcggagcttgcagtgagctgagattgcgccactgcactccagcctgggcgacagagtgagactccatctcaaaaaa

SEQ ID NO: 124877 - DNA, 613 bp, Homo sapiens
ctgtcttggcctcccaaagtgctgggactacaggtgcaagccactgcgcccagcccttgaggagttttcaaagtatccacagcacccaaggctgagaactgctacagcagctgaaagccataagtgtctttgactttccttttgtcctggtaaaccccttcattccttccttccttccttcctacactcattcaatcaaacactggttgaacaccaacaagtcccagcactgtgggctccaccctggcctctggggagtgggggagggacccccgatttggagattgtaggtgccaagaggaacgggcaagatgccctcctattcattcatttattccttcagggcctctccaagggcacagggtcttttcttgttggcatctgggttttcctctcctgtaagctgggaaggagatttctccctcaaggagctgttggccagatcaaagactaaaataatgctaaacagagcttccgtttcctgataaatgtatcaggagccaagcacttaaaatatattatcccgttgaatccccaagtaggattaaaacctcaaagcagagattgctcttatcctcacatgacagatgaggaaactgaggatcaaagaagt

SEQ ID NO: 124878 - DNA, 504 bp, Homo sapiens
gccggaacgagctcatagcaaaaccaaaaatctgcagacatttccaaccaaaccaaatgagaaggtatccctttgaaccctgaaaatagaagcaggcaagaataaataattgatagtcacaagacctgcatggcatcctcatctgggcaggagaaagcagaggagagtaatgaggcatttaacaaacctgagaacaggaaacccctaaaatatactacaggtattcactggaaggctcagcaggccaattttggaagagtagctgaaacggttttgcctattccaatttgctggtgagagcagtggggagcccttcagtgaggtctgaaaggtatggagaagtccggcccctgtgaactctcaaaacccaccaggtaggaatctcttttaggacaggtttgttccctaaagatactactgggactagaattaaaattgaacagaataggcattacagagatgaaggaaagaaggtagacaaaagtgatgagaatctccaggaaa

SEQ ID NO: 124879 - DNA, 418 bp, Homo sapiens
gctcaatgagaggtaaaggaactcagagatgctagagagctcatatggcagagctagaattcattctaagcctgtctccaaagtctgcacccttttctactacgttatactgcttttcaccatgctctatcagcagcagcttcttcatcttatgagaaagtcaaaaggcatgtttccaaagcagtttactatgattgactttccactgattagggttcctaaaactttttattgaagtatactaacacaaaagtctacatgtcaaagtgcacagacaaaaaaaaaaaaaattcacaattcacacaaattgaacacacccaatgtaactagtagccagataaagaaacaacatcggtccaggcatgtggctcacacctgtagtcccagcactttgggaagccaagacaggaagatcatt

SEQ ID NO: 124880 - DNA, 230 bp, Homo sapiens
aggccccaggtgaccccaccctgttgtctaggcagcctggccctgagacagccttgtgctgaggccctggagtgggacgttccactgggcgagggggacatgggtgccaggccctgtgctagacggtttcccctggctcctaccaccgggcgcaaagcgggctggggattgaggctaagaggcagcctgcatgaatgtgggagggactggccaggcccttgatgctctgc

SEQ ID NO: 124881 - DNA, 634 bp, Homo sapiens
gactaacctggttttgatcaaggtgtttttttttgctttttgtcccttgtaaaagttaagagaagctgtaactagtaattaaaatagtaagccagcttctcattcatgtcaattctttcatattataggtacagttaaacctatagctgcaggttacgcacatacaaaatcggcaaggctagtcttctcttagaacagtcatgggtatgaattcaaacaaaagatctttgcttttggttaatataatagattgacaaactgctgaggagagttaagaaattcacaggctagtatgtaggctaaatgttcttttcgtactgctcccaggaatgttctgccttttagaactagaggctgatttcttttcttgacattttaaatccaaaggattcagcctttagattgggtttttaagctctgtgaaatcaccaactgtatctagttttagtttcctttctacctaatgaaaatgaaatttactcagtttcatttttagggggaaaggcaggagagcagtagctttgagcatatcactagggatgaattcaaaatcgatttttcttgaggcagtgacttatggcagatagttgacaagagaaaaattaagttttgagcttatatctcaaatactgaa

SEQ ID NO: 124882 - DNA, 140 bp, Homo sapiens
gtagtgatattaatagctggttttcattgagcaccaattatatgccaggtatgttaataactatggctaacatttattcactgcatttattggatacactttacatgtattcctatttctcatttttccctcatagcaat

SEQ ID NO: 124883 - DNA, 592 bp, Homo sapiens
catacatccgcttggggatgaaaacaagggcagacaggctggttaactcttgaaaaggcttagattcactgcgtcctgttaggcttccaaggaatgccaaatattccccctgtcgtgagagacacaaggtaaaattgacattgttacttggaggccaaatagctctggagggctgacccacagagcctgtaacttctgggaatagtaacgagagactggcatgccttattgccccgggctgtggggtcttggaagagagctgctatgcagttcatattctgtgggtcggaggaccatccaagtggaaaggggacgatttgggtctctgctctgcctgttgcaaaagcgcaacaatcgcttttatttaaggtgtgagcggaatatttaatccatttcagccaggcatttatatcttggtacccagttgttatggctaaagtttgttttaaatccttgacttttattataactactttggttttgtcattgggcatgaaatggtagatggtttgattggatgggcttggggaaggggtaacaatagaggatagcggggaagaaacaaagcgcatttcaaagaagcctgtagagt

SEQ ID NO: 124884 - DNA, 595 bp, Homo sapiens
attttagttgttgcctaccataattacattgttgtatactgggtaaaattgtttcccttttacagattaggaagtgaaggagcaaagaagttaaattatttgtttcaagccctgggcactagcacacaatataactggtttttcagcttggatcttcttcatccaagaagactatctgaaactctgaggtcaaagcaaatgctagaatgtaagctgcatgaaggagatgttcattgtaatcatatcaccctgcatagtgccaggaatgtaataagtatttcataattattacaaaaagagatggtacaaactaatgaacatttaaattaaaaaagttcattagcttggcttatttattttattgcaacttgtttaaagatggttgctctgttttcctaagactcaagactaaagtgatataacaaatttgacaaagtagttgtaattaaaatttgttcatttctgaaaaagatgtaaaaaacaatttatctatctacctaaatatccatgttgcctaagaaatagaattcaatctttaatgcaagctgagagagaataacatcgttttcctaatttttttttgttgccagttctt

SEQ ID NO: 124885 - DNA, 487 bp, Homo sapiens
ctctaagtggagatagcagacaaccttgtttatgtggcgccagcatccattcctgttctgggtataacaccttgattttcctctaggaaaaccacctttcgtccactctcagtccacgtggcgtgggtggaaataacactcccaacactgcaagggaaagcacgtactgcaggcccggccagtgcattccatctccccggccatgtgatggttcagggataggtgtgcttcccaagctatgcctcccaaggaccctcctggaaaagtccttatctctcctcctctacaattactagtgatatgagccagggctactagggaagggaggaagacgtcatttcttcacacacaaaggaaggagtcattttaccaactttttaggttcacaattatgagcaaccttaaatgttccatggaaaaatctgcccaagatgccaggcacgatggctcatgcctataatcccagcacttccggaggctgaggtgg

SEQ ID NO: 124886 - DNA, 299 bp, Homo sapiens
aagacacggtctttctgtcacctaggccagagtgcagtggtgcaatcacagctcactgcagcctccgcctcccaggcttagatgatcctcctacctctcagcctcctgagcagctgggactacaggcatgcgccactgcacccgagtaattttttatcttttttgtagagacaggctctcaatatgttacccaggctagtcttgaactcctgtcctcaagctgaggatcctcccacctcgactgatttttgttttttgtgtttgtttgtttgtctgtttgtttgacagagtcttgctct

SEQ ID NO: 124887 - DNA, 220 bp, Homo sapiens
tatgtatgcatggagcatcttttatgtgacaggcagtgttctgggtgctggtgatataataataagacagaaacccctgcctttaaagaattggggttgaggggagagacaagcaataaacagatcctcctccaagcagaggaggagtgatgtgttctgttaagtctttaggaagatcactttgggccaggtgtggtggctcatgcctgtaatcccagca

SEQ ID NO: 124888 - DNA, 416 bp, Homo sapiens
ggcagaatttgaagaattaagaaagagctttctcacagtggaatccacccacattgaagactgttcttttgttgaagtagtcagccagtaatttcacttaacaaatgcatagtgtttactatgtgctggatagtgttctaagtgctttacccttatttaaaaatcctatgaagtaggcactgttattacatctcttttacgacagggaagtttagtaccttgcccaagattacacattgagtaaatggtggagttgggattgaaatccaggtggtctggttccagagtctgtactcttaagagcagaacaataataactccaagcatttattaaattctcaagatttatccggcaccatgctacatgcttgtattcaagcagaggctggtgatcatcttttagaaatattttagaa

SEQ ID NO: 124889 - DNA, 120 bp, Homo sapiens
ttaacaagggcttgtaagagaagaattgcagccatggaactggtgaccactggaagaaatgacagtagtgcccctaaaacatggtggtaacatccagcgatggcaaagccagttttagga

SEQ ID NO: 124890 - DNA, 230 bp, Homo sapiens
taatgagcttcggtaccgtctgagcaagctgggaacagctaaataggttgttgttgttggttaaaaaatagtagagggatgatgctaataattaggccggcctggggcaggcgggtgtaacccatctctccagtacagtgtgtgctttactcagaggagcgtgaaattttaaaaatcagaacagtcacttaaaatttcagttaggatgttgctacagttaaaccataata

SEQ ID NO: 124891 - DNA, 676 bp, Homo sapiens
tacttcgtcctttacagaaaaatgtgtttgtccccttatagcctaggatattaaagcaaaaatttcaaattcaaagtcaaataaagcccccattgtatataatctctggaatttctatctctagtatttctcccccaataactaagttgtgtattcacatatagacttatgtaaatgaatatataattacagaaatataggtatagcaaaagtaattattgctttggaaactaggagtattccaatgccatgtccttttagcacatagcaaacaggatgacctttccatcctaggaaaatatttttatgtttaacctcattgcactcaaccagacgtttccttgcacagattttcaagtgaaatatttcaatcctgcattcatcttgggggccacgtgtcttatccaagttaaatatttccagaaaataaatgtctagacaccgtctcatataaattaagcacccggtttttaaaagattcctagcagacctcctttctggtgtgtgggtgaatataattttactcctgtgaaaaatgctgggtaaaacctgatgtgcctaagtcagtgcacctgcaggtgactaatgagtgctgctccgtcattagtggacaatgcatgtgtgtacttgtgtgtgcgtgcatgtgtttgcctctgtgtgtgtgtgtgtgtgtgta

SEQ ID NO: 124892 - DNA, 380 bp, Homo sapiens
gtttaaatcaagatccacataaagtccacaagtacatgtttttctttgcaaattatttgttgaaaaaacagttctttatcttacaaagtttcttaccatttgaattttactaattggtgtagttttaataactcgtcagccctctgtatatagtcagcaagaaccccttcaagttggctcctaggtccttttaacatggtcctagaaaccagtgacagcttccttgttacctggtacgaggctcattttgttcacctcttgtcaaagagtcagaattagccatttctccaaaaagccttggctctttattgagaaaggctgcttgaaaaccataacctgggcactaagtttggttattactaaaatggtcacagtggagg

SEQ ID NO: 124893 - DNA, 222 bp, Homo sapiens
ggagtgggaataaatggagcctccagagttacttgtccccaggctccagaatgtactcactgatcctagtgaggcccaaacctgtggcctggagtggcttgtgtgaactgggttctacactggcaaaatccaatccatttgacagcagtgaaattggagtgggatggagaaggtcatcgtatcctttcatcaatcccaaagcctgttgctactggctttttt

SEQ ID NO: 124894 - DNA, 196 bp, Homo sapiens
tgggtccagaaggctccattaccctgaggaccagaggtggctcccagtgctctgagtctgtaagggagtaaccgggagggtgatggatgggcaggtacttcaaggcctgaggctgagcctgatggtccccgaagttagcaacatccttgtcctgccaaggcctcttcctgggctgagccgggggtgggcactgcca

SEQ ID NO: 124895 - DNA, 441 bp, Homo sapiens
gtgtgtgcaccatacacacacacccgaagtggtgcggactggagccctccaggctggcctcgggcttgaaggcagaaagaccatggggtttctttagttttctgggtcaggattccccatttgttgggaccacatcaagcatcaatctgacaatagctgtttccttagtgcttactgtgtcccgccactgtgatcagcacatttcacagccacagaaccaccctctggagctgttcctggttagggatggcacgaaccatctctgtgtggccaggcctgctggggctgccctaggcggtggccatgctggggctgcgcttgtggcctcctggcactgtcgtctggcctggcattctcttggggcccaggtgttcctgggtaaagcagggcctggggtcaggagctgggcttccatccgaggtgggtgccagatgctcagct

SEQ ID NO: 124896 - DNA, 413 bp, Homo sapiens
agatccattgcgggtggtcctagagtgcagcagttaaacacatgattttagaatcagtcagaactgagtttgagtcccagcctggcctcgtacaggctgtgtgactttgggcaaatgactaaacctctctgagcctctgtgtgcccagagggataatggtatttatctcagagtgctgggtaaatctccaggtacttgaaaggacttgatatatggcaagtgttatttttgaaggtataagggcagtttatcctccaaagagttggtactcagaagagcatctctttgtactgtgaagaagctgtctttagtaatcacattttagtggttattattattataaaaatttaatctaaaaatgtatagtagagacagagtctgcctatgttgacctttaggctggtcttgaaata

SEQ ID NO: 124897 - DNA, 648 bp, Homo sapiens
tagaaaatcaaaaggattcattgaaagttgagacaaaattgtgaagtaggaagatgtcttcctccgtaagaggagaaagattgttagaggaagtacatggaggctttggtgacacatccctatgaggaagtgatctgcttccacgggaaggagagaacagatgatagatgactcctagatgctcctgcgtcatgttcagtacaaaatcagagccgcatcagcaaaccggataccctgggaaggaacattgggataactccttggccataaacaaaagttttgctctggccttatgactaagtggattaatagagattagttgttcaatatccttccatctaatggatccatattgttaaaacttaagaaacaccaaagggggagagtgtgagaatctactgccattttctccattgcttcattcaagacttctgtgtccaccttggcatgggattatcatttgcccttttatactcaccttaaactacaaagatcatttgtttgcctttctgaagaaaggaaggtggataaattttgcaggagactttaaaaattcagctcaactcctggcattaaagacaataaaggtggtgattcagaggtccccatggcagtttccccaaatattacgtttaactaagatcatct

SEQ ID NO: 124898 - DNA, 666 bp, Homo sapiens
cgtggtcggcggctgctgggctccgcgccggggtccgagtcccacgaagccccggcccgagccgccggatgcccgcgcgcagcggggcccagtttgccgacggatggggcaaaagaagcagcgaccagctagagcagggcagccacacagctcgtccgacgcagcccaggcacctgcagagcagccacacagctcgtccgatgcagcccaggcaccttgccccagggagcgctgctgggaccgccaccactccgggcccataccgcagcatctatttctcaagcccaaagggccaccttacccgactggggtggagttcttcgaccagccggcagtccccctggcccgggcatttctgggacaggtcctagtcgggcgattcctaatggcacagaactccgaggccgcatcgtggagaccgaggcatacctggggccagaggatgaagccgccactcaaggggtggcggcagacccccgaaatcgaggcatgttcatgaagcggggaccctgtacgtgtccatcatttacggcatgtacttctgcatgaacatctccaggcagggggacggggctcgcgtcttgctggagcactggagcccctggaaggtccggagaccattgcgtcggcttcgaagacacctcggaaggaccgcagccgtgtcct

SEQ ID NO: 124899 - DNA, 555 bp, Homo sapiens
aatcatagggggtcaaagcttgtcttcttgtgctgagtcagttattgggtgggagggccacaggaccagatgagccagttttgtaaggtctgggtggcaccagctggtcatcagaatacagggtctgaaaaatacttcaattcctatctttggttcaaagaaccaaaggaaaaatacttcagttcctatctataggagcaattgaggaggttaagaatcttgtgatccctgactgcatgactcctgcaccgtaatttctagtcttgtggctaatgtgttagttttacaaaggtggtctggtccccatgcaaggagggggtttgtttggggaaggggctgttacctgtttcaaagttaaactataaattccttccttagttagcttgacctgtgcccaggagtgaacaaggtagcctggaggttagaagtaagatggagttgcttaggtcagatttctttcactgccataacttcctatgtcagatttttcactgtcatgatttttgcaaaggcagtttcagtctgtctgcttctacttgtttgatccacgcttct

SEQ ID NO: 124900 - DNA, 143 bp, Homo sapiens
atgcttgggctggagggcaaagtggaattcaccagcatgcagggtggaagtacaaccctagcagacggaacagcactggcaaaggttcagaggcaagaagctttacatgtgaaaggatacatttttagaacactaaacattct

SEQ ID NO: 124901 - DNA, 1132 bp, Homo sapiens
atcagcattgtgaatagtcatttctagaaaaaatgatctcatttactagtctattgaattaaagaaggtaatgtaggatcttgaaagttggggttcttattttcaagattttttataaagttgagtatctagactgcaaaatgtgtcagtggttttagagggaagaattagcttttcattctttgcagagtctggtgagagtgcttgaatccatgtctaaaaaaagggctttgcttactaaagctttatgtagttacttaaaaaataagtgtgctcctacttctttttttcctgaatccttcaggcttatacagtttaggaaccattaatttgaatcagttatttgggcaacttacctgtaatattttcattatgtaggttacttagcatatgctatcctgtattgtcacatgttaatgcacacgtcttaattttacaactagatcataagacccagcagcagggagctagtttgattatatatttgttctctagcacctaactaaattatccttattacaccaataaatactaaaggataatggtctgtgtcaggttccacatttgacggctactgaatacgttatgaggtgattcactagctgactactaaatatgctagggctgttatacagaatacccgtagacttacatggcttcagccaacagaaaatatgggatgactttacaatatctgggaaaattggccaggttggacaaaatccaaggcaaccggcaaggtatcctctcctacgttatcttggcagaatggcacaccttgtcggcatggtgacacaaagtaagctttaacctactgcaagtaaacttcctgatttctccttaccattaaacgctcgccagttccgtaattggaattttaggagaaccccagagtactgtgatcattgtaaccactaatacactgtgtttaagagcctgtttacgaaaaataagaacataagggcaaatttgggaatcacatttgaaattttacaggtgacaaatattagaccgtctaaacagaatccctgaacaggaagaagccacggtaataatatataaaaatacagcaatgattatagaacaacacgattcgttagagattgtaaagagatgtgaccagtatagcaaa

SEQ ID NO: 124902 - DNA, 221 bp, Homo sapiens
agtgaactctagtcagaagtcagagtggtgttttgtttttaatttgaatgcctttaggcaggtgtgttctccagttcattaccatttgcgcattcccctgtgccctctagtctcctgcctggcccctggcccctgtgggaatttgcagccctgcatctggttggtgtctaccgtttctttcgatttagacaatctagagggcagtgagaaattggaaaggg

SEQ ID NO: 124903 - DNA, 114 bp, Homo sapiens
aaaggagaggctatttcaaatcttgatggaaaatcagctagagaatgtgagggaaaagagattaaaatattctaacaatagtggtataaagaaatgtctaggaattacgaactg

SEQ ID NO: 124904 - DNA, 621 bp, Homo sapiens
agaggatccccgagctctctctgtgggggacgctggatattttacttggtgtattatttctatccaggttttatttggtcatacttctaaaaagtcaggatgggaataaaaagctaatttaattggaaaaatagctcatataaagagaggtaaaatgaatagagcatttatcctatagaagagatgactaaaaggtaatatgaactttttactctttttctttttattattattctttaagttttaggggacatgtgcacatggtgcaggttagttacatacgtatacatgtgccaggctggtgtgctgcacccactaactcgtcatctagcattaggtatatctcccaaggctatcccttccccctccccacagagagagcgtcgacgctctctctgtggatctccacagtgtgatcccgaatcccctacttcacccaaactggcttaatcataatcccttacttcttttgagttcctcctatctggaactcacttcccccactctccattattcaaggtctacttcaaattcctatgtctccaccaaatacacaaagatcttccccacaaagtacacagtgatctatctctgaaatctctgagaccatcccttatatgt

SEQ ID NO: 124905 - DNA, 322 bp, Homo sapiens
cagtaggttgtcccttatctctataggacacgtaacagtttctgatgtattctcttatgaaagtgtttccagaagtcaccaatttgaacatatttttgaattctaataaaaagctttgttgttgttgtctacttaagtatttctgtatttatgttgagatcagaattatgtaacagctggatagagacatcagtaagatactctatttgaatagacctaggagcacaggtcctgggagtagataaacaagaaagactaacaccctgggagttactccagttgtgaacactgttttcactaatactattctaatagcagtttt

SEQ ID NO: 124906 - DNA, 706 bp, Homo sapiens
gcctataggcaacattgtaatatcatgggaactattgaggttttcctataaaatatcttcatcatatttcctccatggctgaaatctgaccattggagatttactgtttggggtagaacatcgattagtcccttattacagtataaatgccatgaaactcagaagttgtaagcctgtgcaacagtagagttaaatggctctgtggccaggtggcaggaaagggtgagaagatagctgaatgtactgtgggtaagtggcatatgagataatcttcgtaactgccttgggtgagcccgctgagggtcccagtggaaggtgctgagtgggcaggcaggactcaagctgctgtcttcccatagtgccttgcagttcctgccctggatttctggtgggaagtccagaaggccctgggagggaaagcagcaattaacaatatgggaagcattagaggaaatctcctccattgcctcctctcctggctcgacatgctgcctacataatacccatgtatttgccaaaggttgagccaagccagggccctttcttttcacagacttatacagctgtttcactatagagccaggctaaataaacaattctttttcatttcctgcctttctcctgaggacttggtgctgtagatgacagtttctttctttcctatagtgtcttcacagggctaaatatgggaataggcattgtgttc

SEQ ID NO: 124907 - DNA, 497 bp, Homo sapiens
gctttggcgaaatgtctatttagatcatttgcccattttaaaaattgaattatttgtttttttcttattgagttgtttgagttccttatatattctgtttagtaatcacttttcagatagatgctttgcaaatattttcttccattctgtaggttgtctcttaactttatagattgttttctttgctacgtaaaacatttttagcttgatgtaatccaacttgtctatatccaggttttattgtgtgtgcttttgaggtcttaccccatacatctttgcccacaccaatgtcctgaagtgattcctcgctgttttcttttagtaatttcatagtgtcaggtcttatttttaaatcttttatccctttatatttggtattggaatattgtgaaggatagaaatctaattttatttttctgcatatggatatctagctttcccatgtattgaagagattgttctttccccaaagtatgttcttggcacctttgtcaaaa

SEQ ID NO: 124908 - DNA, 386 bp, Homo sapiens
cactgtttgcatatgcagacaggttgtgtttcttctgtgagaattccgttcctgtgcgtggatcatgacaggcacctgtgctaatgaacttctgcccttgctcacgtcagagctgctgataaggggtgtttctatgggttgagtacgagtcattctattgacacactgttaaaaacattctttgcattctgctgttccataaaggaacaattttaggtttaatggaaatcttgcgatctcttttcctagagaagatttgtgataataatcatacacgtatttggaatgcatgtacttatgcttgtatgatcaatttccaaatgattctaaatatctgcaggcagaatttcttaagattagcattctgtgctgtacccaaaaagata

SEQ ID NO: 124909 - DNA, 206 bp, Homo sapiens
gtgccccaatccctgtgttgttcaatagtcaactgtactattttgattacaatgtaggtcaagaaattgattaatttaatgtttgcgcttcattgtaatactttctacaacagatcataactcatgtgcattttacttgggcagtgccctgaatagaaacacaactggagggccgggcgcggtggctcacgcctgtaatcccagca

SEQ ID NO: 124910 - DNA, 847 bp, Homo sapiens
gttcaactaggtttttgttttgtgatgtttgagatagggttgagacccaggttggagtgcagtggcacaatcttggctcactgcaacctccaccttctaggcccaagcggtcctcccacctcagccccccaagtagctgggaataacggcgtgcgccaccatgctcagctaattttttggtagagtggggtttctccacgttatcccggctggtctcaaactcataggctcaagtgatcctcccaccttggcttcccaatgtcctgggattacaggtgtgagctactgtgcctggcataggttgtttttaatacagaaaaatattttaaaaaccagaagcagcccataatcctagtagccttgataactcttatttaacatttaaatttaaaatgaaataatatctttgcatctttaagaaattttcaggaagaataaaaaaaatgcgaaagctttccctcatagtccctctcctcaaaggtgtctcgacagtttcttaagtacttcccaggaagtatgagaaagtgagtgtctatttttttttgaatctagataaaagaaacactatattacacaaaaatatgctatactttacttctttacttaatttaaatggaaactctccttatcagcattgtagataatcttatcctttgtaaaaactgcatggattgtttccattgattggataagtcatagcctgtttaacaagtcaatctcaggatggtttacagttttctctagtatgaaaaatgctgaccaggtgcagtgcctattatcccagcactttgggaggctgaggcgggtggattacctaggtcaggagttcgagaccagcctggccacc

SEQ ID NO: 124911 - DNA, 440 bp, Homo sapiens
ctttagtggtggctgtgccttcactggggctaggacgtttctggacccacaactgcagtgtgatgcaaagaccttcaacatgacacaagagaacatattttaaaaagagatctagacttgaaaactggtctccatgagcacagtaaagttaactggaactctcacaccacgtgtttgggaagtgggactcgctgagaaaatgttagaataattttcaaatatatgaagagttacaaagagcaatgattgcaacttcaaagaaagggagagccgggcatggtgtctcatgcccgtaatccagcactttgagatgcagaggcaggaggatggcttgagaccagttcgagaccaacctgggcaacatggtgaatcccaatctctgctaaaaaatacaaaaattagccgggtatggtggtgcatgacagtagccccagctattc

SEQ ID NO: 124912 - DNA, 733 bp, Homo sapiens
tacagatttctttcttttgttttgttttgtttttgtttttgagatggagtctcactctgccaccaggctggagtgtagtggcgcaatctcaggctcactgcaacctccgcctcctgggttcaggcaattctcctgcctcagcctcccaagtagctgggactacaggcacgcaccaccatgcccagctaatttttttttgtattttcagtagagatggggtttcaccatgttggccaggatgtctcgatctcttgacctcgtgatccacccgcctcagcctcccaaagtgctgggattacaggcctgagccaccgtgcctggccaaacctacaaatttcttattatgtaactagcattttatgtacatgtacacagatacacatatgcctagatacatagataattagaaggctcctttgttaacattcaagaatatttatctcaaatcaacaatcaatgctattcttaatggtgaatttctacagataccacatccttgtaactattaattagcattattttaaaacttttagccaggttattagccaaaataaaatatgtttatatattggaaaggagacagtgttactttgtagatggtatcttatatatagaaaaactctgaagcgaaaaccaacttaattttaggtagaaggactatgtgaaaacacagatttgacagatttttgtgtttcaacaataatcagtaattagaaaaagcaatactatttta

SEQ ID NO: 124913 - DNA, 552 bp, Homo sapiens
ctttagaggatcccgtctgagcaacctgggaatagtggggactatatcagcatttgacagatgaggaaacaatgtcggcgaaggacccaatttgtttttagtccctgaagatcagagactgctacctgggaccaaagctcaggcccctcttagtgtgttctaggccttcagggactcttgtattgtgactggactgagtaggggggtagtggggatcaggccactttttgttcaatcctggaagtgggaagggtcaggggaagaaaaggggctgcagaggagtcgaaggtctcccaaaggtgtgcctcagaaggagactctctgacccagaaagccagccattcagctttgcccccctactcctctccccagtttcctgagagctctggttactctccggctctgtgtctccagagtgcctgctgcccagttgtaagtggttagtgggcataaggatggggattccaaatctgtatcgttacacccaggggcttgccagagactaaaggtggggaatggagggcagagattgggagagttgccttctaacgg

SEQ ID NO: 124914 - DNA, 382 bp, Homo sapiens
tcctgacagaatctctaacacatcttctgagggtgggagaactgtcacagaagcaacctgcaggtgtgagatggactccagggccttggcactcatcagaagaaagcttgacctcctcacctgcatggggttggggaacaaagcaaattaagcatcagagaaagacctggcggtatgacacgattaagccataatggcaccagggcacagctgccaagcaggttgtcagaagggcagacagagtgatggagttttttgttggggtactgtcatatagttatttgatgaagccatctctctgtttttgactacattcttgctttcattggattttttcctacatcttgacccctaacctcctgcaacaggtatgggtgggagt

SEQ ID NO: 124915 - DNA, 174 bp, Homo sapiens
ctgtgtgaacccacttgcatgaggagcctagaagagacaaattcatagagacagaaagtagaacagaagttggcagggcctggcaggatggggaatacagagttattgcttgatggacacagattttctgtctggttgatgaaaaagttctggagagagattgtagtgatagtt

SEQ ID NO: 124916 - DNA, 505 bp, Homo sapiens
gtcacccaggctggagtgcagtagcagatctcagctcactgtaatctctgcccactgcaatctctgccttccgggaagagaaggtgagggttaaagaaagacacacacacacacacagaggagaaagaaagagagaggagacagagctagagagcgcgagcttgacagcaaatgcggctttatgtgcagcacaaaacctacagaagtaggggaccagcctaatgccacagcccactgctaagtcttacaggctaagggtacttataggtatgggcgggaggggtctgggcagcatggcttgttgccctgcaagatatcgataagatgttcccatgatttgtattgatttgtacaataagggttctggcccttattcaggtggatgtcatcatggtgttccttggacgtttgcccaagaagtcatgagagggaagtttcttcagataagcctctgttggccttgcggtcaagtggttaggaaggatgtttctcaccgcctaaaccc

SEQ ID NO: 124917 - DNA, 625 bp, Homo sapiens
cctagttgtttataaaccatgggaaagaatgaaatcattgaccaaatgagacagggtaacagtcttccctgggagtaaagagactagcagtctctattgacatatattttaggcctggcctccaaaataaatttacccaaagaagtgatgtatttgtgtccagggctaccgagcctaatctttggctgcctctgtgttattctaagttgtaattttccatgtcatctaaatttgtaataattctttaatatgatagtgtttcagtgaacaaacattctgcttgctgcatttcttctgagtgagtaattccctgacaactaccagatcttggcagaagcaaagttggtcataagttatgctccactctcagtgctggtgaaacgtatgatgcgtaacacagtgtttttgaattcagtgctgattttcctaaaggacatttggaaggaaaaaagaaaaggaaaggaaatacccaaattcaggaatagaacttacatattattataagacttaaaaaatacatgaacactaatgatgaactcatttcttcgaagtaaaaggccttatgctattttttcccatttccctatgtggcttgattgtggcgaaagtggctgtgtgagtttcc

SEQ ID NO: 124918 - DNA, 668 bp, Homo sapiens
tctgcctcagcctcccaaaatgctgggattgcaggtgtgaggcactacacccagctgacggaaatgtgctgcatcttgatagtcatggtggtttcctgggtgtaaccaattgtcaccactgatcagtgatacacttgaaatagatgcagtttattgttcttaacttattcctcaatgaagttgataacttaaagagaaaaggaaaaataggggtccttagcagtgtcaagggacctggctgggggcactggacgtgccaatgaggagagtcttgatgattctgagggctgcctgggtagaatttcagtgggcagaaaagtcagcattccacgcactctattcttcctttcctccttcccctcctctttcttctttttttccctgctttgcctccttcttaaattcttcttttctaatttataagacagctagaataggagggagatactgagggctctggagatttttattgtccccttgggaagaggctacgggcagaactggaggaaaaggttcgtcgtactcaggggagaatttccagtctagctgtggacactgacctttgcatgtctttcgtccctcctcccatactggaaaatgaaaggattgttgtgtttatcataacacatttttggtcattttagtttagtttgtaattagactataat

SEQ ID NO: 124919 - DNA, 449 bp, Homo sapiens
gaacaagtccagctagaggcacgcagagcatccctaggccttcccttccagttggctcgagacatagaaatgctctgtgtacatttcttccttctttggctgctgctgttcaaatgtttgaaggccaagttgacgccaggccaggaaagtgtaaggccagcccggggtgtttcatgcagatggctaacaaactctgtccaagctgtgggtaatcttagtgtctgacccagtgttgcatgcattgacaacagtccatactaacttaaacaaagttgtgcatttgagaggggcaaggaatgagactcttgacccctacaaaccaggagcaaaagtcgtcccctggctatttatgtgggggggagcccagtgggagacaggcatttgctgatggaactgagccccaatatggtcatagctaaacacagaggcctccacatctctataaagaa

SEQ ID NO: 124920 - DNA, 236 bp, Homo sapiens
tcactatgttgcttaagctggtctagaactcaagccagtctctcacttcagcctcttgagtcgttgggattacagaagccaccatgtccaactgctgatcttgaactcctgggctcaagtgatcctcccacctcggcctcccaatgtgttgggattacaggcgtgagttgcggcgcccagctgatatgtatacttttctataggtatattacacttcaataaaaagtttgaaacag

SEQ ID NO: 124921 - DNA, 258 bp, Homo sapiens
gaaacagatgatttctgcattttactggaaaaaaaagactaaaatgtacagctagtattgaattggggtaataatctgccacttttttgcccttcaatgctgtcgtgatcttttagggaagtgaggtcatggtagacccgcttgttaatcatttctgcgttttcagctcagtttggtcatgaatacttgacttgctacctatagtcttgcttctgtttgcctctttgcatgcagctccttaaattgtttaaattacca

SEQ ID NO: 124922 - DNA, 493 bp, Homo sapiens
gaccctgggaactaaagaaaaatgagcagggaacttccacccatgctcttagaaaagttctccagaaaaccatttcaggatctacttttgttatctgagatattttcctggacagctctttatgtctcccgtggcacctcctttatgaaactttttcttatcctcccttgcgtttgtgcctcccgtgtgtgtagaacacattcttaccacttacctctctcagaatcagttcattcgggtaggaacagggctgacttcaaatctaatccccaaaccttaccgtgttgctgtaagtgtgcactgtgaggctggaaagtcacaagggctgtagaatgcagtggctgtggcacaggatggggagggctaggttggctggggaacgatcgggcagggcttgaatgccaagttaagggaatctggtcagtagttcccaaatgaatttctgaatctctagggaaaaacagtaaaatacacacttccccagcctcacaca

SEQ ID NO: 124923 - DNA, 299 bp, Homo sapiens
ttaacttttatgagtttattgtcaagggagaaacttgaaaagataatcatttctcaaacagtcctcatggacttcctaaggctttcctggaaattctagggtaaagaatagaaataaaccggtagggcttggtacccttaggcccagatacaagcagagctactcctttccatttgttttccatttgaatttctgtgtgttcatttgagggaagggtcctgcactaaaaatgtttgaaaccgctgtattagaatgctctgtcacctacaacagtcttgttgttcatgtgggtagatact

SEQ ID NO: 124924 - DNA, 239 bp, Homo sapiens
aacagctccagctctgagcagccctgcctagcctgtgctgtgactcagggtataggagtggcccaaccctttcccaagtgagaaaacttaagccctcccaactccagtccctaaacctatatttctccactgctattgaattatggcaagttttagcttcagtcgtccaagtcatgaggggggagccaggaaacccaggacaactccccaagttaagaggtctgtgatgcgcatgccgg

SEQ ID NO: 124925 - DNA, 705 bp, Homo sapiens
ggtcgaggctgcagtgaactgcactccagcctgggtggcagagtaagactctgtctcttagaaaaggaaaaaaaaaaaaaacagaaataggttcaaataactaagaagtccaagggcttcaagcacaattgcacctaggagcccaggcagtgccctcagaggctggggaggcctctgttttctgtcacgttgctctgctctcagcagtggcaaaataattaagagcagctcctgccccttttccagcccctcagcaatcctagaagagcgtactcctctctcttccagctccacacaaacatcagaacagggccttgtgggatccctctggggcacttgacacccctgagccaatcaccatggactggcaagggcagtgctctgatggacaggcctggctcaaatgatcagccctgtgctggggttgaaatcagagtcctcctgaaccatatggcctggagatgggagggaagattccccagaggaaaacccaagaagaagcagggagtggacttcgggtacttcaagttttcaagagaatcccaagaaccctcccagcactttgggaggtcgagtcaggcagatggcttgaggtcaggagttcgagaccagcctggccaaaatggcaaaaccccgtctctactaagaatacaaaaattaaccaggcatggtggcacatgcctgtaatcccagctactcagtagg

SEQ ID NO: 124926 - DNA, 498 bp, Homo sapiens
gatgaaggacaggggagctgcccatcttgggggatgtgtttttacaagcaggtattccctgatggccatagaaaggatacacagagacaggcaaacagatactgggcccagtgaaggaaccacttctcggagctcattgaggaaagagagaacaatgacccctttgacaacaatgaagaagaggttgtcacctttgagctgggtgagatgttgcttatgcttttggcagatggggacgatgaactgacagactttgaaaatgagtgggacttgttccatgatgatctggaagatttttatgacttggctcagtagccaccttgcgtggcatgtgaactggcctgctgacctcagacagcagcagtcccctgtggtggtgtgacagtgcccatgtttctctcctaggcaggcctatcaactccaggtgctgtcttaataatttttacctagggcctgtcttctcaatctgtgacctttccccaaggagtgtgttatttt

SEQ ID NO: 124927 - DNA, 344 bp, Homo sapiens
ctattttatcaccacaagctgctgaaatcagcctgttgtacgctatggcaaagatttcccagccatctggaaaagggttttttgtgaggcttccctcctatattttggtttgaaatgacactgctgaagacttttttcatctgagcctcagtggttatccctctattgcttgcctagttccagtgcctgttctcttttatagtctaagacttcggtgctggactcatctaggttcatgggatgcttggcaaacttggcatattctcttcaaactcaaagaatgataaatatttgaatgccaacttgtgaatttacaattttctataaaactaccaagtaaacca

SEQ ID NO: 124928 - DNA, 507 bp, Homo sapiens
gagccgcttttgtttttgaagaataactagggacatgtgcctccagcattggccttgggtggaaacctacaccccctaaaaggaacgggctgtctcagtcctccccctccccagcctgggggtctcaacctggggtccatggatgcccaaggggccaatggatacaattcagggggcctgtgaacttgaatggaaaaaaacacacagacttattttcactaatagaaatttagcactttcttcagttatgcttggaggccaaaaaatcacacactgtcaactacacctggtcattgtcacaaaaaatcaggtttttctccttgcctaacaatttgttaaatatcaattttgctcagctctacttatgaaacttactagccttgctgccacatcttgttatttgatgtgttaataaagaagcacatgagctgggcgcggtggctcacacctgtaatcccagcactttgagaggccaatgcgggtggatcatgaggtcaggagttcgag

SEQ ID NO: 124929 - DNA, 1047 bp, Homo sapiens
gaacagtgtttgttggaacacagccagactcactcattcacctgtagttcgcggctgcttttgtgctagagcagcacagccagagcggcctggtggccacaaagcccgactgtctctgcagcactggttttttatatggcgtttctagttgtttttagtagtaggggtgatttgccacaagctgtttcatttatagctgcaagtggaaatcctttattgtgcatttgttacataagttatagctgtttctttctcaattattgtaacatctaaaaattatgtaacagttactaagtctttttttatgaaaaatttacaattagtccagaatttaaaacaagtttagtattaaatcctagggaatttctcacataactaatttggagaaataatataatactgttcaggcatggtggctcacacttataatcctaataacactttgggaggctcaacattgcttgagcctaggaggtcaagaccagcctgagcaacatagtgagacccatctctaccaaaaaaattttaaaaattagctgggtgctatgacatatgcctgtagtcccagctgtttgggaggctgaggtaggaggttggcttgaactcaagaagttgaggctgcagtgagctatgatcacaccactgtaccccagtgttggtgacagagtgagaccttttctctaaaaacaaaaagaaaaaattcagtattgtacttattctcaattttgaaataagtcaatgtcatgggagtgttgacgaaatacagtcttttctagctactggaagtgcatactaaaagccaaagtttctcattttttagaagaacaggtatacactttccacctttgttccgcagtacgtatgtttatgtttcttattctgccattatttatagtagtcgaaattcacaaaataatcttttcatttgtattttaagtaggtgtgtttatagattatatcagaaaacaatcataagctttcaggttacaatcagtagaaatactgagtggcattctcttctgtgtgaggtttaaattatggatagtc

SEQ ID NO: 124930 - DNA, 770 bp, Homo sapiens
gcaagcaaaacaatattctttcttatcatgttttcaaatagaacaaacgaccacaaatcaaggcttatataaaaaggcccaattccaatataataaatctttacctggctgtcatcctcatttaattctcagccaataggattatataacacacacacacacacacacacacacacacacacacacacgtacgtatatgtaggatatgttatatattatatataacatatcttacacatacataatataaaatatattttatgactatgagtaaaatggctaaaaattgtagtgaacagagtagttcacatgcatactttcattaatgaggaaaattgttcttatttcattctccttgtgccagtgtctttgtgtgcatgagtgggtttgtgggaggtgaagagcagagggagaaaaagagagagaagaggagggtgagagagaggaacagaagacctggctgtactcctgaataacactgagtaagtaatttcattttctttgtttcctcacataattttattctcttagtttccaaacctataaaagaaggctaataatacatattctgcccattttctacattttttggtgacaatcaaatcaatctattcatccatccatccatccattatgccatgcacttttctagacgtgaaggctgtaaagcagaaagataaagtccctgctctcctgtagcctacatactcgtggcagaaaggccattataaataaataatcaagtaaatggtatgtcagttggtgataag

SEQ ID NO: 124931 - DNA, 223 bp, Homo sapiens
  misc_feature (148)..(148): n is a, c, g, or t
  misc_feature (191)..(191): n is a, c, g, or t
agatatttgggatgagacagcatgctggtccctcagcagcatccttatcacgtcagctgtgagagaaataaaactgtgagactgtgaagtgtataaaggattctaccgctctcccggggctcggagacccacagattggagaaacccncttgccatgtgctaccttttgccatgttatgaaggggcaaganggccctaaccagatgcagcccctcgaactggg

SEQ ID NO: 124932 - DNA, 632 bp, Homo sapiens
ctgaagctaatggatgtgcagggtatacaggctcaggagccaaactaaggtgttgcctttctgttagtaaacaccaaataaagtgtttatttggcctcctcaaggcacagattggaagaggaaagaggagtcagacctcctggcacacacattctgagtgaatcacatggtcagcccaaagaaacaagaaagaagtgcaaaaaggaggaggcaggaggtgaggaaggacaaattattgctggtgacaagagaatagttggatgtatgtgggctgccaaaagtgattcctactttccagccctgcctctgtcactcctgaatatttccaacctgacaatctttgctccaccccagaactacaccagagtctccatgggtttccatctcattcctgtggtctgagaaagaacacacagctcccagaggatggggaggtgagcagctaatggtgccacctgggtcagtcaaagcctcatccactgcattgtctccctgagatgcaaaggaccaggaagagaatcttttacagtaaatgaaaattggggaatgaggagaggaaaggcagtaacaggtgccaggcactgaagctggagtgtggtgaataggataatcacaggccattcttacagaaa

SEQ ID NO: 124933 - DNA, 475 bp, Homo sapiens
caactgtgtctcaggaagggactttaagtaggaagaggaaagccatcaagaagccaggcatcccctcagtgtgcttgctgcgacgtgcactctgtgcagagtggctgtccctgcttccagaccacccagaaggcaagaaagggccagcctgagacccccagtttgtaatccccttcattcaagagaacagccaaggccgggtgtggtggctcatggctcatccaagcactttgggaggccgtggtgggaggatcatttgagcccaggaatttgagaccagcctgggcaacatagtgagaccccacctctacaaaaaatacaaaaaatttagctaagcatggtggcacatgcctgtagttccagctactcgagaggctgaggtgggaggattgcttgagcctgggaagtcagaggctgcagtgagcagtgagtgtgccaatgcactccagcctgggtgatggagcaagaccatctc

SEQ ID NO: 124934 - DNA, 528 bp, Homo sapiens
gactttatcccagggctatggaactgtaacaactttgtcctgtttctgaagaatccagtgaggagtgatggcaattcctctgattatgtctttatcctgtcatctatatctcagaggcactttttttttaatttaaaataaacaaaaagttaaagtaatccttagaggttctctgcagtccccagatattagaactcagtttctgcttcaatatcccattaactccaaactaggaaagacagcttaaagtcatttccaagggcatcaagagatactgtaggataggcttttagagtgaagcttctaacagccgtccacatcacaaaaatgacctaactagagcccaaaacagaaggaagagccttttcctctccaattttcacagtcattttgtttcttccaacagaaaagtcattctagatgctttcacttgcagcagttcctcaggttagtaactaggacccttcccatgattgacttctggcaaggaacaaatgagccccaggcaaagcacatgggtcagcaaac

SEQ ID NO: 124935 - DNA, 235 bp, Homo sapiens
gcacctcacaggaggggtctggggccatgtcccctgtttaggggaacagaaagggtctcttgcctctgcccttctgacccctctgttctcctcgtccctctgcaggacagccagagcctagacctgcagttgccatagcaacgacagagccagagagagtacaaggcagggcatccctgtggctccagagaagcagctacctcttctagacagcaaagtggggaaacagctataa

SEQ ID NO: 124936 - DNA, 391 bp, Homo sapiens
agacaggactctcacagttgtttggagcaggcagtgacccctggcatctggccattcacgggctgcctggtggtgggtgagggggctgaggccagcagcccctgtgaggtcacagcatcccctctgggaacgcagtgacgagctcttcctggtctgtccaggacgtcctggtgttagcaccaaaggtctggcagtctgggaatgcctccattcacccggggggagcggggtgggggcactgccttgtctcagcccagagctgggcacagaacgagtgcttagtagaccctggttccatgactgaatgacaaccaggtgagggaaaacagggagacaggctgtcggtgctcccccagagaaatgtgaggcctccatactcctaggcctggcc

SEQ ID NO: 124937 - DNA, 111 bp, Homo sapiens
gtcctgagaagaaaaaaattaaatcaagattagatggtcccttggaaaattgtgttgggagaaggatggaggaggctgaaatgtttaatcaaggtacatggggaagacctg

SEQ ID NO: 124938 - DNA, 480 bp, Homo sapiens
aggggtggggggtggggaacaaagcatcctcagagcccacagctcctgcttagctccctgcagtgctctgtggggtccctcctccagcactgtgatggcaagtgtgcacctgccctgcctggtctaagcagctggggctggtctgagctggtctacaccatgctcagcaggttggagtgtgtcagacctggttttcaaccaccagaactacttatatgttcaccttgagagcatgtctggcaagctctgagaagacgagctggtttctctgcctgccttgtcagggcgtttcccagggccaggtgcccactcattttcctcttactctgtgcccctaggcggcagtggtcttgtacaatctctctctgtattctcaagtccccatctgtgagcatggctcctggaaataactgcagctgtatactgacttaaagatccaaaaatcccaggaaggaccccagagctgtgagccagaagccc

SEQ ID NO: 124939 - DNA, 688 bp, Homo sapiens
attgtttctatccattgtaatacatcatgtttatattgtttcaaattcaacaaaatttgtagaggcaagataattcttctcttttttggctcctaggtgttaccagacagtgatactgaggttggtattagaatttatggaaatctcagagaactttctagagcagtattgcacaataaaatctcagccgtcagccacatgtggctatttaacttaattaagataaattcccttccttagtcatactggtcacatgtcatgtgttcagtaaccacatacagctagtggctaccatttcagacagtgcaggtttccatcattgccaggttctactagacagcattgttttaaaaagtagaaagtaggacaccattctgtagttctccaggattgactagtttcttaagcctcaggcttttgcaggagttgcttagtctagtaaatgtatagggctttgttaaatagataatgatgtaaaaagaaaataattaacatcttgaaagtatgctttgaagccttcaggagaaagtacaagtcacaggactagctattgtctaaattagtccaagagacagctaagaaagcactgtgctaattgtgtgataatctttttttgtgttgattcaaggaaacactgtagaaggttgagagagtcataaaatgtagcatgtatgtatactgttctcgc

SEQ ID NO: 124940 - DNA, 478 bp, Homo sapiens
gtctctaaattggattacattcttactgtctgtgactttggctttagcattagtggattggtaatagatattctcaatttttaaatctggcttgaccatatggcaggccatgttattttgaaacccctatttagtgtaagtctcacaagacatggaacaaaaatttttataaaattttaaactggtttgaccgggcgtggtggctcacacctgtaatcccagcactttgggaggccgagtcaggcggatcatgaggtcaggagatcgagaccaccctggctaacacggtgaaaccccttctctactaaaattacttctctacaaaaaattagctgggcgtggtgctgggcacctgtaatcccagctactcaggaggctgaggcaggagaatggcaggaacccgggagggggagcttgcagtgagccaagatcggccactgcactccagcctgggcgacacagcgagactccgtctcaa

SEQ ID NO: 124941 - DNA, 249 bp, Homo sapiens
ctggcctcccaagcttctttccatttcgtatttctttgtctcaggcacaatccctggccttggccccattttccatgccaaggcctttgttgggtggaacaggaggtaaagtgatttttccttctttttttcctaaatgttgatgaacccttctcctgttcactcattggctagtttcagctttggaggcacggaggatggatgttccatcaagggaagctagcaaagctgaggtgaggatgctggtgg

SEQ ID NO: 124942 - DNA, 469 bp, Homo sapiens
agctgatgaaacagtgcaacatgtgtgtgaaatgtaaggtgttcatgctgggccagcttgctcgccctccctgctgtgccatcttccggaaagcagcccagcctggagagcaggggctagcagccgttcttccccactctcttggcctttcagctgcctgtccgtcaggagtcaggtgcacttccctgccaggcgttcaccctgacctggggcgctcagttcaccttctcaacctcgttatctggaaagggatccagccctggatttttatggaagtccccttttcaggttgttgttggttacagatgtgatcgttgtttctgatctagaaagtctgaggaagcagaaagagaaacatgagtctggagaggccgctcaagtcgaagtcagtgaggggacacggtggagaattttcttccagtcttccccggtcatggtttgctcatagttgaaacaactcagtaactgc

SEQ ID NO: 124943 - DNA, 592 bp, Homo sapiens
tgggcagccaaagagatcagcagtcaaggtctgagctttataatatagcagttgttcaaaaacaactcatgtgtgtgacatttcccagtttttgctttgtctgccataaaaagtgttgttgttccagtgatgtttgtgtaagtgctggatgaggtaagagaagagaaaagagatggagccttctcaggggttcaaggaattcttttctggcttagcttgagatgccagtggttatgaaaaggcagttaaaatcctgtatgtgttttcttcccataatcttaattgtctcccagttttaagaccagcttttctgaaacacaaaatggcaaatccaagggactgaaatcctgcatactcttctgaaatacaaatggaataatatttgtatataaaacagttcaacataatatccataattttccctaggtgttctaaaaaaagaagctattacatcatttgataactagatttttttactacacaattaggagtatgggatccaatttcaagtttaccattactgtttttcaacgttattcaaaatgtccatattttgtttcattatttaactagatatcataatattttaagt

SEQ ID NO: 124944 - DNA, 400 bp, Homo sapiens
atttatctgtctgtgtgtctattagagtcttgctgtgtcacccaggctggagtgcagttgcgtaatcgtagctcaccgtaacattgaactgggctcgagcttcccagagtgctgggattataggtgtgagctactgcgcacagcctacaattttttgatatgtagttttgggaggcagagtctcactcttgctctggctggagtgcagtggcatgatcataactcactgcatcctcgaactcctgggctcaagtgatcctctcctgcttcagcctcagctcagtagctgggactacaggtgcctgccaccatgcctggctacattgttaaattttttgtaaagacaaggtcttgctatgtttgccaggctggttggtcttgaactcctggcttcaagtga

SEQ ID NO: 124945 - DNA, 454 bp, Homo sapiens
aacaggcaatcccagtaaagaaatgcacatttaaaaatgacttccttctgcaattccaggtcttaacttgactacaggagcccttctctgtggttactgcccaagctctaggttctgttctcaaactgtgcaaaagagctcataagctactactcccttaaacgatgtcactgcctctgccctcatctcagatcactgcaacctccatgtcctgggttcaagtgattctcccttcacagaatctttcatcgactcttgttccttcaactccctttattctcctttgcttgttccgctgcagcgaaccaggcaaaagagaaataaggagaacatcatgtaaatttcccaactgttaaaaacagtcacaggacataaaagtgatagtactctgaaagtatgaactctgaagtcctgtatatgggtcctggctcccccaacagcatgacccgaaaac

SEQ ID NO: 124946 - DNA, 469 bp, Homo sapiens
taatccaggagtctcaaaatcccgggctacggactggtactggtccagagcctattaggactgggtcacacagcaggaggtaaatgatgggtgaacaagcattactgcctgagctctacctcctgtcggatcagtggtggcattagattctcataggagcacaaaccctattgtgaactgcacatgtgaaggatgtaggtcgaatctaactaacgcctgatgactgatctgaggtagaacagtttcatctggaaaccatcccttgtctgttcccctcatccccagggaaatattgcctcccacaaaatccctggtgctagatatttttggcacttctggtaccaaaaaggttggggatcactgctctaatccattaatatgaaatgtcttgggccaggcttggtggcttgcacctgtaatcccagcacattgggaggccgcagcaggtggatcgcttgagcccaggagt

SEQ ID NO: 124947 - DNA, 257 bp, Homo sapiens
tcccagctttgcgggctggcagggctctggggccctcccctgcctcccagcccaggccgcagagcgagagcgtttccatctgtgctgcgagcgggaagagcctctctgtgctccccggcacgtccagcgcgcgggcgggaacacgctctcctgtggggggcagctttcccagggaccttgcctaacgagggccaggcggctcccccgtgggccccgaatggctcctggcaggcagacccctatccctgtcgagagca

SEQ ID NO: 124948 - DNA, 467 bp, Homo sapiens
tctcttctggttttgaaattatcattaggaataaagaactcattgctttctcctagctaaccgtctatagcataatactaaataccctttcaaaatgatgcttctatttgcatttatgttacttcattctactaattttccctatgctttcactcaaaaagctatggatacctccacactgtgtttttcggtatttctccccgtgttcttctgctgggatttgaaagtatacacttgaacttgaaataaataatagtaattcatgcaatgtaaggaaatatgctgctattatagggatagggagagagataacttaggaaagacataatttgtaacaataaaagttttgaggtatttttccttcttgggctggacttcgttagtaactatcataggaagcattggacacttcatttttaaaggtacagtagtccccccttattctccagggatatattagaagaccc

SEQ ID NO: 124949 - DNA, 349 bp, Homo sapiens
tctaagccacccaggggagtgaaagaaagattaatgaatggtttaaaaggggcctgccccacagacctgtccccttcccttttttctcttctccttccacctaaagtgttgagctgcacatccagtctgacctccactgctgagacctcacgtctatcaggtggggcctagcagggatctgggtgggaggttcagtcagatgcaaacagcagccagctgtgtagaagccacgtgcaaagcagttcctcctgcgctgacatgacagccacgcgtttcaacaacaaccacaacaaatcgcataggggatcagaagaccatgctattccattttacactaaccacttaccag

SEQ ID NO: 124950 - DNA, 263 bp, Homo sapiens
cagtgtcgtccaggccacctgcatcagatcacctggggtccactgagaatgcaggttcctgggccctactccagagtgactgagtcagtatcctggtgggggtgactcagcaccctgcatttgaaacagacttcccaggtccctgtcaccacactggtgtttgaaaattgttgtcagtagtcctcaaactgaacttgggctctgcccttgttcagctgcaggcttcttcctgaatgtgcttctttggccctaattctttatat

SEQ ID NO: 124951 - DNA, 322 bp, Homo sapiens
tctacacagaacttgagatactgagtcagcctaaaagtctctgtaatactcttggcttatatttgactccatgctttttattatacttaacaaaagccacaaagttcatttaaatatgcaaacggaaagccaattctacagatgacagaatagtggaaactacaactattcttaaattaaaactcttaacattctttgacaaatgttattaatagtgttattaataacatgcatctatcactttataatcacatagttctttcataagacaaacttctaagatggggatatacaaacaggatacattctaacaataccaaat

SEQ ID NO: 124952 - DNA, 486 bp, Homo sapiens
ggtctgtacttgtcagatcattttacgcacggcccttggctgctgtccatgcctcagtttcccagatgtgcacacaggatcatgtacagcactccctgccacatgctcttgcttaaggataggttttatatagatgtcagatcttctaatgttcaaataagagatgcaatgtacttcactttcacttgtcagaaaacaaatattctctgaacatttatgttttagattcattgtgtctgtgcttttatttagtaagagaagatgttttacatataactcctaagcctgtggtctttgcacacatacacaggaagatacactgtaaggttcttaacaaagaacaaaagaaaaacagtttcagaaaaactgggatgctgtttcactaacgcactgggttctgccactggcttttacagtaatgctatgccttgataggtttattttctcgcttggaaaagtagctgctgtgctattgtgatggatgtt

SEQ ID NO: 124953 - DNA, 323 bp, Homo sapiens
acagacacaatgaatcaaaacataaatgtacacgagaatatttgttttctgacaagtgaaagtgaagatacattgcatcttttatttagtaagagaagatgttttacatataactcctaagcctgtggtctttgcacacatacacaggaagatacactgtaaggttcttaacaaagaacaaaagaaaaacagtttcagaaaaactgggatgctgtttcactaacgcactgggttctgccactggcttttacagtaatgctatgccttgataggtttattttctcgcttggaaaagtagctgctgtgctattgtgatggatgtt

SEQ ID NO: 124954 - DNA, 397 bp, Homo sapiens
ttcccatgggaagttttaactgatggacttaaagcaagcaggcctgagctccgtggggccacactgtgactgtcgggggactctgcagtgtggctgcacagtccatgttgggtgtggtatcagtggggctgcagggaagtcaccagggggcagttgcatagggtgggtgtctggatgggccagctcgaggaatgggggatgtggaactggaaactgtcagggcgacagccctgcttctggtgggagaaagtccagcttagatccagaatggatgccgaggcagcctaaaaccatgagcgttccctgcacactctggcgtctgatctctagcttccctttcttgtgcaagcttcattggatttttaaattttcctaatttttcaattcccgggaacat

SEQ ID NO: 124955 - DNA, 315 bp, Homo sapiens
ccttgcttatgtcatacatttctcttcctcatttgttagtaaagtcaaagtcatctaaaagtgattaacattagccttcattattttattaatttcttctggaatctagtttctgaagacataacaagggattgagatctaaaatttgcaagtccttgacatgcattttcatgtcaaataatcttgttgctgaagacatgaaaggaaattagtctgagtaaaactcttgccaatctccaaagatttttactattaaatttatttcagaaatgttttaatgttactcatagagttctcaaatttaatatggaagga

SEQ ID NO: 124956 - DNA, 372 bp, Homo sapiens
gagatgaatgtaattcagacactcttgttggcatacgggagaaggtgaagaagttctctgtagtatcctgatttctgaggactttctctgaagttttgagagcatgctgtttggcactcctggtctcatttttagaactgtatttttccgcatttcaattactcttttgctctaaaacagtatttccaatgacatgaagagttgtgttagcaagtaatactaagaatttgtactacttgattataactggttgaatgagacattttcagttgtcttttctgacgtcagtttccatttcatacttgaaaaaataagttgcaatgggtcttaagacaaaaggaagaaaattgaagcaacttacaatttttgtga

SEQ ID NO: 124957 - DNA, 593 bp, Homo sapiens
gagaagaaaaagcagaatcatataaaatactcaaaccaaagaaaacagaaagggggaagggcataaaaaaagaaagaaatgcccagtgcaatgaatagaaagcagttaaaatatggtagttattaatccagctatatcaataatcactttaaatgtgaatagcctaatacaccaattaaaagacaaagattattacattagataaaataacaagactaaaatattatacatgtttctacaagaaactcactttaaacataaagacacagctgggctaagagtaaaatgatgaagaaagatatgctaacactaatcaaaataaatctgatgttagctatattaatttcagacaaagcatactttgaacaaggaaaattatcagagataaacaggagtactacataataatgaagggattaattcaccaaggggacataatctttaatgtatatgcacataacaacagagcataaaaatacatgagacaaaactgatagaactgccaggaaacataggcatatccactattataattggagacttcaacacccctcttttagcaattattagataaagcaggcaaaaaattcata

SEQ ID NO: 124958 - DNA, 201 bp, Homo sapiens
  misc_feature (186)..(186): n is a, c, g, or t
  misc_feature (196)..(196): n is a, c, g, or t
cagggcagttcctataaaccaagagagatttaagcacgattgggagcaggaaagagccagtggagactgagcttgaagacatgagaagcagaggaaatattttttcattggactttcataaggcacaagatgtctctctattttcattcttttcttttttttcatcgcccttctaatctctttccnttcattgaangtgcc

SEQ ID NO: 124959 - DNA, 136 bp, Homo sapiens
ctcataactgaattcactcacctccatctcactttattttcttgttcacagtgccacagggcagtaagcatcctttcttccaaactgtgatgtcctgtgtccttccctccacccagatcatgggaaatttggcatt

SEQ ID NO: 124960 - DNA, 404 bp, Homo sapiens
ggggtccagggaccccgcattccctcccccgccctcaggcccctgcaggtgctgagccccaggcaggtctgcagtgcacggcactgccggggggacggggcatggacacacatacccagtggcccccaactacccacaagagcagggagtgtggcagctgcaggggtcctccccaccctgcccctctgggcacctccgggtgtgcacgcatgtttgagcgtgtgtggacgtgagtgtatctgtgcatgtgtgcgagcatgtgcgtgtgtgtgcacgtgtgcatgtgtggagtctatgaatgtgtgtgtgtgagcatgtgtacacacgtgtgaatggatgcatatgggcatacgtgaatgtggactgtatggatgtgtggcatgcgggtgtgggcgtgtgtgtgt

SEQ ID NO: 124961 - DNA, 287 bp, Homo sapiens
aacacaaaagatggattccctaacctagacttcaatgggtccaggaaggattcctagaagaaatgatgactagaatgagtaggaattaaccggaataggctcaggtaatcacatgttctaagggccagaggtgtaatctcaattctttctaaacagtaaatagtagggctgacactggctttaccctgacacgttgtgaggccaaagcgggagaattgtttgagcccgggagtttcaagaccagcctgggtaacatagcaaagacccagcaaagaccccaaaagggg

SEQ ID NO: 124962 - DNA, 335 bp, Homo sapiens
agaaaacttaacactttgcatataaagattaatggtcagtattccctgagaactgggcacttttctaattaatctaggattagagatgaatacaagttttctgaaaaacagagtgttaattttggttagtctgatttatagtttataatatataatgaacaattgaatattatcaattcatcggtgagttgtggctatagctttgtcttgtgtctaggttgagactaatttgtatatatttttataatcctatgtctaatttgtgttataacagaaatttcaaactagaggctaacatagagatcatctattctacttctctcgttttccaaatg

SEQ ID NO: 124963 - DNA, 1712 bp, Homo sapiens
gggatggctccacccgcgctggctccaaaatagcgagggggcggggcccgggccgtgggagcgcctgaggggcaggagtccagtgttttagccttcgaaggaccatggtgcttccacgtcatcgtgttgtggcgctcccggctatggcagtaccgtagttttcctctcttctgcctgcggtgaccattgggctgtagggtgccccgaggcctccctggccccctcacgccggcagaatggcctcagcccgaggggccaagcagtcttcgccccgggtggggaccaccccctacacagagacgtccacggtccgcgtggagacctcgtcccaccgcgtggagacgtcgtcccggcgggtggagacctcccagcgccgcagcgaggggccctccctctccccctcggggaagcggctccctcgcatcctcgaggcgtcctcccggcacgtggaatcctcctcgcagcgcacggaaacgacctcccgccacgtcagagcctcgtccctgagggtggagacgtctctgcactgcgcggagagcccgaccccgcggccaagccggccgcccgccagaacgaaaaaacggcccgatgagatgctgcttcccaaaggccaccaaggggccagggccctcagccaggacagaaaggcctccagttgccagccagccagccagctgccaggtggaccaatcattttcggtttcatggaaacaaaccataaatcaatgtaagaaacagccaagccgcagtttctgaacacagccaacgtttactgaccgtcctgcgtcttggaccagcctacttttgacccagtgaactattttcacttgaagccagcacagaaggttttcaggcccaggatgctgtctaaatcgggttgatggacaaagagaggctgtttgagcctctgagccaggtgagtttgggatccacagccctcagaaaaccttcaccccttaggaacagagaccaaactgaaataatgacctgtggaatgattccatgcctgctaaaaactcgagggacaaggaacagactcataaattattaattggcctttgtttatgtttcaaagtaaatggtcgttttctttatgctaagtctttgtacctggcacccccatccatacacttttttaaggtaggttagatgtggttaaaaatgacagtaaacccaccagcaagcaaaaataatcttagaaagtgagaggaggtcactgaaacctggcctgaggtttgaagaagatggagaagagttatatttattgagaaccggctctgtgccaggcactagatgttcctccacttacgatggggttacctcccgttgaaactattgtaagttgaaaatatggtaatttgaaaatgcacttaatacccctaacctactaaacatcatggcttagcctagcctaccttaaacatgctcagaacacctaaagttgagcaaaatcatctaacagaaagcctgttttataataaaatgttgaatatctcatgtaatttattgcatactgtactaaaagtgaaaaagaatggttgtaagagtacttaaagtactatttctactgaatgtcacttttgtaccattgtaaagtcgaaaaatcataagtcaaaccatcttaagttgggaactgtctgtattctgggaacttgggctatagcagtaaaaaaggcaaagtcccagctctagtggagcttacactctggtga

SEQ ID NO: 124964 - DNA, 667 bp, Homo sapiens
ctggtatcagtggaggtctagtagagaacatgtacttttagtcccacctcacaataatgaggtaacaccctactacccactggagtgtggtgctagaggaagtctgctaaaacacaagaattatattgctctacatagttgccagcaaaaacaaaaaccatagtactcaaaatgtccagatttcaaaatgaaaatcatttgccttacccagaatcaggaagatctcaaactgaatgagaaaagaatatcaatagacattaacaccaagaagacacaaatgtcagaattatttgacaaagattttaaagcatctgatacagttgaggtttgtgtccccgcccaaatctcatgtccatttgtaatccacaatgttggaagaggggccttgtgggaggtgattggattctgggggcagatttccccctttccatccttgttacattgagtaagttctcacaagttctggttgtttataaaagtgtgtagcacctccccctttgctctctgttactcctgctctggccatgtaagatgtatgtccttcctcttcaccttccctcatgattccaagtttcctgaggcctccacagctacgcttcctgtatagcctgtggatctgtgagtcaattaaacctcttttctttataaattacccagtctcaggtat

SEQ ID NO: 124965 - DNA, 259 bp, Homo sapiens
taactttgctatactactgtatatatagtaatggtacaaattatacatatagtaacaatacaaactatgtattcatataatactatatatacatgactgtgtatcctgtaaatttgttatactacaaattattttcagaatgcccattttgttgactttttcaaagtagaatctttggaactttcttgatagacagtcgtgttatctgcttaaaaaaaagacagtttttattcttccttccaatctgttatatatttgt

SEQ ID NO: 124966 - DNA, 193 bp, Homo sapiens
agcaaggccagctcccagttgcagagatccaaagtgagagctcactgttggcttttgtggctggagcagccagctctgagtgtgtaaacgtccactgcccaaccctgtcatgtgtccccttgtcactcctttccccaagacactgagagctttgactccagaacaggaaaagcagggtgccaattaggaaagc

SEQ ID NO: 124967 - DNA, 477 bp, Homo sapiens
accaggtgttggcccatgcgtatctgccgtaataacagctgtagttttgatcactaggttgttactagtggaaggatctggggggctgagtggagacacctgtggctcagaggccgagctgggtcttcatggacaaggcaccacctggtggcaggacatggactcttagtttcaacacaccagggttgtattgtgttcgcgacccccgccccctgccagctttttgggggaggattgataaatcttcgtgaagtggcagaaaatatgaaagccagccaattggaatcttgcttattctgatctgttatctcaggggttagattcgcgtgctgaagtggtctacgtaacttccatagcgattgggaggtgttctctggtggggtagcagttctgtgttatgacatcacaaatggaattcacggggaggaaagctgggtataggcattaagtgcccagtagagcaggtgggaatatagg

SEQ ID NO: 124968 - DNA, 217 bp, Homo sapiens
acggtagttcttttgctgtgcagaagctctttagtttaattagatcccatttgtcaagacatttctaaccagcaacaggtccaatatcggagtgagtatgttctgatgcacagggcagcagtgtttaaggatatattctcttcatggagtaacatccaactcaaactttaatggtaacgctttaaatcttgccaagctctgaaagcaatttcttctg

SEQ ID NO: 124969 - DNA, 222 bp, Homo sapiens
ttattctgcagtctccaggaatttactaaatgtgagcagaccagtagcatggtaaaaacagtgtttcaagaggaattcaaagtactttacaatcccacaatgctcctatcaaatctctcgggtggcatataaacctagcttccccactgataaacaaaaatattctgcaaagaacataatacattttaacaagatgctgtgatggaatggaacattttattt

SEQ ID NO: 124970 - DNA, 384 bp, Homo sapiens
ggggtgactctagcggatccttcgctggccaatggcacatactctgagtatcacccttctcaaagtcatcccagggtctcccagagaagagccttctctggatctaactcctggtcttgctacaagtcctggtcaccacactgcctctctctcagctcggcaggaatagtgcctcgtggcacagtaaaaaattcatggggcagggagtccaggccctgggctctaggtggttctgccacagataagctgtgtgatcttggataagtcaccagccctctctgggccatagtgtccttgtctgtaaaatgaggggttttaaacctcttcctgcctctgcggaatctggcacactcatcaggtagggcctgccaccagccagcggag

SEQ ID NO: 124971 - DNA, 530 bp, Homo sapiens
atcttttcaggagatgaggggcagaaagggagctgtccatggggtacgctctagccagtgatgcctcagcttttttcatggcccctgagctgtccccacttgaccaggccaggacctacacggagaaggggcaaggctggctcacctgccaccaggcagtgccccactggcctcatcccacatcatcctgagcctcaaccccttctcaaagtcatcccagggtctcccagagaagagccttctctggatctaactcctggtcttgctacaagtcctggtcaccacactgcctctctctcagctcggcaggaatagtgcctcgtggcacagtaaaaaattcatggggcagggagtccaggccctgggctctaggtggttctgccacagataagctgtgtgatcttggataagtcaccagccctctctgggccatagtgtccttgtctgtaaaatgaggggttttaaacctcttcctgcctctgcggaatctggcacactcatcaggtagggcctgccaccagccagcggag

SEQ ID NO: 124972 - DNA, 217 bp, Homo sapiens
gtttattaggtaagcatgtaaactgatacagagacatctcttaaaatgttattctgagttaagtaaactgcaaaatatcttactatttatcatgcactgggcacaggggtgatgatgagaaagagaatagggcacttgtacatttgcctttgtcttatgggtcagcactagatgctactttatttcctcctaggtgttatttctggtattgttgaag

SEQ ID NO: 124973 - DNA, 264 bp, Homo sapiens
caagcataaaccttgaaagcattatgcgaagtgaaagaagccagacacaaaagactagatattatatgatcccatttatatggcacacacatgcgtatacgtatacttgcagtcccacttcttttttgtaacacaaaagcatgcttctgttcgtaagttcccctgataaattccaatgtaccaacaaactggatttgcctgccttgtcctttggtttctcagctcctttggcctttgagggactgctttgcttacaccaccctt

SEQ ID NO: 124974 - DNA, 106 bp, Homo sapiens
taagtttcaacagggttttgggttaaggttttatagcccttaacattccccaccccccttaaaaaaagtcaaccctaaagaagtattattttatattaagccatat

SEQ ID NO: 124975 - DNA, 531 bp, Homo sapiens
agtacctgggactataagcacaccccaccacatccaactaattttttattttttgtagagacggggttttgccatgttggccaggctggtcttgaactcctgacctcaggtgttccgcctgccttggcctcccaaagtgctgggattacagtcatgagccactgcgcccagccaaaaaatgtctttgatcagtcagtcccttattgagggaccttctgatggtctctggtcatttgctactgcaaacagtactgcagtggctatactgaacatatatacctttagggtaagtgggagtagttggtaggatccactcccagaggtaggactgttgtacacattctattgttttttaagagtcaaggtcttcacattctgttgtttttcaagagccaaggtcttgctctgttgcccaggctggagtgcagtggcagaatctcagcttactgcagcctcgaactcctcgctcaagcaatcgtcccacctcagcctccagagtagctgggactacaggcgtgcgccactggaccc

SEQ ID NO: 124976 - DNA, 534 bp, Homo sapiens
aagtccagtggtctggctgcttctgaggcagcctcattaaggaagatgtgtgagtgctaggattggtctggggtcagaagtccattatcggtctcagtctgtgtccctagacctactttgactttccttacactgggaagtcaggtcaaatttcaagtctctttagacaacagaaggtttctctaatccttcttgctttcaagaatcatacataatgtacacaaagtagatgagaatcttaagttgcatcgaagaattttaaattacctataattgtaagtactttgttaaatactgcttagtctccttttcttgttagctctgcatttgtgtttagttggatacaagcactagctgtgccatgctaagtgatttatacattttcttaaagtaattatgaaaattctgtcccaggaggaaaacactctaacgtccagattggcagtgcaataacttgtaatgccaatattttcttgctaatttaacatctttagccattttataatatgcatacctgcttttgtatctattttt

SEQ ID NO: 124977 - DNA, 512 bp, Homo sapiens
tgaaaataatattggatagaatgaaattccaggtaaccaaacatggtacaggggactgaatttgtacatttaggtaacggggaaaataaaaatactacaacataaactaagagaaactttcaaaagcaatgttcaacttacctttagaaaaatgctctactgaaataaaatcaattgacatatcctctgtttttcatactaattcctctggcccaaacctctctcttgagctctagaattgaacaaagtacctccatgacatctccattggactatgtcaaaatctcctcgtctttatcacgtctaacaccacactcaccgccaaagcaacttgcattgtctcttgtttcaggcaacgcccccaacatgaagatatttgtgcatccagaaatctaaacattcctctgagacctcctaatcccttcagcaaatcctgaccctctacctcaatcactcctgaaacctgctaaatttcctccatctctgtggccactcctgcctgtggaaaagta

SEQ ID NO: 124978 - DNA, 218 bp, Homo sapiens
tttaagtagcaaatacagtaatcacagtagcatggagacacaggctggcctatatttggtttcacaaaggccttgtgaaagatctggccttaaagtccctttttaatgctgaaattatgcaagtggaaagttaatttgaggatcactgaggcacgctttattcatgaagaatgtgagcaaaacataaatacaaagtctggaggctctgttctacgctg

SEQ ID NO: 124979 - DNA, 351 bp, Homo sapiens
agggcaaatgtcattagattttcagatgttagaataatcctctttggcttgatgccctgccctgtgggctccgtagggtggtgatcctgccctgttacctaggaggaggcagccccacctgccggacctgtgccctctgggtttgtgttggcagtggcagccctgccttcttttgagcctcctgaagggtcgttcttcccttttcttgaaggataacttgtgttcacaactggatggttttattggccctgtcctatagaatcctggaagtccaacagccttccttaattttgtccccatctcggtcccttcagtccaagctggcagtgtttctgttgcttgtatccgctg

SEQ ID NO: 124980 - DNA, 752 bp, Homo sapiens
gaaactggccttttataagtaaatcattatgtagtttcttcctttggagggcagctctgtgtgactgcttgggcctctgtggttagatctgtttggttaacgggcttttgggctttcacacaaagctatactctccacaaacttctgtgagataaaaaggtgatatctgtcttagtcctctgaatattttttctttgttcagaacctgagaaagatgaatgaaatttagtgtttcccatccccgagagacacccagcatccacaacttcacactctgatgccattgtgtatttatgcaagaaataccataactaaggtaatgtcttgagattttttggttcaataatgtccttaaattctatgttgtttttaaagcctaaaagaaattccccctcctcactcccccgtctctccctacaacctggtgagacaattctctcattttctcctcccagtttccaatgctattgttatgatctattagaataattgctattatttttttgccttatctgaccctagaagtgatttacagggaaaaaaattactaaccaattgattagtgaactgaatataaagtgcagctcttatggtttattcacagacaagaatatatatagtacttaatgtgatagtattttgttgttgatgtggaacagtgttagtctataatacaggctttcaggcagacaagacctagtttaccttgacctctggacttctgaaaggttgagtaagttattttaagagaa

SEQ ID NO: 124981 - DNA, 302 bp, Homo sapiens
cctgccggcgagtctatagagaatcccttttggggtctttgctggcagagtagacaagcatttaaaaaaaagaatttttttttaagagacaggggtcttgctatgttgcccaggctggtcttaaacttgggacctccagtgatccttctggctagggagattctgcactggaaacaaggcccaaggatgctcaggttgctggtctaagaaccacatgtcaaacactttaaggatccccgtcttattactttacatctaatgctatgttctttgtgtgtgtgtgtgtgtgtgtgttttttttt

SEQ ID NO: 124982 - DNA, 669 bp, Homo sapiens
aaatgtaaacggtgactggatatttgcttatcttaaagaattactattcttaggtatcatcatggtagcgtgactacttaaaaaaaaaaagtcctggccgggcttggtggctcacgcatgtaatcccccagcacttggggaggccgagatgggcagatcacccgaggttagggattccagaccagcctggccaacatggtgaaaccccatctctacaaaaaatacaaaaattagccaggcatggtggctcatgcctgtaatcccagctacttgggaggctgagacaagagaatcacttgaacccaggaggcagaggttgcagtgagcagagatcgtgccattgcactccagcctgggcgacaagagtgaaactatgtctcaaaaaaaaaaaaaaaaggaaaaaaaaggtccttattttaaaagatatttcgggaaattttcctagtggaaatttgctatcgggaaaatggggtcacaggcgttttggtacaaaggaattggtgcagaatttttttggtttgcacaccactggttggaccattgaacgtgggtatatggctcgaaacatggaagtgaggagcacatgggattcttgaaaaaccactacacaccggttgggggggttttaaattttcctgtgaaaaaatgcttaacacaggtcggggccag

SEQ ID NO: 124983 - DNA, 422 bp, Homo sapiens
ccctggagagctttactgcagctgagctgaaactcagagactcagatccaagaataagaccacatttttctttttttcctttttaagtaactctgctaatcatggcaaaatcagcctcactcgtatctacctgaggctggaacatatcccagctcaggagagcgagcttttatgagccttcacccacacaaggagtgtctcattaacaattctttagtggcttactacctcccacacctgacccacatcggctctctctttaatagagccttcacccacatggagcaaaaagtctgtcttcctccttaacatcaagttaatagattgctagctcacataattgactaaccttgagcttctaactagccagacctatcagagtcccattattcctagcaaagacctccaaagggggaccgagc

SEQ ID NO: 124984 - DNA, 210 bp, Homo sapiens
gtgtcttaggcagagtaagccatttgtgtcataggagaatactgagaaagaaagatgttttttccttgtgaaaagtttaggggtggcctcaggcaaaaacttaaactatgtgaagtttatcttaattgtccttgcatggcctttttggttatttttgtcttccacttgagcgccttagaccctccccatgactccttcccagaatctccc

SEQ ID NO: 124985 - DNA, 425 bp, Homo sapiens
tagactcaaaaatcctcaacgaaaatacctgaatccagcagcatgttaaaaggattatacattatgattaagtggcacttattctaggaatgcaagggtgattcaacatatgaaaagaaatcaatgtaatatatcactttatcaaaatgaagggaaaaaacccacaatcatctcaataaatatggaaaacgcatttgataaaatgcaacacactttcataataaaaacactcaacaggctgggccggtggctcatgcctgtaatcccagcactgtaggaggccaaggtggccagatcacctgaggtcaggagttcaagaccagcctgaccaacatggtgaaacctcatctctactaaaaattcaaaaattagcagggtgaggtggcacatgcctgtaatcccagctactcaggaggctgaggcag

SEQ ID NO: 124986 - DNA, 206 bp, Homo sapiens
gcactgtttctatataagctctgtgtttatgaattttagatattatcctgccaactttttcactgcagcattcctcaaatttaggttttgtgagtctttcctttttgagttcagtttcacctaagaagaatctttgtggtatcttctggggattatgaaactattggagctacgtggggacagagctaaagatctcaccactccca

SEQ ID NO: 124987 - DNA, 321 bp, Homo sapiens
gtgaaggcaaggggagcaaaatcattgtcattaaagaatggagatggctgtcatttcatctcacgccatgggtgtccctaacagtcttcctttaaacatcctgtgtccagcttgggcaacatgttgaaaccctgtctctacaaaaatacagaaattagccaggcgtgatgacacatgcctgtagtcccagctacttgggaggctgaggtgggaggaccacttgagcctgggaggcggcgggtgcagcgagctgagatcaccccactgcactacagtctgggcgacagagtgagacccgtttcaaaaataagtaagtaaatc

SEQ ID NO: 124988 - DNA, 138 bp, Homo sapiens
aaattatagagcaagcagctctaaaagacgaaagacacacctccaaacgcttcctaaggatcagggaacagacagcaactccaacttccctaagcacttcagcctgcatcgactgagattcaccaccaattcttcgct

SEQ ID NO: 124989 - DNA, 299 bp, Homo sapiens
agaagatttcttagaaggactcatttccctggacttaccttccccagccatatttctaagtgttgttttttaacactgcagaacctggcctatgaccagcctttttggctagcttgtgcccagaagatgggatatggtttgactttggaatttattggaaagataagttttactagttttcaactgtttcttggatttttgtttttatttacttttagaaaatatcctgtggttaggtaaaagctgattaggcagaaatagtttgtatctctgatagtggtacatttttaaaaactcat

SEQ ID NO: 124990 - DNA, 210 bp, Homo sapiens
ccgagatcacgcactgcactccacgctgggtgacagagtgagactccgtctccaaaagaaaagaaaggaaaattgaatgtatttttaaaacattcccacaatgatattttaagccaagtaactcatccaaacatttaaggaaaaaaataccactccaatatgacacttccagagaataaaagtggaacaaatacttctcagctcatttca

SEQ ID NO: 124991 - DNA, 379 bp, Homo sapiens
cactccctgcgctggtggctggacatagcctccctatcccacctcatcttcccccatccccgacagaggaggttgtgaatctacaggcccttgacgttgaggcgtcggagggcgcacctttgtaattgcggcctcccttcgccccttaagtgccgcttctgggcgcctaggctggatatgaaagccccgttcctaatcctctgctctggtcccctcctctggactgctgggactctaagctaggccctccccaggttccatcactgcggcgccaacccgcggctgggctgtccgcaagagggagttgaaggcgcgcggaatcccgaggtgcagctgaccctcctctcaacgccgactctgccgctcccgcccggccacc

SEQ ID NO: 124992 - DNA, 532 bp, Homo sapiens
catgagttcatggtgggaacctggactgttgggggtcactcacttacccttttcctccactggggagccagcctctccaggttctcagccaatgctagccaagcaggcagcctcacttccccttccttttttgttttggttgtgtcctgtcacttatctgttgaattctaatgttctttcataaatgatctattcaaagtgtgatcatctattcactgtttttgttcttctctgtgtaagagacacgtagcagatgcctctagtcagccaccttgcaacccctctgccatgcagttaatacatgattttttctacttttggatggaattagataaggcccaagctaagaactccatacagcccattttgtaatatgatccagacacagagatgcactgttcagatcctcgttcaaaaaacgacccaccgcatagctgagagggatgtggtcagctgatgcctccagctgttagatccttcaggatctgtctcagttttcaaaccaaggttacgctcttctctcagtgatctc

SEQ ID NO: 124993 - DNA, 533 bp, Homo sapiens
tggtgtttggacttaatcctggggcatagggagccattaaagggttattaaacccaggcaattatgggatgagatttgtcttttagaaagattactttctgcagtgtggacaataaatttgtaggtgatgctggcagatagactatgctcaagactacaaaatcattatcagttagaagataactggcagtgttcctggaagactcacggcaggaaaggggctgtagaggaagggcactgatagaaggacctgaaggctatagactctagacaaattggttaccaatcctttaagaggactgtagggagaataaagcaaggagaagcccagagtgagttccaagaaacttgggatacataactgggtaaatagtattgctgttggcaaaaatacagaatctaaaggtgaacagcaaattctgaggaaagtatcttcaatccactaactccaggccctcatttgttctgtgaggtaggtggcatggacattattatccccattttatgactaattggtgtattagtccattctc

SEQ ID NO: 124994 - DNA, 348 bp, Homo sapiens
tttgaatgaatattcatttactcatttactgagcacctattatgtgccaagttctgtgtaagcactggctatacaaaggagaataaaacactgttctattttataccccatacatggaagtcattggaggcttctgagaagtctccagaagtcacccacaggaaatagaagtaggatgcaaaggacaccttgaggtttttagggtactgagtcatagttgttctaacagagtaatagacctgggttaaaggaacatctagatgacctgcccaagctcacaaagagcacagctctttgagccccttccaaaggaggctacatctccatcacagcactagctgcctgacc

SEQ ID NO: 124995 - DNA, 615 bp, Homo sapiens
gtctttaagtttgggttggatggaaggaaggatccagtcagaaatgagagccatcatctctcctggcctggcaaacacctttgaatctcacttcctccttataccgcgtagtcagtttgtaatacaccagaacagcccactttttcaacataaattaaaatcagcaggacaactggccttctctctcacactccagtctccaccacagataatgcctcaccctcagatgcttacacagtaactgataggaaacacatctgtggctaggtagaacaccctgggtaatgaagggatcgcagcccatctttgctgagcaaagcaatatccctttttaatagcccagcccagggtactcccacgcccctccataaggaaacttccaatctccaatttcaattcccccaaacccaaatctttgttctcttgtattatacttttcttatctttcttaggcatttattctgtctcctctggctacttttctgtgcctcctcccgcagataccagtacatttttcacaaataagcagccctcccatccccagtgtaaacctggattttttttcccctcacctattatattcttttagtcaactctcttcacctcatctcactt

SEQ ID NO: 124996 - DNA, 408 bp, Homo sapiens
ccaccttgggggatatgggcaggaacttatgtgtgttaagagaacaagattattcatagaaagcaagtgagaggttctatcagaatttgggaaggaagttatgtggagtgtgtcatccttggctaggtcattgagaaagagagagcctgttttgtcagtggcaggcactccaaaatatttgttgacagactgagtggatgggtgcatgagtgaataatccacctccccacacatctctagtgcagacctcacaggtggaaggaggataggccccactggttgccatagtccttataaggaagggatttcaaagtcctggaatagaaggagccctggagatgatcttatcaacccaatcattgcatggatgtgagaatgaggtccagagagggcccatggcatatccaa

SEQ ID NO: 124997 - DNA, 679 bp, Homo sapiens
tgtttttacccttatagcgcagtggaatgttcttattaatgatgtaatctcatttttaaagttattactagtgatatcttaggaattgattttgttatatagttcagtaatgttctagagaggtaagggaaccatagtacttcataggtaagaacccatccccatattacttagctgaagacaggcgatgtgaaggttatatagaaaagggaggagtaggatagtaaagaaggacagagcaaagaataagaacccattggaaactgaatgaaagccgcaagtgaggagggtcaggaatcatagtggtcctcattcacccactacctgtagctcctccattatagaccagtggacacatgggtacctcaggctgaatgcagacaattgcttcaaaataataagttctccttggcatgaaatgtttcatctactaagtagaagaatgaattttgtgatatacgagggtattactggcttaggacaaggctttgcttcctaattgaaggtgctttgtgggactattagcataccagttgattcctcttgtgttgcactgcaaattgctgattaactgcttttatgtatgcagagctgacatgttgcctcatttagaaacaaagtgtagtgctctaaggaactagtcagaagttcaaactgacatttagaaattgtaaaccca

SEQ ID NO: 124998 - DNA, 550 bp, Homo sapiens
ccatcagctgatgaatgaataaacaaattgtggtatctccacacggcacaatagaatattcagccataaagagaaatgagggactgatacatgctaaagcatggatgagccttgagcgcatttttgccaagtgaaagaaggcagacacaaaaggcaacgtattgcatgagtgcatttatatgaaatatccaaaataggcaaatccatggagacagaaagcagataaatggttgtaagaagctgagagaaaggagtggggagagattgctaaaaaggagtttccttctagggtgatgaaaatgttctggaactacttattggggatgattgcacaacatggtgaaggtactcaatgtcactaatggtaaatttcacatacactttaccataatttttaaaaagctttattagctacattatgttatgatacttaaatgtcataacaatagcattctgtacgcttcactaggataaaaacttcggatttatatgcatctggaagagaaatttttcactgtaatttgcaaataaatgaatttctaaaaatcta

SEQ ID NO: 124999 - DNA, 796 bp, Homo sapiens
ccatcagctgatgaatgaataaacaaattgtggtatctccacacggcacaatagaatattcagccataaagagaaatgagggactgatacatgctaaagcatggatgagccttgagcgcatttttgccaagtgaaagaaggcagacacaaaaggcaacgtattgcatgagtgcatttatatgaaatatccaaaataggcaaatccatggagacagaaagcagataaatggttgtaagaagctgagagaaaggagtggggagagattgctaaaaaggagtttccttctagggtgatgaaaatgttctggaactacttattggggatgattgcacaacatggtgaaggtactcaatgtcactaatggtaaatttcacatacactttaccataatttttaaaaagctttattagctacattatgttatgatacttaaatgtcataacaatagcattctgtacgcttcactaggataaaaacttcggatttatatgcatctggaagagaaatttttcactgtaatttgcaaataaatgaatttctaaaaatctaacagaaaggctcttaaatcttaatttcaacctaagaagggagtgagaaacaacgagaaccatgaggggagagttaacggggaacttccccaccgtccggtacatggcaggcattccacaaatgttttctgaaagttgaaatagacatcttttcatgaactctgtaatatttgaaattattgataactcttacacaaaaacaaatattcaataaaatgatatttaatttcactgtgaaaaaaaaaaa

SEQ ID NO: 125000 - DNA, 525 bp, Homo sapiens
ccatcagctgatgaatgaataaacaaattgtggtatctccacacggcacaatagaatattcagccataaagagaaatgagggactgatacatgctaaagcatggatgagccttgagcgcatttttgccaagtgaaagaaggcagacacaaaaggcaacgtattgcatgagtgcatttatatgaaatatccaaaataggcaaatccatggagacagaaagcagataaatggttgtaagaagctgagagaaaggagtggggagagattgctaaaaaggagtttccttctagggtgatgaaaatgttctggaactacttattggggatgattgcacaacatggtgaaggtactcaatgtcactaatggtaaatttcacatacactttaccataatttttaaaaagctttattagctacattatgttatgatacttaaatgtcataacaatagcattctgtacgcttcactaggataaaaacttcggatttatatgcatctggagcgccggtctcccaatcagcgacgt

SEQ ID NO: 125001 - DNA, 550 bp, Homo sapiens
gatctcgctcctatacattgcctaaatatttaaacatttgcctaatcgataaaatgttctggaactacttattggggatgattgcacaacatggtgaaggtactcaatgtcactaatggtaaatttcacatacactttaccataatttttaaaaagctttattagctacattatgttatgatacttaaatgtcataacaatagcattctgtacgcttcactaggataaaaacttcggatttatatgcatctggaagagaaatttttcactgtaatttgcaaataaatgaatttctaaaaatctaacagaaaggctcttaaatcttaatttcaacctaagaagggagtgagaaacaacgagaaccatgaggggagagttaacggggaacttccccaccgtccggtacatggcaggcattccacaaatgttttctgaaagttgaaatagacatcttttcatgaactctgtaatatttgaaattattgataactcttacacaaaaacaaatattcaataaaatgatatttaatttcactgtgaaaaaaaaaaa

SEQ ID NO: 125002 - DNA, 548 bp, Homo sapiens
agcaaagggaaatggcgtattggttaggtaggcagcttacaacaagctaggttagactttttctttctaaatatttaaatatttaaattatcttaatactagctttttttcttttttcttttttttgagacagagtctcactccgtcgctcaggctggagtgcaatggcatgaactcggctcactgcaacctccgcctcccgggttcaagcgattcttctgcctcagcctcctgagtaactgggattacaggtgcatgccaccatgcccagctaattcttgtatttttagtagaaacagggtttcaccatgttggccaggatggtctcgatctcatgacctcgtgatccgcctgcctcggcctcccaaagtgttggggttacaagcatgagccactgtgcccacctttttttttttttttttttttaagagacaaggtctctcactgtcacccaggctaaagtgcagtagcatagtcatggttcacagcagcctctaactcctggccataaataatcttcccaccttgagtagctgggaccacaggtg

SEQ ID NO: 125003 - DNA, 125 bp, Homo sapiens
aatgaccccaagaggattgtgaggacaaatgagacaatgcctggaaactgagcacagtgcctggtgccaagagttcaataaatgttagcttgcgttagtattccaggtgataaaacaaagtcata

SEQ ID NO: 125004 - DNA, 365 bp, Homo sapiens
tcaacgctttatacttcagacttcgggaggctgtggcaggagaatcgcttgaacccaggaggtggaggttgcagtaagccgagatcgtgccattgcactccagtctgggcaacagagcaagactccgtctccaaaaaacgaataaaaataaaaatcaaaaagaaggaaaggctgatgaggtagaggaaaaaacaaacaggaaagtatgtggtgtcacagggccaaggagaaaaaaaaagcatcccaagtagagagttgtcatttatgttgaatatgttactgggaggtttagaaagatgaggacattgagtatgatttgtctgcatagatgtcactggtggcttttacaataattgcttgtgtgg

SEQ ID NO: 125005 - DNA, 566 bp, Homo sapiens
ctaatatttgtatttttattagagataaggtttcaccatgttggtcaggctggtctcaaactcctgacctcaggtgatccacccgccttggcctcccaaagtgctgggattacaggtgtgagccaccacgcccagccagaatcacatattttctattattattattttctattcaatatagagttggccctctgtatctacaggttccacatctaaccccaggctgaaaatattaagaaaataaaacaatacaacaaaaaatacaaataaaaaaaccaatacggtataacaactttttacacagcatttacattgtgttaggtattgcaagcaatccacagatgatttaaaatatgggaggatgtgtgttagttacgtgcaaataccacaccattttatataagggacttgggcacgcttggattttggtatgggcaggggggtcctggaaccaatcccctgtggacaccaagaaacaactgtattttttcaaatggagatacaaatgaaaccacagcttcaaattttctctaccaaataaatacctttacaggtttggctaggcc

SEQ ID NO: 125006 - DNA, 447 bp, Homo sapiens
attttcagcaagagagctagctggccactagagctaccctctgcagggtttccagaaggcctgagtgtagagcagtcacacaaaatacacctgacttaacaagcctcccaataacattttcaaagtgagtgttaactgatgatacaaatgtttaaattcatgtgaagttgctacacaaattagtcaggagagataacccagcaaagcctataggctgacagagggaaatcagactgatgttaaaaattgctactggtcagcagaaaccaagctttagaagaaaatagtgtttcctctgcacaggaaggcaaaaaagaaaaaaaaaaaaaggaaaaatataataaaaagcagaggctgggcacggtggctcacgcctgtagtcccagctacttgggaggctgaggcaagagaatcgcttgaacccgggaagcagaggttgcagtgggc

SEQ ID NO: 125007 - DNA, 427 bp, Homo sapiens
agggacacaggcgcaggctcccgcgtgctcgccggctgtgttgttaaacatcttcatgcaccagccctcccggcaggcccgggcgggcagagcagcggaggagtgctcgggttcagaccgagtcagggtcagcctgctggtcctcaacgccgttccgggttagttcaggttgattttcctctctgagggcaaggccacctctaaagttgggagggacaggggcggggacgaggctcgggctgtgctgggcggttcctctgtatcttgagacgctgcatttccccgcctgctgcagctcctcccagaaccgccagcaagaaaccgagagctgagctggccaaggccatcagggccgtccactgtgggtgggagacgcagccttgccacatggaagataaacgaggccgagcaggctctctcccctccc

SEQ ID NO: 125008 - DNA, 265 bp, Homo sapiens
tggggcgagagctcctaaggagccgcagtaaggttctgagcagtgcttccacctccagcgacgcaccaagcctcctgaggagtccactgggcaggctgagggcagtggtgccatccccagtttacacacgaggaaaacaaggcccgggaaatcaagtgtgacttgctcaagaccaccccgtgggatggtgacagagccaagaccactgcacaggcgccttacccgcaggagcgctctgctcgccacacccagctctctcccttct

SEQ ID NO: 125009 - DNA, 1045 bp, Homo sapiens
tgcagagactgaattcgttttatttctgaacagttcagcaggggctaatttgctaaattgatacgtgaatgttttctaccaagaagctatataatttaaaggggaaaaatattcataatacttaaaatagaattgtttaattgcgacatttcagtatcccagtattatatcagaaccacaagtaatcaactctgacaatattgtacacaacagtttctaaaatttagaccctcattctttcctgtgcttgtaaacttagcaagaatggagattacaccttatattccaattctggctactatccacatttaacattcttcttagtatcagtcttcgaatcctggggataaataagcacagcttgcttttaggctgaattttcagagcgccatttattatttaaagcactaaaaatgcctgatttatgcatgataatgtaaatttctttctttcttataatatattttaaaacaatttttggaagacacgaggtctcaccactcctgttcacccaggtttggaattgacatgggtaacgcgtcggcgggattcaaatgacaggcttacgatattcccaggctcatagctgatatctcccacctaagacgctcccagttggtggaacactaacagggcatgaaacaaccattgccaagctaatttgattaatagttaaagaaaaagggagccacacatgttgtgccccagacgttggtcttataaaaactatggggacccatctgtagttagtcaacccaaactatatggtcaccacaaaaggggcgagcaacatataaggggggagtagacaaactaaaaccccggtggcctataaattatctcatataaagtggggtggagaattttatattaccacacgatcgtagtgcacaataatataggtggacaaggaggaagagtatattagcagaatatctgaaaattctagtaaagatatttaccaggtgtaacaaaatattccatttggctcaatattatatataaacaagagttcataacaatagtgacagcactatgtatatag

SEQ ID NO: 125010 - DNA, 455 bp, Homo sapiens
atggttgggcctgcctcatgaggtcgttgggaagatcaaatgagataagcaaggaaaaacctgtgtgtagcaccttgcctgctgttcagtgggtgctgagtatacttgttattcctataattattacaactccagctctctctagccctggtggtccacaatgtgagttctagacccttccttgtgcatgttctctctgtctctttctctcagcttccacagctccatccaaatcttgtaggtactttggtgtgagcactgcaggactgggagcgggtaaccgcctgagcactcttgaaaaccaatctcccacccctcccaagttcctgagcctcatcgcgatgacatcaagacagaactaaagcatacttagtcctacttcatgctatgagaaacagaccatgggaacctcatattctgagccaaaagtcacgtcacattcacaagaaaaatct

SEQ ID NO: 125011 - DNA, 347 bp, Homo sapiens
tttctagcctgtcctcagctggcataagtcaaaaaggagatttttttattgactctggcgattgaaaagctgtggtaggactggtttcgggacaaagatctgataatgaatgtgccttatagggaattcctgtagggtcacgtgactgctttagattgcaggtcaggaaaggcctctgaagtggtggtgatgaagctgaagctggaatgagagggacctgagaggggaggagtgttggcaggcagagagcaggttctagggctggactgagcgagatatatggaggaacaggaaggaggtcatggtggcaaagtcgggggaaccatggtgtacagtctggggtgatt

SEQ ID NO: 125012 - DNA, 405 bp, Homo sapiens
tcatagctgactctagaggataaaactaatgtcctgacccacgctactgagggccctccatatggcgggtgttttgggaagtaggtactaatttaagacagcttttggtctgaagttgcatatagtatggctggggagccagacaaggaaacccgttaagtgctatgtagtgttaagaagtgcactgaatccaaccaagagagtcaaggaaggcttcttggagcagggatggcttttccccaacctttcctattattctgcagagtctgcctttagtgagtgacttgctttttataaaaacttgaaaaaaaattctgtcatgggttcttttccccttttattcattcactgtcatgacagttcccacacagtatgccccagttatggcttctgcattctcaaaaa

SEQ ID NO: 125013 - DNA, 769 bp, Homo sapiens
gatcctcggagaaatcaagtcagtcccttcccactgcttctcctcaatgcatttggttatctgtggctctcacctctcaaactcacaatcaccataaaggtgattggcaaaaaaatgaataagtatcacaatatatgcttactagatgtttggaacagcctcagatttatcttcttggtgtttctgaggccttaggccacacagtgattgttttcttttaggaagtgttcaaaaccttgtaatgagtcagtttggttcaaactgccgggaacacagggcagttcaccgtccctgcatgaagaggccttaggatgcacagatctgaagactgggcttggctcttgtctctgcagttgatggtgactctgcagccctgacccctttacttccttctatttttttctttcatcttggaactcctaacagttcttgctgccttcatcccacctggtgtaggtaatgagtatcaaatgtccgcatcttctcagaaaaaagtactgtgaatgtgaggtgtgattttaaggcattgttatatttcttcttatttgtgagtgttttaaaattttgtatttcttttaaactttttattttagaaaaatttccaacatatatagaagtagactattgtaaggaacccttatgtaccctccaccagcttcaacaactatcaacaaaagtttgatcttgttttaaccacattcctttccaatttttgtgtttacccccagattattttgaagcaaattcctgacctcataacattttcaaa

SEQ ID NO: 125014 - DNA, 174 bp, Homo sapiens
cctgagcctcccaaagtgctgaaatgacaggtgtgagctaccatgcccagctgatgttgtgttttgattaaaagattatcatacagtaaccccctgtgtgtggtgcacctttcagattttggaacattttggattttgaatttttggattagggatactcaacctgtatacccc

SEQ ID NO: 125015 - DNA, 325 bp, Homo sapiens
tggggctagggagtgttatctgaactcaggctttctaaggtgacctgacttgtcccagctggggtgtcttctctgtgggtcattcagctttggtttctcagggcttggagaaggacagaagctcagagccctcacacaacactggagtgaatgtggctctgactaaccccatctggctagaccagggtcagggagacagcttgggagaccccactcttaaaccaggagaagagacaggaggccaggggatgagtggaccatatggccatggccacccacaaacactcgcagtgcacccacgcttacatgctcagcatacacacat

SEQ ID NO: 125016 - DNA, 289 bp, Homo sapiens
tctgagatgtggcacatgctcaatatacatgtattaagtaagttaataaatgttatcaacaagtagctgtataatttggggcaattcatcgtctctggaggagctcgcctttcttcagccctaacgtggtgatttggttaaacctgtggttttcatactggctcacccctaccccattctcatcttgggccctttctgcaatccctgccgtattagtccattttcacgctgctgataaagacatacccgagactgggaagaaaaagaggtttaatggacttacagttcc

SEQ ID NO: 125017 - DNA, 394 bp, Homo sapiens
tacgagtgtgtgtgcatgtgtgtgctagtgtgtctgtgtgcatgcatatgcatgtgcaagtgtgggtgtggtctgtgtgcatgtgtgtgagtgtggtctatgtgcatatgtgtgtgcgtgtgtgcatgtgtgtgtgtctgtgtgcatatgcgaatgtgtgtgtgtggcctgtgtgcatttgtgtgcatgtatgtgtggtctgtgtggatgtgtgtgagtttgtgtgtgcatgtgtgtgtgtctgtgtgcatgtgtgcctctgaatgtgtgtggtctatgtgtatgtgtgtctgtgtgcgtgtgtgaatgtatgtgtgcatgagtgtgagtctgtgtgcatgtgtatgtgggaatgtggtctgtgtgagtgtgtgtgtgtgggggggaatgtggt

SEQ ID NO: 125018 - DNA, 591 bp, Homo sapiens
atggcacgtgcctgtagtcccagctactcaggaggctgaggcaggaggatcgcttgagcctgggaggtcaaggctgcagtgagccatgattgcaccactgtactcctgcctgggctacagagactggtctcaaaataaataaataaataaataaagatacaaagaactgcagattcattatgatggtcacttgtcaaataaggctgtgaatatataatgcccctaagaggaaatctgaatgttcactgaagtaggaaaaagtgcacaatttcagttaaaaaataatgtaatgcaatttcacactcatattgacccagaagtggggagggaaaatggctaacaacaaatactaaatattgaagaggaacaagagtgatggcaactcatacactgcctgtgtactttggagagtgtatcagtttgctgtataacaaactattccaaaatgcagtggcttaaaatagtacttattactccttacaagccaaggtcaacttctggtgtcagctggactattcagatgtctgcagctagctctgagttgagtaggcaactctgctgatcttggctatgctctcacacagtttggag

SEQ ID NO: 125019 - DNA, 228 bp, Homo sapiens
aaagatttctttctttatttacataaaggggacaggggtcagtctgtgtattggaagatgtgcccatatttggtcacatattggaagagtacaaaattgcccaaataagggatatttattgccttcctgactgcagactcaaggaggcaggaactttgacattttctccaatgcctatctgtatccacattgcctgtaacatagtatatgctcaataaatattgattg

SEQ ID NO: 125020 - DNA, 171 bp, Homo sapiens
gaagggagaggtaaagaagaaaatagaataagctaattgatcactgtctaggcaataagtggctgttaaaggataccaataagaactagttaaccagatagtaaaggcttgaataataaaacagaggactaaggacattaaaatggtataagaaaaaagaagactactagc

SEQ ID NO: 125021 - DNA, 190 bp, Homo sapiens
ggcccccacaggtatgtaccctcaagcacctttgcacttccattccttaggggtgtgtatcagaaccccctactccacgggtgagattatgagacacttctgtgcctgtctgctgttgtgcccaggcagtcatttcttcttctctttggttttgcttacatttgtaccatttataataatttattattat

SEQ ID NO: 125022 - DNA, 710 bp, Homo sapiens
agcacagtacgccctgcccgggaggtcccatcgcagtacctgtggatgtgagttaataaggtcagcttaattcacatcactccttttgatatattttaacacagttgaaaacactgtctatgcatacagaagtatgtgtgtttgtgtataaacacatatggatggttgataaatttgagaaagaaatgggttgtgtacacgtggcccacagtttcagtactggctgcttccacaactaaaatgtacacatgaattgataatgctctgtgttttctccgttgatcttattctttctaaattattgtcctaacttcttatttttttttctttttttaaaaaaaggaatggactcttactgaaatggtgtttgatcagagaaagtgggttatataaactaaaattgtgtaatttctgaagtgtataaaattaagccaggcaggtggtacgtgcctgtggtcccagctactcagaggctgaaagaggaggatcacttgagccaaggagttcaagtccagcctggacaacataatgtgacccatctctaaataaattgattgatcagatagataaccagacagacagacctacttctcaaatacagaaaatcacatatgatgactgagtcactgttccctctgtaaggaagatggcaccatctccgtgtgttgccttgcagtggggccaccgcagtgaaaacacagacttcttac

SEQ ID NO: 125023 - DNA, 469 bp, Homo sapiens
ctgatttctagtaatagtttaattctgttgtggtatgagagcatactttgtattatctatcccttaaaatttttaaaggtgtattttaaggctcaggatatggtctaccttggtgaatgttctttgtgagtttgagaagagtatgtattgtgctgttgttggatgaaatatactataatgtcagatccatttgattgttgatgctgttcagctcgactatgttattggatttctacttgctgggtgtgtcagctacctataaagaggtgtgaggtctcccagtataatagtggatttgtctgttactctttggagttcaatttttgcttcacatattttggtgtaatgcaactcttaatctttgttctgaagtggtttttatgtttccttattttgaaaactgctttgtctgtaattaacatagctactctagctttcttttgattagtgttggcatggtatgtttttc

SEQ ID NO: 125024 - DNA, 445 bp, Homo sapiens
ccccatctctacaaaaagtacaaaaattagccaggcatggtggcacacacctgtagtcccagctactcgggaggctgaggtgggaggattgcttgagcctaggtggtcaaggctgcagtgaatcaagatcgtgtcactgtacttcaacctgggtgacagaatgagaccctgtctcaaaaaaagaaaaaagaaaatttacctaataactacttctgtcatgttgagcattctttgttaacaagttgaggatggggttttttgcatcattaattggatatttaaagataggttgtgggaagggtgtgtgggacaagtgggtattttactaatgaaaggttgtaactggcatcttaaagttgagaggtgctttataataattgcagatttcttggcaaaatagtgtaatgcttgatttgttaataggtataaagcaatccagtcattt

SEQ ID NO: 125025 - DNA, 417 bp, Homo sapiens
cttgatgggaacatggaagattccagtaatacaatgtttgctttatcattgttactatttataatagaaccaattaatcaggataaggtccttttgtctgtctggaatgttcttgtccccaggttgcatgtccttagaacgatctttcctgacccctatctgtcacttcataaggcaacatcactcaccttgcttgagtgtttccatggcacttagggcaacttatagaaccttaaattacaggacacacccctctctttgtttattgattgtctgctgctggaacataaacttctgggcagggacatgactgtctctccagtatcctatccttacccttagcagaatgctgtccagccattggcagccagtagcttctcatttcatatgttcattgacagatgactgtattttcat

SEQ ID NO: 125026 - DNA, 691 bp, Homo sapiens
gagtcagtagttatcacagaggttagttgtgctacaacaagatttcagaaatcctttgataggctgacagtgaacttgttccttgcccacagacatttctcttctcttaccttttttccagactgactacacaactgtttgtctgataataataataaatttagaacttaaacatttcattattaaatcaaaatgtaggcctaatggcagtcctaatgtttgctctcttgtccttcagtctggcactccttccccagttttcatttgtgaaaaatcagaaggtggtaggtatttgcttgagcaaaggaactcttctttgtttaggtaaatagctttgccaattgaagcccttagggtttcaaaatcattttgctttttaggatagactgtcatttacagacacttgtaactgacctaaaattttgatttgcattatttgtaattatttcatcaactcaaaactatgaacactgcatgggttttttttctattaatattcatatgaaaagaatatactatagtagtcttttcacagtatgtttcagtcaattctctgctaaggtctattttttatgcctatttttaaatgtctcttttaaagtttctcttcagcctttcatttttttttactgacctacttgacatttggaatgtacctgcattggcaggaagtccctactatttaagaaaa

SEQ ID NO: 125027 - DNA, 629 bp, Homo sapiens
gtggctctgtagaatgcccccttagcagataatataggcatgttaaacaccatgatggacaccttatcaaaattgcaaaaaaacccaaaaaacaaaaaacaaacttaatctaacatgttacagaaagaaggaacaatagcaagagttaagtttgaaagagttagtacattattctctgggttccatatctttttctgcatcagtcacaggcaccagtaagtgacagttggaagatccttgctttgaactcacacaaacccagctctatcttatttctttgttcaaaaagagttaagcagatgtgatttctccctttgttgaacttgcagtttagcagggaagtcatatataaaatattaattatgcaaataactatttaagtgggcttgtactagatactttaaagaagaatacagatgcatatgagagaagacctaacccggcccacctatagaagtacacctaagccaaaactttgagagaggtttgccatgtataggcagggcagagtggctcatgcctgtaatcccagcactttgggaggccgaggctggcagatcatttgaggtcaggagtttgagacaaacttggtcaacatagtgaaatcccatctctactaaaaatacaaa

SEQ ID NO: 125028 - DNA, 566 bp, Homo sapiens
  misc_feature (462)..(462): n is a, c, g, or t
  misc_feature (464)..(464): n is a, c, g, or t
aaagtgatagatgggtatggaacaagactttcagtgaatcagctctggacaggagtaaagggaaataaactctggaactttcgaggaaaaaagtctctgggactctcaaggaataaaatgccaaccaccagaaactacagaacaggctttgggataatctaatggtgctcaccacaaggctgggattcaacctccattaaagggtgacagtgccttttaactcaatacaaccactttaaattgagggacacttcaggtgaaagaccagcttaaatctttatgcccccctcattcaagaaatattcattgagagcctgctgtgtgccaggtactggaaatagacaatgggaggacaaggcacccggaccctgttatctagtggggaaggcagctaagaaacaagataagcacatacataagggtcatttcttttttcttttttttttttttttgggaaaaagntncccgtttggtggccccccagggggttccctaaaaagcaacccgggggctttgaagttgggcacgggccggcggttaaacaagctcgggagggaccccggggg

SEQ ID NO: 125029 - DNA, 177 bp, Homo sapiens
cagagcctggattgaactcagcatccagggccaagggggaagcactggcttggccattgatgctcagttcctccttcttgctggtcctgcctttggggaagtttacaaaaactgctgaacacatcatttgcccaaaccccacaacagacaggagggttgccgctgggtgctgtgtca

SEQ ID NO: 125030 - DNA, 440 bp, Homo sapiens
tttttttctttcccttactgtagagaatgctgggtaagttcttttggctttgcttctatagccctgtgcacttctttcagcaggctttatattgggctgtacagtttgtcctataagcctatagatggcacttatatgtaacagttagctatagccaaggaggctaggtatatacttaatccttgtttactatcagctctctgttgcctcaggcattgggctgattggtagactgcgcagagatctgagatccctgcttagccctggtgggatgggagccatgaatggtggggccagactgggcaattccacctgctggtcccctgatggcagacacaagcaccagtgccaggggaaagtccagtgggtggccagcaggcctccagaggtttgcctgggcatggagctaggaaacctctttggctccaaatactctctgc

SEQ ID NO: 125031 - DNA, 168 bp, Homo sapiens
ggtgggcaacaacactgatcttgagtagggaatcttgagtccctccagagaaaggcaactctctggctccaggcccctcagactggttgaaaccagtctgacatttgcacaagcatcaaagtgtaactcagaccacagagacaatccaaacctgtggtgctcaacaat

SEQ ID NO: 125032 - DNA, 808 bp, Homo sapiens
  misc_feature (808)..(808): n is a, c, g, or t
ggaacacttctcattttatgaggatactgtgatcttggtaccaagattgaacaacaatagtgtaagaaaagagtattatagagtatagcctgggtaacgtagcaagactctatctctaccaaaaatttaaaaattagttgggcaaggtggtgcactcttgtaatcccagctactcaggaggctgaggtgggaggactgcttgattccaggagttcaaggtcacagtgagttatgattgtcactgcactccagcctgggcaacagaacaagaacttgtctcaaaaaaaaaaaaaaaaaaaaaaaagaacagagagaaagaaagacagaaaacacaattatttttgctgcgcacctcctccgttaaaaaaccgaggagaggaatataactctcctccaataaaatattatctccagcaacattacttcgcagaaattttcgccaaggcgataatttttatttagccccaagggtaaggggttttacttcccaggagaagtccagagggtgggtgttaaccttttttccaagaaacccatatttcttcccccatctattcatctcgcagatataaggggggaaaaagacgccttttagaggggggcggtgaacccttctcccaaaaaaggctccccgcgaaaaagtttttttcaagcccgccagttcttcataggatcgatgtttttagaaaaaggcgcctcttatataacttccaaaacttgggaacgcaagatacttttctcaacgtcgcgtgggctttaaacccgttgccggtcacacacattgtgggcgtcaccgtttatacacaan

SEQ ID NO: 125033 - DNA, 249 bp, Homo sapiens
catggatgcagaggagcccatggatgcagggggccaactatactatttcaggtagtttacaagtgaaataggcttttggaggttgacatagaaatctataacattattcctgtggggaagtatatttccaatttcaaacaagtaatttgttaagtaaactttcagaactaaagtttgtcgtggctatttttagaattttgctactggaagggtgctttgtcattataacctgtaaatgaattgaatcta

SEQ ID NO: 125034 - DNA, 425 bp, Homo sapiens
ctaggtttttagattaaactattgggtgaatgggtgctgcaattaatgatatatataaatagatttggggggaaattaaagctgctttttgcatcatataagtttcagacagctataaggcattcccattgagatgtcaaatagtagagtctatgcatatggagctcaagaatttgtcagtttacattttgctttaaagttgaggattgaatgagataacctagtgtatactagaagaggagaaggccaaaggctgaactctgttgcattcccaatatttagatatcagattccacagaaggaatcagcaaaagaagacagaagcaaaatagaaagataaatggaaacgtaatagccaaactgagatggtagtgtttttgctgctaaggtatagatgagcagaagtattcactgcatttaacatt

SEQ ID NO: 125035 - DNA, 380 bp, Homo sapiens
cccactgactcatttttaaagacttaattcaagcctcaacctctttcgtgaaatctttcacgaggcttcccccacctctcccactctgatctaatgcccagggagactgaccacttcttcttgtgtggtcctttagatagcatgtcactgtaagtcatttgctcatgggtttacattcccctttaaacctatgagctcctgggtgggagggaccatgtcttattcattccatcctcccactgccaggtggagtgccaagtataaagtaagggatcaataaatgttggatcaaacttctaaaatccacttacagtgacactccataatactgtggctccttctgtctccaggaccctaggacccaggatgctccaacatac

SEQ ID NO: 125036 - DNA, 348 bp, Homo sapiens
caggctcttgcccatccttcagatcccagcttaatatcactcctaatcaaaagtaggtaccctgttattctttcgtagcaccctttttcctccattgcatttatcacaatttacaatttgatacaaataattttatatttaacatctatgcccccactagactgtaagctgcacaagagcagggggacgacttttttccaccttgcaaactcagaatctggcacagtcgttttcaatacattgactgatacactaaaaataattagcaggatgggtgtggtggctcacgcctgtaatcccagcactttgggaggccgaggcaggcggatcgcctgaggtcaggagttc

SEQ ID NO: 125037 - DNA, 283 bp, Homo sapiens
aaatacctccctgggctcaagacgcccacccgcacacccttcactgaacaccacaaagtgccgcatcctataccacctagcactgaacttggcctgctgtgatgctcttcctgcttcgtgtaagcctgcattctgaatgacgaaatgactctccctgagcccagtggccgtgcggatttctgccatggtctggatatttgaggccccctccgaattcatgtgttgaaatggaagccccagtgtgagggtgttaggagctggggcctttgggaggtaatgaggt

SEQ ID NO: 125038 - DNA, 768 bp, Homo sapiens
agccagttctactcagaataggcagctgctttcattatgtggttttgtctctgaacatgttttgtccatctttccatccccactgctaccacccaaggccagatcttaataatctgtctctggcagcgttttaattatcaactcacttgccactccatgtccagtctttaccctgaaatataaccttttctctctccatagcttttaagacacagatcttattcctgtgacttccttgctcatgaaacctctaaaatctaatcttcttagaatgatatttgaggttctgcaaagacttttgcccttttctttccagtcctttctccaatcgtctcctcataccctgttccatgggggttcatactagtgggtaggaatattagagaaaccatctttgggacagtatgaaggttaggaaggattctttgttgtggggccatgttaagatttaatttgataaaactttgtgctcggcacagaagtaagtcttaggaataaggagtagccaaacacatggttaaggcttttggagcctgtagttgatgaagaaggacaggaaggtaaagtaagtaggctagagcgataatcactctgaatggaaacctggagagagtgctttaggagcttggaggggaccactacctgagagatgaaggaatacctcccagaagaggtaatatttgagttggacttcaaagatgaggcatttggtaattatgaaggggagactgtaacttccaagcagaaagaccagtgaggacagaggca

SEQ ID NO: 125039 - DNA, 206 bp, Homo sapiens
gttgggcaggcaaccagggcaaacaccaggagcttgtgtgaacacccagattccttctgctgtgttactccgtcatcctggagtgttgtccttgtcttcatggctgaagctacctcaccatccatgtgagcccacattccagcccaaggcaaggaggacagaggaagggaggacatgcagcttcctcataccaactgtcatcagga

SEQ ID NO: 125040 - DNA, 786 bp, Homo sapiens
gtaggtggatcacttgagcctaggagtttaagaccagcctgggcaacatggtgaaaccctgtctctacaaaaaaaattaaaaattagccaggcatggcagcatgcatctgtggttccagctacttgggactctgaggagggaggattgcttgagcccaggaggttgaggctgcagtgagccatgattgtgccactgcattccagcctgggtgacagagcaagaacttgtctcaaaaaaagaaaaaaaaaaattctagaacctcagaagcctagatccacataaacttagaaacatccaattcaagaatttactggaacaatcaaattctagaatcttagaagcctagagctaaagaagcatagaaacatcaaattctagaatcttgtatgtatagaatcctagaaccttggaatctgcagattctggaggtagagaagcctagaattgtagaaccctagaactgtcaaattttagagtttagatatataacaccctaaaatcttggacattaaagagtcttagaagtgttgactcatagatgtctagagttctagaaacttggacatcaaactctgaagccttagaaatacggaatcaggtcaggggcagtagctcacacctgtaatcccagcactttgggaggcttaggtgggtggattgcttgagcccaggagttcaagaccagcttgtacaacatggaaagaccccatctctacaaaaaatacgaaaaattagccaggcatggtagtgcgtgcctgtagtttcagctactcaggaggctgagg

SEQ ID NO: 125041 - DNA, 314 bp, Homo sapiens
cagcaaggcttctaacagctttgacctccaaggcttctcctggctttactggaagttatcttactttgagctcccttccttccacttaaggaattgtaaataacttcttggagggctatttgatttttgtttttgaagacaagatctggccctgttgtccaggctggagtgcagtggcacgaacatggctcactgcaacctcgacctcctgggcccaagtgacccttctgcctcagtctcccgtttagctgggaccataagcgcttgccaccacatccagctaacttttttatttttagtagacatgaggcccc

SEQ ID NO: 125042 - DNA, 437 bp, Homo sapiens
ggtgggtggaagaaaagcaaagggagtacatttgtaatggtgtctctattttattggttaaatagatggttagattctctgctctgagttgatgggtaggggagggattttgaagtagctggaaaggttctagatttttatggtagatgtaccttgatagagaacttaactggctctagaccagcagtctaatgatgttcagtaactccaatagctattattgtttagggttgttatagcttattgaacaaggtttgtaactaaccagtatagaagtgaatatagaacatgagcagatagctcacattagaagtgatatatgtagtaaagacttaagggacaggaagaggaagaaaaaggagccagtaaagaagactgagaaggaaccaccatcagaggtagaaggaacactaaagtagaggttctagaagctggcg

SEQ ID NO: 125043 - DNA, 720 bp, Homo sapiens
attcctttttatggctaaataatattttatcatatgtatataacattttatctattcatctgtagatggacattagggttgttcccaccttttgactgttgggaatagtacttcaatacacactagcatgtgagtacctgtttgagcctctgttttcaattattttggttatttacgtagaagtgacttgctgagtcatgtggtaattccatatgtagctttctgaggaacttccaaaccattttccatgacagctacccccttttacatttctaccagcaatatacgagggttccaatttctctacaccctcaccaacacttgtcgttttctgctattttgattatagccatcctaaagggtatggagtaatagctccttggggttgacctactcaaaatgtttaaattgataagaaagctattcataaatgccttctattaaaatgtagaagacaaaattgatggctcccacctgtaatcccagcactttgggaggccgaggtgggaggatcactagagctcgggagtacaaggacagcctatgcaacatggtgaaacctccatctctacaaaaaatccaaaaattagccaggtgtggtggtgtgtgcctgtggtcctagctacttgggaggctgaggtaggagaatcgcttgagcctgttatgtagaggttgcagtgagccaaaattgcaccactgcactccagcctgggtgacaga

SEQ ID NO: 125044 - DNA, 366 bp, Homo sapiens
gcgcagagaggagtgtaaactctagcggggctagagcaaacattggattagcggcagcagcctgccagcctgcccgaggagtgctgggaccagcgcgctgcacgccgactggcacgatggcctcgtctcaggggaaaaacgagctgaaattagccgactggatggcaactctgccggagagcatgcacagcatccccctcaccaatttagccattccagggtctcatgattccttcagcttctacattgatgaagcctctccagtaggtcctgagcagccagaaactgtccagaattttgtctctgtgtttggaactgtggccaaaaagctcatgcggaaatggttagccactcagacaatgaatt

SEQ ID NO: 125045 - DNA, 399 bp, Homo sapiens
gccggaccaggacagtcttaccactttcacctttctaatgtgccttttgagagaccgtccacctctctcctttcaactaccaaacttctggaaagaataaattttgattatatttttcaccatccatttattccctcaaatttgcttttgcttccaacattcaacttaaagccatttacttaagcgtcaccaatgttctttcctctgtcctcctcttctctgacctgagagaattgattattaactattaaaccttccttcttggaacttcttcttcccttggcttctgagacattttcaatttacccttctctgattgctcgttgtctattctattcttttcttttcttttcttttcttttcttttctttttcttaagactggtcctggggatcctct

SEQ ID NO: 125046 - DNA, 420 bp, Homo sapiens
gtgaagggttgagaccagaacccaggtcccttgactcataatccagtgttccttccactataacttcctcttgagcctttcatggcatgaaagacaaccaaggtgaggtatctcatacatttcagcagtaaaagttcgtagcagagttatgggaggggtaagagttgtggagaaggggtgataaacgctgttactcccaagtaagtttggatatgaagccaacctagaacatgggaaactggtattcctcaagcaagtcatctaaccatcatgtcaacttcatgcacattctacggactgcgtgtacattggtgcacatggaggaacagcatgcatctcacagcagaagacctggtttcctttttccctattttagctgtgggggtgggtaggtgggagtctaaggcaacacaatcctcc

SEQ ID NO: 125047 - DNA, 730 bp, Homo sapiens
atctgaatcatcaaagtgtcaggctgtagatctgaaggactttgtcctgggactcttagaggaccctcggggtgtagctaaccaccatggagggagttgaggatgcgcctggagtgtcactggcctttccagcgcgtggggcacctttctgagtgctttacattttgagctctcccacatctgacggagatggtattctcatttacagatagattaaccgagtcggagagaggcaacatcacttgaattatgtcccatggctacaagtggagaccccaaacccagccatctggttccagagccaagctcaactacaatttgaaaccacctaatcactgtgcccttgggttttagagagacttgcatgtacataactgttgtgtcccccaaatgagatgctgatggccagagagcagttttactgcagagagtgtgtgtaggatcatgggaagaacatgggcattgaatgccttcccatctaggtgttccttacctgggtgctgttagttactgagtggcagggcatgctgcccacagagtgaccagcttcctggcctgtaggggagctctgtgccccccacctgccacatgccgtgcgcgttacagaaggcagcatgtgttcccagtgaggatccaatggctgatggctgtggtggcgctggtgatgacagtggacgcttaatccgcgtcaggtgctcaagtcctcacaaaaacagacctagggaggcac

SEQ ID NO: 125048 - DNA, 534 bp, Homo sapiens
cttggaactctccaagtcacccctcttgcaactttcgtgttaaaatcattcagtattttagttatagcttgtgatttttcaccttaaaattagaccttgagctggactcagtggtgcacacctgtagttctggctcctgaatggctgaggccggaggatcccttgaggccaggagttagaggctgcagtgcactgcgattgtgcctgtgactagcctctgtactccagcctgggcaacatagtgagacaccatctgttagaaaaaaaattagaccttgtgattattactgtttttgtacagataattgttggtttagatttactttatatgttagaagtgtttgtttattcattattattctcacatctcagacctttcacctaggataattttccttctttctgaagcacatcttttgatgttcctctagtgacatctgttgatggcaaactcttagtttacatttatcaaaagtattttcaattcattctataaagttgattttatatgtacataattctaagttgaggtgt

SEQ ID NO: 125049 - DNA, 228 bp, Homo sapiens
gtactcagccactgtgtgacttagggcaggtctcagaacctctctgagcctcaatttcctcatgtataaattgggtgtggccaatacctatttttcagggtagttgtaagaaatagagatgagagaaagaatcgaagaacaagattttgtagtgtgtgtgtgtgtgtgcgtgtgtgtgtgtgtgtgtgtgtgtgtgtgtgtgtgtgtgtgtgtgttttaagcattggg

SEQ ID NO: 125050 - DNA, 398 bp, Homo sapiens
ttttaatgagataaagttatatagctttatttttaaaagtggcatatgtgtttacatgtatatagttgtctagaaaattactggaagtctaaagccaaatattaaaagagattaactggccaagtgcggtggctcatgcctgtaatcccagcaatttgggaagccaaggagtgagccaccgtgcccggcctcagggctgattctcagccagcagtggccacaacaggacttccttccatgacgtttctcacactgctggaagtgcaatcagctcagccctctgcccagaatcactcccggctctgggctacaccttggtgacgggctcctctctcctctgccccacagggtgtgccgaggacacccccagtgtcttccagtcttatccctcccatggc

SEQ ID NO: 125051 - DNA, 2036 bp, Homo sapiens
ggttcatgccattctcctgcctcagcctccccagtagctgggactacaggctcccaccaccacgcccggctaattttttatatttttagtggagactgggtttcactgtgttagccaggatggtctcgatctctttacctcgtggtccacccgcctcagcctcccagagtgctgggattacaggcgtgagccaccgtgcctggccgacgatataacttttaaagaaccaacctttggttttatttttctcaattgtttatataattaatttctgttattttctttcttctatttagcttgagtctcctttgatcttttttctttagttccttaagataagccttaggtcattgatcttagacgttatttaaaatacatatttaaagctatacattttcttttaagcattactttagttgcgactttacaattttattatgtcgtatttttattattcagttctaattttcttttttttttctttttgagatggaatttcgcttttgttgcccaggctagagtgcaatggtacgatctcagctcactgcaacctctgcctcctgggttcaagcgattctcctgcctcagcctcctcagtagctgggattacaggctccagccaccatacctggctaatttttgtatttttagtagagatggggtttcaccacattggccaggctggtctcgaactcctgacctcaggtgatccacccactttggcctcccaaagtgctgggattacaggtgtgagccaccatgcccagcctctgattattttctaatttcctccctcagttcttctttgacccatggattatcagaagtgggttgtctgatcagcaaacatttgttttttttcctcttaatatcttcttgttgctgatttctactttaattccattgaggtcagaaaatatcctctttatgatttcaatcctcttagttttattgagactcgttttatgacccaatatgttgtctgtcatggtgagtgtaccatacacagtttaaaagaatgcgtattttaggccaggtgtggtggctcatgcctgtaatccagcatgagattacatgctgagattacagctgtaatctgtaatttgagaggctgaggtgggaggatcatttcgagaccagcctgggcaatgtatagtgagaccatgtctctaagaaaaacaatatgtaatttgaattgttgggttaatatgttttgtaatatcgatgagattaagtggttgatagtattgttcagatcttctatgtctttactgatccttttgtttatttctatcaggtgctgagaaaggatgttaaaatcttcaattatgattgtggaattgtctatttcttaaattctaccagtttttgtatgaagctctaataacttatgtcttcctaatgtattgaccattttatcattatgaaatttccctctgtctctggtaatttgggtttgaaatctactttatcttatgtgaatatagccactgcagccttcttaagcttagtgtttgcacagtatacctctttctattaatttactttgtgcttctgtgcctatttaaagtagtttctttaaacaacatatacttgagacttgcatttttatctgttctctctgtatcttttaataagtttaacattaaatgtaattattaataggtttctaatttacatgtttcctgtttagataagattattttataattgtattttaatttattggctctttagctatactgttttaataatttttttaagttggatgttctagtgattacaatatacattcttaatttttcagtctacctagagttgatgtgccacttcacataaaatgtagaaatcttgtaagtatgtacatccatttatcatacctgtcttttatgctgtagttgtcatacatattaaatctacatatttaaatattgtaagtcctgtcataagttacaatttctgctttaaataatgatatgtattttaaagaaattaagaggaaaaaataaaatcttttgtatttattcacataaaaa

SEQ ID NO: 125052 - DNA, 1714 bp, Homo sapiens
ggttcatgccattctcctgcctcagcctccccagtagctgggactacaggctcccaccaccacgcccggctaattttttatatttttagtggagactgggtttcactgtgttagccaggatggtctcgatctctttacctcgtggtccacccgcctcagcctcccagagtgctgggattacaggcgtgagccaccgtgcctggccgacgatataacttttaaagaaccaacctttggttttatttttctcaattgtttatataattaatttctgttattttctttcttctatttagcttgagtctcctttgatcttttttctttagttccttaagataagccttaggtcattgatcttagacgttatttaaaatacatatttaaagctatacattttcttttaagcattactttagttgcgactttacaattttattatgtcgtatttttattattcagttctaattttcttttttttttctttttgagatggaatttcgcttttgttgcccaggctagagtgcaatggtacgatctcagctcactgcaacctctgcctcctgggttcaagcgattctcctgcctcagcctcctcagtagctgggattacaggctccagccaccatacctggctaatttttgtatttttagtagagatggggtttcaccacattggccaggctggtctcgaactcctgacctcaggtgatccacccactttggctcatgcctgtaatccagcatgagattacatgctgagattacagctgtaatctgtaatttgagaggctgaggtgggaggatcatttcgagaccagcctgggcaatgtatagtgagaccatgtctctaagaaaaacaatatgtaatttgaattgttgggttaatatgttttgtaatatcgatgagattaagtggttgatagtattgttcagatcttctatgtctttactgatccttttgtttatttctatcaggtgctgagaaaggatgttaaaatcttcaattatgattgtggaattgtctatttcttaaattctaccagtttttgtatgaagctctaataacttatgtcttcctaatgtattgaccattttatcattatgaaatttccctctgtctctggtaatttgggtttgaaatctactttatcttatgtgaatatagccactgcagccttcttaagcttagtgtttgcacagtatacctctttctattaatttactttgtgcttctgtgcctatttaaagtagtttctttaaacaacatatacttgagacttgcatttttatctgttctctctgtatcttttaataagtttaacattaaatgtaattattaataggtttctaatttacatgtttcctgtttagataagattattttataattgtattttaatttattggctctttagctatactgttttaataatttttttaagttggatgttctagtgattacaatatacattcttaatttttcagtctacctagagttgatgtgccacttcacataaaatgtagaaatcttgtaagtatgtacatccatttatcatacctgtcttttatgctgtagttgtcatacatattaaatctacatatttaaatattgtaagtcctgtcataagttacaatttctgctttaaataatgatatgtattttaaagaaattaagaggaaaaaataaaatcttttgtatttattcacataaaaa

SEQ ID NO: 125053 - DNA, 1236 bp, Homo sapiens
ggttcatgccattctcctgcctcagcctccccagtagctgggactacaggctcccaccaccacgcccggctaattttttatatttttagtggagactgggtttcactgtgttagccaggatggtctcgatctctttacctcgtggtccacccgcctcagcctcccagagtgctgggattacaggcgtgagccaccgtgcctggccgacgatataacttttaaagaaccaacctttggttttatttttctcaattgtttatataattaatttctgttattttctttcttctatttagcttgagtctcctttgatcttttttctttagttccttaagaccagcctgggcaatgtatagtgagaccatgtctctaagaaaaacaatatgtaatttgaattgttgggttaatatgttttgtaatatcgatgagattaagtggttgatagtattgttcagatcttctatgtctttactgatccttttgtttatttctatcaggtgctgagaaaggatgttaaaatcttcaattatgattgtggaattgtctatttcttaaattctaccagtttttgtatgaagctctaataacttatgtcttcctaatgtattgaccattttatcattatgaaatttccctctgtctctggtaatttgggtttgaaatctactttatcttatgtgaatatagccactgcagccttcttaagcttagtgtttgcacagtatacctctttctattaatttactttgtgcttctgtgcctatttaaagtagtttctttaaacaacatatacttgagacttgcatttttatctgttctctctgtatcttttaataagtttaacattaaatgtaattattaataggtttctaatttacatgtttcctgtttagataagattattttataattgtattttaatttattggctctttagctatactgttttaataatttttttaagttggatgttctagtgattacaatatacattcttaatttttcagtctacctagagttgatgtgccacttcacataaaatgtagaaatcttgtaagtatgtacatccatttatcatacctgtcttttatgctgtagttgtcatacatattaaatctacatatttaaatattgtaagtcctgtcataagttacaatttctgctttaaataatgatatgtattttaaagaaattaagaggaaaaaataaaatcttttgtatttattcacataaaaa

SEQ ID NO: 125054 - DNA, 1455 bp, Homo sapiens
  misc_feature (1315)..(1315): n is a, c, g, or t
  misc_feature (1323)..(1323): n is a, c, g, or t
  misc_feature (1337)..(1337): n is a, c, g, or t
  misc_feature (1350)..(1350): n is a, c, g, or t
  misc_feature (1353)..(1353): n is a, c, g, or t
  misc_feature (1356)..(1356): n is a, c, g, or t
  misc_feature (1361)..(1361): n is a, c, g, or t
  misc_feature (1368)..(1368): n is a, c, g, or t
  misc_feature (1375)..(1375): n is a, c, g, or t
  misc_feature (1388)..(1388): n is a, c, g, or t
  misc_feature (1391)..(1391): n is a, c, g, or t
  misc_feature (1395)..(1395): n is a, c, g, or t
  misc_feature (1401)..(1402): n is a, c, g, or t
  misc_feature (1435)..(1435): n is a, c, g, or t
  misc_feature (1442)..(1442): n is a, c, g, or t
ggttcatgccattctcctgcctcagcctccccagtagctgggactacaggctcccaccaccacgcccggctaattttttatatttttagtggagactgggtttcactgtgttagccaggatggtctcgatctctttacctcgtggtccacccgcctcagcctcccagagtgctgggattacaggcgtgagccaccgtgcctggccgacgatataacttttaaagaaccaacctttggttttatttttctcaattgtttatataattaatttctgttattttctttcttctatttagcttgagtctcctttgatcttttttctttagttccttaagataagccttaggtcattgatcttagacgttatttaaaatacatatttaaagctatacattttcttttaagcattactttagttgcgactttacaattttattatgtcgtatttttattattcagttctaattttcttttttttttctttttgagatggaatttcgcttttgttgcccaggctagagtgcaatggtacgatctcagctcactgcaacctctgcctcctgggttcaagcgattctcctgcctcagcctcctcagtagctgggattacaggctccagccaccatacctggctaatttttgtatttttagtagagatggggtttcaccacattggccaggctggtctcgaactcctgacctcaggtgatccacccactttggcctcccaaagtgctgggattacaggtgtgagccaccatgcccagcctctgattattttctaatttcctccctcagttcttctttgacccatggattatcagaagtgggttgtctgatcagcaaacatttgttttttttcctcttaatatcttcttgttgctgatttctactttaattccattgaggtcagaaaatatcctctttatgatttcaatcctcttagttttattgagactcgttttatgacccaatatgttgtctgtcatggtgagtgtaccatacacagtttaaaagaatacctggctaatttttgtatttttagtagagatggggtttcaccagcctgggcaatgtatagtgagaccatgtctctaagaaaaacaatatgtaatttgaattgttgggttaatatgttttgtaatatcgatgagattaagtggttgatagtattgttcagatcttctatgtctttactgatccttttgtttatttctatcaggtgctgagaaaggatgttaaaatcttcaattatgattgtggaattgtctatttcttaaattctaccagtttttgtatgaagccccaaaaaccnaatgcctncccaaaggaatggncccatttaaccantanggnaattnccccccnggccccngggaaatgggggntgnaaanccaccnnaacccaaagggggaaaaagccaccggaggcctnccaaagnctaagggggtcca

SEQ ID NO: 125055 - DNA, 670 bp, Homo sapiens
atagctgtttattgctatgtgatctgcaaattagcctttaagtcgtaatattaaatgttggctgccaaagagtctttactttcttttcagacctgtgtttgaatagatgaattcaggttattgccagacatcttccccctccacgtactcaattttgttctaaaatgccttgtctttttgttgtaggttccagatatctgctagatgccgtgaagttataggctgcatttttattaagtattgattatttatgtaatcatttatgattcagtgaataagatacatacggtttatatactgtagtcttcatatattgaaattatttagaagagaaagaaaatatgtgatttgtaactgtaggatagaactagaatcatcaagataatatgtgggtaacaagaccgtttataaaatatttacgtatttttctgaataaaaggccaaatgccagtttatatctttttcattccctaattacaaaaagggggggaattaaatttatagttatttgtaaatcagttgtttaaattctaggggaaactttactcacataaaatccagaagacacattagcaacttgggttagaatattatagtcccttagctctgtcatcacctcctttcacactgtttcctcaagaaacaacacaacaagtgtgtgtggcgtgtg

SEQ ID NO: 125056 - DNA, 497 bp, Homo sapiens
ttgttaaaatctatgtcttccctgctatataaaccctggttttagtcagtcagggagatggaattgagaccaagctcccatcttctcagctgccgcccctgattaaagccttcttccttggcaatactcattgtctcagtgattggctttctatgcagcaagcagcaggacctagactgaactcctggtgtatcagtaacaaactaatagctaaagaagacagtaactttcttaagctagttattaacagagcagaactaaggtactctgacttccagactggttttctttctactataccatgctgttgtcaagaactctgaagaacctaagattttaccctacatgcaagctaacatcagtctgccatagtttcatggacactgagagcaaacactgtacctacatacagtttgggcactgaagactgaaactacatgtcccctatactgagttaaataagtgtcctcccaaaatgtgtaacggctagaaatagg

SEQ ID NO: 125057 - DNA, 365 bp, Homo sapiens
aagatagaggatccctgtggagacggggtcttagctcagccccaactcacagagggctccgttgatctatggtcccaccctgtggttatttccaaattcctgagagtataataggaatagccatctatggcaactgacaaatctccacactggctctcccacccatggagtgagagaatcatggtggaaagggctaagggaaagtccctgtaacttccacttcctgtcaaggacagttaaccagagggctgggcgcactggcttacacctgtaatcccagcactttgggaggccaaggcaggcggatcacgaggtcaggagattgagaccatcctggctaacacggtgagaccccgtctccacat

SEQ ID NO: 125058 - DNA, 738 bp, Homo sapiens
tgttgttctcagagacacactgagacttttcacatctcactgtcacttcttggaagggctctctacctcgtctgcctgctgagcaacctcttggggagacacgggccctcttgagtcactgaacttgagctatttggtgttgactttcttcagtcacatctgaataaatcccttagagatgttggaatttctgatgaatctgcagtcagcattttgcatgaactgtgtgtggattcattgcctacattggatgatgaagacttgagtgttgctactaaggccatggtgtgtgatgttccccatcctgtgtccaagtgttctcatttttctgttcccacctatgagtgagaacatgtggtgtttggttttctgtccttgcaacagtttgctcagaatgatggtttccagcttcatccacgtctctacaaaggacatgaactcatcattttttatgctgcatagtattccatggtgttgtgtccccgagaaagtgtcagagcctttacgtggaccttctcatgaaacaaggaaacagaatagtcaatggacacaggaacagggcctcctgcaaaacatccttccttgaagcctagccgtgaagtggaagatcctgctgtgaacggagcagtacaaagaacagaatgtacagacattgagagcagaacaaacttaccgtggtttagaggaaagccagaacggtgtgaacgacgtgaccgaagcatcccggtcagcaggact

SEQ ID NO: 125059 - DNA, 394 bp, Homo sapiens
tagccataggctggttactgactacttgaaatgtggccagtgtgactgaggatctgattttttaaattgtatttagttaacttaaatgcaaactgtaggccggcgcggtggctcatgcctgaaatgccagcactttgggaggccaacgcaggtggatcacctgaggtcaggagttccacccatctcagcctcccaaagtgctgggattacaggtgcatgccaccacgctcggctagtttttgtatgtttcatagacagggtttggccatgttggccaggctggtctccaactcctgacctcaggtgatccacctgctttggcctcccagagtgttgggattacaggcatgagcccctgtgcctggcctagaaatgttcaagaagcaggaactgg

SEQ ID NO: 125060 - DNA, 274 bp, Homo sapiens
ctgagcccggggcagggaagagccgagggacagaggccctcacaggaaccaggccctcccgcacaccgcctgacagtccacgtcagcgtctctgtccagcctccacacacccctgcacgttctgaagagccctccccaagagtccaactctctctccttcctcctcagggccgcaccagctctctctccttcccctcctcagggccacaccaactgtggggttccagctatcactctgtgcaaaggactcctaacatgggtgtcctccgtctca

SEQ ID NO: 125061 - DNA, 516 bp, Homo sapiens
ctcacccaggtataaatggaaagatttctactgaaactttcttcagctcatcagaggcttctagaatcaaaatccaatgaacatttttcagtttattatgtccttgttatatctacgggccttggccctggtcgcacaagaccacaagcccctgctcccaccacttctttccctctggagggtcctttccatgttcttttctgtcttttcctctccggccatttatgatggtaaattttctgtgtcaatttcactggggtaagggttgcccagatagctggtaaaagattgcttctgagtgtgtctgtgagggggtttctagaagatattagagtttgaatcggcagactgagtgaaggatgctaatgtaaagcaaagctacaatatagaaacatttggatttacaaggaacgtgggtgactatttgctttacattagcattcttcactctacaaaacgattcacctactatgtatgatgttcctccagatcccagggagaggaaatggtgggggt

SEQ ID NO: 125062 - DNA, 436 bp, Homo sapiens
cgtcaagtttattggagcctaccttccgcagcctccgagggtggaccaagctttgccgcaagaacgccgggctcctgtcactccttcctccgcctctcgctaccaccgccgacggtcttcagggtcacgagatgagcgctatcggtcagacgtccacacggaagctgtccaggcggctctggccaaacacaaagagcggaagatggcagtgcctatgccttccaaacgcaggtccctggtcgtgcagacctcgatggacgcctacacccctccagatacctcttctggctcagaagatgaaggctcagtgcagggggactcccagggcacccccacctccagccagggcagcatcaatatggagcactggatcagccaggccatccacgggtccaccacgttcaccacctcctcgtcctctacgcagagcgggggc

SEQ ID NO: 125063 - DNA, 433 bp, Homo sapiens
agtgctatttagctgaggagtgaagctccttgtagcccggctaattttttgtatttttagtagagacggggtttcaccatgttagccaggatggtctcaatctcctgacctcgtgatccacccgcctcggcttcccaaagtgctgggattacaggcatgagccaccgtgcccggcctcatgaacccttctttgagcttaatttgctaatgcacctctcaaaactcaggggagctgttacttacgtttaccagcttattagaaaggattttacaaaggaggcagatgaagacatgtgtagggtgagggatgtgggaaggggcacagagggttccgtgctctccccgggctgtgacgtctccaggaacctccacgcattcatctgtggggaagcttccatcccagtcctccgggttttacctcagcttcctcgca

SEQ ID NO: 125064 - DNA, 578 bp, Homo sapiens
agtttgagaccagtctgggcaacaagagtgagtcctcatttctacaaaaaataaaaaaaaaaagtttgctgggcatggtggtacacagtctgtaatcccagcactttgggaggctgaggcgggtggatcacgaggtcagaagatcgagaccatcctggctaacacagtgaaaccccgtctacactaaaaatacaaaaaattagctgggtggtggcaggcacctgtagtcccagctactcgggaggctgaggcaggagaatggcatgaacccgggaggcggagcttgcagtgagcctgggcgacagatggagactccgtctcaaaaaaaaaaaaaaaaaatcgatctatctatatatatctagatagatcgatctaaggtactgatcctacaaattcccctgaaagttcagtggacacaatgcccgtgaaggatgcaggtcttccatttcagctgaactgtggcaagtgtcaaatggtttgctaacccttgctcagccccacaacccactaggagctttaaaatacttaatataggatttggatttttttttttataaagctactcagataagtgtgaa

SEQ ID NO: 125065 - DNA, 222 bp, Homo sapiens
aataagtaaatataactatctagctgactactcagagttcttgggaagaacagacgagacaacttataaatgctttgtatctcagagcaccatagaaatgccattggtggctgggcgcgatggctcacgtctgtaattccagcactttaggatgccaaggtgggcagatcacaaggtcaggagatcgagaccatcctggctaacacagtgaaaccccgtctc

SEQ ID NO: 125066 - DNA, 701 bp, Homo sapiens
aggccttgtaggaaagagaggaggaggctggggacttctcactgatgggagacttcccagttttgtttgaacatctgtgttttcacattttttgtagcactactacaaatcattttaatatgctctcatagaaggaaatacattgagccagcagaataagatctactaaaataaattttgaaaaggaatacattcttactcagtgttttacaaatcaatttcaaacgattcacatttgggttgactttagagtctttatgctaggaagataaaatccttttgatagatgtacatggccttttcaataacagggaattaagcatatggtaaatacctagagccaatccaaatatataaaaatgatattgaagtgtagaggactaacgtatcatagtgtaaacaataaactcaatattgcagagtaaaaaggtgaaaggagactccatctttaatagcaacattacccgctgtatgcctttattcccactttgctctagtacaggaagatcttcactatggggacttattcagataagttcccaagatcatgatcttcaaaatttcatactctagcctattaatgatttcagtaacaaatacaaagtgcgtgaacaatttattttggtatttataattttggagatattttgctatgatttttattctaagacagctctttaattagtatatgcattagtttc

SEQ ID NO: 125067 - DNA, 965 bp, Homo sapiens
  misc_feature (481)..(481): n is a, c, g, or t
  misc_feature (682)..(682): n is a, c, g, or t
  misc_feature (959)..(959): n is a, c, g, or t
atttttcttgggtcttctctacagctgacaggccaactcaacctactgccaaccaagacctgactggcacgaggaaaggtgcaataatgaagagttttcttctagttgtcaatgccctggcattaaccctgccttttttggctgtggaggttcaaaaccagaaacaaccagcatgccatgagaatgatgaaagaccattctatcagaaaacagctccatatgtcccaatgtattatgtgccaaatagctatccttattatggaaccaatttgtaccaacgtagaccagctatagcaattaataatccatgtgtgcctcgcacatattatgcaaacccagctgtagttaggccacatgcccaaattcctcagcggcaatacctgccaaatagcgcaccaccactgtggtacgtcgcccaaacttgatccatcatttattggcatcccccaaagaaaattcaggataaacatatcagtcctancatcaataccattggtactgtttgtaacttataacaggttcctgacaatggaaccaacgggtggacagtggtgagtcactccagaagcttttcagagtccatcatcacggagaaccctgtgaggaaacacaagtggggttatcccacttcgggttaaaacccgggatatttctcgaaccaaagggggaggtggttggatcncaattataatataaaagtccttatgagcatgggttcgtgtgttacaaaaagtgtgtttccaagaagggttcccaacaatattaaggggcacaaataggtttgtgcaagacggcgtcccaacaaaaaaaactgtggggggcggggcagtaaaatacggggggggcagagaagtaacagcccaacgaggacaacagcgaactagtctgtctccccccctcctcctcctccctctctctccgcataaacgaagcaagcgaggaaaaaggtggtggggagncctacc

SEQ ID NO: 125068 - DNA, 326 bp, Homo sapiens
tgttgcataggatgactggtcacttatgtgatatataaaaacagtgtagccagctgaattagtccattcttacgctgctgtgaagaaaggcccaagacagcaatttataaagaaaagcagtttaattgagtcacagttccacatggctgggaaagcctcaggaaacttagaatcatggcaaaaggcacctcttcacaggacagcaggagagacaggagcaagcagtggaaatgccagacacttataaaaccatcaaatttcatgagaactcattcactgtcatgggaacagcacaggggaaaccatccaccatgatccagttacct

SEQ ID NO: 125069 - DNA, 345 bp, Homo sapiens
gaccattttagaataatgatctccccacctgctgccagtgtggaaaccagcaagggcttagaggttcatggatctggaacccaggaggatggttgtgtccctgcagtcccaggtatgaaggtaaggcctgtagagaaagttgaggagtggtgccagtagtggcacttggcaaatagttccaccagcaccaaaacaggtgtggatgtggagctgggaaggggcagacaggaagtgggtcgctgtgtccagggtaacctctcagtgtctgctcaaggacagtcccgccttacctgctccttctgaccatcttactgcccagggctcaggattccgctggaagaatct

SEQ ID NO: 125070 - DNA, 646 bp, Homo sapiens
atacatgaatagccatttcccttttcctcaaaattctggagcctgaaaactagccatatatttcagttctcaggcagttttcattttgttgtttttgtttttattgaggaattttccttgactgtatatccaatatatttatattttaggcaagtaaagtatcctttgtaaacataacaattgtgattgactaaataagtggcccctctatctttttttttatttttattttttgagacagagtttcactcttgttgcccaggctggagtgcactggcgtgatctcggctcactacatcctctgcctcccaggttcaagcaattctcctgccttagcctcctgagtagctgggattacaggcacctgcctctatgcctggccaattttttgtatttttagtagagatggggtttcaccatgttggccaagctggtctcgaacttctgacctcaggtgatccacaagcctcggcctcctaaagtgctgggattacaggtgtgagccgctgcacccagccccatatatcttttgactagtatctgatgatactgaagtactgtgtttttgtctgcatttaatctgtatgttattttagttttataatgaaatagggcaataatcagtcattgaatcatatatattatg

SEQ ID NO: 125071 - DNA, 263 bp, Homo sapiens
caaagtgctgtgattacaggcatgaggcacagcgcccagccctccctttggtgttcaagaacatggttacataaacaaagaaatagcaaagaaatagaggaagacttaaagggatgttgtttgaaaccatctgggctaggttattttttagcctctttggtaacaatgttgaaccctcaggcaaaaggcaagcacctggcatttgcagataagtaaagatgttcttttgtggcctaaaagagatgacctttttttcctggctt

SEQ ID NO: 125072 - DNA, 501 bp, Homo sapiens
agaactatggagacattctctcaagatagtgtgtgtgatagtatggtttttaagttcataccttctagaaataccagcaaaatatttacagataaactgataggatgtctggggtttacctcaaaattatccaggaacaagaggtgtgtaatgtaaaaagattgtccatgatgggtgttacttgttgaaattaggtgatgggtacatggagtccattatattatctctagtataatgaagatttagtttgaatctaaactttgctactagctatatatgtccttagcaagttactcttcctgagtctccatttcctaatctgtagaatgagaaaagtaaatactaaaatctatcacataggacggttgttattattcaattaaagtaagttacaggccaggtgtggtggctcacacctgtaatcccaacactttgggagactgaggcaggcagattgcttgagcccaggagtttgagaccagcctgggcaacatggtgaaa

SEQ ID NO: 125073 - DNA, 662 bp, Homo sapiens
ctgtgtcataattaagttcgaggggaggtagtatgcctggatgtgcacgtaggccagatttatgtttctctctgcccaaacatctcagtggagtaaaacataacaaagcagcattgctgccaacatgtcttgcctcccgccacagggcgttttttttcctatctcagaattgagcaaatgtacaatcgggttttataccgagacattccgttcccaggggcaggcaggagacagaggccttcctcttatctcaactgcaagaggccttcctcttttactaatcctcctcagcacagaccccttatgggtgtcgggctgggggacggtcaggactttctcatcccaagaggccatatttcagactatcacaggcggggagaaaccttggacaatacccggctttccaaggcagaggtcccagcagcttttcgcagtgcgttgtgcccctggtttattgagactagagaatggtgatgacttttaccaagcatactgcttgtaaacattttgttaacaaggcacgtcctgcacagccctagatcccttaaaccttgattccatacaacacatgtttttgtgagctcaaggttggggcaaagaggttggggcaaattggctggggcaaagttacagattaacagcatctcagggcaaagcaattg

SEQ ID NO: 125074 - DNA, 391 bp, Homo sapiens
ttctgtatttttggcttcaccagtctggagtttctgtttcagtgaagtgggaagagtgaggaagggagtgatcttttttcagatatcaaagactttactgaattttagatttttttttggactagatctttctttatttgatatattctcttaggactgtttccagaaaatttaaatgattggtttttcataattttcttcagttgctggggagcaggcttgtggatcacatggtagtcagtcaaaggttcaggagagaaaaattatagctaacatagttacaagtacgcatacacacacaaaagacatatttttaaaaaattacttgcctcttttgatcctaaattcatttctgtgactgcctaactataaaggtagaatcagttgatga

SEQ ID NO: 125075 - DNA, 428 bp, Homo sapiens
agtagtattactcataagagtaaaaaagtagaaacaatccaaatgttcattaatagatgaatgaattattttatatgtgaattttcttaagagacaaggtttccccatgttgcccaggctggtctgaaacccctgggctcacatgatccgcccacctcaacctctttagtagctgggactacaggcacatgccatggcagctggctttctttttctttcttgcatactcttccacattcatggtctcattttccttttattttccccacctatgccactggcacttacgagcttcatttcggccagctgataatattcagggacactagccatataattttgctgtgatacccttattttaataaagctttggaatataggatgtgaaatagtaagtgtaaacacactgaacacactgtcacttactc

SEQ ID NO: 125076 - DNA, 334 bp, Homo sapiens
tactccagcctgtgtgacagaatgagaccttatctcaaaaaaaaaaagtttaccaggctttaaatagtttattttgatggacattatttgtccataaaatagacctttataaaagctcggatttgaaaccaataaattagaactgtaatgtagtcttttctagctggttttaggccagttaaatctagcagagatcatgaaggcagaaagccaacttgaagccaaaataactattgagaacattctacattccattaataggtaatgaaattaaatctgttaaccgctaaattaaaatacatattctacttacttacatacaactttaggccta

SEQ ID NO: 125077 - DNA, 692 bp, Homo sapiens
ttcttttgtgttgcagaataggcaccttgaatggtgcctggcatgtagtaggtattcagtaaatatttgttgaatgactgagtgaacaaatatgtccccagatattggaaggagacagaagaaccctcagattccagttcctacatttgttcctccagtaattcatttgtcacgtagtcagccatgccagatgtttcttccgtgtctggtttatgcacacacagggcatgaaacttacatggatcttgatttagacaaactaatgtataagacaattgaaatgtgatcaccgtctagatatttgatatataatgaacaattttattgttgacttattttcagtgttataatggtgttttggttatgatttttaaaggaggaggaggtctggttaagatgttaaagtttatgttatgtgtattttaccacaataaaaaattgggggaataaaaagaccaccgcacccagcctatcttctctctactttctatgtgtttgaaattttctgtaataaaaagtttttttttgttgttgttgtttttgaggtggagtcttgcactgtcgcccaggctggcgtgcagtggtgcagtctcggctcactgcaacctctgcctcctgggttcaagtgattctccctcccgggttcaagtgagcctcccaagtagctgggactacaggtgcacgccactatg

SEQ ID NO: 125078 - DNA, 207 bp, Homo sapiens
ctgtctcggggatcccaaagtgctgggattatagatgtgattcgccgtgcctggccaattcatggccaatcttatttcaactaatctcctacctacttcctccctcattgggagaagcaaaaccaagacattatacattttcatctgtaaatagtgagtacaatgaaatgacttttagattgcatatcttatacctaaaatattaaa

SEQ ID NO: 125079 - DNA, 197 bp, Homo sapiens
ggagtttgaggttacggtgaccttgatcataccactgcacttcaacctgggcaacaaagtgaccctatctcaaataaataagtaaataagtaaattcacccttctaaagtatacgtttcagtggtttttagtatactcacagcatgatacagccgtcaccgcaatcaattttataacacttcatcatcccccagtag

SEQ ID NO: 125080 - DNA, 315 bp, Homo sapiens
caaggatccctccgtaatatgtaacacacatgcattatattcaacaggaatatataaatttataattataatttaggatcaacagatgacaaacctttagaaggttgtatttaaccttaaaatataattttttaaaaattggttataaaatttctaatactttcttttttgtgacctcaaggggaaaatataattcttataaaagttcaaatgatttacagaatacaaaaagtgaatagagatgatgaatgaattaaaggaaaggatattgctacatagatttggttacatattacggatgggatcgctctagag

SEQ ID NO: 125081 - DNA, 1178 bp, Homo sapiens
ctttgcctcttgtaacagattttcagtgcaaatctgttttgtttgcttataaatatagctaccttcactctcttttggttactatgtgcatggaataacttttttcatcactttattttcagcctgtatacaactttaaggctaaagtgggctgttgtaggcagcatattgttggatcttgtgattttttttttttttaatccacataaccactgtgtgtcttttgattgaataattcatttacatataaagtaattattgatatgtaaagatttactattcttatttttctaattgtttactgactgctttatagttctgttatttctttcttccaatctctctgtattcctttgtgatttatttaattcttatagtgatagattttaattcttctctccttatctgctttttacaagtgtaatgatcaaatcagagtaagtgggaaatatacactaaattattgttaaatatagtcactctatgttctactgaacactagatcttattccatctctctaacttaattttgaagtcaaaaccagagaagcacagtaagagagaaaaactgccggctatctatctcactagtaaccatacatgaataatctaaaataaaataatgacaaacgcaaaatgtcagtttagagcagggttcctcaagctacatggcactcaggccaaatgtcaccagtggagcctgtttttgaatggcctacaggctaagaatggttatattttttgagaattttttttaaaaaagaagatgccatgataccaaatgatacctacaaggcctaaagtatttatgatctaactttacagaaaaaattatcaatccctgatttaaataaaaattataaaagttatattcttgtacataattcagtattcttggagttcttataaaaagagaaatatttgatacagagacaggaacacaggtagaacaccttgcgaaaaggaaatcagagattgagtgatgcttttgcaagtctagaaacaccaaacaaagactgccaataaaccaccagaaaccaagggggaaacacatggaacaggttcttcctcacctccctcagaaagaaccaatcctaccatctgatctcagtcttctaacctctggatctaagacaattctcctcttaacaaacaaacaaacttcacaccaaagaaaa

SEQ ID NO: 125082 - DNA, 529 bp, Homo sapiens
attctactgcttgtatgtcctcctccccattttaatataatgtaaagaacattgatatccatctctgattttcttgttaagctatcttaatgtttactgaattctatgagtatgttccctgctgccttccccatttctctgcttaaatcagaaatggctttcctcctctccaaaggtggcactatataaatgacataaataggctcaggatttcagaaaatgattgtatgtcttcgcttctttctagatatctttgttgtagctctcagctcataagataatgatctgtgttcctatgcaacttctgttcccaaatttgagctccttgcagcaaggactttcctattcaactaggaatttctagaagaaactgcttctttcctgtgccagggtgtcccgaatgagttagaaaaagcatttagtgtagatgagcaattaggaatggacccagccgggcacagtagctcatgcctgcaatcctgaggcaggaggattggtttaggccagaattttgactttttaaagtatc

SEQ ID NO: 125083 - DNA, 268 bp, Homo sapiens
gcagggtctgcaaaatgtctcaagcattgatcttaggttttacaatagcggtgttactccccggagtaatttggagaggtccagactcttgcagccaaaggctgcacggcccccaaaccatgacatccaatcttgtagctaacttgtgagtactataaaggcagactggtccccaggcaagacagggatttttggcgaagggctattatctattttgtttcagagtttaaactataaactacattccttcccaaggctagtttggcct

SEQ ID NO: 125084 - DNA, 345 bp, Homo sapiens
cgctttcctcctttttgtggtcaaaaatatatgttcagctaggttcctcaggggtatttagtatttttttatttttttcttaagaatacatctgaaaatgctgtattaaaccagaagcttatttctataaagaccagactacttcgttttattctgtattatcacttatattatttagaaaattgaagtgatatttgttctgtatattttaaatggaaacataaaatacagataacttggaaattcaagtgcactatcaggattttacagagttataaataactctcattagttactgggcagtcttcatactacatgatatattttcaaatgcaaccatctttt

SEQ ID NO: 125085 - DNA, 258 bp, Homo sapiens
ttgcaggggcctttgcttgggagacggagatgaattagacactagcctgccattaggaggaggtcgggtgctgcagacttgtggtgggacagtggtggtggaggccagactgcatgctataggatggacaggacacgagtatgaaccagggggtggaggagtaccacagcgtgggggcagtttagtacagagggtcagcttctgctaagaggggacttcacacctgggatctgcatggccatggcaggtggggaagga

SEQ ID NO: 125086 - DNA, 284 bp, Homo sapiens
atccacccgcctcggcctcccaaagtgctgggattacaggcatgaaccaccgctcccagccgagactttgacttttgaacagacttcaacagttaagggaaggagagagcctgtcaaagggagcagtgagtgaaaggccttaagtcaagagggtgactgacatgttgaggaaaagcaaagaggtgagtctggctggagccgactggatgagagagaggagtataagagatgaggccagagaggtaacagggccggatcatgtagagccttctaggtcagcataa

SEQ ID NO: 125087 - DNA, 315 bp, Homo sapiens
tctgattttagtaattcgatctttctttccttagtccatctggctaaataaagctttgtcaattttgtttatcttttcaaagaagaaccaccttttggtttctttgacttttctctattgtttttctattctttatttcatttatctctaatctttattacttcctttagctttaggtttagtttgtcctttttctagttatttaagttgtaaggttaggttgttgattttaagtttctcttcttttgttaaagagactggtgtttgtttgttttttgacacagagtctcactttgttgccccggctggagtgca

SEQ ID NO: 125088 - DNA, 754 bp, Homo sapiens
taaatagaagttctataaaatcattacacaaagaaatatttttattatcagaatttatgaatgagaaaaatttcataaataatttaggtcatccaggcctatgacttaattaggtttatcttgatttttataggtatttcttttatctaatttttttgcttctatctttcatttttatttctctaaaaatagatacttagaagccacctccagcttagttgtttgaaattttatattttcccttccaaaactgggtcttccacatgttaatgacaccagcatatcatgctgatataataatggcaaatgtttattgagggcttactgtttaatagagctattaacagtgctgtacatgcattatctgaatcctcattacaattttatgaggtagtttattgtctgtattttataggtgagaaaactgaagcacagtaaggtctcacaacttgtaactggcgaagcttgttgcccagctagacgactgtaagctttgggctcttaaccactgtactgacagcctcttatttctatagtcgtatcagcttatgtgtcagggctgcctgtcacttattagcaaagcaaattactttgtcactctggactgcagttttcttatctgtataatggatatttacctcacagaacttgtagaacaattaaacagttaatgtgttacatgtctattatgctgcccaacatacaatatacacttgctaatgtttattatttctcaccgctataatccttaata

SEQ ID NO: 125089 - DNA, 533 bp, Homo sapiens
tacactctcaattagtttacataattgggagttcagtgtatttggacaaggtggaaagttgccgaagagctttgtgggtgttttaaacaaaatttaaaaaacattttctggctaagcgatctgagaagccctctcctgcacttcagactgctcaggggtgaattgatggcaacagtgctgacccccaggctgggctgagttcagtcccacatgtgtttagtacagcacccagtgtcttggcctgaatccctgattctccagggctctgacggcgatgcatccccttctcacgaggcccctgggtgcccccagtcaaggactggctttcctgctctttcctcagagcacgtgaggattccctgtcaggaccgtcccccaccctgttgtggtggctttggataaggtacgtcataggatgcacctggggctgaggccccaccatccccagctcctcctgtggggccggaatgactgagcgtcctcctgcctcgcaggctcggtgtccttttgcaccctgtggtgaatcccagatc

SEQ ID NO: 125090 - DNA, 546 bp, Homo sapiens
taacaatacaaaaattagccaggtgtagtggtgcgtgcctgtaaacccagctgctcaggacattgaggcaggagaatcacttgaatccgggtggcagaggctacagtgagtcaaaatcctgccactgcattccaaactgggctacagagcaagactccatctcaaaaaaaacaaaacaaaacaaaaaaaacaacaacaagtgaaatactgaaatactgatcagctttaaaaagagaactgtcataaccaccccaatttagttccaagacttaggcttccccaccaaggcaaaattaacacagtaagaaggctattccagttcattttggagaaaatcttggatttggtaagcaggtaaaaagagctgggcatgctggctcacatctgtaatcccagcaaactgggaggccaagacaggaggatggcttgaggccaggagttcaagaccagattgatctacatagcaagacctgggccaggtgcagtggctcactcctataatcccagcactttggaaggccgagacggctggagaacttgaggtta

SEQ ID NO: 125091 - DNA, 479 bp, Homo sapiens
ttttttacttttcacagggtaaatataagccccagaagaatgaggaatttgtcttattaatgtagcctcagattccacaacagtgcagataaatggtgagggttcaatgtacagatatacagttgtcattaagaatgaaaagcataatccttgccaggaatttccatttaagtgattcttttcagtctttgtatttgataaagtccctagggtccatctctattttactcttccatttcccttaatgtaggtttccccagagttctagtctcagtattctttcatttccctgtgctttatctcttggtaatagtattctttgtcaaatatcaactatcacatccaggtatgactcctaaattggtatctctcttgtcacactggttgctagacttttctatctggacaggatctcttttcatctcaagcgcagttatgtccaaacccaaattttgtatcaccaccccaagcttcccatc

SEQ ID NO: 125092 - DNA, 469 bp, Homo sapiens
gcttcccctgaggtcttctttctctctctcctcttcccattcctcctcttaagtctgtctcttgccccagccttagaacagaatccttgttaactaacccttcttctgtactatacaagagaggagttagagtacacgttgggctttgcaacgggtctgctttcatttgttaagcaattgttttttatttggatttcatttattcatttaaatatttatgaagccctactacttaccctcaggatgctaggcattctaaaggaatatcttgctagagaaacgtctccgtttagattgtaccttaagtttcagtcacagcacagaaaagggcttctttggaacctgtgacaggtgaccgtcttctccttttcctctgcagttagattcagggcgactgctttgggctaaattatgaaagacttaagcaggagtaaagagatttttctgaaagtaaaaatatctaaatacc

SEQ ID NO: 125093 - DNA, 526 bp, Homo sapiens
ttttcaacattatagctgctgctgagtgaagaaaggcatcatgactgcagatgctttctactgccttccagggacaagccacctggctttcaggtgcccttttaagtgtctttttatcacctgtctcctctctgtcctcaccattccatctttccgaagggcaagcacaacggagtgggggagtgacacacatcagacaaggttccaacgaaaatgaaaggcttgcgacattcaaatcacagggtgctttcacctattcattcactcctgttcattctatcagctgagtacccaagagcagcagttttttggagtagattttaagaatgctccaccttgtaggcagttctgcatcctacttttgtccctcaaggaaaagacctgggggtagttttaaagattgtatactgatgcataacaaaaagaaatacaaacatttttcccattaagttttttggggttttttgttgttgtttttcctgaaacagggtctctctctgcaatctcggctcactgcaccctctgc

SEQ ID NO: 125094 - DNA, 324 bp, Homo sapiens
ctactggggccactgactgaatacatttttgaaatctaaatagattcatttagattcaggactgccctatcttaacaataatcatattgttaaaattcagcatagaaattaaatccaatcttcagaaaaaacatttatgccaaatgagtaagactggggatatgtaaaattaagacacagtctgtgctaaaataacttgtcaaaaagaccttaaaagggctgggcgtggtggttcacgcctataatcctggcactttgggaggatgaggcaggttggtcacttgaggtcaggagtttgaaaccagcctgaccaacatggtgaaa

SEQ ID NO: 125095 - DNA, 492 bp, Homo sapiens
tcttcagggctaacgagggacccacctcccagtggatgtttctcctaccgtactggggctacaaaagcagtgacctgtaagtctgatgcagtcttctgaagttcgcttgtcatgacactccttgactgcaccccgccatgaatcactgaattacaaggatgatggtaataacaagaacaatgaatacttacagaatttttcttatgtgccaggtatggttctaagtgctttaacatacacacatatgaactaatggggatgaagttctctccctaactaaaccctaaacactggttggaatgtcactggtgttgaggctgcatgtgaatagagcagcctgctctgtgaaatgaacatctgtctttcatccttctaaaaattccattctacttccagagaaagactcaagagtctctcattaagaactcattcctggccaggcgcagtggctcacgcctgtaatcccagcactttgggaggccgaggtgggag

SEQ ID NO: 125096 - DNA, 236 bp, Homo sapiens
agaccataaaaaatcctttggagaaattaaaaatagagatgtgatgagtgcctaaggaagataggtccagatctatttagattttccatcagcatttatttaatttttttctttttttaagagacagggtcttaactgtgtcacccaggctcccaggctggagtacacatgcgatcatagctcaccgtaaccttgaactcctgggttcatgcgatactcctgcctcagccaagcca

SEQ ID NO: 125097 - DNA, 683 bp, Homo sapiens
cagaggctctaacgcagtctcctgctgactgaatcctcttctctgagcccgttcattcactgtctctgccagctgtttccaagtgtgaacccagtggagaccttttcaaactgtagccatgaagcaggttgcatgaggcagttccatctcctggcaactgtctccatagacacagcctggtttcggtccacatcccttacctaggattcttcctggctaaagaaacccataaaagtggaaaactcaaactccacagtgcaaatatctcttgagtctgcctgcactaccctttcttgaatgtgtattgataagactgcagttgacattttaagaaatttaaatttcaacctgaagtcaataaggacacctcagaagttttcaaaggaaggatggagtctgttgaaaagaaccggttggtaaaatgagaaaaaatggattgaaggaggacccaagtgaccacctggtaattacttcaacagcagagcgactcatacagccggcagtccactttgttcttctatagatcctgcctgtggtgttggatctaacagcttcttccctgacccaagattatgaaggatttctcctgtgttctcttctaaaaattttacatttaggtacataatccattttgagctaattcttttaaatagtgcaaagtatggattgaagttctttttttt

SEQ ID NO: 125098 - DNA, 495 bp, Homo sapiens
aagggaatggaaaggtctggtttgagatttgtgttctgtaatgagctacagcaagtgacaggattttataagggtgaaatttatcttaaaaataacttctttgggttcctaaccttagagtgatttgaggttttgggtttcagtaatccatggttgaggcaatttctcaaaatccatgggaaaagttggttagaaacaggagttctccacactttgagagttccaaacggagaagaaatttggtgaaccatgtagtagtataacaaagatggggattctttgtatttaaaaaataacaagaaaagttcaaggcatgcttgcagatgatcctagttatgtaacacttcaggctaattgtgagagaagtggcatgatcacgcaagcttgagaaggtatgattttgactaagacccttaggctccttgagactcagtttcctaatccaccaacaagagactgaacatatatgttctctgtcgcccttcccagcccagc

SEQ ID NO: 125099 - DNA, 259 bp, Homo sapiens
gggagaacagaagggcccagaatgataaagccttgtgaggaccacagaactcaggaatcctggctgggttttaaaaattttgtccctgataggccggacgcggtggctcccacctgtaatcccagcattttgggaggccaaggcgggcagatcacttgaggtcaggagttcgagaccagcctggccaacatggtgaaaccctgtgtctactaaaaatacaaaaattagccgggtgtggtggcgggcatctgtaatctca

SEQ ID NO: 125100 - DNA, 573 bp, Homo sapiens
cactccagcctgggtgacagagtgagaccttgtctcaaaaaacaaacaaaaaaaaacactcccgaatcacaaaattgtacatttggtataatttagatgtccttctaaatctttattaattaatcttgcattaactcaaaaactactgaactagaaattaatttcactatttgaaacagcacctataaagtggtacagcaacaaaagaagtccatctaatatagacttcagtaccaggttccaccagtcagtttagtatgccttttatctcctattcctttattgaatagtgtttgttttccagcaggagaaccagaatagagctggcccactaaatccagctaaacacatggacaaaatatccaattgtatggccacagtcatctagtagagtgtaaataataattgtgtatatatataatgtgtatattagtagataatatgtattcttacacgtataaaaatacggaagagggtatttagatttccttagaattttcattgcattatttcatctccaaatagatcacagttataactgaagatcaatctgctgcataagaaaagctgatc

SEQ ID NO: 125101 - DNA, 281 bp, Homo sapiens
gaagagtcatatcagctaaggcactgggcccattgataagtaacaatcctttctttgaacagggacctgggagaaagagtcacgttacctggatgatgaatacacagatagatcataaagcttcctgtaggcaggacccagcaaggagagttacataacctggatgttgcaaatggcaatatgtcacaatgacccatgaaggcagggcacaggtaggagagtcacataaccagggtgaggggcccagtgatatgtcacaatgtcccatgtgggcagtgcca

SEQ ID NO: 125102 - DNA, 353 bp, Homo sapiens
cccaacatgatgtggtaaacagctcaactgaaaccataaacatcaccttgcttgtgtggggtaaatagtggtataagtacatgtttaatgcattgataggtaaattcctagtagggcaaagataagatcttaattcattcacctatgcatactttgtgctgacgaaatttttaacacgagttccatccctcaaatgtttcaatatcaaaagtctaaaatgcataccatgcttttaccagctgctgggaagttggaatgtatcaaaacgtattcatttctcagttctgcccacactaacctccccattaacttaatattagggagacaagcaatgaatttctggatcagtaagt

SEQ ID NO: 125103 - DNA, 546 bp, Homo sapiens
gcgaatcccttaccccagcttcccaagtagctgggattacaggtgcccaccaccacgcccggctaatttttgtatttttagtagagacagggtttcaccatgttggccaggctggtcttgaactcctgacctcaagtgatctgcccacctaggcctcccaaagtgctgggattacaggcatgagccaccgctcccagccccagtggctttaataatgaccaaacctcatctgtgttttcctcatacacacccacactctctggtcctccccacattggaaaagtgcataataagtttcacccagtcatttctccagagtctcctgaacttatggatcaaaagcagcccatctgaagtatggccctggctaggaaaagccttcatggcaagtatagaacctgaacatgggctcttggtaaaaactttcggtccttagaaaatttaattcttaatgaaaagccaatgttcaaactatcattctctatggaaaataggaatctattctacaagattgactttttcctccatgattttttagttgtggga

SEQ ID NO: 125104 - DNA, 492 bp, Homo sapiens
ggggttcacagggtaggggaagaacaacccaaagaactcacaggagctaagaaaacataagaaaaacatgagcaagagaaagaagcgcctttttcccctcctttcctcttgttaaatgatgattgacacacccgggctcaatttccagttcattacgtaacactctgagcaagtcatttaccctctctgagctgaagtctttttggctgtacaatggggataattatactcagttcatagaggccttttgatataatgcctatgaaaatgctacatgaaagtgaagcatttatcatcaacacaattagctgaactggttagggttaatgaggtccaggttgtacctccgttcccattagactaattagccaccctcagacatagatgctacaggtaggtcagagattgcgcctctaatccagactattggcttagcagggatatttctatatatccaagacaggtcaccctggccaactgtgcagatgttac

SEQ ID NO: 125105 - DNA, 333 bp, Homo sapiens
tggtgggccaaaattaagatgtattcacctcaaaattatctccagagttggtgctacacatacatgatgaaacactgagcaccttcctgaactttcattgagagtcgtagtttccccctcaccactatcaccgagtcaagtcgactcctttgtgggcgtaactcaagttgttcctgtcagcatgctgaccagctggtcacctttggttcatatctgtttaaaaagattccagaaattctgtaggctttcatggtcaagcgcaatctctgtgacttcctgcgttaagtaccatagaatgctaatagcatcacagaatgttaaaactggagagcc

SEQ ID NO: 125106 - DNA, 547 bp, Homo sapiens
ggagaagcaacagtggctcacgatcaacagaatccttagcacgtgcagatgttcaacagagaaaaggcttctgtcactgccgcagcaggatgtggcttgctgcttcctaactcgtcattgaagaaaacagagactgtgatgtataagatgggctgggcagaacacatcaagaaggagcccatcttcatggggaaaactaggaagtgtccctgagagccttccagggctcagagtaccttctgtttaaattacatgtgactacacaatactgctagggaaacgtggaaagtgcttctagtgactttggcattctaaatcagaaactgtggacttaggggactgatgggcatatttatgttgtctagttgaaagaggagatgtcggaaggaaaagaagatgtgaaatgcaaacagcaggctccacagacagtgtcagagaacaggacgtgatatcttgagttgtggttaactggagagtgtgatcctcacaagggccttggtacatctcacaaaaataggctgattctgtctgactggaggggaaagaa

SEQ ID NO: 125107 - DNA, 445 bp, Homo sapiens
ggaggttgttctgtggccctccagcctgggttgacagcaataccttgtctccaaataataattaataatgaacctagtaaataacagcagcaacagaagtgatgatgatatttcccaagtctctaaaacaaaacatgtcctcatctttgggattgggatttgggcactgtgtgtgtttgtgtgtatgtgcatgtatgcacatgtgtgtattgtatacattttaaaagtctctccattgatttaaatgtgtaggtggacttaagaggcctatgctgtgtattacctaggacatggcagtagtcattgattcagtgatttcgctgtgttgtaaagcacatagtgcatttgataaaactagctgatgcatgttagggattatgtaggataacaggatgaagagagtcatcacctgggaagccttcattaaatcagtgggcttgagctg

SEQ ID NO: 125108 - DNA, 172 bp, Homo sapiens
ccctgcaagtaggatcatatcagatgagagaataaaaagagtaccttgcctttttacatattcaggattttggtctccgttgagaatgaatcttttttgttcttttgttggaaatgggctatttacaaatattttccagggttccagaaaactcagttctctgcaaccaact

SEQ ID NO: 125109 - DNA, 204 bp, Homo sapiens
ggataaaccatgttcaaaaagaaacaaactcagaaaggaagagggaagggtcatatgtatagaatatgaaagtggatttaatcacatgtatataaagaattgtccaaatggctagccagataaatacgtctcatattttacagttctggtgtgatgaaaagatgttcttttactaccttgataatcacacttatgacacataag

SEQ ID NO: 125110 - DNA, 339 bp, Homo sapiens
ccaggccacagccctccagaatgcagtacaaccactaggtatgacttatcagctacagtgaactccgggaggaaatcccaccgctgataccatcatttagtttcactttgcagattacaaaacattttatctggtggctcatgcctgtaatcccagcactttgggaggccagggcaggcggattacctgagctcaggagttagagaccagcctgggcaacatggcgagagcccatctctacaaagaatacaataattagccaggcatggtggcacactactcaggaggctgatgtgggaagatcatctgagtccaggaggtcgagcctgcagtgggcca

SEQ ID NO: 125111 - DNA, 246 bp, Homo sapiens
tcagtcttgccctccctattctattcaccacagtgctatgagactgaactttctaaaacgcaaaactaatattaccgctctccagtctaaaacccttcactgaagccagacacaaaaaggcacatattataaaatcccattcacatcaaagtccagaataggcaagtccacagagatagaaagtagattagtggttgccaagggctggaggtagagacataggaaatgacagtaaatgggtacagg

SEQ ID NO: 125112 - DNA, 257 bp, Homo sapiens
ggcctcaagtgatactcccagcttcacctcccaaagtcctagggttataggcatgaactactgctcctggcgtcattgtttctaaccctaaacttgagtgctcattttctcttctcacttgtccccccataccacattcatttctgaagcttgggaagataggagtcccatagaaaactgccatggttttttctcttcatagctgagttctagaaggcaatcagttgctatgccttctgagttagtacctaattcta

SEQ ID NO: 125113 - DNA, 144 bp, Homo sapiens
tgtattgtttttatcctcacaaccaccctacaaggtagacagggacccttacatgcatttagagatacggaaactatgcctatggtcaagagctagtaaaagtcagagtggggtttcacacccagacagtctgattcctagtac

SEQ ID NO: 125114 - DNA, 560 bp, Homo sapiens
gatcttacggatcagtaagaaaaagttgaatactttaggagaaaacaagtcaggttatcagtaggcaactcgcagaaggaccaaaaaatggtcaaaagtacggggaaagttcagctttacaaatggtcaaagaaatgtaaatcacattgcagatttgaataaaacgagcttgcccaaggttatgaaagggtctgcttttagagtataatttgatgacatgtatcaaaatcttttaaattttgtgtaataatagcatttactaccctctctgtgaggcataacattaaacattggacaaagattagctcatttaatcctcaaaattacccttttgtgcaaatgtggttatttccattttaatgatgagaaaataggaatgttggaggaataatgccaactttcccaaggtcatttagctagttaagagatagagacaggaccggccgggcgcagtggctcacgcttgtaatcccagcactttgggaggcggaggaaggcggatcacgaggtcaggagattgagaccacggtgaaaccccgtctctactaaaaatacaaaaa

SEQ ID NO: 125115 - DNA, 328 bp, Homo sapiens
gtaccgtgttcctcccaccctgtttgaattgggggaaaggagatttggggtggctttaaggctaagcctctgccctgtgatcaggactctctcaccactaatttgggacaaattgctcctcccactgtgaccctcggtttctttatctgtaaaatgaagatagtctctatagagtcctgtgaggattaaggataaaatcagaggagagaacacgggctaccacaggttcataagctaggggagtcccgggaagaaagttgcaaatatgaacccgaagactaggggtcacgaagctcagtggctggaggtcacattccctttgctctgg

SEQ ID NO: 125116 - DNA, 434 bp, Homo sapiens
gcttttttctacatttggctgaaagacagtattagggttttatccctttgggggctgtgttgtataagaggatagaatatggcaaaaaggagaataagaatattgttttatttgctgaaagttgaatcattctttggggacatttttagtggatggtatttgtctttgacattttatcaactcctcttttttcctctttgaatcctagtaaccttcttgccagttagaagcaatgcactgctgaacactagtttcttattgaaaatttaaactaaatctgctgtattccagagagtgccacattttgtatttttattgacctgtaccaccctccctttccaggttttcttaaaactctcatagctgaatctcaactattctaggatatgacaaaaagaaataaaaatgtatgagtaattgacatccctcttagt

SEQ ID NO: 125117 - DNA, 383 bp, Homo sapiens
tcgtggtacacgcaggaagaggctagaacaagggagacagccttcactttggatcctgttcttacctactgcccaactccgaggagctggtctttctccagacagtacttccactccagagatgtcctgcccaagactgacgcacagttgctctcccactgagccaggttcctcaggtcccaccgtcctcctgtcctcaaaagcacttaggatgtagcaaattgtcttattgttttactcccgactagcaaattctcctttctaattagtaagcctatatatgctaccttatacttatgtcaatttttttgcaacacattgcattttctacatacttcctctggatttggtctgatatggtcatctttgtgttctctcctttg

SEQ ID NO: 125118 - DNA, 384 bp, Homo sapiens
tataatgtgagggagggcttgaatacccaccactcccagtaggaactaggcagagcactatcatatcctccagagagaaagagggccagcaaaatcatctctcactttaataagataaaggggtaacttcatactagcctattcccaggagagaaagaaagaataaagccacgtgtttaagtgctcttctggctctcattaaagtagatggaaaaaacaggtggcgtagaggcaagagacaggactgctcattcatactagatagaacagtagtttccagcctgcagattgcagtcttttttttttttgagatggagttttactcttgttacccaggctagactgcaatggcacgatctcggctgacagcaacctccacctccc

SEQ ID NO: 125119 - DNA, 393 bp, Homo sapiens
gacggcaccaagccctgaaggatctgctcccatgacctaaacacctctcaccaggcctcacctctagcatggggatatagttcactatgagatttggtcagggacaattatccaaacttaatcatttttagtgaatatgttttaaaaaatttcttatatgagtttctgttagtatttgtccttattagggtgctcatctcttattcattttaaaaactctcattaaaggtattgactctttgtaatatgtattgtaaattgtttttcaagtttgctatactacactttctttatagtatctttgatatagaagacttttagtttattttgcaaaatatgttagtgtttaattcctgtgttttggcttatccctggcaagacctctttaacccc

SEQ ID NO: 125120 - DNA, 753 bp, Homo sapiens
ctccccagccatgtggaactgtgagtcagtttaacctctttcatttgtaaattacccagtctcaggcatgtctttattaacagcatagcaatggactaatacagctgccgtcaatgagattatagtccaatattatattaaatatatgtcatcttagtaaacataatcgtcacaaatatggattgtttgacttgatttgaggtatgaaagagctaagtgaaaataataaaatgttaattgattagtggcccaaatagagaggttaagatgtcatgaaaactaaaagacagattttcatgaaacaaagacatcaattatttcaaatagtggtgagctatcaaaatttaggcatattaaaagttggtctttggagtaaaaatctagaagtcacttgttacaagagaagggatattttattgggatagtagggcatagatgcatgttggattgaattgaagagagaaaaaaattctagttttccataagtgtgaattaaaaacaataaaaatggtggacaaattgtgaaacaactaaatttcaaaaccaaaacatcatcttaaaaatattgaaggacaaaaataaaggtcaaaaaattgagaactttcaatgaggtgctataaatagaaatgcaatcaccacataatattaaagcactattgtaagaatacagaaacattaaatgtaagaaaacagaaaaatttatatattatataagtgtatatacacaatgagactgaccaaaacaagctgatt

SEQ ID NO: 125121 - DNA, 541 bp, Homo sapiens
gttgaagccaaagaagcagagaatagaatcgtggttacgaaggctggcaggggcgaggggaatggggagatgattgtcaaagggtacacaatctcagctagacaggagaaatatgtgttgtgttgtgttttgtgttgtttagagacagtgtctctctgtggcccaggctggagttcagtggcgtcagttcttgggaatcaatccactgtcctatctaaaagcatcgactccagtctgaaaccctggctctactaccaatcagctatgtgatcttgagcacagcacttcacctgcctgggcctgttttctcacctggcacaggaggatgacaagagtattgcaggggtgtagacacatgaggtgtcccggcacaccgtgggtgctcaacacatattagagattactcttctgcaaaacggactcagttcccatgttgtaatttaaaataaagaagaaagcataggaagaggttaagaaaggggataaagaagaaaaagggagtgcaggccgggcgcagtggctcacgcctgtaatcccagca

SEQ ID NO: 125122 - DNA, 283 bp, Homo sapiens
tgggcacagtgcgttgtggctggagcaggtgggaggaagctggaccaggactgacggacctcagattccaaactggggaaccacagcatctctggccagcaggatacctgctgaagcttccagtccaggcctccactgcaggcctctgtctgctctgtccccagccccgctggccggcacgatggccacacaccggggttagccaggccccgttcatgcttcaagcctagccctgcacgcgctggacaggggccagttcttcctggaattcccatctgcctgc

SEQ ID NO: 125123 - DNA, 1236 bp, Homo sapiens
agcgcgtcaatcccggcgggaaccccggctgcggaaggcggctgcggccggcgggagccgaggggaagaatggagcgctgaggaagcgaggcgccagccccagccgcttcgctgccgcggagcctgcacgaccgagaggtcgcggagagaagccagagacaggccagcgacctggcgagagagaagatctagctatgttacccaggctggatttgacctcctgggctcaagggatcctcctacctcagccccccacacagcagggactacagctgcacaccactacccagctcccttcttcatgtcttacctgtccttattatcacagtgaataatgcctaatctattagtgaataatgcctaatctattaagagctatgtgaaaaacctaaactctttccatttgcaacccttttggtatggtcaagtcagtggatctggctatcatacaaactcaaatcaactactacaaattcagattggctaagcagattccagccattttaaaagcttgtctctgctctatcctgtatctttctgcatttacatgtaacttcactgtgggtgtccttacagtatatatttttatgagacatcaaacttactaagagtactttatagcatagtatttaggaacttaggggtcagaattaagacattgttactatgtcaccttgagtattttgtttaacttcacaacacttcagtttcctgatcagttaaataattatgataatacaagacatagtagcatcacaggattattatggggcctaaatagataatgtatataaagtatttatcacagtgcctggtacagatgttagcttctgttactactctgattctagcctccctaattctcattcttttttgggggttgcaggggagttcactgtgctgtttgctatatttcaagcctcaaaagacaatgaagttcccaaatgctcttcaaggcagaacaaatataaataatgattctcacaccaaatgtgtgcaaagttcaaatattgcattaatggtgctttttattgtgcaaatcatacgactaacccatcatgtcctttctgtgtcaggaagaacatggatgggaatagaaggatctttgaaatcctaccctctgtgtaaatcagtatctgtgaatttttctcttgttagtactgatttatttactctttctggtgtatctgctctttcccttaaaacctttatgataaaaacatatttgaatgccca

SEQ ID NO: 125124 - DNA, 388 bp, Homo sapiens
aagtggaaattttagagttgaatagtaaccgaaataaaaaattcaaatgagttcaccagatggtctgaagagcagatttgatattatataggaaacagtctgtgaaattacagataaagaaattaaccaatcagaacagagaaaaagaacagagcattggagacttgtaaacaacatcaagcataccagcatgtatataatgggaacttcagaaagggaacagtaaaaatattacaagaaataactgctgaaaacattccaaatctcatgaaaaaacattaacctacagatctaagaaattcaacaaatccaaagtatgataagcacaaagagatcctcacccagatacttcataatcaaacagctgaaaacaaaacacaagaaaaaa

SEQ ID NO: 125125 - DNA, 477 bp, Homo sapiens
gtgaataagataagactcctgccctgacaactaaatgatgaatggaattcagatactgttaagtgctgcgaagaaaaaggaaacggatttgggatagacaggggcaggtaatggagtggagggctatttgagtttgggagtcaggaaagacctctctgataaacagaggcgtgcatgaaatgaggaagcaaaccttgcaattggtggggaacagcattctaggtgagggaacagtgagtgcaaaggttggaatgagcagtagaaaggccacagtggctagatggagatgagggggtgcggctggttaggcaggggtagccaggtcacggagggtcatggaggccactgggaaggggttggaggattttataaggttttgagcagaggtgttgacaggatccaatttacattttaagaggatcccctggctgctatgagggaaagaatggaaattagaagactggttgggaaacttag

SEQ ID NO: 125126 - DNA, 333 bp, Homo sapiens
gtcctcacggaaagcaacgaggcagatttgaaacccacactaaggaggcattgtaaatgaactcaagaacatgagcttggcacagaaggaacaagttgagagataagaagtttcctgattaaaataaccctagtgcctctttgagatctgcttctagcaccaactgacagctatttccaacggcagaagacaccaaatgtcaatctgtaacatgctacaggtcaatattgctttctttcctgcagatggtttaagcacaacttagcaactcctctgccgcctcgtttctgctgaaacttcgccgggttttaacacgcctgccaaaactgcccc

SEQ ID NO: 125127 - DNA, 781 bp, Homo sapiens
cgtggtggctcatgcctgtaaccccagcactttgggaggtcgaggtgggtggatcacgaggtcaggagttcaagaccagcctggtcgagatggtcctgaaccccctccccaaaaggattttaagccagcctttgctttgacagctgtcctatcatgatttagagaagagaggtttcaactggccccactagtggaacaacatcatcaactggcccacacctgtttttttatcttgaagataagataaaaagataaataacacttaaacaaccaaccaaccaacaaaaaatctttgggaaatggttacaaaggtcgtattttgtatagggcatagcactatgcaactattatcttatttttattttttctggagatggaactactgccctaagtcttggaaaaggcatagggtaagacagaaggaaccacagtgcttacacgcacatccggccctgggaaactgcctttttttttttggaatctcggaaacaaaaacaaaaaacaaaaaaaaaaaacttgtgtggggcggcttgggccctggaaaaggtttttaaacccttcggttgggggccggggcccctgtgggtacggggacctgggccaaaggggtccccaagggaaaacccgggcacagaacccaggggcgggatttccccccaattaaaaaaacgcccgggggggaacaccggggtcttctcggaccaattcccagtggggatccagggggggccacagacggggcgcttaccaccagggagtcccagggaaccgagaaaataca

SEQ ID NO: 125128 - DNA, 681 bp, Homo sapiens
gatggtctcgtggatatcagaatgacttaaaactttaaaaataaaatattcccaaagctactgatgcaaccatctgaaaaaatagaagatgatgtaagacatgcacatgactagagtcagaccactaactctgaagatcctaattcctgaagctagttttaaaatattaaacataatttttgctttgcataaagcaaggcacaagaattcctagagggcaaaatcagatctagacttggtgttgcatttatggaggagcgaagcacagaccccctttgctggagtttgtcacacgaggagcttctcaagactccaggggaacaatagtgcctctttgctgctggtgtggtcttgtggttcttgaggaaagcaatggttttgctaaagttattacaaatatttaaaaattattcagttctaagtttcaatgtgtgtttttaaaaattacttcactctagcttaataacatttccaaagaaatctctaagaaaaaacaagacttctggagggagctagataagaagggctgaggagaagataggtgatttccggctgccatgtcattattaaccacgaatagaagaaaagaaatgcacaaggaataaaattaatgtctttaaaagatatggatacatgttaacatcaaagaattttgagctcaggatatgtattttacaattt

SEQ ID NO: 125129 - DNA, 306 bp, Homo sapiens
actagtccacggttggctatagtccacgaggtactagtccacgtttggctactagtccacggttggctactagtccacggttgtgatactaggtgcacggtcggctactagtccacggttggttactagtccacggtgggctactagtcacggtcgtgtcaattccagtccagcgtatactactagccaaccgtagactagttgagctcgatgttttcgaggctcacccatgtgtcagtgcatcattcctttttatggccaaataatattccactgtatgaatagcctacattttgttgatctact

SEQ ID NO: 125130 - DNA, 344 bp, Homo sapiens
tttgtttttaaataaatactcactgatagcctgggtctatgacaaagttttaatcgtcataggactacgaaaaagcattggcatttcttgtgtttgacagtcaaagcccaaaggaggcaattatccttgtatttgtgcttcagttcctcagctaattgttttaagcaaaaccttacgttttgatcccatgtgttactgtgaaaatattagctgtgtgtgatatgtttattgatattagtcttgtgaatttatgtttagttttttttggattgaagaagggaggggccatccttaatagatgttattagtccgttctcacgctgctgataaagacatatacccaa

SEQ ID NO: 125131 - DNA, 358 bp, Homo sapiens
ctgggtgagaagaggccttggaagggagagatgggggggcgggttgtaaggggactccagctctgggcacagcaggggctgggaaccactgtgggactcttcggctttacagggggtcccatcctgctcccatccaggcgccctcgggcttggcagcatcatcacagagaagtggaggggctggatcacaggtactggcagccaccatcccaggcacatgccctcctcagccctacatggtgactttgacccacttcacagggcacagaacagaactaggagagggaatccgagtggctcgtctatagggaaagaaaccaaagagaagtagatggctcccttcccgtgatggagaggc

SEQ ID NO: 125132 - DNA, 553 bp, Homo sapiens
gcttctaggagcagtgtgaaggactcctgggttgtttttgttttgtttgttttcttataggcaatttgaagtaggtgctttgtcttctagttatgttgagaatgtggttttcatgtgaccagacttcctattggtgtggctgtggaaaatcagatgtttttatatattattggtgggaatgcaaactgatacggccattttataggggaattttccaatatctaaaaaaaaccccacacatacgcatttaccctttgatccaccagtctcacatctagaaatgaactctgaagatatacctccaataatatgaaaatatacagtacaaggatattcaccaaaacattgtttgtcattgcaaaagactggaaaccacctaaatgctcatatgtaggacttgctcaataagctatgttatatccaaacagtggagcattatgcagctctgaaaaaagaatgaggaatatctgtatgaactattatgaagtatttctaggatatattattaagtgaaaaaagtaaatacaaaagactggtatgctacttttcatgt

SEQ ID NO: 125133 - DNA, 709 bp, Homo sapiens
agacccagttcccgaccacgcctttccctccacacctccctgcaagctgagggagccggctccggcctctgccagcccaggaacgggctcccacagtgcagcagcaggctgaagggctcttcaagcgtggccagagtgggcgccgaggccgaggaggcgccgagagcaagcgaggctgccagcacgctgtcacctctcgctgcctcagactctggagtagctgggattacagtcacgcgccaccacgcccggctaatttttgtacttttaatagagacgcggtttcgccatgttggccaggcttgtctcaatctcctgacctcgtgatctgcctacctcggcctcccaaagtgctgggattacaggcgtgagccaccgcgcctggccgatctgatggttttataaggggcttttcgccgcttcacttagcactcctctgtcctgccgccatgtaaaggacgtgtttgcttccacttctgctttgattgtaactttctgtaaaaaattacagcagtgcagaaggtctactggattatggcctccagttccatccatgttgctgcagaagctataattttattcttttgaatgttctttctggctgtaagtctctgatgttggcaagtgacagacccctatggccaatgaatcacaacttaaatgagtaccaagttcccagctgatatgtgaaaaggagctcagtgagagg

SEQ ID NO: 125134 - DNA, 389 bp, Homo sapiens
ttcctcctccagctccatcagctcctctctcccctcctccaacttctctaacttcatctcttcgttgttctccttctcttccaactccctcaactcctcctcctcttttccctctccagcttttctaattcctcctctcccttccacttttcctcctcctccaagtcctcctcctctttcaattcttccaaatcctcctcctccaactcctccaatttctccttctccagttcctctttctcctataattcctcctcctcatgctgctcttcctcctgtaactcctcttcctcatactcttcttcttgtaactcctcctcctcctctagttcctcttcctcctataactcctcctcctcatgctcctcttcctcctataactcctcctc

SEQ ID NO: 125135 - DNA, 534 bp, Homo sapiens
cagcaacaaaattcaagaacatgggcatgaggtagggtttggcactcaaagctagcataaaggaacagtcatgaaatgacattttgacatgcagactttgagcaaaactagggcataaacactgatccatgggagattctgccagccctctgctctggtttaagaagcatttctcttgtgggttaccaggaataagcaagactcagctctgtagttgcagatgagtgcagtaggaggtcaagtgctctggagagtcccctggtttcccaaagcccctcttagccccacctgaacctgaagtttgagtaaaaatgagctggatgacgagtgaagattagaaaggagggccagggtgagagtgtatatagtgtggtttggcaataaaggaagaggtataggcagacatgagtcaagagaaaacatagtagtttatagcggggtgtccaatcttttggcttccctgggccacattggaagaagaattgccttaggccacacataaaatacactaacactaatgatagctgatcaact

SEQ ID NO: 125136 - DNA, 435 bp, Homo sapiens
tggctctgccatcagacagatctgtgttctacttctatccctgctggtcactagggattacttattctctccaccacagctttctcatctgtaaaatggggacaataagagtaccttcgtaatagggcagttgtgaggagtaagtaagatgttacaggatgagtacttaacagacactgagtagtaaatgttagctcttattacaggctacaggaaagaacttttaggaattagttgcagcaattcatggcaactagaactatgtcccattgagctgtcagaagtgtcctgagggatcacaagatcacagagttttattttattctttctgaaaagaaaatctaaggggagtttacccagtctgtatgggagccatgcagatgattcagtttggctctttaaaagaactatttttaaaaatagaagtaggactgc

SEQ ID NO: 125137 - DNA, 375 bp, Homo sapiens
ttgaacttgctgtctttggcagtcatgtccttgtcggctagggacaggtcaccctccagccgcacactgtccagcttggctcccggggcctcgacgtccacctccatgctgggcagagacacctccacgacgggggtcatcacatccgccttggggcctttcaggtccagcttggggcccttgacatccacctgggggcccttgagggccactttgggcatcttcaaacagggcatctgcaccttggggaggtgccctttgaggccggctcccttgggcagggggccctccgggagtttcacgtccacttggccagcctggacctccaggtcggcggaaggggactgaatgctgaggtcagtggtcttgaggtcc

SEQ ID NO: 125138 - DNA, 745 bp, Homo sapiens
tcgagtcacccgctgcgaggtggaatcgttggcagcaggcggatctgcacgagtgaaacgctgatccgatccgtggcaggacggcgagccgttcgccgtcctttcaggctatagccccaagtggctcccgggacgagtagatttgtgcttttttcccagggttaggttttataatacatgggcctcaggactaggcacagcattgcattgacttgagcttcagtttctgtacttgtaacatgggggaagcataatcctcgccctgccgtattctacagtaacctctgtaggagtaattaatgttacttgtagacaaagatggaggggggcaatccaagagcttcaaaaattcagtgtcaagtcatattcagaaataaggctaatgatgaaaatatgattatcagctagaaaagcaattgggctctagttgggagaacttgtttctggtcccaaaatactaaacaggactgtggtcttggccaaacgaaatggcctcgtgtcctcaacagtataagaggtcagcctgaatgacctctcaggtcctttgcagctcaaaacactaatgtttctctgaaaaatgaccaacatgcccatgacccagcaaaggcttcaattctcagatccttgggtgggacaatgctgagagatgtcctgtgggactgagcgccaggtgcccacagaggtagtagactcttcattaacactccctgtgaaagtaggggagtcctctagagtcacctcatga

SEQ ID NO: 125139 - DNA, 318 bp, Homo sapiens
aaaaaaacaaggagggagaaaaacaaaagaaatgctaagagcctggatgctccataggttctataattagcacttgaataattacatgaatccatgtacagggattacagggagaagcctccagaggccccttatatatggtgactgccatatgctaattcatgtgtcctccccggtggcacattccaaagtatgaccaggaacctacagcatccaaacgggcattcagtgcagtccatccagaatggactctcttcctaggcagtgaggtcagctcctgagggagggaggcttccatagaacatcttgctttctttt

SEQ ID NO: 125140 - DNA, 197 bp, Homo sapiens
aggagacatgcatggcgtatcaagagcaaaaattcaaagaaatgggaactagtactcagagacatttttgatctcaagggttaggggcctgtggtttggtgtagagcttggacctgttcatccatatagacctgtgctaatagggtaagcaagcactaaccacatgtggctggttcaagatgagatgtaatgtaagt

SEQ ID NO: 125141 - DNA, 222 bp, Homo sapiens
gctataaagcaaacctcaacaaatctcaagactgacatcatgtatacatgcactctgaccactttaggatttaattagagttcagtaacaaagatttttaaaatatctgaatgttcagaaattatgcaatatacttctaagtaatgtaagtgaaagaaaacatcaaacgggcatgacaatttgtacctatataatctcaactactcaggaggctgaggtggg

SEQ ID NO: 125142 - DNA, 367 bp, Homo sapiens
tgtagggattacaggcatgagccaccgtgcctggcctcaacgcacatctttgagaggggctgggctctgtgctggtgatgcagtggtgattaagacagactgcacttgtcagcagtttacagtttacttgggggagaaagaccatataagcaaacttaaaactaacataacttcaatgttcaataaatacaatgaaggaaaaagtcacaaggggctagcatagagattaagagagtaaccctcttggacaggatggtgaaggaaagcctcctcatgcgttgaccatgagcgtgaatgcacaaggcctggagttggaagcagccagacatggggagagcatgcagaggaatgccagatggagggtagg

SEQ ID NO: 125143 - DNA, 364 bp, Homo sapiens
aacccgtcctcttcctccaactgtaaagtaagattatgaagcagaatcaagagcctacactgaacctcaaaagggaaagcccagggttggggactcccagtgcagcatggtcaatggtgccaccccaataccacctgcaccaacatcaccttcaatagcaggacttattcccctgtggctccataaactgggcagatcaatggagaaggtgcagcctgaaaaccctggaggcatcccctagaatctgggccccaaattcctagcttggaatctcccccacttcattatgttcttaccccaggcataacagttctgctgctgatcaatccaataggtctgctgtacctaagagctatgatgcact

SEQ ID NO: 125144 - DNA, 584 bp, Homo sapiens
tgtgtgaaggagctcaactgcccgccctgtgactgtgcatgcatccctcccgaccctgcagttacagacacagcaagacaaccaaccatattaaattccacatatatatggtgatccaagtccataagctacctacctgaagacagctatgatgttcagaggcgatgacattctccaatcgacaaggaatttagtcagtacttgttgaacaactgatactgaattctatgtcacaataccttgcacaaacttatttatgttgttatattttgttgtagttgtaggctcacagaaaatgagaattgaaagaaatgctggaacccatttagtccacttgcttgcaaatactttcagctctgaagacctttatttgaaagtttatatggaaacctaatatatacaagagagagacttgcagcactttgaagaccttaggagcctaagctcagccctctgtgacaggtcctaagtgccaagaatctttcagaaacactgctcgaaaaccattgttcaggttcaatcccttcattttctagaaaaagaagctaaagcaaggctatgaggcaagttagcgcagaactaga

SEQ ID NO: 125145 - DNA, 530 bp, Homo sapiens
tttacttttctatattttccaggacaaccaaccatattaaattccacatatatatggtgatccaagtccataagctacctacctgaagacagctatgatgttcagaggcgatgacattctccaatcgacaaggaatttagtcagtacttgttgaacaactgatactgaattctatgtcacaataccttgcacaaacttatttatgttgttatattttgttgtagttgtaggctcacagaaaatgagaattgaaagaaatgctggaacccatttagtccacttgcttgcaaatactttcagctctgaagacctttatttgaaagtttatatggaaacctaatatatacaagagagagacttgcagcactttgaagaccttaggagcctaagctcagccctctgtgacaggtcctaagtgccaagaatctttcagaaacactgctcgaaaaccattgttcaggttcaatcccttcattttctagaaaaagaagctaaagcaaggctatgaggcaagttagcgcagaactaga

SEQ ID NO: 125146 - DNA, 393 bp, Homo sapiens
aagggaatatatttaaaatttttttaaaatacaatttcctatatttcagtttcagaactggttctaaatcactggatctgagcaatttcgctagaaatgctccctaatgacctgccctgagctaatagcatcgagatcattgattagacacaagacaaggagcccaggacacagggcacagctaagctttcacagctcagattttcagcctttccatcaccacggtggaaggggaaaaaaaatcctttcagttccctgaaggatgtgttcttgcacataaattggcatttaggttcaattagatactgaaggcctggtcctttaaggccagccgggtgggttgcggctagatatgcctcggcgcctctcctctgtcctattactgggcaagtg

SEQ ID NO: 125147 - DNA, 441 bp, Homo sapiens
tgacttttcactgggattacttgattaagatggtgtctgctaatttcatctactgtgaaattactcattttccctctgtaattaataattattttgcatgcaggtgctttgaaactatgtaaaatccctttcctgatcacagttttagttaatttatttgtatcagtgtgtgcttatgagcccgtattttattcagtgagctgtaatccgttactattgtaacttattttggtgcccatcttgtccctgattttgccagcagtacccccttcagtatctttttgacatgtcatcccttgatcatactgatatctctaatttcattccaatcctataggcttcaattatatttccttccctttttgtacctcctcttatagtgagaaacctgactaccatgatccttagtgttactttatttgatcattctccctgtatgta

SEQ ID NO: 125148 - DNA, 437 bp, Homo sapiens
ccggagggtatgagcaggcgcaacgaaagcaagagagatgcagaggacagtagctgcaagaacagcagccccaggatgagagctcatgtagactggtcttcagaatccaagttgggtttggttctcttcagttaatcttctggtataattttcatctcacatattttagtagtagatttcatctcaagaaatttaatttgtattgataaaaatatctttcataattctacctttggaatatatagactacagttataatttttaacgtccttgttttctaattctaacatctgtttcagcttagggttggttttgactttttgacttttgagtatacacgttcccttgggcttcagagaggttcaactttggccttcagcctcttcatactcatctggtgattttattaacttttacaaatttcacctcttaacttt

SEQ ID NO: 125149 - DNA, 123 bp, Homo sapiens
ctggctgtttctctatttatgactgattttcgacaacttgaatattatctggcttggtgtgactttctgtgttactcttgcttcaggtttattaaagttctttgacagctcctccctctccca

SEQ ID NO: 125150 - DNA, 591 bp, Homo sapiens
ggtgatccacctgccttggcctcccaaagtgctgggattacaggcatgagccaccgcgcccggccacagatctcttttcatccttttcttactctgttgtttttgcagcattcattactgttgacccctctccttcttcaaatatttggtgacgctatacttttttacttgctttcctggctctttttctcctgcccattcttcatttatatatttttttatttttattttttattttgacacagggtcttgctctgttgtccaggctggagtaaactggcatgatcatgactcactgctgtctccacctcctgggctcaaggctcccaagtagctgggactacaggtacacaccatcacatccagctaattttattttttaattttgtagagatgagttcttcctgtgttgcccaggctggtcttgaacgcttgggctcaagcagtcgtcctgtcctgccttggcctcccaaagtgctgggattgtagatgtgaattactgcacctggcccctgtcctttaaatgttcattttcctgaaagtttctgttgtattctccctatctctcgttcttaaacctagtggcatatg

SEQ ID NO: 125151 - DNA, 480 bp, Homo sapiens
aaagaaagagaaaccggcaacattttatctcatttatatgcatctcacttttatccacaaagacttcaggcagctgttacaccaggaactaaaaccattaaaatctaaaacttggccaggcacagtggctcacgcctgtaatcccaacacttttgggaggatgaggcaggcggatcacaaggtcaggagacagagaccgtcctggctaacagagggaaaccctgactctactaaaaatataacaattagctggacgtaagtgggcgtgtgcctctagtcccagctactcaggaggctgaagtgggaggacagcttgagccccgggaggcagaggttgcagtgagccaagattgtgccactgcctccagcctgggtgacagccaggtcctgtctcaaatttaaaaagccaccctaacaagccaagtcataaatactaaaggtgtgttttcatagagaatcagaaaattgagacccgtctcc

SEQ ID NO: 125152 - DNA, 302 bp, Homo sapiens
tatctctactcaagagtctcttctgcccagcctggggatggggacgcagctactgtcgcccaccccgtcataatcttttatctggactatcgaaggagtctcctaacaggtctctctgcttcttccttgcccagctagtgtctgttctgaatgcagcagctgaagtaaacataaaccaagagtcaaatcgtgccactcggagctacatcaggtctgctcaaatcctccagccgctccccatcgcacagaagattaaaccaaatccctctctctgttatccaaggccctccccactctgctcg

SEQ ID NO: 125153 - DNA, 641 bp, Homo sapiens
caactcattagaaaatttacaaatgtaccatattaacagattaaaacagaaaacatgtggtcatcttagaggcagaaaccatttgataaaattcattagccatttatttccaaattctagcaaacttggaataatggcaaacttccataacctgataaagggcttctaaaaggaaaaaagcctatagctaacattgaacttaatggtaaaatattaaaaattgatcctgtaacatcaagagcaagacaaggataccaactaccagcacttctatttgatgatgtaactggtgatcctagccaatgcagtaagacaagaaaaagacaaagtataaaggactagaaagaagacactaaatagtcatcatttgcaggtgatgggattgtacatagaacatgaaaaaatttcagataagttattagaattaagaattatttgaattattattagaatcaataattggaatgacttctaattaacagtttggcaagattgctgggtacaaaagagtatacaaaagtttctctgcataacaataaatagatttctatgaaaagtttaaaagatactagttcctagaaataatgcttagttcctaggaataaatcttacaaaagttgtacaaatatctgtgggagata

SEQ ID NO: 125154 - DNA, 697 bp, Homo sapiens
ttattaataagttattaagccaataaacttaatttttattaaatatccacatgcaccatattggacagtatgtttttaaaggatatacttaggacaggatgaaattgatctcaaatcacaaaatgaaatgtatgaagagtaaattaaaggtaaagaaaatgatacatatttagagaatgaaaatgaatatggattgcattaaacatagtaaaaatgtctaatggattaaaaacaagggtataacaagtaggataggtagagtctaggatttaaggtccttgtcttacctagaaggatagtaatttaaaaaaaacctcttatggaaaattttaaatatgtaaaagagaagagtataatgaatccttatgtatttattacccaccttcaacagttatgaattcatgactaaagtgtttttatatatatcccaagtattttaaagtaagtcctaacaatcacattatttaacccataaatatattgttcttataaaagatatgggcttaaagtataataccagtatcatatacagaaaaaaatcaataatttcttagcattatgtagttagtattcacattttcccaattatctaaaaaaagatttaaaaaattatatttggtttcttcaaactggaatccaaacagggtctacatattgcattttgttgatgtgttgcttatgtcttttaaaatctata

SEQ ID NO: 125155 - DNA, 480 bp, Homo sapiens
tggtatatgtttttgtgatctgtccctggacatgaatctcatcctttaggatactggactggaagtgaagatacttgaatctactttttataaagaaacaacatgggatgattctatcttgagaaaaataaagcagatttggaaaagaactttaaacaacctctagaaataaaagtcactgaaatgaaaaagccaaacagattacagtagattacatacaaagacagttggtgacctgtcagatagatgtaagaatgttacccagaatgcacagataatgtgacagaaaaaatgaaagaagagttctgaaaggtctcacagacatctaagaaaaaaattccaggctgggcatggtggctcacacctgtaactccagcactttggggaggccgagaagggtggatcatctgaggtcaggagttcgagaccagactggccaacatggtgaaacctcgtttctactaaaaatacaaaaagttg

SEQ ID NO: 125156 - DNA, 854 bp, Homo sapiens
tttggatagtatctacagtttgcattgtagatactggatacttggattggctggtgcaccctgtttgtgagactcactggagtttgaagagatgaccactggaaaatatccctaagcagtagctgcaattccacccccaccttggagagccaaaaccctcttcgttttcactctcctgtccttggtcttaggctacttaaagcagcctttagacatagggaaaaattgaaagcctctcttttaagaaaagcattaggtacttctggaatagagagttcaagaaattaggagaaaaatgaacttttgaagctttttctttcccttttttgtttacttcattctcttactcagttttaaaatgctggtaatggtcttttttttcttttttttttttcttgggtgattttaatgctttgggaaaagatctcatggttttatctccaaaggaggaaattaatttggatgccatggaaattagttttctagtcgtatgccttgaatgagtgaagaatttctttttcatggtggtactaaatttggggaaagctatagaaactttcatctggaagcttacacttttcctctttttgaaaatttggtgagagacttggatattttattattttctgtaaaagagtgtaatttgttgtacaggtctaatattgatccttttttggaagtatggaaagaatctgagtataaagcagaattacctctggatggcatgtattctcaaggacactgtcacagtgaaacagtttatttagaagcttgtgtttccaaagtgttgaatttgatattcacaaaattggcatgtgtaaactttattaaactttaagctatttcctaagatg

SEQ ID NO: 125157 - DNA, 427 bp, Homo sapiens
ggactctgcgtcctcattggctccaggaccagggggtgcagccaatcagagctcatcttggctgaacacggacggggtgatttgtttccatgttttctttctttttaacaaaaatttaattggcaagtaaaaattgtatatattggccaggcacgatggctcatgcctgtaatcccagcactttgggaagtcaaagtaggtggatcacctgaggtcaagagttcaagaccagcctgaccaatatggtgaagccccatctctactaaaaatacaaaaattagctgggcgtgttggtgcatgcctgtaatcccagctactagggaggctgaggcaggagaatcgcttgaacccgggagggaaggttgcagtgagccaagatcgcaccactgcattccagcctgggcgacagagtgagactccatctcaa

SEQ ID NO: 125158 - DNA, 910 bp, Homo sapiens
gtcaaaagtgcctcaaggaattgaaataaggttcccagagagccctgaggaggcagcaatgaacaaacaccctgttcatcagaaccctctagatagtcacagaagccacaaaaggaccttggttgaccttggaggaggaagcagaagtaccacgaagtggagtgactggcccagtgattcagtcccaacctcctggttcacgaacctgcttgctttccatctcgccatgtggcctgcaggcttgtcagtaacacatttctttagctgtgcctagaggtttaaaaaaaagataagggtcatatgaagaactccataatgttcttgccaagaaaaaagatgattgagtatataacgaacttcagatacagtgtatagaggatgatgcatttgtggcataataaatagttttcagtgctggttttgatatgagttttctgcattcatgaaaaagaaatgcattttggctttttccagaaagagtaccatcaaggaaacggagacctcaactgctgttctagactgtgggggtgcattcctgtctcagcaccaaggatcccaacaggcaggcagggaggcccttgactttgtgtcactgtgaggcagcagagtccatgctctgcatcaggggaggtgcagtaaaggtccattgtgtggcttgagacctatgatctgaggcttgtgcataataagatggcagctgttacctacagagcaaggagtttcctctttcagggtagattatgtaagaatcaattccctggtcccaggagaagttttattgtgagtttgttaatttaagaactcactcagcagaaggacatgtaatgtctgagtaatcttgatggaagaaaggaaatagatctgtgattaaaacacacacacacacacacacacacacacacacacaccc

SEQ ID NO: 125159 - DNA, 182 bp, Homo sapiens
aaggcattctgaagactctatctgcaagaggaatttttctgttgtttatagctatcctctgtagacctgatcctgaaacctatttcccaagtagtaacctttatttttacattattgagcctgaatgctgatcatagactttccttgcaggtggtgctaaatgagaatgttgacacatttat

SEQ ID NO: 125160 - DNA, 1236 bp, Homo sapiens
ggaggtctttaagcaaagaaaatttgcattttagaaaacagctatagtgaatatttgacattgttagtaatttagggtctattccctttttaattgaaccccaatttatttggagagcttttccaatgaatgtttcaacttggtaaaaagtaaatgcctcttaaaaaagaggttctgggccaggcgtactggttcatgccttgtaatcccagcactttgggaggccaaggcgggcagatcacctgaggtcaagagttcgagaccagcctggccaacatggcgaaaccccacctctactaaaaatacaaaaattagtgggatgtgctggtgcatgcctgtaatcccaactactcgggaggctgaggcaggagaatagcttgaattcacaaggtggaggttgcagtgagccgagatcgcaccagtacacttcagcctggctgacacagccagactccatctcaaaacaaaaccaaaaaaagaggttcctcgctggctgtggtaagcatggtgtagtcccagctactcaagaggctgaggcaggaagatcacttaaagcccaggagtttaaggctgtagtgcgttatgattgagcctgtgaacagccaccgtactccaacctgggcaacatagcaagatctcacgtccaaaaaaattaatttaatttattttccaataagaggctcctgaagagacgttccatcacacccttcctttcatcaccacagtacatacattcttaagaaagtatgtgatctaagcttggccaattagatgctgttacatttgaattttgaatcaagagacacaaagacaatacaaattgttacagtttatgcaggccataaattattttttactttttggcaaattgttacagtttatggggtctacaatttatttttttattttctggcttaagttatctaggatttgtttctgtggtttacagtcaaagaacccaaagaccagatcactcttgactaccataaaaatgattaattataaagggatacaagaaaaacaggaggctgggcacagtgtctcatggctgtaatcccagcactttgggaggccaaggtgggtggatcacttgaggtcagaagttcgagaccagcctggccaacatggtgaaaccccatctctactaaaaatacaaaagttagccgggcgtgatggtgggcgcctgtaatcccagctacttgggaggctgaagcttgagaatcacttgaaccgggg

SEQ ID NO: 125161 - DNA, 517 bp, Homo sapiens
tcgctgaggatcccgatcagagcatacccctggtctaagcttggccaattagatgctgttacatttgaattttgaatcaagagacacaaagacaatacaaattgttacagtttatgcaggccataaattattttttactttttggcaaattgttacagtttatggggtctacaatttatttttttattttctggcttaagttatctaggatttgtttctgtggtttacagtcaaagaacccaaagaccagatcactcttgactaccataaaaatgattaattataaagggatacaagaaaaacaggaggctgggcacagtgtctcatggctgtaatcccagcactttgggaggccaaggtgggtggatcacttgaggtcagaagttcgagaccagcctggccaacatggtgaaaccccatctctactaaaaatacaaaagttagccgggcgtgatggtgggcgcctgtaatcccagctacttgggaggctgaagcttgagaatcacttgaaccgggg

SEQ ID NO: 125162 - DNA, 382 bp, Homo sapiens
gtgattgggacactgtactcctgcctgggtgacagagtgagaccctctctcaaaaataaataaataaatacatccccgctcagccacttatcagttacgtagatacactgcctaaccttagtgaaccctgtttcgacaactccaaaatgggagtaaaaatcctaaacttgtacagtggttttttagttttgttaaaagtacaggtgaggtttttttcagagtattggttgccatctgagagtgatcccctttcacctcctctaggacttttagcattttctggagacattttggtggtcacagctggggtggtagagtgtgctattggctaggggcttgaagccagtgatgctgcttaacatcctatatggcacaagacccc

SEQ ID NO: 125163 - DNA, 450 bp, Homo sapiens
agaactttacacagaatgtgctgaactccttgctcctaccaccttctaccactgctccaacataagaaaatgggtgaaatctagccaagtctattccaagtagagaccttggcataaatgtgagacatcccaggttcctctgaagtccctgcaacattgtgactattccgactggcagacaggatacatgtgctgaaaggtttctccagccagagtacagaagcagaaaccttctctgttgccatatcagtgatattggtaaattctgcacttgacaatacagactaggtttaccactgctccacaagccaattcttcaaagacataaaataggattctaatacaatacgattctaataccagccccttacatttttagaatgcttttcatatacactattgtttgatccacagtctgttagaaaagtagaaaagttgctcttcttcctt

SEQ ID NO: 125164 - DNA, 702 bp, Homo sapiens
gaataataatccactaaggtcatcacagaagttttgtgataattatgaatgtcaactgagaggatatacaggaaaactttctttgaaatctaaaacataaaaaaaaaagttttcatgcaacctctgtgtttatgtattactaaaagttgtaatttggtagtatcctttggcaaataactttgactccatttcccatttctgaatagtcattttttaggggaagtaacataaaggaggaaatatgtattatgaaggtggttttggaaatattatttgtaataccaaataattaaaaagacataaatgctcactactataaaaaagttgaagaaaattttatacatatataatcttaaccaaaagtgatgtaaccgtatcaaaaaataaatgtatgatgctaagtaaaaatgtgatataaagttgaaagtagagtatgtgtgtagataagaactagaatagaccgtcaataataaaaaaaacattttagagatggacgacataggaattaaactttttttttgcagtttaatcagtgctgacatatgacgtcaatgctgactacgtacagtctgttacatatacacacacatatatacatatatacgaattctgagggcaagtgataggagaataaacaaactaaaatgcaattgcagcagatatattgtgacaaaaaatgtaggaaataggaaggcattcaag

SEQ ID NO: 125165 - DNA, 294 bp, Homo sapiens
atgtgggtggtgttctagaggatcccaactcaggggcgagctgcagctcagggcgagctccacgttacggatcggcttactccgcggagttggcctcatttctgcagtcggcgctccctgtagtttctcctctcgaacgccaggtggagcaaccggccggataccgccacagccctggcaggcggcgctgtgatgcctgagctgatcctgtatgttgcaatcactctatccgtggctgagcgactcgttggcccgggtcacgcatgcgctgagccttcctttcgctcttcccgc

SEQ ID NO: 125166 - DNA, 1088 bp, Homo sapiens
ccaaagtgctgggattacaggtgtgagccaccgcacccagccaagcaccactgatttttaaaaagcagaaaactttgaagttaaaccatttatatactccaaataagttctcttggtacgtatttcccaaggacatttctctccctgggtaatggtaggtgtttggtctttggtcacgaaattcatctgtaattaagtatgtggctcattttattcaaaaactgtaaaaggaaatttaattattttgacataagaaagaaaaggcttattctgtggcctgatttgctgaaatgtattcagttttattcatgtaggtcaatgattggtgtctatgtggaagacgaagtggtgtctgtgctgcctctctttaggagctgccaacagggagcacctcagacctgcacctgtggggtgttccatattgaagcagatgatattatagattaataaaagcaaacacaacagaatgggtacaaaaaacatcaacaaaatagataatttgagaaaaatatccgtacacctcctattaatggctcccagactgtagctctgagaacaaaatcctgttatatttgatggtacagacacgttactcatagaagcaattcattcactatgggtttcatgttatggaagaagccactcttcctgggccaggtacctcttcatttggtttaggaagagatgaagatgtctgtcactctgactgatgtccccgtatgtgtggaatgcctggagtggagtcctgcctagcacacgcctttcttctgcgttcttgggctcaggacttaatctctgtgcctcagttccctcctctgtgaaatagaagtaatagtggcatgtggctcacgtgcatgaaataaaatgagccatgaaataaaatatgcacaatgccagcagcatagtaaatattcactgaatgctactgttatatttaccattaaatgttacggattcagaaagtatatttctatcataccaaaaattgtaaaaaaataaaatcaagcaaatttttaaaatttattttcatttttttgagatggagtcttgctctgttgcccaggctagagtgcagtggcacgatctca

SEQ ID NO: 125167 - DNA, 545 bp, Homo sapiens
agaggtgtccctggtagaggaatgcaatcaacctacagcagcatggccaggaaggagccaaaagaataaatatccttattgaaccccttggatctcccatctcctgatgccagtgcctcccattaggcagcctcagtcagagccagaaggcaagggaactgggtggatgctgtccacggagggcagagcctctgtggggcagagctgcctgaaggaggatggagggtggatctgcggagcgaatgggaacagtctcacagagtcaagagttgcaggtcacttggattataaggacgtttctactttagaccaaaagaggcttttgtgtatgtttgagtgaaactttgcattgtgaggtcagctacgtagatgtgccggctgtgagggatggtaggagcaacggagatcccagtccttttcagacttgaaaagacccagggaagtcaagggatttgcccaaggccactcattaattcatgaaagtgtttctcgaaagccccttacattttctcgggaaaaacaacacaaaacatttgaaacagttt

SEQ ID NO: 125168 - DNA, 700 bp, Homo sapiens
caatttgttcaccccccagagttaagtctgaaatacacagactcttcgtagacccagagaatgtgtttctcttgatttagggaaatgaggtagacaggaaaagagttaacaagatgattgcttgatttttatctcaagttataatttcagctcttcatgattggcatcctctagacattcgccatcctttaggactgaaggtatcactgcaaatatttatttgacaagagtatggtccactcaccataaagcctcagccaagttctctcaacatctccctctctcgcctaccctgaccaccaccttccgatttttttttttttggcaaggagacccttagtcttggtgagatttgtgaattaatggtgtgaggctcttcacatggatgacaaagctggccaatatgctttctgcgaatctgtgaaatctaaactactttccctgccagaggacaggtgctcccatctggcgctctaccttttctccccagggagcctggcacgcaagtccttagcatagcaaggtaggtctatacagcagcctagagagcagcaccagccatgactgaagaaggcagtgaggccccccgactggattttaggataggatagaaatcaccctggctgggcgcagtggctcacgcctataatcccagcactttcggaggctgaggtgggtggatcacctgaggttgggagtt

SEQ ID NO: 125169 - DNA, 291 bp, Homo sapiens
ctggtttattctgctttgggctgtggttcctgtcctcctgccagctcctgtctcctgcccctcttgccttgctggccccccgctatctcagcctggggggccaccacagggctctaaacagcgctttgcattcccaagacacctgctgccacacaagccagtgactggagacgtcccttggttcgggccctgcccgctccacctttagtatttcccagtctcaggagcgtggctgcacctgagtctccctgaggccccgaacttagacacagaagtccagctgattgcctt

SEQ ID NO: 125170 - DNA, 452 bp, Homo sapiens
tcggcctcccaaagtgctgggattacaggcatgagccaccgcgcccagccgcctggtgcttttttaattttattttttatttttgagacaaggtcttacactgtcacctaggttggagtgcagtggtgcaatcatagctcatcactgcagcctcgacctcctgggctcgagcaatcctccttcctcagcctcctgagtagctgggactacaggtgcatgttaccaggccctgctaatatttttttttagattattttttgtagagacaggatctcactgtgttgcccaggctggtcacctggtgcttttatctgcaaagggacattgattcctcaccctggttcctgaaggcagacagtagatacccctcttggaagtttggggaacaggctcaggagctgtgtaaatatgcccaagaccacaggatcggactgccaactccaaagcattgc

SEQ ID NO: 125171 - DNA, 464 bp, Homo sapiens
acctccccctccactccactgcctcgaagctggtcaggccttggctggtgcccccaggtctgaggtcaggctctgcaccagccgccctacctccaggcctgtcccctctcagccactacgacagcaactcccctaaaacaccaactcattattgaattccgccacatcaccctgtgaacaacgatggcgccatccacctccttacatacctcgaactttccagaagttagaaaataacctcagctgggcgtggcagctcatgactggaatcccagcactttgggaggccaaggcatgaagacggcttgagcctgggagttcaagaccagcctgggcaacatagtgagaccctgtctctacaaaaaataaaaaacttccctggcatggtggcatgtgtctgtaatcccagctactcaggaggctgaggcagaaggatcgcttcagcccaggggttggaggctgca

SEQ ID NO: 125172 - DNA, 334 bp, Homo sapiens
tccacaacaccgatttttgtaatgtttcctttctttgtttcactttgactgtagaagctggctaagatgcattggcactagcactatctattgcatgcaaaagttttgctcaaaagaagtgttgatgttggagctgtgagaaaagcaggccctacgttgcaggacttgggggaagaatggaatgtgaaaagctcactttaaaatggtaggggtttgggtgccaggcaggagcagtggtagagcatttcagagaccagtccgagcctaatgaggtctgccagggctctgggcaggcgtcaccagctggctgtttgccactcctcttgccctccca

SEQ ID NO: 125173 - DNA, 472 bp, Homo sapiens
ctaaacgctttatacttcaagcttccgatctcatttttaaaaggaaaaaaaaattcttacaatggtctgtaagacttttctggatctgattgtcaagtcacaacactctttgcttcccatccccacagagaactcttatctcctgacctattatggactgaattgtgctccctcaccccccaaattcataggttgaagctctacctcccaatatgactgcatttgggggatagggcctttaagaagataattaagggccgggcgaggtggctcacacctgtaatcccagcactttgggaggccgaggcaggtggattacctgggcaagagttcgagaccagcctggccaacatggtgaaaccctgtttctactaaaaatacaaaaattagccaggcgtcatggcaaatagcagtaatcccagctactcgggaggctgaggcaggaggatcgcttgaatctgggagatggagg

SEQ ID NO: 125174 - DNA, 528 bp, Homo sapiens
tgaggacccaggtcaggggcgagcggtaactcagggcgagctgctaactgcaggtgcgagctgctaactcaggtgcgagctgccaaggcaacagaaacgtgcactgaatgctgaaagtaaaggggaactgatgaaaaaggtattgggctgatgaggcctggtgtgagccggccagcagcagtcccagccttgcttcagatgctctggcaaggccagtcgtgctgcccagcccttccggaccccactccagccgggagaaaggcccttgtgcccactcctttccacacccctgcccaggtgcatcagatggaggagcctgggtcaaaggcctgccagggatgctaggaaatcacgcatctggcttcagcttctttaacgttattgggtaccttggataccaccaaaagcatcacccaactacaggaaggggccaaacactgggcaaatggagacaataaaaatgtctccagctcattacagcatctatactttagcctatgccagagcattttagaaggttgcgtccca

SEQ ID NO: 125175 - DNA, 737 bp, Homo sapiens
ggaactccttgtggtatgctctgaaatacagactatagaggaaatattttagtggctctacaggatacatggtctctgttgcacctactgaattctgctaccatagcaagagagccaccatagaggatatgtaatgaatgggtatggttgtgctcaaagcaggcattgagccagattgtttgctgacttctctgttaaaccatgaattttaaatgattgcatagtatagatggtacatacatggacacatgtaccatcattgccctttaataaattttattgcattataatatacatatagagaattgtatttattgtctgttgcagtttgatgaattttgtcaactggatatatccgtgacagtacccagggtgtaattgccttttggtagatcggaattgtttctaatttgggacttttactaatgaagctattatgagcatagtacctgatatactttattttattactatatctgcacattggttgtattagttttctgttccttctataataaattaccatgtacttggtggcttcaataaatacaaatttattatcttacagttttgcaagtctgaaacctgggttaaagccaagatgttggcagggctgtggtcttttctggaggctgtcagggagaatctgtttccatgccttttccagcttctagaggacaccaacattccatggcttatggctctttttttccaacttcaaagccaataaccttgct

SEQ ID NO: 125176 - DNA, 368 bp, Homo sapiens
catgacacagacattcaggctacggatcctgtgtccaccgtttactgagagggccgtgggtgagtgacgtggagtgtggcgtaacctccccatgtcgccctctcctagtgcagaaattggagacagtgggggatccctcacagggttgctgggatgactgaatgaggtaatagacttcacagatcccacatagggtctggtacgcagtggtccctcaacagtggacagacattattaggatctggtcatattctgagaacaaagcttgacaagttctggaatcaaatgtcattgtcaaatgtgcctgctcaatgcaattctacttggctactggactctctgcaataatttgtctgaaagagaggcag

SEQ ID NO: 125177 - DNA, 521 bp, Homo sapiens
gtaacccataagcgcgtctggtattgctggtgggaatgtaaaatgatccagctgctgtggaaaacaatacagtggttcctcaaaaaataaatatagaattgccatatcaggctggacgcagtggctcataactcgaatcctagcactttgggaggccaaggcaggagaattgcttgagctcaggagttcgagaccagcctgggcaacatagaaagaccttgtgtctactaaaaatataaaaaattagaccagcatggtggcacatgcctgaggtcccagttactcaggaggctgaggcaagaggaccacttgagcccgggagttcaatgttgcagggagcagagatcacacccctacactccagtctgggtgacagagcaaaacctcaactcaaaaaaaaaaaaaagcaaagagaaagagagagaatggctgtatgacccagcaatcccacttcttccaatataatcttcccatatattggaagaattgaaagtagggactcagaacagatatttgtacac

SEQ ID NO: 125178 - DNA, 527 bp, Homo sapiens
ttgagtgctggtggctgtccagctttactggcagggattctgatgactcagagacagtagctacccttttcccagtggtattgccactgagtgtgggatgggtcacagctatgtctgtggccttttgcaaatcaacttcaaaatttgcagtcacatttatggtaggacagattcatttcacaatgattttgccaattacccttgttatttccactcacatatatctccccaaagtggaaacaaggacacgtctagagacaggcgctggacgtctcctgctcactggcattaagtgggcaggcggcttattgctgagtgatggtccctggacatttccagtcgactgtgtttgacatggtggtgaattggacacgtgacaggtggcaatatgttaactgttcgtagcaaggaagatttgttttcaggctggtggtttgattacaagttggtcattcttaatgccagggagggggaagagagagaaaatgagagagaatgaatgagaacaaatgtaagaactttttttg

SEQ ID NO: 125179 - DNA, 386 bp, Homo sapiens
tggaagctggatcagaacctcacatgtttgcagacaaacttgtctcctcaaagtggcagagccattccaggaaggaaaactaaagcttgtctgagaccggccagaaaggggggagtgtctaaactgcctcacttccacttctgggagaaggtgcttatgatggggagtcggggagcccctccatgttggggttccctgtctacactgttcctgactgcagtggtcaattgtgttatttgcccctagggcagtggttcttgactgggggtgatttttgccccccaggggacatccggccacatctggagactttcagttgtcataactgggcagtgttactggcatctagtgggcagaggccagaaacgcggccaagcatcccccag

SEQ ID NO: 125180 - DNA, 407 bp, Homo sapiens
atctggtgtatcttgaggccagctattagtgaatctgggaaaaccgtccaatacaggggcacatggcaaaattgtgtcatcccttctccttcttcccatctccatggaccccttgcatggaacaagtaggtaacatttgacacaagttctagccgagggttcagattactgtttgtctgaggcattctgacaggcacaagccactaagcattgctatggaaaccattttgttcttctctgctgtgtcatttgttttctggcacggttgcagttgtggtaccgggggaagggcagtggaagaggtacccaaggatcagacacctagtggggcctatgttcctacaggattgtatgaccaaggctaattcctgcttctccctgggtcttgcaatctccaactctcagaa

SEQ ID NO: 125181 - DNA, 311 bp, Homo sapiens
atttcttttctttataaattatccagtctcaggtattcctttacagcaacacaaatggaccaagatactgcccacactggctccttcctcttccttctggacctttttcttccattttcttctgctcccctttcctccttttgatattccataaagtaactttgaatcttgatatgttccccttcaagttcctactttaacatccttccgtctacccctgccagaatccttcactttccacttcagcccctcagtaatttgaactttaagtacccctactctcaagggattcaaggtctcccaaaagcaac

SEQ ID NO: 125182 - DNA, 822 bp, Homo sapiens
gaaatgggtctggaaggtgagtgagaggttggggtggagagaaagacgtacatggaggtgacagtttcagccatgagagtagcgaggatccctaaggggagtgggccagagggcagaaaagaggactgagtcagaacttgggggaatgttcagagggcaagaggaagaaaaagaggattgcatgagagaggccaaaggtcaaaggccagtaaaaagggcagaaccagagcagtgccatatcatggaaatgaagggcagaagggagtaaggacctcctctgcaggactgctgacttggccttagcccagtgctgttttactacagttgtctggctatagtttgccaggagtttctctctgggaccttaaaacaacactgttgggcaggcatgacttgcttttttagtaaagaatttgaggcttagagagactatcactttcctaaatcagccagcaagtgactagagcccagggattcttgaactctccttattacagtgagaatagacggttgaatttggggatcagaaggtcatggtggcctctgtgtttcagtggtaaggatagaggctagactataggaagttggtatgacttgggagggcagcaactgttgctggctatttcactaaaacagagaaggtgggagaaggtgcgccttggcccctgggtgaacagggttggggagtgaccctggctttgggctctttttagggtttgacatcagcgacctctccatgtctgcgtcctccttgtctctcttttaggcaccagggctgaaagctattcagcagcttgtctttccacttcatttagaaaattg

SEQ ID NO: 125183 - DNA, 217 bp, Homo sapiens
ttagtacagtgccaggcacaaacccaactccggaccacagtgtgggaatgaagagacagctaaggtcccaccccctccacccttccagccttcttcctccttccagccttcttcttcacactggagaagcttgttcttgactgcctacatgttgacactttttagtagtctttcaaaattgtcatctccgtaataattttcgaaaaacatctttgga

SEQ ID NO: 125184 - DNA, 680 bp, Homo sapiens
ctactttgtcatattagttttatgagtggatttgtttttatttttgctagaccatttaaaagcaagtaaatctgtgtgcctctctgaagaatagaggcattctcccttataaccacaatcccattattgtacctaaggcagttaacaaatttctattaacattagtaggtttgggtcggacacagtggctcatgcctataatcccagcactttgagaggctgaggcaggtgaatcacttgagcccaggagttcaagaccagccagggcaacatagcgaaaccctacctctacaaaaataaaaaaattagccaggcatgatgatgtgcaactgtagtcctagctactggggttggggagctgagatggaaggatcacttgagccccaggaggtggaggttggatcacaccactgtactctagcctgggcaacagagcaagaacctgtcttaaaaaaaaaataaaaaaggtttgtctcttaaggttttattcaattccagattctactattagaacgctttcttatctctcctctaagtagggagaagaaaactaacatttactgtataaatgtttgaagggcttttgtgtgttgtcttatttaatcttcactcattttacagatgaggaaactgaggcagaccacaggacgggtcgacgcggccgcgaatttagtagtagt

SEQ ID NO: 125185 - DNA, 196 bp, Homo sapiens
actaggatgatcaaaaggaaccaaatagatgggagaaattaagaagtcattatgtatgcccaggggtgggtggaagcctcagtaaagtcatgtactgaataatgatgttttggtcagtgacagaccgaatagataacagtggtcctataagattataatggaggccaggcatggtggcttatacctgtaataccag

SEQ ID NO: 125186 - DNA, 362 bp, Homo sapiens
aggtggcagaggtgggcccaccgcacagggtaaatgtcccggtgtcacatacctccagattgcagggacctgcgtatgctactgctgctgtggaaaccagctctctctggctctggccttggggagagggagccacagtggatttaggaagagtctccagatgtagcttgagactaccaaacaggcctgacccccacagaccctgcctcttatgagcgcccagactgagccctgcttcaggctcccagccatgtggccagctgcttttcttctttaatttttagcatcagacgaatatttcaggaaaatattctcattgtaaaatctcaaacattaataaaatgtagtgaataaaaggccat

SEQ ID NO: 125187 - DNA, 775 bp, Homo sapiens
aacgaaagtcagagaatagtttctcgaatctgcacctagatggcccaatattctataggaacctagatactagtcataaaatactacgataatgccgtaatgtaagtcttcataatcatcatcgaatgcgtgcaccattcaagctgtagtagagctagccgactctttctattctgaaactatttgttccttgatcgttaccacctttctgttttctcagagcttgagtcatgtttctaaaaacatttgaatcacatcacacatctgcttaaaattttttagtggcttcttaacacctttagagtggaatctcatctccttaacatgactttcaagaccctttgtagtgtggtcctgattgccttgccctactcctatccctcccaagaagatactacacttacttgctgtcctccgttttgttcatttttttcttgtgcatgttatcccccccaggtaatttctacttgttctactactccatccagagagccatttactttccccaaatctcctgagtggtcttataagacactgtcatactttattgtaatttcttctgattagaatctcttgttaggtatgttaattagcttgatttagccgttccacaatgtatacatatcacaacgttatgttctatgccataaacacataaatacacacattttttatttgtcaattaaaaaataatctcttgttagattggaaacatattgctatcagatattacctgtttgttttaccattgtatccctagtgtctgaaatattgg

SEQ ID NO: 125188 - DNA, 632 bp, Homo sapiens
tgttagccaggatggtctcgatctcctgacctcgtgatccacctgcctcggcctcccaaagtgctgggattataggcgtgagccaccgcgcccggcctggtctcccatttcttttcctctttccattctgtgcacaccttgccttcccagagcctggccacagatggcagtggggccagggtgggttgagtttagacatgcctgttcattttttccctcctcaaaccatgccagaaccaaagccagctctttaggtcccagagtcttctggacgttgcatgactctctctgtagccatctgctcacttgtccctgccaagaggggacatttgtgcttggggtttccatgtcactagggactcggtttccaccattcattcccttttgccccaatctactttatatctaagatcacagaaatcagaattttgtgtgtatttatttattgtgcctcttcttttagtactaagtgcacagtgttcagtagggcatacagaattaaattacctttgctttctccaattccatgttgactcatgtggctgttaccaaggataaaatatattagtggacaaaatggccttacctcatcccattacctgaaattatataccaatgcttatatttctgta

SEQ ID NO: 125189 - DNA, 347 bp, Homo sapiens
tcagtgcttctacccagcacctaaagaacggcttggcacgtgacaggcatcagtaattactgaatgaggttttagtcgtatccccctctcacttccgtttctcccctttctccgccctccttctctcccctggctttacctccctccaagacagcttttagctcatgcagtggctcacgcctgtaatcctagcaccttgggaggccaaggcaggaggatcgcttgagcacaggagtccgagaccagcctgggcaacatagcgagacccatctctacaaaacatttaaaaaattagctgagtgtggtgcacacagctgtagtgccagctacttgggaggctgaggtgg

SEQ ID NO: 125190 - DNA, 289 bp, Homo sapiens
agtgactatgcttcatatacaaagcaactttttaaaaatttgtgtgcttgttttacagaaagattccttataatttttttattctttttttaaagaagcaaaggcaggcagactataagactaatcagtttggtaagtgagccaaaagcaaggggggaaaaaacagatccaaaagcactggctgatctcattagctttgcttaagaaactttatagatgtgacttcactcctggattacacgtctatatttagtttatacctaatatggataaagtcttgaaccaacag

SEQ ID NO: 125191 - DNA, 372 bp, Homo sapiens
tccctgccacagtggcccttctttccattcctcaaacatgctcacttcttcccattatggtgttctcctgctatgccactctccttcacttcctagtaaccaggacctagtcagtgcttagtcatcattacgacctcagctcagaagtctcatcaggttttttttttttgagacggagtctcgctctttcacccaggctggagtgcagtcgtgtgatctcctcggctcactgcaagctccgcctcatgggttcacgccattctcctgcctcagccccctgccccccgctccctgtgcaaaggctaattttttgtatttttagtagagacggggtttcaccatgttagccgggatggtctcaatctcctgacc

SEQ ID NO: 125192 - DNA, 441 bp, Homo sapiens
ctctttattgtttgctagattccgtgcattgtatctgcggggtggtctgctggtccccaaggtaaaagccaactaatgtgtcaaatatgcattacgatttgtaccttttagagaaaggtgggatggaggtcattctttctgaataaagagaaattccctgagatagatttgcattggtagaagaataaaaactttacttgcttcaaccaaattccaaaatatggccattccattcctgagttttgttagtcaactccactcacaagagccatggaatcactgccaaatctcagtctagagaccacgcacacagtttgactaactcgggggaaaggaaaaggatcactctaacaacagtcacagataatatctggccaagatcaaatacaggatcattacccaagaagacacttgaaaatggaatacagcaataaaaatgag

SEQ ID NO: 125193 - DNA, 172 bp, Homo sapiens
ttgtggaatagacctgtgaattatggtcttgtctgtatatgacttaggtcaaaatttaattgtgagtggaaatttgtgtttagtaacgtgtcattcctatctgttgagcctactaaatgccctctcaaactagagagctatgtgtaaagaatcttatgttcttcttggttca

SEQ ID NO: 125194 - DNA, 298 bp, Homo sapiens
aacatagtgagacctcgtctctacaaaaaaaaagtcaaagaatgagacaggaggattgcttgagcctgggaggtggaggctgcagtgagcagtgattgcaccaatgcactcccacctgggtgacagagtgagaccctgcctaaagaaaaagaaacacttggagacaagatggcatcttccggatccttgcctacagctatgcagggcagccagcagctgtgcattattttgcactctcagccatgaaggaattcaggcaatccttcaggaacctacacagtaaattcttttcttgcag

SEQ ID NO: 125195 - DNA, 605 bp, Homo sapiens
caccggccccagtgacaccagccgctgggcctgagctaagaagccatgcttctcctgaagaatggcaagaaattagcacttggctgggccgccccatcattgctgttcctcacaccttgctgggtaatttctacaagaccaaagcctgagcctaatgggccgcctgcttccagcccggtggacaacatcagggaaagcagcccccagggtttctcacagactaaggggctctgtgctctgctgaaaggatggtgcttacagttgtcaggagagaaggacactctgaaagcttgggatcctacagctgttgggtgagaatgagcaagttaagagtgctctgctgagcctaaaaagcaggaaaacgttctctgcggcaatgggaaaaggagtcatctctgttagtgacttgagtgccaaagagccatgtctgtgctcggcacacgccgagtggtgaagcctccagcgtgtacagccatccaagcagccccaccgagaacagctctgtgtaccatgccccattcctgggcccaccaccgtccaccctcgagccacccggtgacgaacaccagccatcaccaccgcatgggctggcaccccaccagtcc

SEQ ID NO: 125196 - DNA, 372 bp, Homo sapiens
ggcgtgaaccaccgtgcccagcctaatttttgtatttttagtagagatggggttcaccatgttggctaggctggtctcgaactcctgacccaggtgatctgcccgccttggcctcccaaagtgctgggattacaggcatcagccaccgcgcctggccctcaaactagtattattatgactttttaaaaaaacgatcaactgaaaccccgaagttgtttcctcacaagctgtcatgaggttctatttccccatcctgtacttatatggttgcttatctagaccaacgattctctaccaggggtgattcttgctcccagggtcatttggcagagtctggagacatttttggttgctatgggagtgaggggggaa

SEQ ID NO: 125197 - DNA, 311 bp, Homo sapiens
tttataatcttggccacacgtgtctggcgtagacacctgaagttcctcggttctccgccttggtgggtcttctctcctgcgggcacagtgcagatgcagatgagtttcagagctggtcaaaagtaattccatcacctgtaggatgcagaactgctcattctgcaccctttgctagtgccctgtgtgggtggcctcccctgcccctccccatcccttagggcaggtgttatcagccctgttggagaggaggcagctgaaggccacaggggccgcgtgctctgtatcagtcacatgtcacatctgtcaggctc

SEQ ID NO: 125198 - DNA, 728 bp, Homo sapiens
ggattcccgggatgcaggcagcttggggccctaggggaaagagcctggggctcttcaaggctgggctatgaagccaccctcctcccagggttgaggggcagtcaaaatatccccaaacctaatgtgatttctcacctgccaagtggcagcagtgtggcatcggggcataaaagctgctaacagtggggaaaggcctggcccagtgccaagcaggctgtgggcgtccctagaagaatgagcagcgcaactacagcaggagtcccaggccctgggcagagagacacccctttatcgagacctactacctgccaggcactttatttattggtaaatttaatcagattttgaaaaccacaaaatctggatacatttgcattgtggtatttgttgtaattgttggatataattacatatacatgctataaaatataagatagaactagaacaagagttcttaatctggcatctaagggaacccgaaagatcaaaggatagagttcaaggagtctaaaaatttggaagagaaaaaatatatatctttattttcactaatttctacctgaattttagcattctcttcaacgatgaatgtaggcaacaaaccacagcagtattagcaggactcgtgatgatgtcactagcaattacaaatattttcaaatcatataacggtttttgaagatatttcaaaatatggtttatactcatcactatttcaaaattacagc

SEQ ID NO: 125199 - DNA, 297 bp, Homo sapiens
aaaagaaaaagaaaaaagaggtcaaggactccgtccttggaatcctaagaaaattttccagccgtattacccttctatgaagcccacctgtcaaccaacaagcacccactcgatcagagcttccccaggctttttggtgtctcctccttgcatgggaattgacttccaaggaccaccagacactgaggaagtattttaacatataaagcaaaagcaacaatagggcagctggagaaaggaaattagaagtaacagagccaatgcagtgattagaaaaacactcaaaaaatggtaata

SEQ ID NO: 125200 - DNA, 347 bp, Homo sapiens
tatcagatgtaaaaaagggcttttactacataccctacagacattataaaatataataaaggaatactatgaaaaactctacataaggaaattcaacaacttaaataaaatgaaccaattcctcaaaaaccacaacctgcccagactcacccaaaatgaaccaaacagtactatattaagaaattttggccgggtgcgatggctcacgcctgtaatcccagcactttgggaggccgaggcgggcggatcacgaggtcaggagatcgagaccatcctggctaacacggtgaaaccccgtctctactaaaaatacaaaaaattagccgggcacggtggcgggcgcctgt

SEQ ID NO: 125201 - DNA, 735 bp, Homo sapiens
catgattccaaaaaacaaaaagaagagccattggctcaaaggttagatgaagaataaaattcaaaattaaccattaacctgaggcttagcttatattatacaaactactttttcggggcatataaacgctaataagtttaattaatagctgacacgcttttcatgtggcgaagtttcttaaagtattaacaccaattaattgatttacatattaaacagttgtaattctacttagctcaaagtgatagccccatattcggaaagacatgtataaaagaatcctgattattaaatctggactttgatcatgacgccagctttgaaatacatgtttcattgagtccttacaagctatctgacatgctcaaaagtgtatatattaaatttgaatacatcacccatcaaattcttattccttaataaagtgttggtgtctaggtttatttggcacttcattatctctttttgcttccctaaagtgcctgaagagtgcataattatcaagcaaaaatggaaggacaagaatgaaatttttaacattaacccaattttacatttcaaagagtgcagctaaaaattttttcttaactatacctttgcctggtaaaaagacttactctaacaatgctggctgcaagtgacaacataaaatttctgtattcctttattttagcgagaattgtttaacaaagaaatttctaatctgttaaaatagtgagtggttattgtagaaag

SEQ ID NO: 125202 - DNA, 480 bp, Homo sapiens
acagtcaaacttctgaaaactaaagacaaagaaaataaaattaagtctaaatcagtgaaagagaaacaataccaatgaagagcaatttttcaatgatagtaaatttcacattaaaaaccatggaggtcagaaagaagtagtacaacattttccaagtgcagaaagaaaagaacagtcaactcaggatttggtactcagaaaaaatattctcaggaatgacagggagatcatgacattctcaagtgaaggaagactaagagaattttcctagcaggactacccagaaagaatgactaaagaattttttttttggacaaaaaagaaatgataaaggaagtaatcttagaacatcaaaaggaaaaagaacaatggcaagggtaaaattataggtaaatacaatacattgtctttctcttttgagttttatgttattattgttacataaagcaaaagttataatgttgtctgatgtggttttaa

SEQ ID NO: 125203 - DNA, 256 bp, Homo sapiens
gcaaaagttatcgtggttttggccaccaaaaccacgataacttttgcgccaacctaatacaaagggcagcccataattttatttttcaatgacgattggcactaagctaaggaaacagtgagggattttgtttgtttgtgtgtttactactgattggaattgtcatttcttttttccttaggaaacagtagggagatctccctactgtatcctatctctcccagtcctagctgctggcatcactatactactaaca

SEQ ID NO: 125204 - DNA, 294 bp, Homo sapiens
gaaatttttcgtcaccccaaccagaaactctgtatccactaaacagtaactcctcattttctccctgacccctggtaacctctactctactttgtctatgaatttgcctcttctaggaaacccgtgtaagtggaatggtaccgtatttgttactttgtgtctggcttatttcacttagcatgatattttcaaggttcatctgttttctgttttttgaagagtaatttttcaagaattttttcatttataaataatctcagattaacaaatatttcaaatacaatatgaagactt

SEQ ID NO: 125205 - DNA, 401 bp, Homo sapiens
ttctgcagtccccactctaagcccatggttcaccattttattcttcctcctaaaatttcttcccttctggtaagattatctttgccttaacaagggcccttttcatccacccactcccttacccttcccagaagtggttaatgggcacaaaaatacagttagatggaaagaaaagaacttctagtgttcaatagcacagtagcatgacgatcgttaacaataacttaccatgtatttcaaaatggttagaagaaagatttggaatgttcccaacacaaacaattgataaatgtttgaggttatggatatgcaaattatcctgatttgatcactacatattgtatgcatgtatcaaaatatcacatgtaccctagaaatatgtataattgtcatgtatcaat

SEQ ID NO: 125206 - DNA, 170 bp, Homo sapiens
gtactattgtgcaagtatacactgacttttcctggactaaggtcttctccaggaaattggagggaaaataactattgaacacatggaatgagacaggaaaagtttcctttgataataaaagtgttctgattcgacatttcatcggttttcccaaaacttaaccatctaat

SEQ ID NO: 125207 - DNA, 529 bp, Homo sapiens
ctaactctactaggtaagtgttatcatccttattttatataaaaggaaactgaggctcaaaaaagttaagtgaatagacttgttacagccatgtttgcttccactcaaccctagtatgagtttgttgttgtggaaagaatttatctggaatgtcttggtgcaaattagctgttttggtcaattttatttcttcaacaaatatgaatgatttatgtggcaggcacttgtgtaggcactggggatatgggatgaataggacagacacagtcctgctctcaagaaggttatctccatcacgtgagccagacataaagcaaacaattatctaagtacattttgattatattaatagttctgattagtgttatttatttattctgtgttcctaagtcccaatggtttgaaactgactgatgataaataatagaactgtaaaatttataacaataaatttgttacagaaaaggtcttattttttaacagtgtaagtactctggtttattccagaggctactaaaaattagaacat

SEQ ID NO: 125208 - DNA, 339 bp, Homo sapiens
ttgtatcctggacattgaggatgatacgttagagactctggattctgttatactctttcaaagagcattgattttttgttttaggaggcaactaccttggctggactcaaactctgtctcctccatgatgagcagaagctagaatccctttttagttattttagccttggctagagtacctggagtctgccccaccatgtgtgtcagggggcaaccagagatttgggaagattttatgtgcaaaatttaggactcctctgattgtctttattccaagatttcccttctcactttcaagctactgtgggtaccctaaactctctcctctggttcttcaag

SEQ ID NO: 125209 - DNA, 482 bp, Homo sapiens
ctcaacgctttatacttcagtggtattctgcaacttgctttttcacactcaataatgtttctgacattaatgttgatatgtaagatatattcattttaattgctaaaaacatccttccatatgaacatacaatgactttttgcattcactccccaaccaatggaaatttaggttgtttctaatattccatgataacaaaacatgttgtaatgaaaacatccttatacatgtgtgcaggagtttctttggggactactccaagaagtacagtaagagaatgtgcaccttcaatattactagataccaccaaatttgctagtaaagtagttgtgtcaattttgactctcaccaatgtacaccagcaatatagagttcctgcctgagcgcagtggctcatgcctgtaatcccagcactttgggagaccgaggcaggtagatcacttgaggtcaggagttcgagactagcctggtcaacacggtga

SEQ ID NO: 125210 - DNA, 453 bp, Homo sapiens
cgggaagagtatgacagaaattgcccctgtgattcaattaataagacttattcactatcacgagaacagtgtgagagaaattgcctccgtgattcaattatctccacctgcccttgacacacgggaattattaaaatttaaggtgagatttgggtggggacacagcgaaaccatatcaatggcattgagagatgaggcctttggggatgtgattaaatcccagtggattagaatagattagtaccttataaaaggcctggcggggactagtttaggcccttttggcctttccatcccttctgccatagaagacccctccagagaaagcaacaaggcaccatcttggaagccaagagaggagcccttactggacaccaaacccgccagcacctccgtcttggacgttccagccttcagaaccatgagaagtaaatttctgttctttatacatta

SEQ ID NO: 125211 - DNA, 389 bp, Homo sapiens
cagcaatactctcaaagagttaaagtgttcttatccctgctttacagatgataaaactgtatctaagaaagattaagctgcacgtattctcacagttaatttgctctaagtctgactgcatagatgttactccttctgcaacacgggtaaaatccactttcattgtttcaattatccaccatgtaagtgcctatgattccccaatcgcatttctaattttagtattcatcctgagccccaaatctatccacagcattcaacagttctcatctcccttataagtcctacgaactcatccaaaaaacgaacacataatcccatatcaaaacttgttccttctcctttaatccctttcattttttttcactgattagtgaatgcatattgtc

SEQ ID NO: 125212 - DNA, 748 bp, Homo sapiens
catggtggcacgtgactataatcccagacacttgggaggctgatacagaagaatcgtttgaacccaggaggcggaggttgtagtgagccaagattgcgccactgcactccagcctgggcaacacagcaagactctatttcaaaaaagaaataaaataaaataataatttagtttaatttaataatttcaaaccaggtgcagtgattcacacctgtaatcccagtgctttaagaggctaaggtggggggattgcttgaattcaagagttcaagaccagaccaggcaacacagcaagacaccaactttataaatttttaaaactagccaggcatcgtggtgcgtgcccgtagtcctagctacttgggaggctggggcaggaagatctggaccccaggggttcaaggctgcagtgggctacacttacatcactgtactctatccgaggcaacagagcaaaactctgtctctaaagaataagaataaactataatacaataatttcaaatgaaaattaaagtgtcaaaaaataagaatgtttaacaattgtgatcatatatgtcagatctcaattttttctcaaactccaaaatctttcaaggggatatattaccctggtttttcttaaaatagccaaaagcagattatcaaatttcctgtgattttgataatctcattagagagaattcaccttattaatcccatgtatttgaatataaataatactatcaccttttcaaatatgtattgg

SEQ ID NO: 125213 - DNA, 498 bp, Homo sapiens
ctcactcgggcgcccagtgtttgccgtgtagtggactgacactaggcacacagcaaactaccacctacctaggcttaagtgatctctacatctacagcctcccaaagtgctaggattacaggtgtgagccaccgggcccagccaatatcctatatttgaagttatactatagttactgcagcaaaataaatccaaatgtactttcctaggcaaaggaaggacatctaacactgtctaatgtaacaatcttagaaaattctagtttttttgtggtataggaaatactaatatcatctcaggttatgtgcatggaaagtatttaacatctctttactaccagatagtcatgtaaagttaaattatatttttctcttaaaaattccttcttctgggtactaacaagcccagagtttgattttaatggaatttaacatttgtgtcgatggtgacttctagatttaagagagtagggaaaaacagtggaaattttaaaagtac

SEQ ID NO: 125214 - DNA, 302 bp, Homo sapiens
tgctcaatataagaatttagctgggagcagtgctcacacctgtaatctcaatactatgggaggctgaagcaggaggatcacgtgagccccagagtttgaggccagcttaggcaacatagtgagagctcatctctaccaaaaataaaaaatgtaattagctgggcataatggtacacaccttgttcctagttacttgtcaggctgacgcaggaggatctcttgaacacaggagtgccaggctgcagtgagccatgattgtgccactgcagcccagcctgtatgacagagcaagaccctgtctc

SEQ ID NO: 125215 - DNA, 355 bp, Homo sapiens
ccaccttggccttccaaagtgctaggatacatttttttccagttcttggttagatccagccgagagagattttacagagctagaaaggaattggctcactgcccctgggccataccatttgggtgggtttataggctttggggatgagtctgggaagagggcctaacaatccctcctttcgagcttttgtttgttcaagctgctggcctttgagtgccagcacttatcctgtgcaaagacaactctgatcctcaaatggatgtaatttcatattcctgcactatgccttatacataagtaagcttccaatacgtatttgtaacagagaagaggaaagagatgttggaaagaaagt

SEQ ID NO: 125216 - DNA, 240 bp, Homo sapiens
tgggacaagcccacagccaacatcatactgaataggcaaaagctggaaccattccctttgagaactggaacaagaaaaggatgtccactcccactactcctattcaacataatactagaaatgctagccaaagcaattaggcaaaagaaagaaacaaagtcatccaaaaaagaaaaagaagtcaaactatctctctttacagacaatatgattttatatttaaaaaaccctaaggactct

SEQ ID NO: 125217 - DNA, 497 bp, Homo sapiens
caactatacatatattactgaacattttttatgttcaaatgctgtgctaagtatctgaataatattcacatgaagctgaaaatctatcaaaaatacatttgaatacagatacttggtaaaatctctaaaatgcacaaagcttcatggacacatgaaatttctttactatggagaaatcaaggaaggtttaataaaagtagtaacattagagctaatctttgggtaaagaagaggaaaagacaaattgtagtgcatgctgtaactgtatataggttctttggagatagctcattgaatgcaaactttcagaactcacttcatgagtcaataggaactttacacaatggtgagaataaagtgcatcctttcaaagcacactgtccatggcgtgagagtaaccaccacactgacatttgttgaagaaaggttctcctgggttctccccactctaccctccttggatgccaattaggcaccttaggaaggacaagtgtctt

SEQ ID NO: 125218 - DNA, 199 bp, Homo sapiens
gaacatgtgaaaaccaaaattaaaaatttcatttacagtcactccaacgaaagtaatatgcttcgatttacatttaacaaaacatacacaggactggatgctgaaaattttaaaaatgctgataaaaaaataaatgaaaatctaaacaaatagacatagcatgttcatggattagaaaactcagtataataaactgtca

SEQ ID NO: 125219 - DNA, 297 bp, Homo sapiens
agacaagagtgtgcaagctcaccagagtgcatagaggggcatatgtgcatagtatattcactgtgcctggatgagaatgggtgtaggaaggagtgtaaaacagaaagggaagccagagagatctttgagccacaatgtaaactttcaatactaagctaagaagttagcacttttctctgaacagtgaaaacctattgaaggtttttgaagaggaggtaatgatatgatccagtttgtattttaggactggcactctggtcacaatgtattagattgtaaaagccagactagaggggt

SEQ ID NO: 125220 - DNA, 394 bp, Homo sapiens
gagtttcaccatgctttgctgaaaggaagaatgggcagaaaaggaagatgaactgaaatttataaggactctactacatggccatgtgccaggtggcttcccaatcctgatctcaaagtgagcagccttccctagcactggcattgaggtaggatcaagatgactagggaggaattatacaggttgagtagccccttctctagatgcttgggaccagaagtgtttcagattttggattttttgttttcagattttggaatatctgcagaatacataccagctgaacatccctaatctgaaaacctgaaatcctaaattctccagtatttcctttaagcatcatgtcggaactcaaaaagttctggatttgggggcatttcagaacaggaacact

SEQ ID NO: 125221 - DNA, 325 bp, Homo sapiens
tcccactgtcctctcctcgggttctattaatttattagagtggctcacagaaaactcaaggaaacacatctactcgtttactatataggatattacaaaggatacagatggagagatgcatagggcaaaacatgtgggaagggtgtggcacttctgtccactctctggggatgccattcccccggagcatttatgtgttcaactacctggaagctctccaaacacagtccttttggatttttagggaagctttattatgtaggaatgattcattaaacgtttggccattggtgatcaacttaaccttcagcttctcccccacttc

SEQ ID NO: 125222 - DNA, 1031 bp, Homo sapiens
cttcatggcccttactactctttgaatgcaggcatcttgtttattttattcaccccctgcatcaccaatgccttcctaaagaatcgcatctgctgaatgaatgaccaaaaataaggtactctaaaactagactcattagtttgaggtagaagtggaagagtgatggaaagggtgatgcattggcatcccaaagagttggccaatgtccccaccctcttcattatgtggtttttgggacaccataactgtggttttcggacaaagaaaagcacagactctctagccttgaggaggagcagccagtccggcagaaggtgctcagtgacatggagcggcccttgggtcaagaagttgtcctcccacacagaggctgctgcatcctctccttcacatggcagggagctcctggcagccaaattgctgggtgaggacaatcaccacctatacttttgcctgcttcatccttccatcttggggcctttgcagttgcttgcctgctggtttgctcatttgggaagttcaggaaaatgagccaagagaagcaacccatggcacatgtcctaaatctgggggtgtggaaggaaggacagaacattgagaaagcaaacttgaggacaaggtgagtgttgcaatgcaagtaagaagtacctgagacagaagaaatgtgtgttcctgcctttagatgtactgctgatgtagagacatcagcagacacctcaaatcaatgtccatttttattgttgcttttataattgtattttctgattcattattcagtgaatttaatgctatttatgggttcatttggttcaataaaatgtatctgcacttcgctagacattgaggatacaaaaataagtaagacaccacccctgccctcagagagcttatagtctagtgggagacagacaggtaaatgtgtcatttcagtgccacatgataaaaagcagaatagcggcatgtaatgacatggtgctgtggggacagagaaaagagacacttgtttcagcctgccaggtagtagtaggggt

SEQ ID NO: 125223 - DNA, 451 bp, Homo sapiens
ggtcatagctgactcctgagggtaaaaggagggccagcgaatcgtatcacaatttcgccgtgcccgatatcatcacagttccaccgtgccccgtatcgccacagttccaccgtgccccgtatcgtcacagttccaccatgtaccgtatcacaattccaccgtgcactatatcacaattccagctgcactggctttgaatattttctgtactaaagccgtgaaactcatctgatcagaaaagctacgccccaagcctatgtaacctctgattgtcgctggtgtgtggcttctgttctgtaccaagaaaaagatgcagaaccacgttacaacaagacactccctgaatacacacaactccacgtgcacgcagacttcccaaaagcacacaaaagcatgatgctcatcgcagctctctggagaaatcggactcaggtggacaaaacatctgggt

SEQ ID NO: 125224 - DNA, 257 bp, Homo sapiens
tcttggctcactgcaacctctgcctcccggcttcaggcgattctcctgccccagcctcctgagtagctgggattacaggtgcctgtcatcacgcctggctaattttttgtatttttggtagagatggggcttcaccatgttggccaggcttgttggcatgttgaccatgttggccaggctagcctcaagtgatccacccgtcagcctcccaaagtgctgagattacaggtgtgagccaccgcacctggcctgaaata

SEQ ID NO: 125225 - DNA, 397 bp, Homo sapiens
tgttttctgcctcttgagttaaaggattcatccactagaactggccaccttaaggccatattatattgtggtggacttgtcttaaatggaatttcctgcttcttcttaaatgtataattcctctgaattgaatataaatttcttcatttctcctcattgactttcaaagctcttcttccttttgatatacaaagtttagccttgttcgagagatctgggatttcccttacgttacggattattttgtaaacagaacacccaggctcctcccctcatgtcctggctggaggtgaaacattaaaaagagattttaaagcagggccctttactcccttccttcctggtttgtggccagggcacagggcagctctgctccatccaccctttgtccctgtgc

SEQ ID NO: 125226 - DNA, 494 bp, Homo sapiens
atacctgtaagtcccagcgacttggggggctgaggcaaaaggattgcttgagcctgggcaacagaggcttcagtgagccatgatcccgttactgcactccagcctgggtgacaaagtgagatcctgtctcaaaataaataaattttatatatgttgtcacatggctcaaacagttttcatgtaaagttcactttgagtatgtgggctattatttgaatttttggcctttgaaataattatgaaaacattcatcgttattatcctggagtttcactcatttgcagaataacttcattctgaaaatgatataacacctcccaagactaagtaatattaacagagttaatattttatctttttgcccttaatgcctcctatattgctggggacatgatagggcctgtgtgtgaatgtttgttgaaatgaatgaataatactttttaatatataggagaaaacctaagcacagcagtttgtgtgagacagtgatcaga

SEQ ID NO: 125227 - DNA, 232 bp, Homo sapiens
agccagatgttcacctgtctgacaactcgtccaagaaggcatgtaattcacttatccaacattagacagcaaatagataatcttgagtccagagctcttaattcaaagatctcgtgatctgcccatctctcatagtggttttcaagtcttgtttccatttgactgacatcttatatttaaatccatcaaaagaggcactagggtttccctttctaccttcaaaaattctaag

SEQ ID NO: 125228 - DNA, 282 bp, Homo sapiens
accggcctttcctcagcttccacaggtgacaccacccgtcttcctgtcaccgacgtttcctcggcatccacaggtcatgccacccctcttcctgtcaccagcacttcctcagcatccacaggtgacaccacccctcttcctggcaccgacacttcctcagtatccacaggtcacaccacccctcttcttgtcaccgacgcttcgtcagtatccacaggtgacaccacccgtcttcctgtcaccagcccttcctcagcatctacaggtcacaccacccctcta

SEQ ID NO: 125229 - DNA, 154 bp, Homo sapiens
ctaatgtttgtatttttgatagagacgaggtttcaccatgttggccaggctggtcttgaactcccgacctcaagtgaaaacacaacctatggcctccagacactcaaatgaaaacagtggccttggcggccaaaacaggggctgccctaggagt

SEQ ID NO: 125230 - DNA, 487 bp, Homo sapiens
atgaactccttatcagtgatactaataataaaattaatgacaatagctagtatttactgagcacttgtgtgtgataggtattacttctaaggctttacataaaatacctcatttagtcctcataaaagttctattagttagacataataatcaccacttaaaaataagtaaactgggttgggcatggtggctcacgccggtaatcccagcactctgggaggccgatgtgggcagatcacgaggtcagatcaagaccatcctggccaacacggcgaaaccccgtctccaccaaaaatacaaaaattagctaggcatggcggcatgtgcctagctgaataatctcaaaaagtgaccccacagaggatttctttctgattggtttattaccaatcctttagttctagtgtctagggatatgcaaagtcagaaaaaaaacagtcaccacccaaaagaaaatagtgcaggggcccgctagctgaataatctc

SEQ ID NO: 125231 - DNA, 1679 bp, Homo sapiens
cagtgccctctctcagctgctaaccaggcttccccattcccttccccctctactattgcctcgacccctttagaagttccttttccccagtcatcctctggaacagccctacctttgggaactgcccctgaagccccaaccttcctaccaaacctaatagggcctcccatctccccagctgccttagctctagcctctcccatgatagctccaactctgaaagggaccccttcctcttcagctcccttagctctggttgccctggctccccactcagttcagaagagttctgcttttccacctaaccttcttacttcacctccttcagtggctgtagctgagtcagggtcagtgataactctgtcagctcccattgctccctcagaaccaaagactaatcttaataaagttccctctgaggtagtccctaatccaaaaggcacccccagccctccatgtatagtcagtactgttccttaccactgtgtgactcccatggcctctattcaatctggagtggcctcccttcctcagacaacacccacaactaccctagccatcgcttcccctcaagtcaaagataccaccatttcctcagttctgatttctccacaaaacccaggaagcctcagcctgaaggggcctgttagtccacctgctgccttatctctttcaactcagtctcttcctgtggtgacctcttctcaaaagactgcgggtcccaacacccccccagattttcccatttctctgggctctcatcttgcacctttacatcagagttcttttggttctgtccaacttttaggtcaaacaggtcctagtgctttgtcagaccctacagtgaagaccatttctgtagatcattcttccacaggggcctcttatccttctcagagatctgtaattcctccccttccttccagaaatgaggtagttcctgctactgtggctgcctttccagtggtggctccatctgttgacaaaggtccctctaccatctctagcataacctgcagcccttctggctccttaaatgtagctacctctttttcattatctcctacaacctctctcattctcaaaagctctcctaatgccacttatcattatcctttagtggcccaaatgcccgtttcttctgttggaaccaccccacttgtggtgactaacccctgtacaattgctgcagcacctactactacctttgaggtagctacttgtgtttctcctccaatgtcatcaggtcccataagtaacatagaaccaacttcccctgctgccttggttatggcacctgtggctcccaaagagccttctactcaagtagcaaccactctgaggataccagtctctcctcctctgccagaccctgaagacctcaaaaatctccccagttcagtattggttaaatttccaacacaaaaagacctccaaactgtacctgcctctcttgaaggagcccctttctctccagcccaagcaggactcaccaccaagaaagaccctactgtattaccgttagtccaggcagcccctaaaaattccccttctttccaaagtacatcctcttctccagagatacctctttctcctgaagccaccctagcaaagaaaagccttggggagcctctccctataggtaagccagccagcagtatgacctcccctctgggtgt

SEQ ID NO: 125232 - DNA, 491 bp, Homo sapiens
cagataatattcatgtggtctaccatgatgtttacttgcctataaatagttaaaatgtagctaatgatgatacagtacttatatttttaatggcctttagtagtttaaccttggttacaatataatactttgaaaaaatttggaaaatacaggagagtattaatataaagaaaaacattatttaaaactgttgcttggaactaagttatgtttatttctgtctccagatgtttctgtcttttaaattatcttagtatgggtgtgtgtatgcatgcgtacgtcagaacacatttagaggtctcaaataaaagattgcctgatctcaggatgagtgaaatcttgacaataagcttaaaacaaagagaaaccatataaaaaatatagattcatttgacttcagttttttttaaaaggaataaaatttaaaaggcaaactgggaaaaatacttctcaatctgtttcactttactccttattcctttgttagcagt

SEQ ID NO: 125233 - DNA, 578 bp, Homo sapiens
tcctgtatttctccagaatgtcacgatgagtaatgaacaaaagcccacccagagctgtaagggctgttctcagcagcaacactcagtttggagggactggaggtcagggctattgtttggctgagcctttattccagaagactgagtaggtgtcaggaaatgaggctgggctcttgaagatgggtgctttgaatcatgttttgttacttgaacaaaaataatagtaaggagcccattcataaaaacaacatcattttcttcaacaacatgtactctgtatcacttcccttgtgaacggaataattctacgtctgtgacagaatcccggaagacagaaccatagcaacactggcacattcatttcttcttataactgacaatactggacacacttatgtgggctggggccaagctgtgcactgagcactctatgaacaccacttcatgtcatcctcacaataatcgggtgcaggagacattattaatattcacatcttacagctgtagcaacagatgcatggtgagccgaccaacctgctcaaaggctcacgggagcaaggggcagagcctgcactcta

SEQ ID NO: 125234 - DNA, 758 bp, Homo sapiens
attcttagaaaacaatttattctaaatgatgatgcatatagaaaaccagtgtattcttttatttcttttaatactggtggcaaaataggacgtgtctggaaaaccataaggctacttgggatactgtcccattagcattgctgtttccatgacaaaccctattttcagatggtttgatttgcctattttttttttaaaccagctataaattggggtcaatttcccccctcacagtgtacttaatttagcttttggagtaaatatataagtagtatgaaagacttctgaagctcttctttctaaaaaagcagttttccacttaagctttgtggggacagagagtcatatttttaatttcagagccagccagtgtcaaacacgtgcaaaagagccgggccggattttttcagcttgtcctatggtagtcacttgtcagcctgagtttactggcctggtccttttgtctccactgtaagtactgaagccttctggtgtagttgtatcaccttaatgtccagcatttaactaggaaaggagactacaatgaagagttggtggccaattaagaaaaataatagactacatcataaatcatttcaggacttgagtggccgcagatcactgtccctgatagcatgtttcaaccttggtatacattttttttaagatgcatatttactgtgtgtgcttttgctttctaatccatctattgactattggccacaatttatataatgcacatgcaattaattgaaacc

SEQ ID NO: 125235 - DNA, 372 bp, Homo sapiens
taaacttgctctcacttctttttcacacgaggtccaagaaccctctcttggggtctggattgggacccctttccagtgacatccgctctagactaatcttatgtcctgtggttgatgaatcgggaatctctggtgaataggaaaaattgttggattgggaggagattctggtttctggtttccctggctctcatttaatatgtaaccctgagtaggtagctttcccttcctaaatcagtttcctcaactataatgagaggatttagatctccaaagtctcttttagttcagactctcaaaaaaatccaaaacacacagccaggcgcagtggctcacgaagtcaggagatcgagaccattctggccaacatgg

SEQ ID NO: 125236 - DNA, 653 bp, Homo sapiens
caacaaagctatttttcttcttcctattttcttccacacctaaatggagcgaaatttggagtgagcccgaatcatagaagtatcctcgtctatttgtagaactgtatttcactcttcccatataatatgttttctttttccttaaaatcttcaaagagattgattgtacaagtcttattatcccattcttatgactagcacttgatttgtttgtagacattgagtgacaaatgcagtgcttaatttaacagagaaatctaacgatatattttcttataaaactatcccctttttgtctggttcttagtggaaattgaacaattgctcgagccagccctaaaatatgattttaaaaactaatatgtttggggagaattgagtaatgaagtgtcatattttgctcttggtgtttaaagctgctgtcatacattgtgatggtctgtcctggtaaacgaggctcccagcattcttgcagaacataccttcttactaaagcccttgcagtaaattcactctgtattaattacctcctctcctagtggcagacatactatttcctgaatgctttcatcagcgtctctgggtaattcattgcccagaaaatgcctcttacctgtctattatagacctcatcacgtgtattaagaagatta

SEQ ID NO: 125237 - DNA, 349 bp, Homo sapiens
  misc_feature (16)..(16): n is a, c, g, or t
aagaaaaaagaaaganccagaattgggatgacattggataagagcaaaggccaagtgacttctccgaggtcacaatgcttctaagcttggtggtgttgccacagtgcatgtggcttcataactctaataacagtagcaagaagagaaacagccaaaacagtacaaccaattccagttacctgaatgaagctttgggaaagtataaataatctaaattcaaatgacttttttccataatgatgatgtgactcaaaatatttgctggaattaatttcttcctttcttctccttttttccccccgtttccctatggaatgatagtagaattaccaaaagtaggaatccaaaa

SEQ ID NO: 125238 - DNA, 193 bp, Homo sapiens
acaataacggaacgggttctatcacactccattgtaatgaattacctgtctgttcttcccaaagaaacaaaagctccttcctttgttcaattagtagatattcactgacaccttcctatgcataatgcacggagctgttaatcaaatggtaaataaaacaaacattggccttttcccattagcagggctcaca

SEQ ID NO: 125239 - DNA, 676 bp, Homo sapiens
gagagtatggtatgcagtctggtgaatttgtcctagtaaacctgatttttagcattacttaagacataaattctcaatctccaaggaattatttttaaacatattattttcacaagtacccgtgaatggatgtggtctatgggaaacaccaaaatagatataaaattgatggtcttaaaatttgtgatttaccatgcatgttacattagttatttgtataaacatgatgttgttcctctttgacagaatttagaggttggatacttgatgcatctgaagaaaccatagaagtttgcgattatattacagaattcctctcatgtctgtgcaaaaaccctgcactctgtgttacagctcttcagtctatttcctattctgtaaataaatgtctaggtattgtaattatacatgtggcatcctttttactttagtattgaaataacaattctttatatcgtcactgtcatgaattcttacctttgaatagcactttatagctttcgggatgttttctcttattatcttattaaatatttacaattaccaagaggtaaacatggtaggcatgtttatcctctctatgtaagaagtaacagatgtagagaaattcttatttacaaagttcaggtgggaagtagtagagctgagatttaaacacttgcattttaacttgttt

SEQ ID NO: 125240 - DNA, 365 bp, Homo sapiens
acattgtttacagttttaagtatgttaaatacattaagtaacgatcagtttgcataatggtttttttagggtagagtttaaaatcagtaattcttagccttacataattataaagtaatggctcattttttgtttcagtattagatagtaaaactaaggctgtagaccagtccctggaccaagtgttaggagacctgagttccaatgtggttttgcctgggtattcttatttgtaaataatattattgattgaagattaggggaaatgatacatgtgaggaaagacatttgtaaaatttcttgggtttttactacataccgtattcattttttaaagaaataaacattttgaaagttacgtttta

SEQ ID NO: 125241 - DNA, 407 bp, Homo sapiens
aggcgttgacctcatcttgggaaagaaagcaaaggtagagctctgctgtccttgaacggtgtttctgcttccagcttctgaaattctagaaagtctgttttcctgcctctggttttatcaactgtattctggtgtttctgacacggagcggggtccagtcacaacccccacacatcatttatcatcacatgtctaggtgtctcgggccacaaatttgttttctaaattgtcagctgcctgctgcttgcgggctgggcacgagctgttctatcacactttgctatttgtcccttgaatgtcatcgtgtacacgtggcattttccagagtcactggattccagctgaaatcattgttgacttttaaaaaaatgattttattaatatctgtagctcaggttgtgacactt

SEQ ID NO: 125242 - DNA, 98 bp, Homo sapiens
aaaatgtgacccatgttgccaactcccaaaagccaccaggtgacttccactgccgttagaatgaaacccaaactctgcactccagccccagcatcaaa

SEQ ID NO: 125243 - DNA, 184 bp, Homo sapiens
agcatcaccttggtagtcacagtaaaaatattataccatggaaatgtgcaaaagctacaaatcaggacggttcttcccgagagtcagttgttaaacatttatgagcagccactggtcccgctgcatctggcacctagaggttctcagtgtgtaggacggggacctgtctctaggtgacagggag

SEQ ID NO: 125244 - DNA, 304 bp, Homo sapiens
taattgccttattaggaaagactgctgtagaaagatgatcgagtgaactgttcatcttaacatcatccagataaattgagctttcatgtttaaacaatacctttaatacagactctgctgtaaacttaaggttactataccatttaaaaatagttttcatactaacttttgttttatgactatctaaataatagtcaatagtttcaaaagcatatgaattcaccaaaaatcaaaaacttttaaattgcatgactcagaagtaaactaccacattcattcacactagcattattttccctgggtg

SEQ ID NO: 125245 - DNA, 513 bp, Homo sapiens
atgtgtttactttcctgtgtggctaaaaatgtctgtaaaagtgtacagatttgttttccgtggcattttaaaaacataaatgatgtcctggtgcagctgtgcagaacttgctgttcacactgaataatgtgccttcgagggccttccgagaagccagcgtgcagagacttagccaagcgcttagcctgccacgacccttctggaaatgttacctgttattattattaattgtagcaagccaaaattgggaaagaggctgaactgggatttgtagactggggaaaactccagatttttaaattggtttccaagatggttaaaccaagataacaccaaatctaagaactaggaaggcgtaggtctcgcagcctccatcagtcaagtgatttgcaacgctggtcctgcttccagaaggtctgggcacagcgggagagaggcacaaggccgattatttctctgttctgttcagctcgtaccaaggaccagctctaggccctttgcagggagagaaag

SEQ ID NO: 125246 - DNA, 789 bp, Homo sapiens
cagccttttgataaaattcttaatttttgaacaagtggttctgcatttttatttggtgctagaacctgcaaattatgtaggtggtcttaaatctacaccacaaagtttgtgaaaaatctatcatctatctgtctgtctgtctatctacctatctatctatctatcttctatctacctatctatctccatcatctctttatcacctggcacattgtaacatttaatgttcttttttactattgttgccattgtaagaaatatatggtggatttttttccttttccatacctgtacagttaacttgtgaaatcttggttataggatttttaatttgtctgtattaagttgcatctttttagatataacttatcactctatgttgtcaagagtcatttttattcatctctgcaacaaaatgcctccatatcagtgaactagttcagcatgtcatcatccagatttgtgatgcaaaccttgcatagaacagcactgagaagcatgctctgtagcacagcacagaaagcttcctttcatgttgatcattattgatttgccaataccttttgatagaatggtttacttagttcccattcacccaaatttgcaattaactagttcttactacatcaatttcatttgaatctgtatcataaaatactttttcaaatgtattgctaaaatatagacacaatttggctactagtccctgttgaagattgttcagtaatttctccctaactctgaaaacaatttaggtgaaattctacagacttaatattgaacaaagaa

SEQ ID NO: 125247 - DNA, 515 bp, Homo sapiens
gccctagcagtgttggtttgtatgtatgtatttataagatattttgtaagcatcttttttcttagttccttataatggttttttaatacactatctcttgatgttttaaacatacataacaaaaatttccattttagtcatttttaattgtacagctcagtgggattaaatatattcaccttgttttgcaaccatcaccaccatccatcttcagaacgtttttcatcttcctaaactgaaacctcataccaattaaacaataacttcccattaagcagtaccaccgcagcctccggcagctaatcatcctactttgtgtcttcatgaatttgactactctaggaatctcagttaaatggaaccacgtagtaattgtcctttcgtaaatgaacattcatcagtgttcatgctttttttcttgccattttgctttttttttttattattattacatttttttaatacctatgaaagcaacaaagttgtaaaagtcatatagtcttactggccacaca

SEQ ID NO: 125248 - DNA, 358 bp, Homo sapiens
cctcaaagtatggcaagattataaggaactcagatgagaaggaggccacactcccaggctatttgtactgctttctctcagattttgtgtctctagagtggagataatattagtgttattttgacttagagccattcttgaaaaccattgttaaaggacatagtcatcataatcataatcttaatacaggtccccccaagagatagtcatagtgatggtaaagtgtcaggattggcacttgtgggatgatattaggacttctgttctcccatcttccttttaggcttaagattcttactccaagccttacttaaacttgctttcaccaaataatgtgctttcagttatacacgttcag

SEQ ID NO: 125249 - DNA, 294 bp, Homo sapiens
accttttagtgccagcattacactaggaccagaggtgtgtgcaatcctacccctaatttcatttacttggtgtagtaaaagttaagagtgggatgttaatattaagcttgtgtttatgctaatacttatgaaggcattccctggtattatttcttagtgtctgcaaagcatcttgccgctttgaaggcccaactggaaaatctttactagaaagccatgttgcagacctgttaggttttagctacagaaaagcaatcaactatagaacatgctaacagaagtgaaaattaggct

SEQ ID NO: 125250 - DNA, 386 bp, Homo sapiens
tctcagttgaggtgacagaaagactgccttgtgttcactggaactctgtgccactatgagaggctgttctcaaaccccagcatggaataagctgcctccacaatttgctatacctctataaggttccctgttccttagtagcttctcactcttgcagacaaactttagtataaaggtgggcttcccctctgcaccatttagttcccaggcttaggaggtgggtcaagaacactgctgccgtttacatgagcatgtggacaacgccgggctgcaactcctgatgaagggaagtgagaactaggtctcaggacaagagaagctaccagaagactgattaaacttagtttgttccgtcaggttatatatagagaggacctaatgaagca

SEQ ID NO: 125251 - DNA, 475 bp, Homo sapiens
taataaattttccacagggagggaaggaggatagggtatgtttgttttgtgtttttaaaattgtttgctctctgcatttccccaaagacatccaggctgtgcctttaccgtcagcttgtttctttggtcagtgtctgccactgtgttcctgacctacagacttgaaaggcttgtgcagttgtcctggccttcagtatctgaggggcactggttccaggatttccctccaatattaaaatctgcagatgctcaaaccccttacctaaaatcggaaattatttgtagaaaatctatgcatatccttctgtatacttttagtcaactatagattacttataatggctaatacaatgcaaatgctatataaatttttactgtattgttttggatttttttgttggttttgtttttgaatagtttcgatccccagttggttgaatctatgcatttggaacccgtggaaaaggagggccag

SEQ ID NO: 125252 - DNA, 463 bp, Homo sapiens
ctcctccagtgctgcaggaggcgggctgaggccccacctggtggctttcacctgacccagccctgagtcctctccaagcctctctccggcccctcccacctggccactgcctcctccagtgctgcgggaggcgggccagggccccacctggtggctttcacctgacccagccctgagtcctctccaagcctctctccggcccctcccacctggccactgcctggcattgggatcgccccaaaatggacccggcccctcctgttatttgctgggaagtccagcggaggagagggtgcaggtcccccgctgagcctccagtctctgtagactgggctgccggcccttcagccccccttggagcccctcccgccacagccgcaccttctgctcccggcccctccctttgtatttggagacaatgtgttgtaataaagcttaaagtggatgttttccccacgactcc

SEQ ID NO: 125253 - DNA, 662 bp, Homo sapiens
ggggagaggaaacaggtggaacccagtggacactcagggtcaaggaaacagggatgacagtgtgggtagaccaaggcagacagacttcataggacattgcaccagaagggaaaaggtacacagagtgagaaccccagagatttcagagggttcctctcaagtattcagtggagcactgatcagtacagggtgaagtcagtaagccaaaagccaaaatcttgagcataggagaaaggagaagtttgcagagaagtaagtattgcctaatggcatgaactttagaggatctagaattttcacagaaagaagaaattacgatttggaaatggcaaagagaggacaacagagatatatacccttcctcatggctctggaaagaaagaaacaaaatgtgaacccattaccttagcaacttttgatttgtaaatataatgctgatgaacaatggatataagtattgaatgaaaaatacaatgcattatttttctagtaataagaacttagagtttatttttaaactgtcttaactgaaatggcctataaacatatccagctttgtatctaatagtacagtgtgagtgtgtgtgtgtgtgtgtgtgtttaatttatcacatttcttacaaagtactgttgtctgccttagacatgtttcatttatagcc

SEQ ID NO: 125254 - DNA, 458 bp, Homo sapiens
tagattaggttggggtggagttgaggcaggaaggctcctacagcaaaggaggtctgatgagctaagacttggttaatgagaaacaaacagtgaaggtaaagaggcatggggcttggggcaagggctagagccaaaagctggcaggttagagagcactggaagattatgcatttactagctgtgtgacctcaggcaagtcacttcgcttctctgtgctgtgtggtttcctcatttgtcaaagaatgggaaaggatacttaactcatggaattttcatgaggactaaactttataagaaacgtgtatgctgcttggcaatgaaaaggaccttttaatagagtaacaaaggattgtattttctcatgaataaggaattaaaatgagttagaggcaattctctattagttaatttaacaagttacttagcagcctatcggtctttcagagcaaataggttta

SEQ ID NO: 125255 - DNA, 153 bp, Homo sapiens
ggggcattaatgtttaagctatttagctaaatgaaaattatttttatgaaaaggttaagcgatctatacacttgtatttaaggggatattttgcttttcctgtacagatttatcttcactttaaagttgaaacatgaaataagccatggaaat

SEQ ID NO: 125256 - DNA, 283 bp, Homo sapiens
gtccagttccataatggagaaaaccccaagtaatgaaatgaggaatctacctacttgctaaattgaaaattctttatgagcacaaccaaactgagattatttacatgcttatagactctcacaatgttttcccaagagggattacatttcccattccaaaagagagaaacacagaactgcatttatctggaaaatgcaagaatggacgtctatgcaagaatggacgtctatgcaagaatggacgtctatgcaagaatggacgtctatgcaagaatggacgtct

SEQ ID NO: 125257 - DNA, 531 bp, Homo sapiens
gtatcaggtgttttttgtctcttgacatttactaagcagtataacttcaatttaaacaattttgtctcatactcagttttgtttatggtggtagacattattatcatcattttacagaaaagatgaacaaactgcgattcagagaacctaaaagatttagtgttatcaatgctgtgtcattttaatatcattaaaaaccatagaattgctggtgtttgtattgtttctctctatagcactttttatctttcttgtttttgctctctcttgctttgtaggtttcatccatccttctttcatcttcccttttacttactgcaccctctgcttccatacacataccctaaattaggtatctcccaagggaaaaaactcgccagaactctcttctcatagattgtcagcatgacctactctctcacctccttgagaattttgatgttttggatcaccttttctctgaagcctttcctgactgtcctatttagttttcatctcctcccactagaatataaactccatgaggttcca

SEQ ID NO: 125258 - DNA, 789 bp, Homo sapiens
atgaaataaatggggtggaatttactttcttcatttataactagatgatttcaattaatttgattttcagcaaaagcatctttatcagttttgaccatgttggaaactgaacacagcccatctggcattattggcaccacattggaaatgtatataatcttatggtgaaagtacaattacaagtgtaattctgtcttgacgtttgcttgaaattcatctcttttgggttatatgttaataatgagggcggaaatttgctgtgagcatttacatttgatctagacacaggctaatattgtttgcctgcaatatatttaacattccaaaactgctttctgatttatcttatgtatcttaaaacttacagctattaattcttctcatttttccactaaagctagcataccacaaagcaaaatatgaatatattctataagttgtagaatttcttaagatttatctctaccattggatgaggcatcataggcccttttcctcaaggaagtggaaaatattctgtgccagtagttgtcagtaaaagaggatatctgtccctaaagtttatttcatatgaatattaatattccttatatggccatcattttcagtgtttcattttccaaatgcactttctaaaaacatgttaaattatggtccattactaaccactaatggatgattttatgactgaattctgcaccaaaaatgattatttgctgtgtgaggacagatttgcaaaacaagatgtggtagcatttaaacggccacttatttttagtagaagactgc

SEQ ID NO: 125259 - DNA, 437 bp, Homo sapiens
tggacagcatcccccgagggtctaaggagcggcacctgtgggctgttttggcctcgggtcgccagtttgggaccagttgggtcttcgtgatcatcttggctgaacctttatcttgcctccctggaaacccatcatggggaggggaggtcaaggaccccgggcccaggcttcctggacatgcctcacggatggctgacctagggagccccaggcacagaagtgagctaatctggaatgaggccggggaattcgattaggcccaggtcacaggaaacagtgaatgcaggatgctgaccaggcacccctatgtgggtgtcaggggggtgagggaacaggcaagagggagggctgagaaagaggtgaaccctgggtctgggggaagtggtcagctggctggaacgttgtgtgcagacaagccctctgcagcagttgtggcc

SEQ ID NO: 125260 - DNA, 469 bp, Homo sapiens
agaatattggacaatttaatagggaacgttcatgtcggtgactcatagaaaaagttcagagccatgccacgtagaaaatgaatatgaatgtattctccaagaagagccatatccaaaaagaaaaatagcagctattcatcatgatgcaagatttcaacatatagttgatgatcgtgaaagttagctaggtcttatgaatgatcgccatgcaaatgcccataatctattcctgtaatatactttttcatatgttaaattttctttttatgttgtttcttttcttttttagctttttttcactactttaaattgtgaacattattttttacaattttttatgctatgtgtttcatcttcgcgtcatttctgatatgggaggtagacattgtgtagagattttttgagagttctaatttgtcttacgcattattacaaacttgacctcataaaagttcattatcacaaaaaa

SEQ ID NO: 125261 - DNA, 303 bp, Homo sapiens
tggccttctcagcaaaagactctaacacctttcaacatggagaaactcaactcaacagcccttggggtcactgcagatgccccacagttgtgagcactgaggacctcaagtgttcataatcatgaaccccagaggcctgctttgcagaggactcaagaagctttcaccactgaggaaaccaatagccagccaagccactgcagacccccaacagcttttactaacaagggcctaccagtttttcaccttctcagacttcacttgcctaagctaccttagtaagcatcaccatgggcaacccag

SEQ ID NO: 125262 - DNA, 325 bp, Homo sapiens
cagccatgtggaactgtgagtccattaaacctttttttctttgtaaattatccagtctcaggttatgtctttatgagcaatgtgagaacagactaatacacaatgctttcaaaattatctccaacctagtattctatgggccagtcaagttgcaaatcaagtatgagtgaagaatcatacttcaggcttgcaagttctcaaaagctttacctcccacatacccttttcttgggaagctagtggatagaggatgtactccaccaaaaggatgggaaaatatttgagaaaggagatctacacagagagaggcagaggtctacaggat

SEQ ID NO: 125263 - DNA, 590 bp, Homo sapiens
aaacaactctgtggggacacttggatagagaggattttcccgaagctgtaaactttggaggatggcatgactggtctcctcccagccggagcggagctgcggcctctcccccctcccttggcctttgctggcacctgtaagcccccggaggcttcagtctttgggccttccaggtccacgctagctggctgctgttttctgctacaggaagtggtggatctgagacttggtactccgtcccatcgtctccacaaatacacccgttcctgtcaggccgcgtgttctggtgttgtttggaaatgagggggtctagatttcaactgacctcttacggacatacagggtaagcgttggtacttggacgtgtagatggagaaagtagagtaaaagacaaacgcatagaaagtagattgcaccatcagcctttctagggctgtgggctgctttgcttcccgtcactttcactccaggaacaagggactaatatggaaaggaacctaggaaccgggaaacccgagcatttattaggctcagctgtatgatttttaatgtgtgtttctttatctgaagtgcatgaactaccttgtagg

SEQ ID NO: 125264 - DNA, 530 bp, Homo sapiens
ggataaaaatttaaagaataggacttccctcaaccaaatagaaaatatgtggttgctatgtttttttaaaaaaacaaaaatacagaaaaatatatagaaaaaggtgaaaattatccaaatcccacctgtatacacaggtagaaatatatgatttcatgtaattgggattgtactctataagctaatctataatctataatctattttaatcactcctttctatgttgttgaatataattttacatcaaaattttaatgcctgcataaaattcagttatacatgtatatcctgttaatttattcatggtgacattcattcatcaaatatttattttcagtcttactatgtagcagacactgtgctaaattctggggatgcagcagcaaactcctctctcagtggatatttaggttattgctgatttttctgttagaagcaacactgcattgaacatccaatactgcaacatgtctttgaatactttattttctccttagaataagttcctaagagaattgtctggtcaagg

SEQ ID NO: 125265 - DNA, 466 bp, Homo sapiens
gggtttctccatgttggtcaggctggtctcaaactcccaacctcaggtgatctgcctgcctcggcctcccaaagcgtcatttctggtgttcttacttcttccctatgattccgatttgcatgtggtatcactcctcttcagcctgagctccctttaacatttcttctagttcagatctcctgatgatgaattttcttacttttcgttaatctgaaatgtatttattttgcctgtattcttcaaggttgttctcatcagatagagaattctgaggccaggcacagtggctcatgcctgtaatctcagcactttgggaggccaaggtgggaggatttcttgaggccaggagttcaagtccagcctgggtaacaagtgagaccccatctctgaaaaaaatagcaaggcatggtggcatgcacctgcagtcttggctgcttgggaggctgaggtgggaggactgcttgag

SEQ ID NO: 125266 - DNA, 285 bp, Homo sapiens
tgcctcaggctcccaaactagtaggattacaggtatgagccactgtgctggcttagcctgcattttttattgatatttttcaattggtttcatttacctctaaatgtagttgtagtctgcttaagtgccataattcttaccatatttatattttcagttctatacttggattagttgatgactttcaaatcattcaatacatcctctcaatttagaagattctacagatgaacaggaattgaaaatgtgacatgaaatcttttttaaataacatttacccactct

SEQ ID NO: 125267 - DNA, 446 bp, Homo sapiens
gctaggattacaggtgtgagccactgcacctgtccccagtgtagttttgggggacactcctttcccctgacatgggagggaagagttgagagcaggggacctttggagacggcacaggaattgaggaagttcttggccccaacctttgaaattcttagcgttggggatgagctcagtggctgagttgtcaaagacagagcttgtggaggataagcactggaggaaaggagtgcagattcagagcagctgccacgtggaagggagaggtagccagacagagccgggctgtcagagagtgccataggaccatgaacgggtgccgccatttgtgtgtgtgtgttttttttttcacagatctgtgtgtgtgtcttttctttccctccagcagactgggcagagaagccagatgagggtagacccatggctgagggcttgcatagcacgtg

SEQ ID NO: 125268 - DNA, 389 bp, Homo sapiens
gcatgattctggaaagaaattctgtttaaaaagatgagcttcagtgttaaaaggaggtgggaataaatcagaaaactttcatagcttttgaataaagcatgtaatttttcaccaaaaggagagaatttataatgggggagagagagaaaggaggcaatgaggacagccaagggaatgctggaaccattttatccctgtggcttagttcttacagataaaaaatctggctggattctctcattaacaggtgtgtggctgtgaataaaccactgaaacaatcttggggttcagttttttagtttataaaaagatcgggccaggtggtggtggctcacgcctataatcccagcacattgggaggcagaggcgggtggatcacctgaggtcag

SEQ ID NO: 125269 - DNA, 306 bp, Homo sapiens
tagggggctttctggatgtcgtcccgagaattttcctgtctcagggctgtactttctgggttcccggtggttgattgctggtctctaatgatgcagtggaaagggcttgagatctggcattggaaaattcagttctgctaattattgttttgtgacctcgaccaagatagtgctctgagcctcagttgtgtcatcttataaatgggaatcataatgcccatttcatagagttactatgaggattgttggtgaaaagcgctttgcaaatggcaaaggattaaacgaacatcagttgttattgatact

SEQ ID NO: 125270 - DNA, 443 bp, Homo sapiens
aaaccactcccactttcatgacagcattcatccatttacgaaggcagagccctggtgagctaaacacctcccaaaaggccccacctcccaatgctgttgtattggggattaagtttccaacacatgcactgtgggagacacatccagaccataccaccatctttgcccaggatcatgatactttttattaaataagagaatcataggataatgtagtatacaagaattcagacctggctcatggtggctcatgcctagaatcccagcactttgggaggccaaggtgggtggatcacttgggcccaggaattcaagaccagcctgagtaacacagcaaaaccctgtgtctacaaaaaatacaaaaattagccaggtggtgtgcacctgtagtcccagctactccggaggcttaggtgggagggtcacttgagcctaggagatcg

SEQ ID NO: 125271 - DNA, 442 bp, Homo sapiens
tcgtctagagatcccgtgtcatcccccttcgtctcatgtgtccttttagcaaaattagatagtccatcaccaaataccgcatgatcaggtccttcctgttggatgactaactgaatgaaaataccaaatttccttttttatccttagaaatatatcattcagtcatcaagcgcttcagctgatacgatcagtgtcaccattatctttggaatctagagtgctgttctgtctctatgccttcctcttctgaatcatctcatcattgtgaaatctcttcctttctcaaattttcttgccttagccatttgggcataaagaaggaattctgaatttccagctgcattcagtgaaatctaacacaacaccccgagcatggtgtcgttgtcttcttttatacattcttgagaaatactgtagaactttgggcactgccgcaagaaaa

SEQ ID NO: 125272 - DNA, 594 bp, Homo sapiens
atgtgcagggagggtagggaactatgtagttaacacatctaatatctctttatttaaaacacactaggatattaagcccatatctaaagtcaaaatagtaaccctgttgatcttgcaacatgagggacctaatgttaataaagcttcccccaaattttgcctccagttgtttcatttctccagaggtctccttgtatctgatcaccactgcacagctcaggcagtacaaggaatccttcctcagtgcagccctctcacctgtgaagcaccagcccaccattccccttttcagaaagacaaccaatcattgggtttctcctgtcttcattcctccaggcaagaaacctcagggttatctcagacttctatcctctcttatccaataattccacaagccctattggttcttctttaaaatctcccttacatccatccaacctttccattccatcttgactttggtctttttcacatggtagcagtaactcagtctccttacctcaatctccctcccatccaacgacatataaaaatatcccattagattaattctacctaaaaactgctttcatttattgccctacctcaaaatga

SEQ ID NO: 125273 - DNA, 104 bp, Homo sapiens
catgaagcacttagtccagagcccagaaacactcaataaatagcaactaaccaggtgcagttgtgcacgcctatagttccagctgctcgggaggccaaggaaaa

SEQ ID NO: 125274 - DNA, 373 bp, Homo sapiens
ctcccaaacctgcctggggtgtgccccaccccatgctcactagggctctttataatgcacgggtactacagtaacataaaaacaggaaaaatgggaacctttctgcctcctcttcccacgagagacagcatagcaattgcaaatctggttcataataaaacccttttttttttttttgagacagggtctcactttgtttcccaggctggaatgcaatggcatgatcatggctcactgcagcttcaacctccctggctcaagcgatccttccacctcagcctcacaaatagctgggcctacaggcgtgtgccaccatgtctgactagttgttgttgctgttgttgttgttgttgttgtcgtgtgtgtgtgtgta

SEQ ID NO: 125275 - DNA, 613 bp, Homo sapiens
tcctaccaaactagcagcaacaatatgccaagtttcctatgctgaactagtgtaaacaaggaagaaaaagagccagaggtgggaagcagtcaggcaagagaactctcttcaagatataactttacttctaaatttcaccagagtaatagcttttctcagtgtgttcaataacccatgtctctctgactaaacaccacaggttagctgtcagaaaactacagtaggctatattccctgcttgagatcatcagacgtaacagatacaaatggagattacaaatgattaattctaaagactatctcctgcatccagtcaaagagttttctaaacatctagaaatttaaacctgctcttgctgtaataattgaccttaaagataaaatagtaggacccatcaaagatgatgcacagaaaaaaaaaatggcggggcatagtggctcacacctgttcccagcactttgggaggccaaggcgggtggatcacatgagatcaggagttcaagatcagcctgaccaatatggtgaaaccccacctctactaaaaatacaaaaaaaattagccgggcgaggtggtgtgcacctgtagtcccagctgctggggaggttgagaca

SEQ ID NO: 125276 - DNA, 125 bp, Homo sapiens
atggtcacatgtcctgctctgacttagatcctcatgtctcccttttatgaagaccttgtgattgcattaggcctatctggaaagcccaggatagcttccccatcccaagattcttaatgtaatca

SEQ ID NO: 125277 - DNA, 180 bp, Homo sapiens
cattccaaatccattttgcataagtaatgatttaattatgctactctcaagccaatacatccctagtaatttttgctaacataatgtgaaagccttctgtctgatatgtaaactttcatagaatatgatcccaatcaacacatcagaactcttttcttttgaatctctaacatgaatcct

SEQ ID NO: 125278 - DNA, 202 bp, Homo sapiens
taacatgagtataactgggaatctaccatcactttggtattactggaatgtatatcaaaaggaggaacctaccatgcagtgaggctggagaggaacaagaacttgagcttgaacttcatcttctaaggattagataagccagggctatgaagatacacaagtaaatgtacgattttgttttagaaaaacactcttctaacta

SEQ ID NO: 125279 - DNA, 349 bp, Homo sapiens
cctagaattaagcaactcagcttcacaattgacacacctacaataagcaagtccatgagggaaaggcggtccctttgtaaagacaaatggaatcggaaccctgcgcctcccctccccaacctgcagggctagaagaccttcgtacaaatcaatgctccctgaggagagggaagaggagtttcagtgacaggaagcccgctgctgcggggaggggatgctcaggcaaggccgtctgccgggcgttcctggggagctctggtgggtgggcaggccaccggtgcaggagaatcaacacaggtgcacagtccatctgctcagtaaacaggcgtgtcctttcgtttctgcttct

SEQ ID NO: 125280 - DNA, 532 bp, Homo sapiens
tgtttcatgaggcaggcatattttcagcttcaataaatactgctggttttctaaagtggttgtgacaatttacacacccaccagagatgtatgagcattccaatagctccttgacaatactaggttttgtgagctcttttccttttagcctcatggttgttcaatgatatagcattctggttttaacttgcattcccatgatgactattgaggttgggtaatttttcatatgcttattagccatttggataacctctttggaaagtacctgtacaagtctctcacccttgctttttaaaattgagtagtctgtctttttcctgttaatttgtagaacttctttatatattttagatatgagaccattagatatttttgctgtaagtatcttctccctttctaagtgtcttttcattaacagaggtttttaattggaatgtactccaatttgtcggtctttttctttttaatttgtttttttgttcatgtctaccatggtgtctacaagagcacgaagatatcctactatgct

SEQ ID NO: 125281 - DNA, 346 bp, Homo sapiens
gcattgatcctctgccacctaagaaccctcaggagcgtatcctctaataggcacttgttcttcctgagaatgttggttccccataaacaaaaccatgcctcaatgttagtagcacctcaatatttgcatatgttcagatttccctgaactgggagtgaggggagaactcaatggcaatctattgtgctgaaactccatctgttgcctgacatgtaggcatctcagaaggggtgagtagagatgctcatgacttgcccaagaacacaatagaccgaccttggccaaggagagaaatgaaaactggagccttgaaatacactgggatgaaattctacacacactctat

SEQ ID NO: 125282 - DNA, 393 bp, Homo sapiens
atcaataataaggttgaaaggcctcatgggaaaagtccttgtctcatatgcaacactagatgatatggaaaaaccaccttattttccacctaatttagcgagagcaactcaaggaagagactatataccagcttctggatttgctctttttggagctaatcagagtgaggcaacaatagctatttcaattttggatgatgatgagccagaaaggtccgaatctgtctttatcgaactactcaactctactttagtagcgaaagtacagagtcgttcaattccaaattctccacgtcttgggcctaaggtagaaactattgcgcaactaattatcattgccaatgatgatgcatttggaactcttcagctctcagcaccaattgtccgagtggc

SEQ ID NO: 125283 - DNA, 103 bp, Homo sapiens
gaaatgccgggtgctggagttgagaatcttctctgagtctgaagcatcctgcctgacaggtttgctcacactcacccatgccttccttcagtccctctcatct

SEQ ID NO: 125284 - DNA, 434 bp, Homo sapiens
gaggatccccctatcatgtggtctacctatcatctctgtcacacttttcttttttcttagagacagggtttcaccatgttggccaggctggtcttgaactcctgacttcaagtaatctgcccgccttggcctcgcaatgtgctgggattacaggtgtgagccgccgcacctggccttgttttttcattttaaaaatacccgtctttttttggaatggagaagatacatcatcactaatacagttttatcatttttcttcccttcatcgaaacctttaatggatggctccccattgcctataaaatgactacattttgcagcaaggtttataaaactctttacaactggtcccagtttaccttttgctgccttatgtcaaaacaccactactatatggtattatatgcagtctcagactatatttgttctttaaa

SEQ ID NO: 125285 - DNA, 374 bp, Homo sapiens
cctagagttcacgtgagaaggaaaagggaaagttttgaagactgggtgaaatgtttagaagatgcaatgtaagggagatgtaattttggttgtagaatgcacagttttctagaagggaagaaagctgaggaagagagtgtgatgaagaaaagggcagaggaaacggccactgttgaagggcccaggttgggacagaatgacaccaaaccccttagccttaaattccaggtctgccacacctggacccaacgtctccagcttcattttctcccttccccataaccccctccctaaatacctacccaacacccgccgtgtgtcagcgacagcccacggcagacacactggcttcccttggtggaaaacaggcttcc

SEQ ID NO: 125286 - DNA, 556 bp, Homo sapiens
tgcaattttttagccaagtgtttatttttgatgcatagatttttaaatttgtggtaattgacttattgagaattattcagttacttttttaaatctgccaattgttacacattttattaagtaataacatatgttcaaacccatttttggatgaatttcaatggaagaaattggctaaaaatgctctatataccattcatgggggtaacctagaacagctagtgaagctcctgctccacttgaatgacccactccaccccacagccaccaacactgtctcccatggccccagccctgtacaatagctcaaggacctgggtattacaatggacagtcaaggtgtccaatggaatgatttagttgcttccattttggtttggtctgtggcctagtgtagaagcttagaccaaaacaatggcctcctataaattgatttagcactgctactcagagttttggcatattttttcatacatagtactaaatatatgttaaaataataaaagaaggaaaaaggagagaaagaaggaaggaatggaatggaagaaaagaaaag

SEQ ID NO: 125287 - DNA, 707 bp, Homo sapiens
ggtctcgccttgtggcccaggccggagtgcagtggcacgatctcagctcactgcaagctccgccttccggttcacgccattctcctgcctcagcctcccgagtagctgggactacaggcgcccgccactacacccgtctaattttttgtatttttagtagagactgggtttcactctgttagccaggatggtctcaatctcctgacctcgtgatctgtccgcctcggcctcccaaagtgctgagattacaggcgcaagccaccatgcccggcctcattcatatatttttaaacaataaaggttagaaattgatgggggagaaaaattttcccttggagcaacatgaattgcctccagctttccaggagagggttatatttgctattgaagaaaaaagaaaacaaagccatttataagcaatctcatccctattcccataaacattgaaaatctttcatttttcaagcaatttcaactctcaaatgcgtactgagagtttctgaaaacccatctgatgttttcatttttacttctgtaaaataatatctcattgagacttctgatatgaccatgattgtataaatccagtgttcttctcttctgttcctgaaaactacccaaaagaaaaatgggaaacaaaaacacaaattgtattttcagtaaaactaggacacagactctaacgtattttgaaaaggatgccaaaa

SEQ ID NO: 125288 - DNA, 174 bp, Homo sapiens
gggcaaacgctttacgactttctgtctcaagtgccacttgaaatacacacagggctttgaataagcttcggataaaggcctgctctgtaatctcacttaaaatgcctctttgcaagggtcaccttcctgctcagcaaccttcaatggctccccactgtctgcatggtaaggatc

SEQ ID NO: 125289 - DNA, 445 bp, Homo sapiens
gtcggttgttgactcctgtgcagtcttgaagattttagccctgactcaaggacggcagagtataaatctgggcagagtttcatgggctgaaatccactagatattacccctgaccctcagaagcctggccactaaaatggcccacatgggtctcacacatggataggggaagtggttgcctaccaagtaggatatttcacaggtcaaggcagagctcttctgagcagaaaacccctccctacttatttagtgatatttgaaattctgaccaggcacagtggctcacacccataatcccagcactttgggaggccaaggcaggcggatccacttgaggccagaagctcgagactagcctggccaatatggtgaaatcccatctctactaaaaatacaaaaattagctgggcgtggtggtgcacacctgtagtcccagctactaggg

SEQ ID NO: 125290 - DNA, 340 bp, Homo sapiens
atctctggggcacagcatgactcagctaagttgaaacagggtggccccaaattagctacatccagaatgacatcccgcttttgacagtggtgatgcatcaagccagatcaaaggcaggacacctggcagtggccatcttcctgggaagagccagtagggagctggccttagagttctgaggactcagaacagaaaagctcaagagtcagtcaagctcagcatgattctcaagtcccatcttaaacatttaggaaagtcaacagcaattgaaaaggtgaaaggtaaagtagaaagggtccaagatataccccactgatcagtctccaaacactcaccaaga

SEQ ID NO: 125291 - DNA, 194 bp, Homo sapiens
ggggctcctgaaggatttaaagaggagatacatataagtcaatgtatatttttaaaagtttactcagaatatgtgtgtaaaatggattttaggaggtaggatagtgtattagtctgttcttacgctgctaataaagacatacctgagactgggtaatttacaaagaaaaagaggttaaatggactcacagttcc

SEQ ID NO: 125292 - DNA, 402 bp, Homo sapiens
ttggcccggccgcagctcgggagtctgggaggttcgggctaggaaagagagaaggaggccaggcggccaaagttaggtcagtttgttggtgggtcgtttggaattgcgctgggtcctagcaaactgtcgccttgtgactgcagagtcacacagcgggtaagttccaactccaggaaggcctgaggtcggccccgatcgcggcgcggttctgcttccctctcctccactcagtcatcccgatctcccctccctgataaagtgccatttttggggggataacggttgatttcagtcgttcgaatcaaaacgggccaaagtttataataataatttggtactttggatcttgaatgcagcagggtgctttctcgctaattggcaccttttggtgaggaacacatg

SEQ ID NO: 125293 - DNA, 180 bp, Homo sapiens
ccctcaagaaatattggttaaattaaggtttcaaaatacattgagctagcaaaccttgatgtcacatatctgaagattcctcaagattcacttctaggtatgtatttgcaacaacaggtatctaaagaatttagaattatctaaagagtctgggcatggtggctgtaatcccagtacttt

SEQ ID NO: 125294 - DNA, 471 bp, Homo sapiens
tgggaactgagattccaagggcagaaagtccagatcattatgccacacaaagaattatgcccagtgggtcagtgaacactacacccccatgtgagatgaagtaattcgaacaagtgattaccaaaagatatcatagaatcagcgtggtcccctcgttcaaacagatccaggttcaagtcctgagtctagcacctgcttgggaacttgagcaagtcatcatcccttatttttccatcaagataacagttatgataacaagacaacagttatgatacaccagcagggttgctttgggcattaatattttattttattttattttaattttttttttttttttttttgagatgaagtctcactcttatcccccagggtggagtgtgatggcacaatctcggctcactgcaacctccgcctcctgggttcaagtgattcttctgccttagcctcctgaatagccgggattacagg

SEQ ID NO: 125295 - DNA, 552 bp, Homo sapiens
ggcctgagagagggaaaggccgtgtctgcctctcaggctcctgccctcagcatgtgaaggaatagaggggaaagaggaagtatggggtgttggaaaaagtggcatagaggctgagatgtccaggtgaaaacagacctgtggatgtcaaggcaaatattaatgcttaggctgaaggcatagatttgaagagagcggcctgcagcgctggggtcatgggcgtgccgcctgtacagggacacagggccaccatgcccagacaggcgtcacgcttggtttaatgctctgctgtccctgcctggatattcataataacctttgggtaaaggggccacatattcattttgcctcctggtaagggaagctacgggagtggaggaaattacctagaatatacagggtaaggagaacagaggacataaatattaagctcacatatttaacggacagaaggaaacaatatcagacagcagagagggaagggaaatctggtgccactctacccaagggaggaaagtatttcaagaaaaaggaagtgcctacaatatttaatgt

SEQ ID NO: 125296 - DNA, 344 bp, Homo sapiens
ttgctggccacgacacaaataagatcaatcaccccagtgtctgcaccagggacaccactgtcttcatccgtaaactctagggatgaaaccacaccacccaggcatcagggataagcatatgtaaaacacccacaccttcctggggtggagcacagatggctgctttgatggggagaacagctgcctgccagccctgggcgtctggcctcccctagagggactctcagcaaagagggatgccttgtcacactgggggaaccctgaaggccctgctacatttcccacaccctagtcaaccccctgcatgccaagcatcccctcacagtctgcctaggagccaggcc

SEQ ID NO: 125297 - DNA, 428 bp, Homo sapiens
cgttatagaggatccccgtcctgagccagctgggtaacgaaataatcctttaaaagttagttttctgacacaaccacttttgctccagtctctatcctatcctttacaaggaagttgagtagtaagtcagccagtgagaaattatgtaaattcaaccaaattacctaacctgtgagcacctgagcttttctgtttgcaaaaggcaaagaatgctagctttcctctcctctgtggagcaagagttaaggcatggcctaagaatgtgccagtcctatcctgatcccagtacacagcaattccttggtgcttttcccagtcctggtcagcctaggagaatatgacccagacgcttagatgacactctcctctcagtcatctacctggctgcaataccctaaagccactgttcttcccgcttgcctcctcaa

SEQ ID NO: 125298 - DNA, 445 bp, Homo sapiens
aggaggagaggagggattggtctcactgtctcaggggtagcagaggcaaaagaggtggaggaggtggaaggggaggcaggacaggcaagcacagttggtgtaacttttattgtaaaaaatcaccatataaatggacccatgcagttcaaactcatgtggttcaggagtcagctgtatacataaaaccataagccaaaatgtattaacttttttgtttcattacatttcttctattactgaccattttaaaaactactttaaaataaaagccagtcttactcttttcctccaagtttcaacgtttaaagaaaaccatgaagagaagtcaaaaaggccaattccaaaaaaggaagtatctctcagataacacaggtcactttcaatactttaagaacatttaaacacacaaatcaagaaaatgttctgtaaggttacagaagtgtat

SEQ ID NO: 125299 - DNA, 244 bp, Homo sapiens
gcctagatactcaagcaattgtgtcctagtaccagttctgccactaacttctatgtgtatgtggggaaagtatgtaacctctacttataacttctcatctgtcctaccaaattagatcctcgcatttaggatgctcagtttttttcaactgttaggtaggattctcataaaaattattaattggatagataatacaaagagaaattttctctaggaaactgcccattgttgatgtgactacata

SEQ ID NO: 125300 - DNA, 239 bp, Homo sapiens
cacctacctcagcttcccaaagtgctaggatcacaggcgtgagccactgtgcccagccccatttcttttgaagaggtactgagactgtgctatgttcttttgccacgcactgcctgggaagtcagctgttcccaatagatactaggccataagcagcctgttgcttatggacttcagctgggcaaaatctcctgatggtattaactttataaaaggatttatttctaaggtagactaaa

SEQ ID NO: 125301 - DNA, 305 bp, Homo sapiens
cttaattggagctcgcaaagatgtaatgataagagttgaatattacagcgatacagcatcctaaaaaaaacaatgaaaatgtcagtggcctcatgaaatcacaaatgaaaatggaaagtaatttttttcagcaataatttacccgccatttatatgacaaagtgcttaagtttgagaaactgaagaacttactagtttagctgttttcaaaataacagacttagagttaacatgagataattcagccacatttagctaattgttagtgtcaaaataaaataagcaattgattagaaattcttctg

SEQ ID NO: 125302 - DNA, 577 bp, Homo sapiens
ggcttcagagtcaccccaaggctccaagtcttagccttgcattcctcagaagcaaaaagactttaagtacgctggagtgggagctgtgacagtggcttagatgattgggaattgccttttcccatcttaaggccaggaagcaaacagtgtaacatttcacagctgacttttaatttttaatgaatgtgtttggcttctgactttgttagcaaacaaatacatcttaacttgtcttatgagttctagactctggaatctagagcaaaggaaaagtgctttaagaaacatgaaatattaacttggtgccattttaaatcttatataacttagatcttattggagttcctttatgaaaactgtaacctaaaatggatataccacatgttaagaaaccccatttacatcagtttagggttttcattttgtgtttgacgtgacactctcccacatgaaacaagtgtgcgaatcatttttgtgtttattagatacatggcggaccaactatgtaaatccatctaggaatgtgaagggactaaatatctttttagaaggtaaatcggagcttgtgatagcaata

SEQ ID NO: 125303 - DNA, 184 bp, Homo sapiens
gtgtgtgaacatttttttttcctgtgcctttttgttttaaaatcgccaactctttctctcagcaggatgatatgcttggtgtcctttgtctgtggggatgtttgaagggaacccgaggcacatatgcttcaaactctgttctcacagtttgcttcctttgtggaattttttttttttgatacag

SEQ ID NO: 125304 - DNA, 236 bp, Homo sapiens
gcacttgccaagccccagatcagctctctcacagggccttccagccccttcttccctccagatgggcaagaacacgggccactagaaagccatcacctgcagtgttcaaatcatgccccacacaaggtaaagaggtgatgtgggggccagaatcccaagtaaagggccaccaacacaaagacatcagacttggcagggaccaccacacagggctcccagatcgacccccttcacac

SEQ ID NO: 125305 - DNA, 351 bp, Homo sapiens
ggtgtttgctaggaggtgtagcattcatgtattaacggataaatgctgggtagatgaatgcgggcttgttctccatagatagtattattccatgtaaggagaataggctgtaatggtgggggagacatgctccctgcatgtcgtctaattgggaagaggaaccagcagcacgtggcagctgcctgttgattttcagaagggagaggtccatggggtggagtgatcttggttaacattatgagtcagatgagatttgaaccaagccttgaagaagtaggacattattataagcaaggacaccatgtgaagaaatggtaagtggtggggctgtttgagaggatgtaaattaag

SEQ ID NO: 125306 - DNA, 160 bp, Homo sapiens
gagtagtaaataaacgtactaatagttgtatgtcatcttattacatgtgtagattcatacaacacaatcacaatgaagatagagaactgcttcattaccataaagactttcctagtaccacattcacacccagccccctttcctccactgtctctaaatc

SEQ ID NO: 125307 - DNA, 414 bp, Homo sapiens
actcatcattaaaaaggaacaaagaggccctaacccaacctcaaagagaaggaaaaggacctttttctaaatggaagaattcttttgtaagaaacgaggaagagttagaacaagcatctgcatagcctgggaagggccactctctcccaaggcatgctgccgcttgcctctgatgtctggacgcaaacagcagatcctcaatctgctccagggtgttagtgccaaccctgacctagtgagcttactcctttctcttgggcttaggcacatcttgaaaggggagatagggatgactctgtgcatcagtccctctgtctggtccagtggaccttgtccttatgatggcctgtgaaaagatcttagtttctgagcagttatgcaagttgctcaaagcctttgagatgtcccccagaa

SEQ ID NO: 125308 - DNA, 107 bp, Homo sapiens
cacctcatttttaaaacgacatcaagcccactttcctacttttctgccagagatgtgttacttctcaccattcaccaatttgctgaaggaactctcagacccaaaag

SEQ ID NO: 125309 - DNA, 688 bp, Homo sapiens
ctggtctcgaactcctgacctcaggtgatctgcctgccttggcttcccaaagtgctggtattacaggcttaagcctcaaaataagacctgttattttgaggcctggcctcaaaataacaactttttaaccaaatctgatcaatgtttcgtattagtcttactgcataatggcagtatccattgatactgctgttaaacaaccaataaaaaatccttccagaaataatttatattacatatccagttattatattcctttgaaagaattcctgttacaattatcagcaaaggccaggtacagtggctcatgcctgtaatcccaacactttgggaggctaaggtgggaggatcacttgagctcaggggtttgaaaccagcttgggcaatatagtgagaccctgtctctacaaacaataaaaataacttactgggtgtggaagcgcacttctaatcccagctactcacaggctgaggcaggaggttcgtttacacccaggagttagttcgaggctgcagtgagctgtgattataccattgcactccagcctgggcaacagagcaagaccccatctcaaaaataaacaaacaaaaaagaatgatcagcaaatttaatttctttaaaatcttttaacctaaaatccaattttgcattatatgaaaatatccttgtatctggtttctggaagaa

SEQ ID NO: 125310 - DNA, 223 bp, Homo sapiens
ttggggtctacttttgttgttctgaatgtgggcatccagttttcccaacaccatttattgaagagactgtcctttcccaatgagtgtttttggcaccttagtaaaaaactaattggctttaaatacacagattaatttctggactctctgttctgttgttctacatgtctgtttttatgccactatcgtgctattttggttactatagcgttgtagtatattt

SEQ ID NO: 125311 - DNA, 121 bp, Homo sapiens
aggagtgaagcatcaggcatggctggatccaggggatcatgcaatgttatcaaggtgtggtcttcttcctccatttcttagtgttgattgcatttttcagccagactttctttatctgctg

SEQ ID NO: 125312 - DNA, 223 bp, Homo sapiens
atagggtgattcttatttatgttctaggctcctggaaagaatgaagaattggggccactaattcagtcttccacaaacattcttttattctattcgagtctataggtctatatgttgggagggccagtgccaaggaaaagggccattttggtttcagttgacctcacgctttgccttggattgagattgatccatggttgtcatagattgttttctgttgcta

SEQ ID NO: 125313 - DNA, 739 bp, Homo sapiens
aaagcctaaatttcacctttgcattagtgcactaatgcaaaggtgacatttaggctttacacctttgcattagtgcactaatgatgtcaaatccagttcttaataaaaccatatagacaaatctatccaatcttaatcagtttgactacaaggtaagattctcataaaccttttatgaccctttacaattttctgttaaagagcagatcagtgctctaagaataccctgttgtgcttttattccaatgttcaatttatggaaaaacagaataatacgactttaaatttagccagtatgttcacatacagaatttcttttacaagattaatctttcacaaacctttcacaacttgctgaaaccttcagttttatcctaacttaaaacaatcctttaaccttttaatctaggccaaaaaatccacattcccatgccttcttatcttttaccaaaaacacatttttattttccttacacaccttgtgtgtaaaattgtttcttcaatagtctcaattacgtataacaatgttaactcttagcaatttttatttttggtgaaaaacctggtgagtaagtgattctaattatgtaccaggtgtggagcttaagacaacagacaggagtgcagatagggtctgactctttccaccatagcgagggggcatggctaactccacatgttcccaggccttacctggaatctaatagctccaaagcaggtaagttggacaattttcaaa

SEQ ID NO: 125314 - DNA, 569 bp, Homo sapiens
gtggaaatgggttgctttgtgtgggggaagatgagctccaagaatggctctaactgttttaagttttggagttctgtaaatattccctttaggggaagaaacagttattctgagctgctttcaagtaagctcagaacgggaaaccagctgaaagtctcatttccagtcaagtgcaaagttgcaaatcttcatttggtactttatactggtttgtcataaactgccttgaagtgagtggatccacagataaacagatgtgctggttggaagggtcttccatttcagtttctgccttcctgaataatcagagtaaatgagtgaagaaacctctttgtaaaacatcttgctacaagactactcatcataaacgggtctttcctggccaggcgtagtggctcactcctgtaatcccagcactttaggaggacgaggtgagcggatcacctgaggtcgggagtttgagaccagcctgaccaacatggagaaaccccgtctctactaaaaatacaaaattagctgggcatggtggtgcctgcctgtaatcccagctacttgggagcctgaggcag

SEQ ID NO: 125315 - DNA, 417 bp, Homo sapiens
ctctttaatggccagaaagtgcatttctcgaatgatgaaactaaaacccggagggtcctcatctgtgcaggcaggtgagcatacctagacacccggccctcaagcagtcacttactccactctccattttcaacccagcttcattcggaacaaggaggggacaaaagggtgggaggagaggctgctctgtggaatgaccgtacaagttactgagagatgaaacaaaagcattcattttctattaaatgtgaaagatctctcaatctctaattggtcctgcactctaaggcaacttagcagggactcaagtacaatttccatggagagaagtggtcaaatagctgaggtcaaaccctccagactccaactgcagccaagtgcttttatttcccttgtaattttctttaagaataaatg

SEQ ID NO: 125316 - DNA, 700 bp, Homo sapiens
taggaggcactatttgaagcatttacatatattcgtgtagtcctcctagtagtctgtgaggtaggtactttgactttacccatttagaaatgagaatattgaggtataggctagtaagtggcagggctgggatttgaacacaacttgagttcttctattctgtgcctaacccttcatgtgtttatattagctgcagtaaagaaggaagaaactacagactcatctttggattccttcctctgcctcagcctcacatccatggtctcctgagctctttgcagggtactctagaccatgtcttcagtctggtttcactcattttcattgtatagtctcttcctgtctcactctattgcatcagcctttgggagctgccttccttacctaggtcaatacacattcatggcagagttaccttctggatcttgtggtttccttgctaaaagttgtaggttgcccttggcttgcagtattggccctctgctgctggagccccagcatgcctcccctacctctcccttgcatggccttcagggaggagtgtgtggccagcagtaggagcacaagaccacttgagagttaagctcacattgtgaaatagtcagttgctaattggtgtatatagttgttcccccgtatctgcgggggatactttccaagatccccagtagatgcctgaaactgagggtagtactgaatc

SEQ ID NO: 125317 - DNA, 396 bp, Homo sapiens
taaaataaatataaaataaaataaaataaaataaagtaaataaaataagataaaataaaataaaataaagtaaaataaaatgaaataaagtaaaataaaataaaataaaatagtaaaataaaatacaaaaatgaagtttgccacatcaattgaaccttcctttcgctgtaagatttctttgtagcacatgatgctgtctggtactattttaaccacagcagaacttttttcaaaactgaagtcaattctctcaaagctttctattgctttattaatattgttgtttcaacaatattcacagcatcttcaccagaagtagattccatctcaagaaatcactttctttgttcatccatgagaagcaactccaactcctcatccattcaagttttacca

SEQ ID NO: 125318 - DNA, 165 bp, Homo sapiens
tctatacctatgctctttgcagtccacttatatctgaaactctaaaggcttactgtggaaaaaataggagtgcaaaagatttattggaaaaaaaaaaacaaaactctagggaccagtatgttttaaaagtactttgggtaaagagtcatttctccaaagaagaaa

SEQ ID NO: 125319 - DNA, 296 bp, Homo sapiens
gctcgtttgattataccttgttatctttgtttctgtgttaaattttgcatcacttgatacatagcaacttgccaaggtaaaacttaaagaaattgaaaatgaaacaattctatcaatcatatagaattatgaaggggatgactggaaaattcatgaagtattcttcaatgttacaaatttctggctttttttttttttttttaaaccagagatagctatcctttgtttcatgccctcctttcaggaactaactgcatcttaccaaaaatatgcatagcctagccaggctgtggtgg

SEQ ID NO: 125320 - DNA, 443 bp, Homo sapiens
gaaagtctggaggcttcattgctgtttatcatggtgcagtggttgaagtcaggtagtggctctctgtgagccacctgtcagcttggccctcatacattccactccaaagtttaaagctttatcgtttgcagggagaatccttgcttccttacctatatgtgcccattattttaaggcagctattctcaacctgggcactattgatgttatgggccagataattttttgttatggggagctgtcctgtgcattacagggtgcttaacagcatccctggcctctaccccctagatgccaggagcactaaacaccagcctgctccccaagttgtgacaacccaaaatgtctccagccattgccaagtatcccctgggaaacaaaatcactgctgcttgacaaccactgttctaagggttattggttattatgtatcatgccatata

SEQ ID NO: 125321 - DNA, 519 bp, Homo sapiens
taaattatcttaaatgcccgccctgtctctaacctgtactgaattttaaaagtgcactgtaactgtcaaatgaaaaccagaaccacaacgaagagtccacagttgttatctgcctctcatcgtctgcttttaaaggctggagtgggaatcatgttatacaggtgaaatgggaaaagtcaagcccacatttgtagactttgagacacttggttttacataaatgagattgatcaaacagttgaatctgctcttgccattttgatctatccactttgagctgcaatacaccaacctttcttgttttcctcattcttaatgttgcttcatggtgaaccacattaggtaagaatttattaagtgcttctgatacgcctggtagcattcagggagccggagaactccagcagagttcagggctgggcacatcctatcagcctggagctctgctccctgggctatttgcacgctctatctcctccctccttgaccctttcctctgacatttgcctctgggaccta

SEQ ID NO: 125322 - DNA, 412 bp, Homo sapiens
agggcttggcatctgctgggggagcggggggccatcggaggacggcacatggcaatgtgtggtgttgcttccctcctgccttggaagctgtgagtacccccacaggattgaattgaaggcctagaaccctggatgggaaaaaccaggaacccaggagatctcgagggtcttagcgggcagacccatgtgatgtctgaaccctgaccctccccacctagtgccccaggattgcagaacacctccttccttgtagccttgctcatttgctcagaagtcaaggcccaggatggaatctcattgcctgagaatgcaggagtacgaggagcttctagggagcccttgcttctgtcgtgggagggcagcctgtgcatttaccatcccactaggagagcatgcggtggaggagaggtgc

SEQ ID NO: 125323 - DNA, 238 bp, Homo sapiens
ttcctctccagtctacccatcctctttttggacaacctgatgtacacgttaggactcctaggacatcaagtggtaactcatcattatcaccatcacacagcagctggaaccagcagcctcaccaggcctttctcctttaataatgacaaacatggtgtgcagtctgggccacttaatcctgttctgcagatggggactctgagacataaagaggtaaagatcatgcaggtgacaaagc

SEQ ID NO: 125324 - DNA, 224 bp, Homo sapiens
ccatttctcagagtgaaaagctgggggctggaaggttgtctcatacagtgagctagtggcagggatggggcgctccagagcccctagaaatttctgactctgcctctatgagcccttggaagttaagtattagccagggttctctcgagacacagaactgataagatgtgtgtgtgtgtggagagagaggaaggaattgatttattttaagaaatgggctttgg

SEQ ID NO: 125325 - DNA, 122 bp, Homo sapiens
aaattatagaacatgattctcagtaaatctaagaatcacaagcctactaagtaactacttctcacaagttcattacaaaaatccattaggtgtaatctctagaagtaattgttcttatcgca

SEQ ID NO: 125326 - DNA, 504 bp, Homo sapiens
tctgtcaatagtcccatgtcacagtcccttgtttagtttccatagtcccttgtcccccttttcaaatgaacaggatataaattataagtaaaaacctcctgagttacttccttattccacctctctcccactagatgtaaactccttgaaggcaggcagttccctatagatcctgttccacatttaacacaatatccttaacacaacgcagacctaatacatatttgctacctaaggaaggctaagagcaggtaatgattgaggcacaaagggaaagagagaaaacactggtcagaaaactgactggtttatttcccctttattttctcctgtcagtcctgtcagaaccattctagaggccaaggacctagggtggccagtctgcacagccatttgagatcccaaatcagggatctgccctccattggttcacctttggtcaggggagaattaaatgggcacaccagggcaggtccctgagatgtggcagtttaggcagaggga

SEQ ID NO: 125327 - DNA, 303 bp, Homo sapiens
ctcccaagatttccttataatgaagtgacttcccctggtctgaacaagtgaacacttgggttcaggtaagacctgttacccatttccatagcctcatgatttgcagttgccacaggaattttcccagagtgtcttttgcctaagttttccttagtttttattcaaaaggaacgcttctcaagacttcagggttttaattctatttctgccaatgacttaaggtcagtcactgttttctgggccagttaagctttctagggccccttttctgctaataaggatatagtttagtgaataaggagc

SEQ ID NO: 125328 - DNA, 367 bp, Homo sapiens
tcattcgatttgattccattctgttctattccattcaattctttttcattccattcgaatcctttctattgcagtccattccattcgagtccattccaatcccttccattccattccattacagtccattccaatagattccattcctttgccttccattcgaatccattccattctatccattccattccattccattctattcctttccaatccattcgattccattcgattcaattccatttgattctctttcattctattttattccatgccatttgattgcattgcattccattccgtttgattccagtccatccaagaaagttccattccagtccattgctttccagtccattccattcca

SEQ ID NO: 125329 - DNA, 307 bp, Homo sapiens
tcccacgacaaagaatcatccagccccaaatgtcagtagagccaggattccaaaaccctggtgttaggtaataagaattgacttgggggaaggagcagggaaggcttctcagtggaggtggcatttcaggcagagggcacagccaggggaaaggctctgagttagaaatgtttgagagacagaaaggccagtgaggttgggggatagggcagagatggcgagtggtgggatgggttttaaagcagcgattaggctggacacagtggctcatacctgtaatcccagcactttgggaggccgaggccag

SEQ ID NO: 125330 - DNA, 116 bp, Homo sapiens
tccaccggtcacagcactttcctagggtccttctggcatcttctcaaatcttggaagaaatgccagctctttttcaacattcatttgtcacttttaaggtttcactgaattagcca

SEQ ID NO: 125331 - DNA, 492 bp, Homo sapiens
gaattccacgctaaatgagttggagtgaaatgttgagcaaacaatatgtccgggctagagatacgtaaaatgcttagaacagtacttatcacatggaaattgttcagtcactgttaggccatgcatcaatggcagcatgataaaatagtcaaagtgtggccaggcatgagccagcatgcctggcagtaattggattttgaaggacagttttactttagggtagtctactgctgctttggggagttctcaggctttttggaagaaagctttctagacttaagagcatctttgcaacctggtatgtagggatggttcttatagacgtgccagcaccattgcaggagttatattctccaaatgtcaatacaatgctctgaaacctgtagatctgtttacaactgtcctcatgtgagcatcttgctgcattaaagggcctgctgtaatggatggctcatggagcttcccagggaagagcttggagaagctggcaaa

SEQ ID NO: 125332 - DNA, 579 bp, Homo sapiens
gaccacaaaagaagtgcctggtaattgtgaataaacctcaacttccttactagtcaaataaatggaagatttttaaaaataataatatcaaatattgctgaaaatattgctaatggaatgcagattagtaaagcctccctagaaaagctgtttgactttttaaaaaatgtcagaatcttatctaaaagttctatttctgggacttaccttatgaagacatcagaatctcagacaaatttatatgtagcactgattattatgtaatgaaatgcttgtttttatggtagcaaaaaattggaagcaatctaaatgttcaactttagtttaatggttactataaattatggtttagccatgtaatagaatataatggaatcattaaatatttaaaaagactagtgatatgggaaaacatttacaatgtactgttaaaaaggaaataggatgttaagaaaaaatatttctaggtgatgggattattggtggttttaaatttctttatttttgcattcctcccctcacttgtttttatattgaatgtgtattagttttataattaaaacacctttgtaaaaatgc

SEQ ID NO: 125333 - DNA, 770 bp, Homo sapiens
tggagattatgtttcaccatgaggtttagaggggacacagatccagaccatatcatcgccccagggattccgactccccaagtctggagtggggcctaaggctctgtatttctaacaagctccctgttgagcccaagctgctgctgttcctaggcaccgctgaccaacacaacacgctcgttcaaccccctcaaggtgctctgaagattcctcgaaaatacatctgagaaattcttttgacatcccggattattctccagcctacttagttataaatgagtctgcgtgtgtctcagtctgtgctgataagacggatggagtcctcctttccttacagtaacggtctcactctgttgctcactgacgctggtcttgatcttctgggctcaagcagtcttctcacctcagcctcccaaagtgctgggatcacagacgtgagctaccgatcccagctaccattgttcttaatcaatggtatcaatgtttttttaaatggaggaagaggtaacatttgccagttatatctttgttgaatgcacgggctctgaggattagacaccaggcattgtgctaaacacatcgtatccgctgtcactggatcgccaccatgactctcagaagaagaagggatgctcattccacccactgagatggctttcaaatcgacagtagaatccagcacatattctgtctttggaaaattgctccaggtgtatcctcagaacaatccagccccgtcgtcactttccacagccactgcttggcacctg

SEQ ID NO: 125334 - DNA, 666 bp, Homo sapiens
agtcataagttttagcagtgagtgtgtgtatcctgatgggaagtggggctgagggctgtgtgactgctgctgctttctgggaaaatagttttgtggtagattatgaaatatttagattacagaatatagtagacaccatgtatccccagtgtaatatttaaacaatgttaatgttgtcacatttccatctttgtttttttacatgagaagtcaaacattataggtagagctaaaatccaacttctccatcccctttccagagataatgaggagcttgattgtaaatttgttgtatgtcagttttaggcattttaaaatatattcatcagttatctgtattggtaacaatccttattaatgtttatttgtttatttttgtgcagcttttgcattccccattgttgagattaggtcatgttgatacatacagtaaataaattgctagatagtatttcatcaaattccttcactacttgtgtgtacttaatcttgtttagtttttttgtagttgtttcattcaacattgtgttcttagatttaatcatgttgatacatacagatgtcgtttatttttattactatagaactattaaatgaataaattatagtttatttaccaagttcagcagaattagaatataattagtttttatctattacagactc

SEQ ID NO: 125335 - DNA, 441 bp, Homo sapiens
tcttgctctgtcgcccaggctgaagtgcagtggcaatctcggctcactgcaacctccacctcctgggttcaagccattctcctgcctcagcctcccaagtagctgggattacaggtgggagccaccgcgcctggccctatttttttatttttttaaccagacttttacatactgataatgccatgtaacatacttttatattgtttattatctattttgtatgttagagtcctctactaaggagagattcttaatctgtcttatttggtgacttatcccaagtacctggaacatagtagttctcaataaatatacgttgaattgattttatttacatgcaacttctgttttctgttacataaaatgaaagtgtatgtggggcttacttgaatatacttttccatattacatttttttatttcgatagcaagaattttgatt

SEQ ID NO: 125336 - DNA, 417 bp, Homo sapiens
gctgggagaggggcaggcacagggtcttccctcctccctccacccaggaggctggcccggccccaggtgggtgccttcagtagcaccgtgggtgacttggcagctgccagacctgttagcccagggcagggagaccagtgactaaggccaggccccagctcaagtgagcccctggggcggtgggacgtgccatcgtagtcacaagaggtgcaacctgtcagggaggacacctgtggccctgggagctgtgcagtggctgcagcccaactagaaatgggccagtccagatgccactttcggcacgcggcaggtgtgatgccaccagggctgggccctcacacggggcctcctcactgccctgtccccacccaggggcaagcacccatctagtaaggccctaacctgcaattaaccctg

SEQ ID NO: 125337 - DNA, 278 bp, Homo sapiens
tatctaaggattgacagacacaatccctctccagctctaagtagcctgtgaaaagggaaaagaagatgcctcttccagatgtggaggaggcagaggcacaagtcgatgatcctgagtcaaagagaggacgtgtgagaagcatggccatgcccacgtcctgggtaatcgcggagacacagtgaagacgaccagccttcaaacagaggaaggagctccttgtggagcggactctacaccaggatttccgaaaggcaggggctgtggggtgacccagtgct

SEQ ID NO: 125338 - DNA, 487 bp, Homo sapiens
ttctaatagctgggtgtttgtgggggcgcagtcaggctggtgggaaaaattttagttttagaaaatatacacaaacccttctggagggctgggagtttttacatacagtacttggctgaaggcagccttgtccccttagttaagtaaattagattagaaaaggaatgtggggagtttatctcactagcttgtttacccatgtggtcctaagactaacctttgatttaccgggttcttaattgctttctactggggaggtttgcaatatcaattaccctctagtggtgttgactcaaggctttgtcaattaatctgtactgaataaatgcgagtctcactggctcgtcgaggctgctgtctgcaactgtttacagcactgttcttggagtctgtaagtggcccagatgcttagccagactggcaaagcagaatatctgtgtcagtgtactttattcatccgtcattgggtcagggtctgtgggacaga

SEQ ID NO: 125339 - DNA, 301 bp, Homo sapiens
acaaagttgggggcacaggggccctgggaaggttcacatcactgttgacacgttacctgacaactctgtgaaacctctggaggatttttgcaaggacaaaccaaaatgggtgatccaccctgtttccaagtcataaagttgtaaatgtctagaaaagtaagatacatgtgaaaaccagcctggcacagtggctcacctgtgtaatcccagcagtctgggagacaaagaaggcaggaggcttgctcaagttcaggagttcaagaccagcctgggcaacatagtgtgacctcgtcccttcaaa

SEQ ID NO: 125340 - DNA, 513 bp, Homo sapiens
tttaacctttcttcccaaatttctcacctatgcatttgggaatgattaatatctaccacatacagttttacaaggattaaaatagattgtagatataaagcacttagcattgtacctggcacacagaaaatgctcaataaatgaaactattattaatgttggcagataaagaacagaaagaagaaacaaaagataaagtactgggttgaattactagggccatggataccttctcccctggctgactctacttttcaagttcagcaagtgcgctgacccagatcacaggctcctccctgttccctcctttcagctttacaccaatccacattcctcagggagcaggttttggttgtgcctataatttaagctcttttgctcaatggttaaccttctcatttaggaagtataaacaaaaaaggaacaaatcccagaatgggctgtaattttccatcaggtgaaactggcatcaccgttgtggaatttgacatggtgtttatttctcataactag

SEQ ID NO: 125341 - DNA, 324 bp, Homo sapiens
ttgacaactaaaaagttcacaacagtgcagtccaccagatttccagtagcagaaaagaagaaaatgcaaataaaattggcgggaatcaatgaaacaaaccatgcttccatgaagacagggattagctgaccctgtctgaatagagaggaaaggagagaatggaaagtaaagaacagctgaggagccacagaaatttttcacactaaatatacaaaaagtttttcacactaaatatacaaaatgttatagggtctaaagcagagtttcttaaccttgacattttagactgaataattctttgtgctggagagaatgtcctatgat

SEQ ID NO: 125342 - DNA, 367 bp, Homo sapiens
ttctgtcccagcacactggtgaaggtgcaccaacagctgtccctctgcaaaatccagagcccctccaggaatccccaccccaaactccaggcagctcacatctcagtagatctccctctcgggccaccttccccctcttcctctcaaagcaccaccccagtcctgcccgttagcacaccaggcttctgctcaagagaagctcaagggagattagcatgtgctcatccataccacaagaattaaacaccacttgcagctgcaaggtttactagcttgaaaaatccaacactcatgaactccacactcctgtctttggggaacaggggagaaaaagaaaagcacgttagtgacagatacaggccactgt

SEQ ID NO: 125343 - DNA, 369 bp, Homo sapiens
ttacccttcttccagctaaacttcttcagttccatacctgacaccatatggtcttgaatctcattctcctcgtcctcctagtgactctactctaggctggacctgctaacccactgagcccagaacaagaaccagtgcttccggcctgctcagacccacaccgaacctgagcgggctctcccagctcccttcggtagacactgcccacaagagaccagccctgctgccctcacctggtcgcacgttgttggttttggtcacctagatgccactggaacaccccatggctctcccctctccctaagatgtccgatgtgctgagctcaggctcccatccaatctcacctctgcagcgcggcacttctccgg

SEQ ID NO: 125344 - DNA, 244 bp, Homo sapiens
atttttaatctgcttatattgctgtatttgaagtcagtttctcgtagaaagcatgtaactgatcattttaaaatctactttgtctatcttttttttaaaataaattttgaattttgtttctcaagtcactggtatgtaaactgtgttccttggagtcccagatattttccacctgccagtgggtctgtaactggaggaaaaaggcaggctgcatggtgaggttccaggccccaaaccccatgtt

SEQ ID NO: 125345 - DNA, 406 bp, Homo sapiens
ttcagataggataactgcaacccagggaggctgtcacttccccaaggacacacaggcagttaatgataatgcgaggtcacccagttctggtttccactccagtgccctttgaagtgccatttttcttcacacttcattcattaatattgctttactacctagattttctctctcttgacagcatactgcattaaaaccgttattcatggaacaggtacccttggtaactgtatgcatgggaacattgtcatattttcccaaggaagaacttggactgagtcacatgtatctaaaagtactctggtctcaaagttaagctttttttttttcagtcattttgtattcggctaaatacacaggaagaaccagctacagctttgatttataacagggcctttcatttgaa

SEQ ID NO: 125346 - DNA, 400 bp, Homo sapiens
ttccactgggcacatcctgaagaagccgcactgtttacaaagtactgtcacccacagcgccttcttttgtccatgtgacaactctcggggcatggagcaccctgtggcagcccacagtggtccgacccacccatcttctttgttaatgaaagtcaggattttattcaggtctgcccagacagtgtggctgtggggaaatctggcagatccccagccctgtggagcatgtgtggggtgaaccttgaccagtccaaacctgtaatggttaattgcataaccaaggccaaccattgacagagggatggacgcctgacaattgcagcctattaactatgtggggaagcgacttctgcaaaacattccttgctcttacgaaggaataaagggctgcacactctct

SEQ ID NO: 125347 - DNA, 374 bp, Homo sapiens
caagatatgtcaattacatgaatggtccttaaagtgtggtccctatatcagcagcctcagcatcactgagggacttagaaatgcaaattcttagacccctaccctgacctacaaagtccgaaactttggagatggatcccggcaatctgttttcaacaaactctgcagatgattctgatgaacgctacagtttgaaaactactggatcagatgcttttctcattttggctcaaaaatgacaggctcatttgattattcaatatgcagaaagatatgatctcagccctcaatgattctaacccttgactgcacattagaatcaactgggggcttttaaaaaatgaccagtgccctggaatacccccagagatttt

SEQ ID NO: 125348 - DNA, 458 bp, Homo sapiens
aggagatgggggctttgggaggtgacaaggtctcaaaggtggatgctcctgatgggattcgagctcatcagtcactaataaggcagctccagagagcttcctcgcccccttcatggagtgagaccatggcgagaaggcgtcatctatgatccaggaagcaggaccttgggatgccgagtctcctggtgccctgctctccgacttcacagccttcagagctgtgagaaatcaaggtctgttgtttccaggccacccgacctgtggcattctgttacagttccagctaagacatttcctgacagagagacttctcttggaggtcatgagatctcaaaagacatgtgttcattggcccctttgtgaatctcttcgcacgagagagaggcaggtctgcagctcagtgtctcagccctcagtgagcttcctctcagtgttcctcttcttggggaccacgcttg

SEQ ID NO: 125349 - DNA, 306 bp, Homo sapiens
gtatttgtgtctgtgtctatgtccatgtctatgtttatgtgtatttgtgtgtctgtgtttgtgtctaagtctatgactttttccatgtgtttctgtgtctatgtctgtgtgtctatgtctttgtctatgtgtatgtctgttgtgacagaggcattaaatctctggatcagagcagctcatgtcttgcttacggcaatactatcagccagagtaggattgtggcactgactctccattcccaagtcaaattcctccaagggcaatgcgatgttttcccctgtacgtgcagcagactttgtaccctag

SEQ ID NO: 125350 - DNA, 318 bp, Homo sapiens
acgcaccgtaactgcatggctatgaccccgccctcagcgtccgtctctgcacctctttctcctcatggctcctgggtggggagaggcagagggaggagagcaggcccagcttggtggggaggtacggggctgcacgtcccatcacacaggtggaggtggggcagcgggaggaccatctggtcaccttctctctctcagtcccttccccagcccccagccagcccccagctctggcttgagccaattttctagcagcctgttccccaaacagggtagccctcccatctcccaccctctccattaaggccacttgagatt

SEQ ID NO: 125351 - DNA, 501 bp, Homo sapiens
gatccacctgccttggcctcccaaagtgctgggattacaggtgtgagccaccaggcccagcctatctaatttatttctaaattttgtttggtttcattgtatccagaaaatatggttcacacagattaagtaactgcaaatgatgacaaatgtttttgaaagttgacttcacaatgtcagaacaggctttgattgaattgagctagaaacttgaaagtgatgtaataagaaattattgtttcaaagttaaatcactaagaatatttaatgagggcttttacacatagaaaacacttaagactgacattgaggacaaaaactgtccaactgacttgaagtgttaagaattctattattacacaattctgccacaatgagaactgtgtagatgtacagagagcaagtcgtgttatatttttggtcgtgttatttaatgtattacacatgtgctatagatgtttttctttgtatagtatacatgagtggacatggacaggtttg

SEQ ID NO: 125352 - DNA, 154 bp, Homo sapiens
ggaattacaggcgtgagccaccgcacccagcctgcttattgaatatttttaagatagttgatttaacatttttgtctagtacttccaatgtctggacagcttcagaagtgacttctataaaattaccttttttttttttttcctgtgaatgggt

SEQ ID NO: 125353 - DNA, 333 bp, Homo sapiens
tcagtacctggctagaaatccaaggcagagaacactgccttgtaagagtaagagacagatttgaactcagggctattaaatttcacagtttccatgatatactgatgctcttcaatcttagacctgctgtaccaacatctctaagagacggggtctggttcctggaaattttattattttaagcatagatatcttgttcttatttgaaaagaaacttgcatttaattaatttagttgtgagacagtgaccaagggggtcatttttacctaggtgttacaccaattacctaggtgttttcaataaaacctctgtctggaacactgaaagtacaa

SEQ ID NO: 125354 - DNA, 376 bp, Homo sapiens
acagtcagccaatctgcagtctctgtaaccacctgtttttcctccctggcttttcacattgctttctttcctttactctctcttctcattctctctgaaagctcgccttctttcaccaagaaactctaggtttgtcagtgggcacttcctggctctctccaatatataccacaggaccctacatggccaactgccagatgcagatggctccagcctggggcaagctgcggccggcctgcccaggtggcatgcatgctgtggtcagtggtgtggcagggcctcacttccgcccaggactactttagtgatagtgatttttagtgacagtacaggcaaagtatccaggttaggtatcagcagagctttttgagaggat

SEQ ID NO: 125355 - DNA, 332 bp, Homo sapiens
tagcaagcgaaggaactgaggatattttgttctctaaagacattatttgaaagtgtgagagatcataaatagcactaaacagttaaagaccttttccttggaagatgtattagaagaagaaccaatcagagaggcaaattgtaaatctcattgagtagcatggttccagggaggaatcaagcctcaggctggatggtttttaacattctactggactaaagcccattcagtatacaaatgggtggaaatggtaaagggtcatccaagaaaacagaggcacagaattgctggtgtgtctcagcagtgatctaacatctagctgttcatttgag

SEQ ID NO: 125356 - DNA, 217 bp, Homo sapiens
atgtcaagtgcctggcacaaagaagggtgatttccccattaaagggtatgactcggaggtgatctatctagtaggcctgggtggcttaggagggtgggtgtacagtttgtttcctaagtcagacaccctgtgcaagatggagggaggctctgtttcaggaggaactggtgggagtgaggggatttccctgacattaggaagtcagcagtcatgatta

SEQ ID NO: 125357 - DNA, 691 bp, Homo sapiens
ggctgaggtggagccggcgtcgctgccctggagcgtgggcgagtttcctcttagccggagcttcagggattgactcaaagactcctccgcttttttagttgttttgggtgtgaatacagcccggactaaaccttagtcgcctagactaaaccttagcctcccaggctgccaaaacagcacagcttttacagatgactcttacatcaccatccctactctgtgatactgtgtttttcaaagtttagtgcctgaaccatcagcatgaaatctgcctgagacggttgttgaaaattcacatcgctgggccttgcggcaggatgcctcttgaagcccaaggtttttgtttcgtttttttccatttgagtttgaaaataaacaggatacagtaaagcagagaacttggaaaggggcttacattctgcaggaatttaagtcctgaatctttggtataatcttgacctggactaccagagctaacgccgacatcagtgagacagcaccctaaaagttctgtgcttgttgttcccgaaggcttagcgagtagagacatagcaatctagagaatttgggtgcattgagtcatggcccaacagatttactctattattaagtatgagctaatctgctttgcgaagcaaacatgctctgtatttaccaccactccagatccatacgttcctcccatgtactt

SEQ ID NO: 125358 - DNA, 509 bp, Homo sapiens
tccattaaccaacttctagtccattattcagaggatatggaactgctatttatttatttatttgagatggagtcccgctctgttgcccaggctggagtgtagtagtgtgatcttggctcactgcaacctctgcctcctgggttcaagtgattctcctgcctcagcccccaaaatagctgggattacaggcacccgccaccatgcccagctgattgttgtgttttagtagagatggggtttcaccatgttggtcaggttggtcttgaactcctgtcctcaagtgatcctcccgcctcagcctcccaatgtgctgggattacaggtgtaagctaccacgcctggcccctatttatttatttatttaagagacggagtctcactctgttgcccaggctggagtacagtggtgtgatctcagctcattgcagcctctacctcctgggctcaagtgattctctaatcacagccttttgagtagctgggattgcaggcatgtgccaccatgtctg

SEQ ID NO: 125359 - DNA, 448 bp, Homo sapiens
tctggagcaaggatggggggatcatgattcagggggccccaaggagggtctatcatagactgttgctttttaaagtaactagtagcaatgctttaaattgtcattgtagatttaagaacctgtagttcaaatgtctcagtttagtatgcaaaaccctttacctccaagctcctgcctatttctgcctctctcctttatgtcaagccatcatgatttatatggtataatgccaatggatcattgtttcacaaaagttctttccattccttttagttcttttccactccttcagcaagttgaagagccctctcttgtccttcagcactgagctttgtatttcctttttatgccaaaccaggagaaacaaataggaactctgccaacttttgtttgcaaacccctttcacggtaatctataatctcacaaactcccttagaaaaaaatcaa

SEQ ID NO: 125360 - DNA, 354 bp, Homo sapiens
gcgcggtcttcctgcctcagctccacggggagctcttggacgctccgcagcgctttcgcagagtccccagttctcccgtcccgccgggactccaggaagggaaagagaggcgtggaattggcagagccctggcagcgtgatgaggaaacagaccccattctgcagtaattagaaaacgtcatgatacaatgccacgtgaagcacacaccagcacctggcaaaacgctcaacctggatcgaattactgggaaacatcagatgggtccagattacgcaggacactctccatgacgactggcctggaatcctcaaaaacagcaatgctgtgaaagacataaataaaacagaaaaaaa

SEQ ID NO: 125361 - DNA, 510 bp, Homo sapiens
aacatttccacagggcatctcactaggaaattaccacgttctggctttatgagctgaggtccccaagtacaacgttttggccgaggattccaaccaactgccagcaggataatgtggttatgctgtctgagctactgtgaaaatgcattaaaatctcaatgtttgagctcatccaagcaattaaaattaacacggactgttctgttttagactgggaaaaacaagggataggggaatgttggcctccataatcctctgctagtttcttaaacactttaaaggcatttggagctggcatggatgctatccaaactgagtgtgaagggaatctagttaggcaggaacacctccaccgctcaagtgttcaggggcagggggaatggcagatgggagcctggggtaatgagcaaaaaacttagacctactgggcacctactatgtgccagcccgagctaggtgcattcaccacccggaaaaaggagtatcttcaaacccacctgtggcaggtga

SEQ ID NO: 125362 - DNA, 680 bp, Homo sapiens
gagtatttgttttttatggtaaattgatgtttatcatacaatgaaattacattgttacaaacattattctgtaaatgttgtcacaaaataccacacgaagctgtttatctagatataatcccaggcttgtgtttaagtgtaagtggttcaatcattatacttgcattgttttgggaaattacccccagggctagcaggaatggggacgtgtgaaaaacaatcagttggggtccatcaaagccactggataagttgtgcaatcgatcattttgtcctgttgccataaaattccattcaatccagtggtgggagaaggagtcaaatgttaaactgagaaaactttgattcattcatatgatgtccacagtatttgaagtacttctgttgagagtaaagttaactggaccttgagaaattaatgagtattctctcacatgaaaaaaaaaaagtgctatgggagttgtgagatagttcaggacacttaatgaatgtctactattatccccacacagtgtaaggcagtgataggggttaggggcacaggcaagagcttccaatgccgtggtaatggggggaaatgtgttagcctgaaaagatttggtctaatggaatttaatgactttcatttaatagggagtgctgcagaaagattcaactcaaatatatacaatgaatattta

SEQ ID NO: 125363 - DNA, 252 bp, Homo sapiens
acacatcagactacaaaaaaccaaaattaggcggtgacctttgaaggtcaaaagggatggagtttcctaacagttttcctcggttacaattctacttcttctaggaccctctggcttgtgacagccaaagcaccagctcagaatctgtatcaaaatacaatgtttcaggaaattccagaaacctaaaacgagtggaaaaaacgaaagaaaaaccagagcaaaacgcaatgtaactgaaaacaggaagttaac

SEQ ID NO: 125364 - DNA, 104 bp, Homo sapiens
tgaaactcagtgggacagtgctcctgcctcccaatttacatgggctgttgagttactgaggggatgcacacatgcagaatcacctgcagttcctcgaccatgct

SEQ ID NO: 125365 - DNA, 635 bp, Homo sapiens
tggggggaacactgaaaatgggccaggtttgggagagaagagagattatgagtgttttggatatgtcaaacttgaggtgtccttctaaacagagaatatcaggaagcaattagatagataaatcaggaggtcagacacaagcctaagttggagatatgtattagtggcttctacctgtgtggaagatgcaaacaaaaccagaggagtagaagagattgccaagggatagcataaaaaataagaaaaggagaaggccaggggacatgctttgagagctctaagatttaatggctgagtagagaactattagagagataaagaactgccagacaggtaggaggaaaaccaaactgcatagctccatagaagccctggcaaggcagtattttagagagtgacaatggccagtgccaaatactgctgaaaggtgaagtaagatgacgaaagtcaatatgcactggatctactgacatcggaaagagctctttcagaatatgatggaggctaaagccagactgaaacaaatggattgtgagaaggaagtgatgaaataaactcatctcataaactctgactcaattgggtaggagagaagaggatagcagcttacaggaaatggaaataagagtctgaag

SEQ ID NO: 125366 - DNA, 589 bp, Homo sapiens
tgctaggatgtggggcctttgggaggtgatggggctgaggactgagcctcatagtggggattagtgccctgatgaaagaggcctcagagagcaccctcgcttcttctaccatgtgagcacccagcaggaaggtgctgtccaggacccagaaagtgggtcctctgcagacaccaaatctgctggcaccttgatcttggacttccagcctccggaactgggggaaagcaatgtctgctattgatgagccgcccaagctgcggtgctttgttgcagccccaacaggctaagtcaggaaccgtgaacaggagacctcccagggagtctgctcggaggggggatttgtcgtgggggaattggtcattgtgcctcagtttccccaatgttggggaagtggtgcccatggccactggcaggcccccccgggggccagcacaccaggtaggaagaaatgcaagccccaggctgctgagatgcacagagccccacattctgccttcgggacgtctgtctagtcccttgtcttacaaagggtgggcaggtcccctgcaggactcagcagagggagagacacagtcagggagcggccaga

SEQ ID NO: 125367 - DNA, 384 bp, Homo sapiens
atgattctgtatagaaaaagtttggcacttctatcatccatatcccttagctttccttttgtgttttcttatagttatgtcacccaagagagttattaaaaatattgatgtcctgggtcctacccccatagattctgatataatagatctggatacagtgtgggcatttggatttttaaaagctcccccaagtacttaagtgtatccagagttaactgctgctctgtggtgcctgatcagtctgaacctattttcatggttaagcattctggactgttaccatcaatttctgcagtgaaggagtaggcaatgattgccctaaggtaaagttgttcgtccacggaataaattgggaagtactccctcctcctgtaaaaaaaaaaa

SEQ ID NO: 125368 - DNA, 722 bp, Homo sapiens
aaacaagtttgccggccaggaagttttaatcagccctttctactgcagggggtatgatggatggagaccctgtttcagaggggtttcctttagataaaacaataataccatgctttcaagaagctcgttcgacagctgtaaagctatgattaatcccccaaaagtcaaacatgggaagactggcaagatgagattattcactgggtataattagccacaattatcgctaaagagaatttggggagattctgctctaaagggaaaagctttgtaaaggagaattaccagtagagtgaccttataatttaccatccaatggattttgaatacttttgagagagaaatgagatactgataataattataccaagacaacagacataaattgggattggcctagacgagcaaagatgaatgggtcattctgtctgttagtaaaattccatcccaggcacaatatctcagacttgaaacaaaataaaagtgattctttctaggataaactctaaactaagtgtctgataaattctgggaaagtttatccaattgttacaacccagggtcaggaaaactgttttcaattttctgctgtatgaagttgccagtgttaaaccctttcgatagcaagtagaagaaatgttcattcaaacaggcttaattaactgaaagatataggtgtggtaaggggatcaggtaaagcttgacccaggggctaaacttta

SEQ ID NO: 125369 - DNA, 859 bp, Homo sapiens
ttccatctccccaacatcttgaagatgtatcaatttttttaaattaagaattactttaaacagcactcatttcagaagataggcagaggttatcaaacttctgctccaatcttctcattattccaaggttcataaaaaccacttaggaagaccttggttactgtgacacatcacagctataagtgtaggtggcctagactctccctatctcttagctgccctgagtcatgtgaaataagatagtgaccttctccatcatccctagaggctctctccccgagagagagtacttttagactaatttctttaggaaaagtacatttcgtattctgataacatttttattacttcatatccaaaaatgacatttcttaactgtgatcttgcatgtcattcattatctattgctgtataacaaataacttcaaagcttaatagcataaaacaatcgtataaatcattttcatgattttgtagctcaagaattagggcagtgctcaggtgggcagttgatttctctcttccatatagggttgacagaggtcccttagtgatatttagctgctgaatggactagtctggaaagtccaatatcactcttatgtctggtgccctggcagggatggctacacggctagaactgtcaaccagagtgcccagatgtggcttcttcagtatggcagcctcaagatagtgggacttctaacttgggagctcagggctccaagagtgaggggttctagtaagaatctacatgactttataaccttgtcttgaaggtcacatagagtcactgctgctctgtcctattgattgaatcagtcacctagaatgaaaaaagggcaggatgtagacctca

SEQ ID NO: 125370 - DNA, 761 bp, Homo sapiens
ggttcatatcttgtcatctcagggatatcctgtaaacccactcctaatttttagtgttacatttgtcaagttcaatattgatctttttgaaggtctcatattacctctcagacacaatgtcagtctcaactgtaatttaaaagagtaataaaaggaacataatttgtaacacaatatgtatttcaatatgcttgagcgtgaatacactagaagacataatgaagtaggcagatgcttgccacttatatgtagaatttttaagtgtataattgctacaaatgcagactgaaacagatgtattggctactcagatatcatgagtgacatttccgttgatgagatgatattcagaaataggaatacctctttgtaatattaaacaaaacagaatataagcttcccttagttttctgggaaatttagtgtatattaaaactacaactttatatagctaaatggggttcagttctagactcagattattataataggcttttcatgtacatgagtatctcttagaacatttgaaagtcaggcaaatcctggaatgattcttttttgtgtgagactgtcaatttcattgcaggatgccttgtttctgtggctgttgtccagtaaatcccaatagcaaccccttcccaataattctgacaactcaaaatgcctctcttcaccccccaccaattttcagaacaacttttcctccactgaaagtcattcaggctagattcttgtctgatagggtagaaaatatcccagaa

SEQ ID NO: 125371 - DNA, 167 bp, Homo sapiens
atacgaagcagaagggggaaaaacgtggaccaagggatagagaagagggcatggagagaaaaggctggggttgagggcttaacatattagacaagggggtcacggaaagcctccctgcttctctctgtttgctccaaactcttgcttctctttgcttgctcagcatc

SEQ ID NO: 125372 - DNA, 797 bp, Homo sapiens
gtgaaactggtgtattttttattataagggaaaggaataaggaattctatatttgatatattaattttgagatgccatgagagatgtctggccaagtggagatgtcaagtaggaagggattagatctacaagtctgaaaggctacatttggagctgcaatatacctttgggagtcatcagtgtgaggatggcatttaaaactttggaattaggtaatgccaccaaggaagaatgctatggagaagtggtggccatacctcccaagccttcattcttaattctcacatcaactgatggacatagtcatagaccacagaacaagttcactccttccgttccattaaatgcagcaaacattgtcttttctatatgaaaggtgccctaagatacagaatctacaaaaatagatgactaatatatgatgccatcttgtcaagttgctaaaaaattgttaaggagaagacaattctaatggaaaatgtagaatacgttaaggtatttgcaagggactggggaggatcttcaaaagataaatttggtaagataggatgagaacagatcttggagggccaaagaattatatttttcctgcttagagaacagggcaacattgaagatttctgatttccatgatcagattaacacctttccttctgcatccatgactaattcatccttccatgtctagctcaaatctcacctagtccacaaagcattgcccattctctgctcacatactcttttcatctttaagtcctcttgcatttattttccagcactaatccatttagcacttg

SEQ ID NO: 125373 - DNA, 704 bp, Homo sapiens
gtgccgggcctgttcttgttttttctcctgcagatgtaagatttaagattgaggggaaggggagagatggggattggagaatccaaaaaaggaaccattttcaagggttggtaatatctttcgtgttactgctaaactttagatattgactaaagaaaaaggatcagaaaagagcaggaggaagaaaaactaggtcctagtggtaaaggtattacctgagcacaggctctgtatctgcatctgcagaaggtttcagggtcttctgatcaactcagtgccatgcccacacccattccctaggtgatctaacatctgcattgaggaaatccctttaagctggaaagaacaatggactaggggtcaaagctgtagcctgtgttttctgtgtgtgtctctgctccttatggcaactttggataagtcatttaacctgaattatcttgtattttttcagctcctaaaaagagataataacgcttgccttattatgaggattgtattagacaatggatgtgaaatttctgtatcaatagtctaaaagactatccttcaaaaaaaaataagaaacttatcagtatgagtttgaaaacccaaaaaatcagttgccaacattgatttattgagcaacttttttggtgttttcaacaacctgcagaaaactagttctctgaaaaataaacttgtttcttggcttttacttattc

SEQ ID NO: 125374 - DNA, 425 bp, Homo sapiens
aatgtgttagcaatacgatagcaagaacaacaaagctgaaacaaaaccaacaacagtgaggatgctgggtgtgggccaggcagtgtgccaagcactcacaccatctccttgactaatgcttgcacagggctttagggcttccagacccttcacatcaacattctctcatctaatcattccaacactcagagtgacttactagtgttatgcccatttctaggctgaggaaactgaagctcaaaaaggtgtaggggtagctgactttgaggtcatgttgcgagcagtgggacctcttgtaactacattgattctgagtcctactgttacacctctgtggggcctaggcttagtgggggtgactcagaactgattgggttacaggaaggaagggaaggaacagggcactgtgctgggcgcctgacata

SEQ ID NO: 125375 - DNA, 280 bp, Homo sapiens
gtccttttcttcccacagttgtatcactgcctctcccctcttaaaagtggggattgcactagtggcccttaagccccagtggacccactaatgagttctatgcctacatggcaccgttgtttttcaacttttaaaaagtgggctgaggctgggcgcagtggctcacgcctgtaatcccagcactttgggaggccgagctaggtggatcatgagatcaggagttcgagaccatcctggctaacacggtgaaaccccatccctactaaaaatacaaaaaatt

SEQ ID NO: 125376 - DNA, 128 bp, Homo sapiens
taggtgggctctgccgaggtgtctccctctcctagagtccatctctctaaacacaccccaatctctctgctcagaaatcgctcatggcacactactcctgaaggctgcacatctgggacactgatttg

SEQ ID NO: 125377 - DNA, 305 bp, Homo sapiens
ctaggcccgaataaagaaaaagccaaaaaatatcagggttattatggttgagaaatttgagtaatttatagctaattgtttggaaatcttcctaatttgtatttgataatccaaataaatgaaagttcagttaatctggaatggattatgtttctctctttttattttgatggagtctcactctcttgcccaggctgagtgcagtgttgtgatcttggctgtctgcagcctcctcctcccgggttcaagtgattctcacacctcagtctcccgagtagctgggattacaggcatgcgccaccaca

SEQ ID NO: 125378 - DNA, 544 bp, Homo sapiens
gcagcaaccagacttgtaagagtttgcatggcatgttaagatcttagccattacagctttgacttttagctgacttttagtcccagctactcgggagactgaggcagaagaatcgcttgaacccaggaggcagaggttgcagtgagccaagatcccgctactgcactccagcctgggagacagagcaagactctgtctcaaaaaacaaataaaaaacaacaaaaaagacacagatgcttaggttggacacagtggctcacacctataatcccagcactttgggaggtggaggcaggcagatcaccagaggtcaggagtttgagaccagcctggccaacatggcgaaacccagtctctactaaaaatacaaaaataaaacataaaaacttcaaaattaaataagttacggttcaccattgttaccattttattttatcctatttattttgagacagcctgggtaatagagtgagatgctgtctgaaaaaaaaaaaggtttaagtttttggggggggggggattttaatttcacctatttttttgg

SEQ ID NO: 125379 - DNA, 360 bp, Homo sapiens
gctggttccatagaaaaggatgggtctgtggagtaaatggtcatgagtagtgctagccacacacattctttaacacttctgaatgcagcaggccagctggtcattactgttactgccccctcatgggagaccaaatatagctatatcattcctcctccaaaactgccttctggcaaaagttatctcttttaagaattgtgtgcattcttaaattgcattaagggaagcaaacatatggaacaagaaagcacctcacttagttccatttgctaagcccttttgcagacccactgacccttccttaattccaaatgaaatctcaaatgctataaagaaacccgccaaatgggttacagcaaa

SEQ ID NO: 125380 - DNA, 705 bp, Homo sapiens
ggccttcgcagtctccacgatcacgatggtcctctggtgtcccatctttctctctcaaactgtcctttcctcaatcctttgactccgccggactttgtcacccccacaacctggttttgggtctggccaccccaacattaaggtttaattatgacaaacatattaaacacagaaagaccctactttacttgacatctaaatgtgaatgaatttattaatgtcacatgttgcaacattaaagggacaacttgacacaattcaagaacatgacaacttaaaagtcaatcttaaaagtcatggtaaagaacacctggcagtgaaatggaaagtgctcactgtgctcagttgtacctagccaaaacgagcaacacatacctgtataaaacattcatgcatggagacacagctagtactaatccatctgttgttgaaaaatatataaatgaagtcaaagaagatgaaataaacaatccgaatatccctctgaaggaacttctccgctcaacgttctgtggcagctggtctaatatgattcaactggtcttctgttcatgtttcttacattctaattttgttttgttttgtccatttttccctgtgaaacatgacatatttttcagaagacttctatgttgtttacaaatatgatgtcagtgtgattaaaatttcagtagatggaaaaagcaaactaaagcattctttaaa

SEQ ID NO: 125381 - DNA, 914 bp, Homo sapiens
  misc_feature (87)..(87): n is a, c, g, or t
gggccttcgcagtctccacgatcacgatggtcctctggtgtcccatctttctctctcaaactgtcctttcctcaatcctttgactcngccggacttgtcacccccacaacctggttttgggtctggccaccccaacattaaggtttaattatgacaaacatattaaacacagaaagaccctactttacttgacatctaaatgtgaatgaatttattaatgtcacatgttgcaacattaaagggacaacttgacacagaaaaaaatcactggatattttcccagaagcttcaattttgtgaagaggagatactgtttttttttcagcgttaatatttcaaacttaaaaaatacaaagcaaggtttcaaaaggtcaactttctggtaactacaagtcttcagattgtgagttcaaaagcaatactgaatttcaaagagaaaatttttttttcctttcttaactccagattcaagaacatgacaacttaaaagtcaatcttaaaagtcatggtaaagaacacctggcagtgaaatggaaagtgctcactgtgctcagttgtacctagccaaaacgagcaacacatacctgtataaaacattcatgcatggagacacagctagtactaatccatctgttgttgaaaaatatataaatgaagtcaaagaagatgaaataaacaatccgaatatccctctgaaggaacttctccgctcaacgttctgtggcagctggtctaatatgattcaactggtcttctgttcatgtttcttacattctaattttgttttgttttgtccatttttccctgtgaaacatgacatatttttcagaagacttctatgttgtttacaaatatgatgtcagtgtgattaaaatttcagtagatggaaaaagcaaactaaagcattctttaaa

SEQ ID NO: 125382 - DNA, 716 bp, Homo sapiens
  misc_feature (87)..(87): n is a, c, g, or t
gggccttcgcagtctccacgatcacgatggtcctctggtgtcccatctttctctctcaaactgtcctttcctcaatcctttgactcngccggacttgtcacccccacaacctggttttgggtctggccaccccaacattaattattctttgatggacacttgagttgcttacacctttcactattgtgaataatgctgctgtgcatgtacagtggctcatgcttgtaatcccagagtttttggaggccaagacagaactgcttgagctcaagagtttgaaaccagcctgggcaacataatgagatctcatctctacaaacaattaaagtattagccaagcaaggtggtttacatgactggctactagggaagctgagtctaaccatgagaaaaacaccaaatcatcccaaattaaggatgttggatgaagtgcctgtccaatacacaaaaccgtcaagttggtgaaaaacaaagtctgagaaacagtcacagtcaaaaggagccaaaagaaatctgaatactaaatgttatgtgctaccttggatgggatcctggaacagaaaaaaaaaaagaggcattttcccaacgcaaatggcagcataagcatctgagaatctgagcagcccttgcaagcacctcacagaagctgaagaaacaaaagttggagttcagaacctatcaatgtggaggcattctagcaatgaactctagagtta

SEQ ID NO: 125383 - DNA, 799 bp, Homo sapiens
  misc_feature (87)..(87): n is a, c, g, or t
gggccttcgcagtctccacgatcacgatggtcctctggtgtcccatctttctctctcaaactgtcctttcctcaatcctttgactcngccggacttgtcacccccacaacctggttttgggtctggccaccccaacattaagaaaaaaatcactggatattttcccagaagcttcaattttgtgaagaggagatactgtttttttttcagcgttaatatttcaaacttaaaaaatacaaagcaaggtttcaaaaggtcaactttctggtaactacaagtcttcagattgtgagttcaaaagcaatactgaatttcaaagagaaaatttttttttcctttcttaactccagattcaagaacatgacaacttaaaagtcaatcttaaaagtcatggtaaagaacacctggcagtgaaatggaaagtgctcactgtgctcagttgtacctagccaaaacgagcaacacatacctgtataaaacattcatgcatggagacacagctagtactaatccatctgttgttgaaaaatatataaatgaagtcaaagaagatgaaataaacaatccgaatatccctctgaaggaacttctccgctcaacgttctgtggcagctggtctaatatgattcaactggtcttctgttcatgtttcttacattctaattttgttttgttttgtccatttttccctgtgaaacatgacatatttttcagaagacttctatgttgtttacaaatatgatgtcagtgtgattaaaatttcagtagatggaaaaagcaaactaaagcattctttaaa

SEQ ID NO: 125384 - DNA, 522 bp, Homo sapiens
  misc_feature (87)..(87): n is a, c, g, or t
gggccttcgcagtctccacgatcacgatggtcctctggtgtcccatctttctctctcaaactgtcctttcctcaatcctttgactcngccggacttgtcacccccacaacctggttttgggtctggccaccccaacattaactcaagaatggaataaaacatgctacatgaacatttttatattgtcatgatttatcatccagaaaaaaaggagattttaatactactttgaaggagatggggaactgccaagaaggaaaatatacaagtgttcatgtgatgagaggtactgaatcactgaaaataaactggcctagaagcaataccaggatcgagagagatggattctcgctctgtcacccaggctggagtgcagtggcatgatctcaactcactgcaacctccgcctcccgggagaatggcgtgaatccaggaggcggagctagcagtgagccgagatcgcaccactgccctccagcctgggcgacagagcaagactccaactcaaaaaaaaaaaaaaaa

SEQ ID NO: 125385 - DNA, 269 bp, Homo sapiens
gggccgtgcctgtatggggaggggaggaggcccaaagatttgcaaaatgtttatttcagtgagactgtgtctgtatgtttgcttgtgtgcatgcgcgtacacttgtgcataagagtgtgcttacgaatgagcgtttgtgcatgtggaagggctgccatggatgaatgctcaggctgtgcactgtgtaattccaggaagtgccatttacatagacctcaatgtgactggcacgtgcgcaagttgcacagtgctgtatgagtgtgtgtatg

SEQ ID NO: 125386 - DNA, 426 bp, Homo sapiens
tccccccactggctacacttcccagcctcaagtaacaaccattctactctatcttcatgagtttgttttaatattcagctcccccaaatcaatgtgaatgtacaaagtttatctttctgtggctggcttattttacttaaaataatatcctacagcaccattccatgttgtcactaatgacagaatctcattctttgttatggctgaaaagtactccatcatatataggcacattttctttatccattcatctgttgatggacactgaggttgcttccacatcttggatattgtgaatagtaatgcaataaacataggagtgcagttatctcttcgatatattgattttctttttttgtgtatatatctagcaatgagattgctggatcatatgatagctctaattttagttttttgaggaacctc

SEQ ID NO: 125387 - DNA, 774 bp, Homo sapiens
catggtggctcatgcctgtaatcccagcactttgggaggccgaggcaggcggatcacctgaggtcaagagtttgttgagaccagccgggccaaaatggtgaaaccccatctctactaaaaatacaaaaattagctgggcatgggggctcacgcctgtaatctcagctacttgggagcctggggcaggagaattgcttgaacccaggaggcggaagttgcagtgagccgagactgcgccattgcactctagcttggtcaataagaaagaaactctgtctcaaaagaaaaaaaaaaaatctgaaagagaggccaggtgcggtggctcacacctttaatccagcactttgggagttcaaagtgaagggactgcttgaggccatgagttcgagaccagcctgggcaacataatgagaccctgtctctaaaaaaagaaaaaaataattctcaaaatggtattagcactcctgtgttctttacaacaatattcacaatagccaaatgtagaaataacccaaatgggttgaatggatgaaaaaaatgtgatctatacatgcaacagggactactacaattaagccttaaaaatatgcgatgacaggccaggcatggtggctcacgcctgtaatcccagcactttgggaggccgaagtgggtggatcacaaggtcaggagttcgagaccagcctggccaatatggtgaaaccctatctctactaaaaatacaaaaattagccaggcgtggtggggcatgcctgtagtcccagctactcaggg

SEQ ID NO: 125388 - DNA, 452 bp, Homo sapiens
atatgcaggctgtcaatgagaacaagtgttgtgtggggtcctgtgtgttttcattgtgtgcacacgcagtgttgtgctaatgctgtatataagcacagatgggtagtgtatgtaactggggtgctgattttgtgtgctgtgagcacagtgtgcatgttctctgtgctgtttgtatgcaatatgtgtgtatgtgtacagggatggtgtgttctgtgtacacagtgtgagtggcatgtggggtaaggacgagacatctgccacgactgtgtcccccagctactagcactaggctttgggtagggagaggagggtgatctcctctgcttctgtccttgcttctgcagggaggagcagcttttcttcaagtgacatccatgtggtggctcccatgggggcagtgacccacctctcctgcaggttggcctgggtagggtacgagcctgggattgtga

SEQ ID NO: 125389 - DNA, 255 bp, Homo sapiens
agcacaaggaaacatggcaagggtagaaaattgaatcaagttatgcaaaaagacaaaactagagtctttggaagaaaaccacttgcttcatggatggcctttggcttagtggggtgcagtgctttctctgtcaagaggcgccccaagaagagatcctaagagaagtcaaggcactagccatgtgtcacccagggttgtcccacctgtgtcctgggagctcccaccctccaacgataagctctaagtgggtccccc

SEQ ID NO: 125390 - DNA, 804 bp, Homo sapiens
tttctccacatggctagactaagaaggctgcaaaatctatcactgttatgggctggaaagccaaccaggagagccttcttaggacttctaaagggaaacattctggatgaacctcttggtcttgtaagaagggaggctagttatgtttaactataaacacatggcagtaggtgtcagcgatatgttccattcgaagactatataataaacatcatttttggaaaaggaaactaaactaagaatagataacctgagaatgccatgcaagggctagagcaacttcccatccttttgcaagcatttagcaatcaggtttcgcctttagctgaactcctttcatttcatgcaatatttaatttatacagagatgattcatttgcaatagtaaatcatcacaacattctgtaaaaacaacaacaataacaaaagactagaaatataggaggcctacaacaagcacctaatttaaaactgcagcctcttcctatccccaaattggccctcctctttcctgctctgtttttaaatttttttcctagcaattaccaccttctaacttactataatttgcttgtttattgcttattttctgttttcctccaatagaatagaagctctaagagggcagcaatttgtgtctgttttgttcacagacacatcccatgcattgagaacaatgcctggcacaagcaggtgtgcaaaaatgctggccgactaaaaaaagtcatggatgggttgtcaatattgcataaagtcctattctcagatgacaattgaggtggcctcatcactaactacaagaga

SEQ ID NO: 125391 - DNA, 727 bp, Homo sapiens
aaataaacttaagaaccttaggagtcctaataatatgtatatatatgtaaagaaccttagagtcctaataatgtatatatgtataaaaatcttttctcttgttcgtgtaacctttgtttctaattttattgtttattgtggttatcacaatctcattttttttttgttgttttttgagacacaggcttgctctgttgcccaggttggagtgcagtggcacaatctcagctcactgcaacctctgcccccgggttcaagcgattctcctgcctcagcctcttgagtagctgggactataggtgcacaccaccatgcccagctaatttttgtaattttagtagagatggggtttcactatattggccagggtagtctcgatcctctgacctcgtgatccacctgccttggcctcccaaagtgctgggattacaggcatgaaccaccccaccaggcctccatcttgtttttgaaaggaaaataatcaggccatttggagaaggagaatattatgttcacggtatttggggagttgggcatgggggtgctgtgtaacaacaattcattgataaattatgtatccagacaatcagactataccaattacacttggtgtgtaggtacaattaaaaaaaaaatcagtacaccatgtacaggaaaggattagggccatagaacgctgctatgtttaatatgcctgtgagctactttaaattcttcttagaaccaa

SEQ ID NO: 125392 - DNA, 217 bp, Homo sapiens
tgatctcgaggatctcacgtaatatgtaacaaacctgcacgttggcacatgtactctagaacttaaagtatagtaaaaataaataaatagaagttaccttctccctttttggagggcaatttgaccacatctattaaaactttaagtgctcataaaatttgaccttgcaattttacatctggcatccatcctacagaaacactgaagtctgtgcaca

SEQ ID NO: 125393 - DNA, 479 bp, Homo sapiens
aacaatcaagacaggaaattctgcagacataaattcaggctagcggcaataggaatggagaaaagtgaacaaaaatgaaggatattgatggggtagactcaacagatggatagcttgtttcatgaagatttagaaaccggaaggagacacaagtttggagtgaagttgaggactcctgttttgtacactttgatttgaaagtccccatagacttcaatgtcaagatctccagcagacaacaggatatatctggagctccgacaagaggtcagtgataggggagtcttcagtaaattgggggttataaaaatggtagaagtgaatgagttatcttatacagaaagagtttacagagtgaacacagtcaaaagcaatgtagagacctccagagaataccattttaagggctaagtaatgaagaggtactcaagaagctctgcctctaatctatgaaaatagtgagtaatggacaaccaaac

SEQ ID NO: 125394 - DNA, 165 bp, Homo sapiens
gatctaggaacaaaccctggggtctctcttaaaaatagaccccacctgtttccttattactgactcacaaaccacatagcaatgctccccagtggctccaggagacggagcatgggagcctatcccattccagctcagcagaatggagccagcacaggatgccag

SEQ ID NO: 125395 - DNA, 394 bp, Homo sapiens
ctcaattaggcatgatgttcaaatgcctaggcattccctggggcttctggcattagtatcttggctcctggcatagttgttcatgacgaaaaaattatctgctcccctttgtcaacttcattattttatactttcaaagttctcgttatacttttggatgtcttagactatgctactgaatgtatgtttcccgcacgaaactttgcacagcaaaggacaaaggatagtccagactctttgttaaactggctagtcccaaattttctctaactggcacacttccagaagtgaaattctttctttattgacttcccatttagagtaaatgaacccttctatttgtttctatgacagacataaaaagaatttttaaatggtatagttttacctaaat

SEQ ID NO: 125396 - DNA, 475 bp, Homo sapiens
tgggagatatgggcactaggcatggggatgagaatgaggcaagacaggctgagcacctgcttaaaccaggcccttgcagtgagcccggccaaatcaggcctttcaggtccttacatggcaaaatgtggtgatggttaattttatgtgtcagcttgcctgggctaagaggtgcccagatagctggcacacgtgactctggggtgtgtctgagggcatacggatgagatgggcatctgaattggactgaatagcatctcacactccggaacgggaatgggtgtcatccaacccgctgagggctggaataagacatggaggtggagaaagggagactgctctcacctcttgagctgggacgtcatcttctcttgcccttgaacatctgagttccgggttcttgggcctttgggtttggactggaacgacaccactggctcgcctgtatctccagcctgctgacagaagatcatgggac

SEQ ID NO: 125397 - DNA, 132 bp, Homo sapiens
cctacacagggaagtgaggggtcttatctgcatattcttttcccaaggcccaccaaagacagaaaagtctcagtaataaaacactcaatgaaaccaaattcattgagtgatttatagctttatttttttttg

SEQ ID NO: 125398 - DNA, 398 bp, Homo sapiens
cttgcctttctggacttttcaggcccttgctttttaagatttgccaagttctaaggcagaggtaccactggctcagctgtggggcagcagggaagttggggccactgcatctccatgcatgtctgtgtttgaccaggagagaaaggcaatagacagttaacagcagtgatcagggaaggaaaagtaaaatatgtaaaggatggagagtgctctagatgagtgacatttttctagattcctgaccatgcacagcacctgctagctaggcagggctcagtcagcacctgtttaatgaatacgttgctaggtactctgcatctttgctaaaagactatatctaatgttgatataccatcatattcttgcttcaagttagttgccaaatgtatataatcttt

SEQ ID NO: 125399 - DNA, 454 bp, Homo sapiens
tcccaggctgggcatcatctgatgggaggaaaatgagggccccagactctgtgtcaccctggcaggacccctcccctcccatggctttgaagcccatgagatggccttggacaaaacggcaatgggcccttccctgagacacagtgcggccatctactgggaaactgcccagtgtgactctgatgactgtgatgtgaatcccacagcaaagttgagcagtgcgcaacctgggctactgcacctggcagccctggctcctcttcctctgcctcttcctgctccttcattctcccccagagctctaattgtcactgagattttatgtttcgtttaacaaatgactgtctccccgcttgaacagaacctccatggggggagggaagagtgtctgttgtataaatagttgtatttcagtgcataaaacagtgcctgcctcaaagggaggactcagtca

SEQ ID NO: 125400 - DNA, 763 bp, Homo sapiens
agttagcatgaagcgtggttattctatcacggagatatgctcctcatccacaaaccagagggacgcacggtccaatcaccagtgtcaggttttactgtttggttttatttgtcaaaactactgctttacatgcagaggagggaggagtgtgtgtttcttcgggtgggggatggagggagcattatagaagaacacgcatcccagtgacagtatttttaaagactctatctaccatcttttctgaactaacaatttcaccttgaaatctgttacaataagtacctttaatcaaaagccatttgttttccattcttttctatgggcatacattcactatagctatttactgtagttcattatttcagcatattgcaattatcattgttgtagccttcaatcctattgcattaatgtaggagtatgaaaaagtcagaaaggaaaacttaaaacagttcattttaaactgtattgcctgttaacaaccctgtccaaaattttagtaggtaaaaaagctgaaccactgcctacaagaagaccaaaagattgtctgaagattccatttagtacttgtttcctgttctctgtaaaacacggatattctcttggtaaagacattccatttctatttctatctagtgaccatcgaatatgttgtaacttgtttacctatttaatagggaattatagcaataatcataggattgcggtggcggtacaataaaaccagatatatttgtctcctatttgccttcatagtaacatt

SEQ ID NO: 125401 - DNA, 501 bp, Homo sapiens
ttcaggagggccaaggaaagggcctcccgcctggaccgggtgtggaattgacgctgagtaacacacctgtgcaggtggactctgtgagcaaggcaagaggagatgaggagagcatccgcaggggaagaggccaagactgcatcctgagaaggaagtgttgtcagttgctcttgctggggtgaagctgaccagaccgcaggttcttcctggagccagtgacaatgccgacagctgacacagagggagcacatgacttgcgcttggcattttcacctgcattatcttgtttattcctcacatcaaccctataaggtatgtgccattactgtccttgtcttccagccaaggaaactgaggcacagccctatcaaatgactcccaccaggtcacgcagctgataggtgccagagctggctgcagacccagggaggctgcctgcagaccccaagctacaaacctgttctaatggctgagagctgaacacacctccggagcctccca

SEQ ID NO: 125402 - DNA, 106 bp, Homo sapiens
aggacaggcctggagggacattccagaagaagaatgaggggcttggtgaataactggaagaaacgatgagggaaagaaggagtctaagaggaggcaaatgacagtg

SEQ ID NO: 125403 - DNA, 609 bp, Homo sapiens
aagtggtgatctagaggatcccgagctctctctgtggggtggaatgccagttcaggagaagtgtttgacacttggtagatatttatgaaatatttgtcgtacaaatgaatgaaggaatgaatgaccaaaaacttggaaatcaggaaagaagattcaaatggaactgtcagatctagagcagatcttagaaatcatctggtccaacccagagagggtaatgactggcccacagtcacacagcaagggctggagtgtgaaccaatggactccatgtctgcggctctttctaccttcccacttttgctgcttgggctgggtctgaaggatggagaatgtgattggccaaatactcagggaagacaacctaggagtgcaacataggcaaagggaatggcaggggttagggccacatgtgaagggaatgcgaaaagggggaggaggggaggttcatttagcacctactatgaggcaggcactagcatggcatgagctgagagaaaatctctgcagggaaagcctggacaaagaggcggaaaagcaagaacagccagagaacgtaaggagccgcgaaggtcaggccaaggaggctggctgggcgggttttgacag

SEQ ID NO: 125404 - DNA, 255 bp, Homo sapiens
taggtgcagatgaagatcaaaatattatctttatagtaagtgataaggatgactggagaacatggctgagatgtgtaatcacaaatggcctttcttatactttcctatactgaattcaacttacctaactggacaaaatgcaggctgacctggcatgggcagaccggctagagcatggaagtgggacaaaacataaaaatcctgaagactgggccgggcatggtggctcgtgcttgtaatcctagcactttgggg

SEQ ID NO: 125405 - DNA, 809 bp, Homo sapiens
cggctttgccctgtgttattaattggaccttaggcaactgacaaacctgagtcagtttcctcacctgtaaagtaagccaagtgccctcctaacagggctgatgtgacgatttataagacagcaatacacacacaaacacgcacatagacaggcacacacgtgcacacagacaggcacatgtgacggcatacacacatggacataaacacacactggcacacatgcacataaatgtgagcacgtgcagacatacatacacatgaacacatgcatacacatgcacatggacatgaacacatacacctgcacacccactaaaacacaaatgtgagcacacgcacacggacaggcatacacacgcatacacacacgtacaggaacacatgcacacacacgcacgcatttgtgcagtataactcctggtctgttacacccaacagcatagagtcagtgataatttgtcatttgatcaattatccatcactccagtctgatttcttacaaagctgcattcttagaatgattccagcattgtggggactcaggtataatagaaactagtcccagacagtcagctttggactctacaaggcatctgagtgaagagaattaccctcagctcctgcaaacctgctggaggagcaatatttaattcaaggtccatctaataatttctgagctggcacatacatacatatgtacattcctctctgcactgttccttctcctgttctttctgcctaagaagttaaaatgaacactggcaagacaggaaagaaacttggatatttttcaaacttaaataaaac

SEQ ID NO: 125406 - DNA, 318 bp, Homo sapiens
gaaccacccactgcccttggaaatgtccactttaagacactcccagccccagacctcctgggcgaatccttcttgccctcccctcccatctccaggaccaacttccagatagccgaaggtgggtttggcacgtactgagcctcaaattccacatctaaaaaactgagaggaggccgggcatggtggctcatgcctgtaatccaagcactttgggaggccgaggaaggcggatcacttgaggtcaggagtttgagaccagcctggccaacatggtgaaaccccattttattttattaaaaataaaaaaattagttgggg

SEQ ID NO: 125407 - DNA, 299 bp, Homo sapiens
cataaaggaattagaaaataaagctgaagaaatcacactcacaaagtagaaaaataatgagaaaaagataaaaattagagataaataataagaaaattagaagactgatcaagatggtccaatacacatattgtaggagctccagaaatgtcaaacagaaaaccaaggtattcatcagacaatattccagaaaatacactagaactgaagtacatgaatcaccaagatagaaaggattcactaagtattttacacaatggataaaaaaatgatccaacctgaggcacaaaaatgtaaaa

SEQ ID NO: 125408 - DNA, 395 bp, Homo sapiens
cggtagctcctgctctgattcctcctccacattgctactgctgcctcacactgccactgttgctcaggactgctctgtggagcagccagtttgctgtacactgctcctctgggctactctgggctactctgtctatgggacagccctgccctgtctgcggagccaccattttgctatacactattgctctaataaacttgctttctttcactgtcaactcactcttgaattctttcttgagcaaagccaataaccctcccaggctaagccccaattttggggttcatctacatcaggctcagagagaccttctccgatcatccaaaatatacagtccatccaatgtatctaacatatttcctattttattctcttcatagcactgaccacaaatg

SEQ ID NO: 125409 - DNA, 373 bp, Homo sapiens
aactagtaaatacaaaaggaatgacagagttagaaacaatcattttacaacatcataatagtacttgattcaggcaagaatcattggtgactgcaaaactatttcataaaagttgatgaggaatataatatgtatacaaaatacttaataccagaaaaagttcaccctacagtggagaaacctggcagatactatgtttgctaaagagatcacagttgatgtcaccgaatctggggcaaactggtatcttgtgccttttgatatgatgaacttaatgcagtgtaaactgcattactctcaaaatgtgtaacctcaatccatgcatgaggaaatatcagaaaaacccaaaaataaaagacattccacaaaactc

SEQ ID NO: 125410 - DNA, 702 bp, Homo sapiens
ctacatgctgacatatgagactttaccagctcttcccaaattcattcccagaacactgaaagcctgacttatatctgtcaggttgaggattgaaggatgtctttttggggtaattaaatagcccaaggagggggaaatagatgaggatgtatagctgtaggcatctgaaggtcctaattaaatgggcaggtcccttcctgatcaccctccagaaagctaacccctggataaggaaactctcccttacccctcccctcctacacacacatacacccaaaatcaagctctttagggtctcgctcttaaatatcagtggatagacaagaatgatcagacatttgataaaaatctatgaatgaaagatggtgaccaaagacaaaagaggaacttggaggaaacagagacaatgtagggagcagaagaaaactaaaacaggctgggtgtggtggctcacgcctgtaatcccagctactcaggaggctgaggcatgagaatcgcttgaaccagagaggtggaagttgcagtgagccgagatcacgccactgcactccagcttgggcaacagagtgagactctgtctcaaaaataaataggccaggcaccgtggctcacacctgtaatcccagctctttgggaggctgaggcgggcagatcacttgaggtcaggagtttgagaccagcctggccaacatggcgaaaccc

SEQ ID NO: 125411 - DNA, 406 bp, Homo sapiens
tgcacaatgtcgtgcatagatttaatgccactgaattgtgcacttaaaaatagttaaaatggtaaattttatgtataatttactgcaattaaaaatgctttcaaaaaacaagaaatttttaagagtaagatgcactacttttttttgtaaagtttgtgagacataattgtgtggtatgtggaaaggagaatattttcatttttgcatttaaaagaatatagtgttttagttgtctgtcatttatggttttcttccttctgttttcagagagtgtgaatttctgactttctatgtgggacccaaaatctttagctttagatgtaagtgagatgacctaaataccactgactatgttacatctttgataatcaaaaactaaattttgataagccagactagactacag

SEQ ID NO: 125412 - DNA, 521 bp, Homo sapiens
ttcaccatgttgcccaagctggtctcaaactcctgagctcaggcaatccacccgccttggcctcccaaaataatcctcacacctaggattacaggtgtgagccactgtgccagcctccagctgtttcttcatagggtaaattgatgaaaatgggagggcaaggtgcttggtgctaatgtataaaacaacaccttggcatgtctttaacatgatattccattttattgcaatgtttacaaaatggttaagtttggtaaccatatcttctaattttaagatctaattgcatccgctgacttcctcacttagattaaaataactttaaattaaaactttgagggttttggtggagggaatagtgcttttgaatgaatatgcagatgatcagcaaggctggatggggctggtgtgagtgatgtggcaaggacagcagcttttgcaggggttgcgtttgcatctgccccaagaaattcactaactccttgtttggagatgattattgaaggttgactaattgatga

SEQ ID NO: 125413 - DNA, 533 bp, Homo sapiens
ttcagagggacgttgattgccacttagcccgatcctccggaaactcccacactgcctttccaacaacgaggtgatcacccagactctgagtacttccatggacagggagctcattcctgtgtttttgagggagtcttttccatttatgcatttctctcctgtactgaggtgaattctgcctttcactgacttccgccagcagcctggccccctcagactgagatagctaccatactgaatgctgcaacagccagggggtgaccatgtcctacaccaggaaggggaagaagcccgattcactgagccaatgcatgactgcgtgccaggctgattggtctcacacacttacaatctgtgcagggggagagtgaggctcagaggggttcagtctcttgcctaagctcacgtagcaagcggagaagccgtcctcataccccaggtccctctgactccactgcaccgcttgggggaacccagtgccaatgtcacaaggttcagggcagagggcccgtgggtgcccacagtagggcctc

SEQ ID NO: 125414 - DNA, 664 bp, Homo sapiens
agggcagaattagattattaatacaataattattaggcaggtaggatggaattttggaagaaataaaaattttagttttagtcctctagtgaaattttattatgtggagatcagacctcaggaatggagttgatccagaagtttaaaaaaaaattttttttctgaaagcttagaagcagtctctaattgtgaagagtttcagtcacatctgactagctgtgagtaattggttaacccaccagaaagaaaaaaacgagtcattggttgcgatcaaacccaaactggcagtgaaaggaagactgacaagtgaaactcaagagcagataataagggaaatgcaaagagcagatgccttggtacaggttagaaatggagggtagaagaggaagttaaggagcagatactgttgagattgagataactatagccaacaagaacagatagaattctgcagttaaattctgcactgggagaaatgccagcagtgaagggtggaagtggcagagtgccatttagagcacattaagctaaaagatacttgttacgttgctgtgcagtttttggtacctcttggaggaagctaatgattaactgctgtttcttcattgtgaaaagtagaggacaatgaggctgggggattgttttacttttgccacacagtagt

SEQ ID NO: 125415 - DNA, 366 bp, Homo sapiens
ttttttgtgtatgtctttagtagagatggggtttcaccatgttaggatggtctcgatctcttgacctcgtgatccgcctgcctcggcctcccaaagtgctgggattacaggcatgagccaccttgcctggccgaaagtatcttcattttaaagttcactgtttggctactctgttgacaagagtttagtatttctcaaggaggctaagatacctattcctttttggatcctacctctatcaggagggtgggccttccttgcattgaaacagtatgaaacagtagccctgaattcataagtgggacacctttcttctattggtagagcaggcagtttttttctcctgccaatggtgcctactaagga

SEQ ID NO: 125416 - DNA, 283 bp, Homo sapiens
attttgcattctgagggaagtaggcattccataattcttccaaaggttatttggattcttttctgtgttttgaaataagacatggttgttacaagggaactagatgtgagttaaaatgaattttcgtataaaatgatttttatttccttttattaaaagtgacaaattgttaaacatgtgttgtcctgactttcttttgtgacactttttagtgtaataaaagttgctaataaaattgtaaatgtgtggaagataacatatactagatgaattataatctttt

SEQ ID NO: 125417 - DNA, 738 bp, Homo sapiens
gcctgtacgaaccggaaactcaggccccctcttcctgaggaggctgccatggctccagctgttgactcgctctcccctctcgtgtggaatgagtgccctctgctggccgtccctggcacagccgctcctgtcaccttggcttcccaggaaggagctcccccttcacccacccacccccagctgcctcctcctgcaaggtcagctgtgcctggataaggaggagctttgggccgggcacagtggctcatgcctgtcatcccagcactttgggaggctgaggcaggcgaatcacctgaggtcaagagtttgagaccagcctggccaacatggcaaaactctgtctctactaaaaacacaaaaattagccgggcgtggtggtgggcacctgtaatcccagctactcaggaggctgaggcaggagattggcgtgaacccgggaggtggaggttgcagtgagccgagattttgccattgcactagagcctgggcaacaagagcgagactctgtctcaaaaaaaaaaaaaaaaaaaaaaagaacaaaaaaaaaacccggggggcatcatatgggggggaggggaaaaaggggacagaaaagggggaccagttgtgccacaaagagggtacccggagccccagaaatttgtgggaccacagggggggaaaactcgggcgaacaccccacaagtaggggcgtgaaatataaatggacaaaaaaccagggtacaccgggcgtataag

SEQ ID NO: 125418 - DNA, 230 bp, Homo sapiens
tctgccgtgtcagaagtaagctggtttaatccgcacagaaatccaagccaacagttcatgtgagctcaagctttctgactatgggcatcctatctccagttacaacacagtatttaatatacccatggacacagaaagtagaataatgattgcctagtgctggggggtgtgtggtggttggggaggaaatcggcttttgattgccaatgggtatgggttttcttttttgg

SEQ ID NO: 125419 - DNA, 477 bp, Homo sapiens
agtaagggttccaccagttcactaataaaccccatctaaatgccagtaactcccaaattaatacctccataccaggtctttccctgaaccccatattcctatccaactacttactcatgagcatagtcggccctccctacatgtgggttctacattcatgggttcaactaaccgcgactgaaaacatcttggggggaagcatctgtactgaacatgtatagaactatttttcttgtcattactccccaaacaatacagtacaacaactatttacatagtgtttacatcttgcccctacatctattctctaaacagcagctagagtgatccttttatttatttatttatttgagagggagtctcaatctgttacccaggctggactgcagtggtgcgatcttggctcactgcaacctccatctcctgggttcaagcaattcttctgcctcagcctcccgactaagaacctgagattac

SEQ ID NO: 125420 - DNA, 131 bp, Homo sapiens
cactagagtggctgtaatccaaaagacttgcaatactaagtgttggtgaggatttggaaaaactgaaattctcatacattactgatgggtatgtagagcagtatagtcactttggagagccccttgacaag

SEQ ID NO: 125421 - DNA, 475 bp, Homo sapiens
atctccactattaccctacttaaagcaagcatcacctttcatcaggaccacttcagtcacctcctaaatgcagtagtcccccagttatccatgggagaaacattctaagaaccccagtggatgtctgaaacaacaaatggtactgagcacttgattctgttttttgctatacatacatacctataaaaagtttaatttataaattaggcacagtaacagattaacaacaacaataaaatagaacaggctgggtgtagtggctcacacctataatcccaggattttgggaggctgaggcgggcagatcacctgaggtcaggagttcgagaccagcctggccaacatggtgaaaccctatctctactaaaaacacaaaaaaattagctgcatgtggtggcacgtgcctgcagtcccagctaagcaggaggctaaggcacaaaaatcgattgaacctaggagactgcagtgagccaag

SEQ ID NO: 125422 - DNA, 574 bp, Homo sapiens
tacttgttcacagggcatggtcatgggtttgagttgtgaaatatggacccttccatgtgggtatcagcacagagaaagcacaggacattagtggtaggaaagaaaaaagaaacaatacctttcccctagattccagtgcattattttgtttcccttccacttacttatcctcatataaatgcaagtgttcagagctagaaacctcaaagatgcttcctgaattcaagcccagcgtcttcaatctggggcacagagtatgtgaaggaagctgcaggatacaccccagcagttctgtgtcattaacagtatttcatacaggaatagcttctaaattcaccttgtaagcatccacagtgaatctgaaacaagctttctgagatttccctttctaaggtgatttggtgtatgtgggttctcacatcagtgaagctaggaaatccaagctacaagagttaatctctgtttcaaggcgggtaaacaccttaatgttttctgagactcctggtgctaattttcatgtttaaaatgcccacagaaatatatattaccctgtggaaaagtaagttaccaaaag

SEQ ID NO: 125423 - DNA, 491 bp, Homo sapiens
ctggcgcgtgggcgacatattacaacgtcgatgacttgggcaaaaactctgagtgcattattttgtttcccttccacttacttatcctcatataaatgcaagtgttcagagctagaaacctcaaagatgcttcctgaattcaagcccagcgtcttcaatctggggcacagagtatgtgaaggaagctgcaggatacaccccagcagttctgtgtcattaacagtatttcatacaggaatagcttctaaattcaccttgtaagcatccacagtgaatctgaaacaagctttctgagatttccctttctaaggtgatttggtgtatgtgggttctcacatcagtgaagctaggaaatccaagctacaagagttaatctctgtttcaaggcgggtaaacaccttaatgttttctgagactcctggtgctaattttcatgtttaaaatgcccacagaaatatatattaccctgtggaaaagtaagttaccaaaag

SEQ ID NO: 125424 - DNA, 120 bp, Homo sapiens
atgcgaagcaaaaaaagacatgagtcaaaaggctacacactgtatgcctgcatttatatgacattgaaaaaggccaaactataggaaaggaaaacagattagtttttgccagtagttagg

SEQ ID NO: 125425 - DNA, 273 bp, Homo sapiens
gtgtctcgggatgggtgtgcagtgatgtcacgggatgggtgtgagtggtgtctcgggatgggtgtgagtggtgtcacgggatgggtgtgcagtggtgtctcgggatgggtgtgagtggtgtctcgggatgggtgtgcagtggtgtcacgggatcggtgtgagtggtgtcacgggatgggtgtgcagtgatggtaccggatgggtgtgcagtggtgttatggtggtttttgcttctctaatgacaggcatttctcctgagcttatctgtcatct

SEQ ID NO: 125426 - DNA, 710 bp, Homo sapiens
ggctcggctcgtgggccgggcggcctctggcctcccacgtgcttgagagcggcctggtgcggtcggccgcgcgccttgcgggctgtaggggcctgagggcggccctcttgcggcgcggctgcgtgggcgtgggtccgacctgtgggaattgccccattcgtctcccgggtttagcgcggctgcccgccgtcgcgagccccccccccgccgcggaccggcgcgggccagttagcgccgcggccgggtgccccagcgggccagtggctttcccgcggagggcggccccgcggggcctcccgacccgctctgggctaagcgagcggccaggtttcgtgccctcaggtggctgtggttaacaagtcgcgaacttgtgggaattcgtcgaccagggtttacctggtgtgctcgacattttaaatccttgctctctagtctttgaggtcaccactaacgcggggcgggccgggctccaccgcacggcgctgtccttcccggagggcccgcgagggtgggccgctccgggggttgcgagatggagggtcgcgggcgtgcgttcttccgaccttccgtcagacattttgtgcccgccacgtgctagcctatcgcccagctcgcgcctcaaaacttgagagcaaggatttaaaatgtcgagcacaccaggtaaacctggtcgacgaattcccacaagttcgcgacttgtaaccacagcc

SEQ ID NO: 125427 - DNA, 119 bp, Homo sapiens
ggctaatgggataacagcagggtggccatacaatttattgtccaaacagggacgctctctgagtgaagagggcatcattaatagtgaagcctggacaacaaacataaatgtggaccatg

SEQ ID NO: 125428 - DNA, 266 bp, Homo sapiens
tagagaatgcaaattcattctggctgtctgagaaagactccgtttttgtctttgattcaatttgatgacacagattatctgtcttgatctgattattctcttttccctttgccccaacaattgctatttgacatctcatgcacaggaaagacccagtgggccacaaatagagaaatacagttacaggtgctctgtgtttatggaaactaggtgtcgacctacacatttatgggagttgtctatcactgagttagaactttctgagc

SEQ ID NO: 125429 - DNA, 439 bp, Homo sapiens
cctgaggcgaggaggcggatatgaggtcaggagaatcccagagaatgcagagtgccacaactgtcaggcctcggaacccatgatgtaatgcctctctgggggccaaggaaaacaagcccactgttgtcactgccctcccagcaaccaggcgctgccctccccatggcacggctgttctgcgtaattatgatcccactttctctccttgggaggaggaaatatgaaaaacctttgttgtcacataaaaaccaacccaagatatgagaactgtcttttaaaatacatcttgctgtagagagatttccatagcaacttcagaagtgtgtgtatacaactagagataagtccaggctgatgaaagctacctggaatgtgaacaggctctgggcatcagcagctgtggatttttctagaacctgtcatgctgctgtgtgaccct

SEQ ID NO: 125430 - DNA, 270 bp, Homo sapiens
agtgaagatggaaaaaatatttctatttttacaagagggctgggcaaaggctgggagaagaggggccgtgaaaatcactaagggagaggctccagggagtgaagtgagccaagatgtacgtaaggtggcctggggtccagctctgccttctgagctgtgtgacccttagggagtcacttcagatccccagatctgtttcctctcatgtaaaagggtgaggggatgggggtcagggctgggtggtggtgccagttcctttcagcctgtcta

SEQ ID NO: 125431 - DNA, 821 bp, Homo sapiens
gaaaactacagggcaaggtaaaagatatgaaagtcaacctaaataaacaagggacacatgatgccatgtttcaggagccccaaaactataaggatacccattctcccatgcccatctagaggctgctgcgcctagaggaggctttccatggcaactggcatatgtatggtgaggagaaaccctgcaaagacagcaaagccagtgatggggaaggagaagcagccagagccagcaggaccagctgtcaaaacctgttagcaaactacagtgagaaggaagcaaggtcctggccacaaagaacaacttgaatctgaccagtggcacccaatagggtccagaaacagagccacacgtagccagtgagctgattgtaaagacactgatacggcagggtagtggggagaggacgggccttcccatgccgggtgctgagctagactggatatccaagtaggggaagagtggaccttgacctcggcctcacattggacacaaaaatcaatcccagatggagtgcagatctacatgggaaaggtgagctaataaagctttagaataaaccagcatatctttatgaccttggagtagtcaaagtttcttaaataggacacaaacagcctatccagagaggaaatgtttgattaactggaccacatgaaaattaagaccttctgttcatcaaaagacaccatcaagagaggaagaaggcagcctgcagagggggaggcgatatttgcaatgtgtgtgtctgtgagagagtgtgagtgtgtgtatctctctctctgacaaatgactccagaatatctaaagatatataggac

SEQ ID NO: 125432 - DNA, 592 bp, Homo sapiens
tagaggatcccgagctctctctgtggggcgatgagtgtgccaaccgagactctccctcgagacaatcgtgccaagcaaaggaaccaagtgcctaggcaggctgggacagtcctcttccttccaagatcttttaggagtgggacaaagtcaagtgctgggttagtgccccacagagagagcgtgacgctctctctgtgggggacgctgtggggtgcaggcagaaagtagtagcagtcccttggttacagccgtggcacacctctcagtgaagtctgatgttacttgatatcctcaaatgagtccaatcagtatcagttgggatacttcatagagatcaagaccacccccaaattaggatagatgtgctttccaggtcatggtttctgacactctgaaggttcttcaatgtatgtcacttcaaagtgcacagatgttaaattatacaaaaccaatgtagggttgggtcaccagctttacaaaaataacacataagtaatcagacatttgagccaattacactttcttatgttacataaatcctatttcatccacttttccagtctcatcccctgccacttgccctgcgctccat

SEQ ID NO: 125433 - DNA, 457 bp, Homo sapiens
gtgatctagaggatccctcacgcccatctccactaaaaatacaaaaatcagctgggcatggtggcacatgcctttagtcccagctacttgggaggctgagacaggagaatcgcttgagcccaggaggaggtggaggctgcagtgagccgagatcgtgccactgcactccagcctgggcaacagagcaagatgctgtctcaaaaataaatgaataaaaatagaatgatcaatgatccagcaatcccacttctgggtctacacccagaactgaaggcagggtctccagaggtcactgtgcacccgtgctcacagcagcatcattcacgacagctaaactgtggaagtcacccgtgtgtccactgacagaaatgggtaaacaaaatacatccatacagcagcctgcggttcagtcttgagaaggaaggagactgtgacacaggctacgcatggctgcgcc

SEQ ID NO: 125434 - DNA, 835 bp, Homo sapiens
cagaatgggatttggtgtttttcgacgccaaagaacctccacccccccacccccaccccgagcttttggaatccatttcgcttttgtaaaacgtgtgcttcgtctgtaaaaactgagcaaggaatagaaacattcgtagctctacagtgagtgcctgtcacacttcacatccatagagccttttgtgaacttttataagattcagaattcagcttgagcaccagtgacagcaattgttacatttattctagaatgctaaattaattcgattttaaactgattattagcctcggtgtgccgttcctaaaggcttgtgactttaggtatttccaagatgcccttaagtctctgcttaccactttcctccctccccgagcatcctggatgttgggactgtgaatccaggtctccgttatctaaatggttgatgttagtgtttcctgtcatcacgtttagtatgcttgttgcctttactatcattatagctaaaataatactgctttcagagatgtgttgtataatcgcataataatttcagaacgccttcatattgaaccagatatgaagtgatacagtatcatttattcaaactgcctaaaaagtaaaaagtataaaccatatactatttttaaaacaggtaggttagatttaaatcacgtagtttagaactgttggaatggtactttgagtgataggatttatgttaggccttctttagtaatagttaatatcatgtaattagcactcgtttacacacaattttaatgtgttcgaatccctagagtcatcgaattcagaatttatagtattttattttacttagttaatattaacc

SEQ ID NO: 125435 - DNA, 538 bp, Homo sapiens
agtctctataggatcccctgctcacttacactgttagtctcttctgttcttaacgctgtatcatactatatctattttcagtactactcaaagactataatatgactatatcgctttaaattagtccaggtgactcctcattaaactacacgtaagatgttcgggttggttagtgtgtttctggttacaccgtctcgtcactaagacccctcttgcgttcttcatgattttttacatgatgaaaacaatattgccgttttcttttcttttttaagagatagggtcttgactgcactccagcctggatgacagaacaagaccctgtctcaaaaaaatgaatgaatgaatgaataaatgaattcatgcatgcatgctactcaggaggctgtgtcttgctatgttgcccaggctgggattacaggcatgagccactaaaactaaacttaaggggataagaaggggagctcatagagattgtggtggaccccttttgctagaaactgctacttcctcccaagtagagcacagacagatcagg

SEQ ID NO: 125436 - DNA, 232 bp, Homo sapiens
aaaagaaagaaagaaagggagaaaaagaaagaaagaattgcctctaagaagcaggactggcaaatggataggagtgaggcatgcattataaacaatattattttcagtattattaatcaatgtaatcacttgacttttaaactacatatatagttttatatacatgtatagtttatacacacatatatacatatacacacacttttaatcaagataaagttaatttaagaaa

SEQ ID NO: 125437 - DNA, 655 bp, Homo sapiens
tgcacctgcctcagcctcccaaagtgctgggattacaggcctgagccaccgcacccggcctatcgtctcctttttataggtaattatactgaggcaggcagtagttgtaaaatggagtctcacatcatagttatatgaagcagggaatctggtttcctgtcttggcagtctgacttcaagatcccctcttagaaaccattatactataaaaactgaaaagaaataaaatccaagattggagactgattttaacatctattttaaaccatttcataatcaaaaataaattaaatagggaaaaataaacctgaatattcatacacagagaagtgtagactcttcaatggaacacgttttttaagtgtccgaggaatagttataaaattgctgaatattttcattaaataactaagatttaagtattagactcaagagaaaaacttagtcaaaggcctaagcatgagacattaagcttgataaacattgaaaatgcgctgaaaagcccaagtaagaaaattaatttttcattttagaaattataggacaataatttactcaaccatgaggggtgtgtgtgtgggggggggaatgtgtttatgttaatgagcttgttaacaataagttatacaaaactattagttaacagcaaccagat

SEQ ID NO: 125438 - DNA, 246 bp, Homo sapiens
tttccttcctccatacctgctagggctgagcctcagttgaatgtgagaaaaacgctatgggtgtgatatttgccactctctctgccttgggaccttgagtcatagtctcattcttcatctcaaacagtcttctgtctcattctgtccagctactgtttgtcctttacagtctggctcacatttcctctcccacagaagccccgtccagagctgctctgtcccctccaccactccattgtcctgtct

SEQ ID NO: 125439 - DNA, 269 bp, Homo sapiens
caagagtaagctcgagtgctccttgctattgtgatgggacgtgcaagagtaagctcaagtgagtgctccttgctattgtgatgggacgtgcaagagcaagctcaagtgagtgctccttgctattgtgatgggacgtgcaagagtaagctcaagtgagtgctccttgctactgggatgggacgggcaagagcaagctcaagtgagtgctccttgctattgggatgggacgggcaagagcaagctcaagattgagtactccttgctattgt

SEQ ID NO: 125440 - DNA, 362 bp, Homo sapiens
gatgactttcccactggaagctcaaacccgaccagtgcaaaaccaagctcgtacactcccttgccatgaaacaaataaacccaacaaaaacctagcatagtcagtagtaccacaatcgagccaggccagaaatctgggagttatccttctttttctcctagccgcctaatcaccaagccctatttagaaacagaggaataacattcaagtcactcttcttcccaccacattggctgccactgtcctggtccaggccgccatcatctctccaggcatggtagccacttcctggcagtcctgccatgtctatccctgctctctaacagcctgttctccacccagctagcttttaagaaatatgc

SEQ ID NO: 125441 - DNA, 201 bp, Homo sapiens
ccagacttaaccactatgcaatatatgcatgtaggaaacctgcacatgtaccccctaaataaatacaaataaaccaaacaaaataattatatattatgaccaagtggagtttatcccaagaatatgaaaaaaaccaaaccacaaaagtgaatggcccaagaaacaggaaggagagacggctaatttcttaagggctggcat

SEQ ID NO: 125442 - DNA, 552 bp, Homo sapiens
atttacttttcacaggggtggaatcatatatttatctgtattgaatgtcatcctgttaggtttggtctctttgcaaactgttaggctctttttgtcactcagttctgcgtttaaattagtacccacctcagtcagtagtcatagtaacttggtaagtatcatagctccttagctgtattagtcagtagggctgccataacaaaataccacagactgggtgacttaaaggacatttattttttcatagttgtggaggttgagaagtccaagatcagggtgctggccagtgcagttcctattgaggagtctcttcctggtttgtagataactgccttcctgctgtgtcctcacatggcagagagagctctggtgtctcttcctcttgtaaaaacactagccctattggatgagaaccttacacgaaccctattggataaaagccttacactagccctgttggataagagccctacactagccctgttggataagagccctacactagccctgttggataagagccctacactaaccctgtcctgtggaaaagag

SEQ ID NO: 125443 - DNA, 293 bp, Homo sapiens
agtagagacgaaatttcgccgcgttgcccaggctggtctcctgaccgcaagtgatcctcccgcctcagcctcccaaaatgctgggattacaggcgtgagccaacatctcccaaattctaacagccacgattcctaccttcacactcttgtccctgcctacaccatgtcactctggccttctaccccatcactgaaattcagcagaatggccatgtgtcagacaagggtgtgggacctgacggtacagggcagttggggagggagcatggagtctgggatttattttgtaggct

SEQ ID NO: 125444 - DNA, 380 bp, Homo sapiens
attaaaacccaggccatgtgactctagagccccagccatggacttctgccccaattctggctcccactgagtctgactctctagcctcattgacaggatttgtgctcttctggtcaggatggggagatgatgaaacattcatcctcaaagggtcatatacaagttctccagggatgtccagatgacccctattggtccaggtgagatcctgacaggcactatcatccaaatgtcccaacaagcaccctggagttcatttatattttcattctatgttgtggtgggtgggaatgtactagatccaatccacaggataaagatggctttctttcatttactaacacaaatttctttatttagtagcacaaaggaatacttat

SEQ ID NO: 125445 - DNA, 255 bp, Homo sapiens
gaaagtcagaacttttttatttaaaaattttaaaaaaattttttgagggtaagaaagatcttgcagtcttttaggaccactgccctaacaacttcagataggctagctgtaagtagaaagaagctaggactgtggaattgaatttcctggatcagctgcaattacaaggaggataagagaatggttgagctgattcttttctattttcttttcctagaaatagtatgtatttttagtcattaactagtattttgg

SEQ ID NO: 125446 - DNA, 153 bp, Homo sapiens
gttagttggcaatgcagggatttgagctcaggtctccagagacagagtctagtaccttttctaggtcttaaaagtggactgggtttcagaggtttttacctagtgttggggaggattgagagtttggatcctaacttgtaagtgtagctgtat

SEQ ID NO: 125447 - DNA, 200 bp, Homo sapiens
acatagaggcgtctgcccaggctggaacatatgagggaaatggtcaaactttcagaaccccaaaagattgggcatggttaccttcatactagtagttttggaaacagcagagtgatgtgtgactttttaaaacacagattttcggtattttcaatgtagatcagtgtcctcatttaccattctgtgattcataaatctgt

SEQ ID NO: 125448 - DNA, 535 bp, Homo sapiens
caagggaagggggagaatggaacgatctgagcaggttgacctggaggaactggtggcccttgagtccacgaagcccaccctgccaggtgcccctgccccacatgacccaagggggttgcagagcagcaagcaggactctggttagacaggaggaaggacctgccaccacgtggccttgtgaggagacacagagcaagcctgtgacctcggcgtccacccagcacagggtgctgctgaagcccctcctgtcatctcagcaggggtcccagggcaaggcccgaggcaggctgaagagaggggcagagtgaggatgctggggaggcaggggtgaggggagtgagagcccaggtttcagctgagcccctgcacagggaaggaacctagctgaacacccatctccccacacgctcccaaccctgcctctgcccaaccacctcccagagggcacctcgaaccctctgacacccacactcagcaaggggtatggtgtccccaccgaatccagccagtgaggcccggcacagccacgcctgtg

SEQ ID NO: 125449 - DNA, 325 bp, Homo sapiens
tggagactgacgagaagggatgggatggttgaaagaaacattaacaagtagtaaaaaaagaaaaataggaagtcctttgacagtagtgtcttagcttatgataataaagtgatacttttcttacaatgaacattatacagaatgcttgcatttgtaggtatataaaaatgctacttatccttctgccctgagtttctgctactactaaactttgaacctcttttggcaataagacaggtttcattttacttctgcaagtattcagataccatatgttaatgttttactctgggtacaataaagtttagaattattactggtcaca

SEQ ID NO: 125450 - DNA, 235 bp, Homo sapiens
ttccctggccagaagggcactaggactctctaacccgagaagctttcagagcctcaaacatccccttgtctcctaacaagagctgatctgagtttatttaagaaaattataaagaaaacagctgattatattcttcaaaactgctacaagagacactctgcattatagagcactgcttcattactcttaaatagggccgtgttgcccaggcacagtggctcacgcctgtaatctc

SEQ ID NO: 125451 - DNA, 465 bp, Homo sapiens
taaccctacttctcctagtgatacacccatctccacgtgcccaaacgggaaggctcagcatgattccagccctctccttccaacatctgcactcactaagtctgtggtcacgtctgtcctttctccttttctcgtcactcccatgagtgcatgagagagaaaccaagagcaagacatagcctccctgggtgataggaaatgtactcctaggctgccagatgctagatgcaaactccttcttctagacttccccttcagcctcatgggtcagtgccccccagcacgaagcatcccccagaggcagcattaggaagtggttatgagcacattggaataaaggatctgggtccaggttctggctgtgccacctgcgagcttagattggacacttgatatccctaaacttcagctccatcctctgcagagccgggccacgatggtgtgcatcccgtgagttagtggggt

SEQ ID NO: 125452 - DNA, 235 bp, Homo sapiens
caagcaatagaagaagagcaacatttaatattaattttccaagtgagcaagtcaatctcctatgttgaccccaagcaaaaatgtccagggtgtcagcagcctgaaatgtccacactcatcctaagacctcatttaaggacatatggagggtaacaaatatataccatagttaataaatgacaagaacattggcggcacgctctctgaagagtgaattggtcttgcttgtttctta

SEQ ID NO: 125453 - DNA, 174 bp, Homo sapiens
cactgggattacagggacgaactaccgtgcctggccctataaatatttatagataaaagactttgaggaaatatgctaaattattaataatattctttatctctgagtgataggatttcacatcttttgattctttatactctgtttttctaaagttttcttttatgcttacct

SEQ ID NO: 125454 - DNA, 828 bp, Homo sapiens
agcggtctcctttttttttcatttctcaaagtctgtatggaattcaagcattaaatctctctgcctctacccaatccagtccacacatagtcctccttattttaatctcttcctctttctccctgccatttcattctattcttgtatgtattctttccattatattacctaatccttacatgggaagcatttctatactgtctgctttacttcacagaatctcctcaatatgtttctatagccttagaagtaggaagatttttgtccttatatgtgagtacagactttttttcctccccagaaaaatcttaaaagctaaaatttatcaagtgaaaaagaaatagtaattttgaaactggaaaatgtttactacctaatgccatttaacttaagcctattcagtgatttcgtgtatgtgacttccataattattatttgaaaaaaaaaaggcagaagaagaaaaggacaaaaagagagagtggggtaaagcagtgtgggataggaagaagagaaaaatatgtgcatttgcatttggttgttcaagactcaaagcaactaggcattcacaaggagctatccaaatgtttatagtaggttctactatttaatgaaagtaaaacaaactaaaaccaaagactgtaattatgtttaacatttccaattttttaaggaatataagccaaaatgtatccatgtgtatccatgattctagcttacttagctcctgtttatgaaaatgtatatccagagaaaaagtagttattttatgttacatttactaacatttaagttctgtcatccctgttaaggaaattgggaatggagaca

SEQ ID NO: 125455 - DNA, 370 bp, Homo sapiens
ctacaatcgcctcttccctctctggccccatgccctacttgatgtttttgagcccttctctttacaatcctatcatgtatttagtcatttatttgtttactgtctgtcttccctgctggaatgtaacttccacaagaaaagactgtcttattcctacataatccccagccccaagcaatgcctggcacacagaaagtgtctgatgcataattggtgagtgaataaaggaatgaatgacagagaaacgtagcactctagcctgcgggaggtgactgggcttcaaagtgaaatgagtggctcatgtctgtaatcccagcactttgggaggccaaggtgggtggatcacttgaggtcaggagtttgagaccag

SEQ ID NO: 125456 - DNA, 569 bp, Homo sapiens
aattataatactactactcagcattttacagccctttggctttttaataaaaagttttatttcctgacttatgagtaacatttgcccattataggtaatttgtaaaaattttaagggataaggcagaaaattaaacactctcataactctaccaaatagaactagttggctctatttcctgcttggatttgattccccctgccctttgatttctcaatacttggtccatttttgcattcacagcctagaggtaatgggggaattcttttaccctgatggagaaaaagatttctgtgcaaaaaattaaaagtgcacctcaagctttgctaacatgtcattatgagagaactctcactctggccacaaaaaaggacaaagaggtagctgtgcaaatgcgcagaagtgtatgcaaaacaagaagtacaggcaaggccacaaggggacgacctgtttatctgcccatctgctttcatgacagaactgcctgccactgagagacattgatacacatccactccagctcattagcatttttcatccaaccttcctcctctagcagtgatcacagg

SEQ ID NO: 125457 - DNA, 449 bp, Homo sapiens
tgaaatagccaaaggaaatcatcatatctgaagcagaatttgctttctatttctgtgactttttagatactttttgcatcttataattttacttgccaaatgcatatgaaaatatgagattttactccaagaagagaaattaaaattcagttttatttttaaatggcacttgtcatcttttattaagatgtcaaattcatttttttttcattttacagatattgaacatctactatgtgctagacactgttctagacaccctgggtacagcagtgaaccaaacattaaaagctccaaggaacttctattctagtggaaggaggcataatattgtatagtatttgatccagggggtggaggaaaaataagtgaatatctatgtgaaatgatggtacatgctgagggaagagaaaacaagataggagaaatagaaaatgacaaggaatact

SEQ ID NO: 125458 - DNA, 397 bp, Homo sapiens
agctcttcctgccatgatgcagtgggtccgcacgcagaagcccaggagagagtggcatcaatattgtcactgccgattttgtagaacttggtgactttatcagcactgtcataaagctcaactatgtctttgatgaaggagaagccaacacttgatagcactacttggagtttccatgaataagatggagaaagctcattgtattagggcatactatctgtaaacactctgatcttcctattccactgagtctctgaagggaatagggctggtagtgggtgggaaaaggggaaaaactgtttcttcagtgattacaatcatactcttcattactataaatatttcatttcccatttgatgagcaaaatctacttctagtgttaggaataaaaaaaaa

SEQ ID NO: 125459 - DNA, 451 bp, Homo sapiens
gctgcagtcgtcgggagccatgaactggggctgtcccaggatataagggaaatattggctgtgccttccaagttattatagagtaagggataaataagacaaacccatgaacgtggccacgtatttatgagactcataatgagaattttcagcctccttgcagaggtgagctactattgtgctcgggaagattaaggcacttctaaacggctgttcccgtgcactcacggacacttggtgtgcacacgtgcacacggcaacatccacatgtgcacacaggtgcgtgtgcatgcacccctcacacgtgcacccctcacacacatgcttacaggtgtgtgtgcatgcacccctcacacacgtgcacccctcacacacgtgctcacccacagatgtgcatacaggagcattgcatgcacccctcacacacgtgcacccctcacacacatgcacc

SEQ ID NO: 125460 - DNA, 449 bp, Homo sapiens
tatcacagggaagaacttggttggctagagggtataacaggcctcaggctgatggtaggaaaatcccaataaggacaggagtcagaaagagtttggggagtggtctaagctaagtctggagccagctgtacatcaaaggttactagagatgaaagatgctcttacaaatcaaaaacaggatcttgggagcaagcctcaatggaaacacaatgaagaattttaaaatagaacaaatccaaaggcttattgtgtagatgggattagaacatttataaagaggaattgcaggaaaggaaatagaaattcctgctatgataaaataacatttggtactttccgattaggctgattaggcactttctccattggaacagagcaggtctgtgtgtacacatcatctttctagggtagtggggtcaatgggcctgctgaattctgttagttgtatg

SEQ ID NO: 125461 - DNA, 323 bp, Homo sapiens
gcgaccaaagtctaccaatgacatttccttttccatagtttgttctactatgctttacccaatgaattataactgtgtgtgaaaactatgatctaaagtgaagcttttcaagacaattatttctgaccataagggaaataaaaatctatcattaatcagtgtcaaaaatcaaatgacaaaatccaatcagacatctccacgtccatcaggaataggaacctgctcggtgagcctggatctgcagtgagaagggcatcagtcaaaactgcacacgtctgcttccttctgaattacgtaaaccttccccggctccggagctgcgg

SEQ ID NO: 125462 - DNA, 835 bp, Homo sapiens
taatgccgtatgacttttatccattttactgttgatggatatttgggttacatctaagttttatctagtatgaatgatacttttgtgtcatatttgactatatctcttggtgtacacatctacctgttgcaggagctgctgtgttttgggtcatgcagttccgctctagtaaacccttcacatgattttgccaaatgatatattaagttatactccagtcaggcagtgccttcacttgcattttcagccttttttgccaacatttgcattttcagccttttaaacttagcatttatgataaatatgtagaagtggttttaatgcatctttctacagagtctaataacattgtgtactttttcatatgctttcatatatgcctttattttttgtgacaagcctgtcaaaatttcttggcatttttcttctaagatatcccttcttctcatcagtttttggcctttatgcattctggattggagttctttgttaagttatatatgcgttgcagatatcttcctcttctttcctgcaggctgtgttaaacagaaattcttaaatttagtaaagtctgctttattaatcttttcgttcaagattagttttttaggaaaatttttgttgatgatagtggtgttgattaagcaatccttcactaccaaaaagttatgaaactattcttgtaatgtttgatgagcgatgacaattcaatgaggaaagatgatttttttcttttaggcattttagtgttctttcacatttagaactgtaattctaaataggttttgtgttcatattgaagtcaagatcaggtatcatctcccctcattccctg

SEQ ID NO: 125463 - DNA, 449 bp, Homo sapiens
  misc_feature (35)..(35): n is a, c, g, or t
tgttcatagctgactctagaggataaacgccaacncaccgtggatggaagagtgctcggccactgtgaagctctgtgtaaatgttatatacacagtactcccaatgccgtcctcagagcgtgcacgagggcgtctgatgaataccagctctcagaagatgttaaagaggatgctggtctggacgtagtggctcgcgcctgtaatcccagcactttgggaggccaaggtgtgtggatcacctgaggtctggagttctgagaccagactggccaatgtggtgaaactccatctctactaaaaatacaaaaattagctggacatgatggcgggtgcctatagtcccggctacgtgggaggctgaggcaggagaatcacttggacccgggaggcggagattgcagtgagccgagatcacgctactgcactccagcctgggcaacggtgcaaga

SEQ ID NO: 125464 - DNA, 359 bp, Homo sapiens
ccattgaccgtgaagtgtctgctttgaactctgaggtgcttacatgcagcccaagacacattcatttctagtagagtgtagtcccctctcagtctcttattctgcatgatcaaggggtagacttcctcatttcttgaatcatattaacctctttagaaactaaccaccactgggctgcagcttttttattcacaaacttaaaatacagtttccagtcagcatgtgagccagtcagtttccagggatgatttggttgagcctaacgttgatgatgactcagatcaatgagtaatttaacatttttgtccaggagtggtggctcacacctgtaatcccagcactctgggaggccgaggtgg

SEQ ID NO: 125465 - DNA, 510 bp, Homo sapiens
ggcctcccaaagtgctgggattacaggtgtgagccaccgcacccagcttaaatgttttttttactgatggattacatgattaaaaacatttggaaaccactgcttccgtgaaaacaacagttataaagtcaccttttgtgtcacatggaataatgtgcaggttaaagggcatttctcctggggttggattctggtgtctggaatgatgagaaaggtttttagatccagtgagagccccatggaatactggacatagatgctgtttgagaacatccttccccagattcctgacccctacatcctgctccagtgggaaccgtggaagagcaataactcagtgctgacgtgaccccgaagggttctaagagagcagcagtgagtgaggggagaagtgaggagacaggtgggaccctggagggggacctgtggaggtcatgactgtccagagactcggttctgaggggagccaccctttgagcactggcctgtgtctcctcccagtttaaactc

SEQ ID NO: 125466 - DNA, 680 bp, Homo sapiens
ggcttaaagaagaatactaataataactaagctttgcattaaaaatcttaaggaacagactaaactgaaagaagacagggagaaatagagataaagacaataattaatgaaaattttaaaatggttacaatagaatagctctgcaatatttaaaagctagaaaacaaacaaacaaaaaacaccaaatcaggctttgtcaggatttcacaagaagagaagagagaaagcaccaaaaagccaacattaggggactttttttatccaaccattcagtggacaatatgtccacactgtatgtctccttctagtgataactaaaaattgtgaatgtaatataaatgaagataaatgcaagtctggataaggtagaaagaaagatttcatagagactgtacaccgggttcagaactcagaatagtaagcagaacactaaagctggctttgccctgaggaaatttgataagctaggtgcatattcccttctattgtgtccctttcttggtctcatggtgacagaccccagctgcatcaagtggggactcagacagtcactaaaccttcagtgtaagaatactagaattaaattcagccagcccaaccaccctagcatacctcccaccaccaccaccactacttgttgaagacagcaagaaaggttgcctatctagagcaacaatgct

SEQ ID NO: 125467 - DNA, 477 bp, Homo sapiens
ccgccctcggcctcccaaactgctgggattacaggtgtgagccactgtgctggacgaatttttttaaagaaggaaaaataaaattaattcggcccttcattaaaaaaattaaaaactctttaaaggaaacgtgggctaagttatttttctgagagactataagatttgggaagaaaaataatcatgatgaaacgttttgggaatatttttggtatttaaaattattgtagaaatttataaatgtgcactccacaatcacacacttacacagctccgccttgccaggcagtgtagaccctgccaagcagtgtagacagattctggataactatctttgcatccttccccataccatgtcccagatgttgaactgaagcagctccttccatgttccctacccgttaattagccaggccgctgcccacattgtcacaaacattatattaactgaaaaactggcccatgccatattccatt

SEQ ID NO: 125468 - DNA, 589 bp, Homo sapiens
cctgcagcctgggttatacagcgagacaaaagaaaaaataaaaaagttagtggtaacaggataaactacataaccgtatattattccttcacattcatgaagcaggtcaatttgaagcttgaggacgacttccattcctctaggtgaatctaccaagaaatgccttggtagagctaggagtgccaatggtatcagcaaggccagcctggttccctgtgattcatggtaattctcactatgactttgacatgatgttcctacactgtgcctatcaacacttgtagacacactgtataagcgtttgttacatttactttttcttttgtcattaggtcttttattacagaggccactgtgcactccacaatcacacacttacacagctccgccttgccaggcagtgtagaccctgccaagcagtgtagacagattctggataactatctttgcatccttccccataccatgtcccagatgttgaactgaagcagctccttccatgttccctacccgttaattagccaggccgctgcccacattgtcacaaacattatattaactgaaaaactggcccatgccatattccatt

SEQ ID NO: 125469 - DNA, 277 bp, Homo sapiens
agacttggccaggagatgtggagaggagatcccgcacagggaggggcggaggaaactgagatgggatttcgacagggtgcacacagtggcccatagaggggggtcacagaacacagctgctagcattttgtatgaccatgcattgttaacgtttgattcacacagcatgatgttcaggccctgtacttgaccacaaaaaagatttaagatttccatccccaaggacagagatttatctcatttattttccacttaatacctcagcaaaatgcttgtc

SEQ ID NO: 125470 - DNA, 1160 bp, Homo sapiens
ctcttcctcagtttctacagatgacttcattcccctatttcacagagaagataaagccaagggatgcaggaactgggtaacttcctgttacacccacagacgaagttatgtcaacgtagctttcctttacttttcagtctccagatcctgttctcttccagtttttccagaggctttactccactattatcttctttcaggtgttcaacctctgcccctctccctttcctcttaccctgtaaacttactgaaacctcatccctaaattcaaccctcatcctctagattaccagtctaacctctttctttcccttcgcagccaaggtccttgaaaatgtagttgtccatcactgtctctgcctcttcatctttcatttattcacagtccactgtgcagtcatttctacatataccatataccatacagcccaaactgctctgacaaatacatgacctgttattaactagcagttaagtaccaaatccagtgggcacatttcagtccttacgatttatgttgcatgtactaatagtttgttcttgttcattgtattaatatatcacaactttaaaaccctcttcacctgttgatggacatttaggttgtttgcagtttttggttattacaaatctcttgggtaaatacctaggagtggaatgactggttcaaattatatgttcaagcttaaaagaaactaccaaactgttttccaaagcaatcgcaatttgcattcccaccaacaaggtataaaagttccagttgcttgtgagcatttggtgatatccaatttttttcttcctaattttagccattttaataggtatgtaatactgtttatagtggttttgcatttccctaataactcaagatgttgagcatcttttcaagtgcttattagctgtctctgtatccttttttgtaaagtatctattcaagcctttgcccatattttaattgggtggctttcttaatagtaggttttgaatgatctttacatattccggatataaatcctctttcagatacgtgatttgcaaatattttctcccagtctgtagttcctttttaaaaaaattctcctgagtgtcttttgcaatacaaacattttaattttggtgaagtccagttgatccactttttcttttcagatcataacttt

SEQ ID NO: 125471 - DNA, 1160 bp, Homo sapiens
ctcttcctcagtttctacagatgacttcattcccctatttcacagagaagataaagccaagggatgcaggaactgggtaacttcctgttacacccacagacgaagttatgtcaacgtagctttcctttacttttcagtctccagatcctgttctcttccagtttttccagaggctttactccactattatcttctttcaggtgttcaacctctgcccctctccctttcctcttaccctgtaaacttactgaaacctcatccctaaattcaaccctcatcctctagattaccagtctaacctctttctttcccttcgcagccaaggtccttgtccactgtgcagtcatttctacatataccatataccatacagcccaaactgctctgacaaatacatgacctgttattaactagcagttaagtaccaaatccagtgggcacatttcagtccttacgatttatgttgcatgtactaatagtttgttcttgttcattgtattaatatatcacaactttaaaaccctcttcacctgttgatggacatttaggttgtttgcagtttttggttattacaaataaaattggaatgaatattcatttacaatatttctgtggacataggctttcatttctcttgggtaaatacctaggagtggaatgactggttcaaattatatgttcaagcttaaaagaaactaccaaactgttttccaaagcaatcgcaatttgcattcccaccaacaaggtataaaagttccagttgcttgtgagcatttggtgatatccaatttttttcttcctaattttagccattttaataggtatgtaatactgtttatagtggttttgcatttccctaataactcaagatgttgagcatcttttcaagtgcttattagctgtctctgtatccttttttgtaaagtatctattcaagcctttgcccatattttaattgggtggctttcttaatagtaggttttgaatgatctttacatattccggatataaatcctctttcagatacgtgatttgcaaatattttctcccagtctgtagttcctttttaaaaaaattctcctgagtgtcttttgcaatacaaacattttaattttggtgaagtccagttgatccactttttcttttcagatcataacttt

SEQ ID NO: 125472 - DNA, 119 bp, Homo sapiens
cctcggaggcctgggtatgagccccacctctcctgttccattggagggtgctcctaggaaacccacagcagaattgcagaagtatgctgtgtttattttccaaagtctcattttgtgct

SEQ ID NO: 125473 - DNA, 276 bp, Homo sapiens
tccacctcagcctcccataatgctggagttacaggtatgagccatcatgcctgacccctgcttttctttccttcttagacttaagagtttcttcgtgttgggtcagggttttgtgtgagagtttctttcttctctgtagggcattttcttaggatcatgagccttgcttgtagcaggggcagggcctgacgctgatttatcagctttcgtgcagtaagcacctttgaattccgagctagaggctggcgctgaagtggtgaacagcagacagcatcc

SEQ ID NO: 125474 - DNA, 285 bp, Homo sapiens
cagcctctgtaggccacagagttcttaaagtaaagctttccaggcccaccttcggcctcccagcagcctcagcaatcaaactattcccttactgcggccaccgaaagccaagtttctccctgcctcacggcatcctccgaaaactgagcatttgcctcacggtggcctccccaggccacgaatctgcctgcctcccaggcagctgctgtctcacaatggtctctttaggcccagctcatgctaaaagacagactctccaggcacagctcttgcctcctggcagcc

SEQ ID NO: 125475 - DNA, 457 bp, Homo sapiens
ttaacatggtatatgtattgttattaaagtaagtgacccatgtcaaatgtcttttatttatttcatgaggaaaagctttctgtagaggaacaaatttgagaacaagtttcaggaaattgtcttttttgttgttgttctctaatcatgttctcctttctgtttcaacgattttaaaaatattttactttatggtatgttttattttttttccttttgtgggtaatttttgttctattgattatccatataaattttttttttttttttgagacggagttattctctgtcatcttgggctggagtgcaatgacctgatctcggctcactgcaacctccgcctcccaggttcaagtgattctcttgcctcagcctcctgagtagctgtgattacaggtgcccgccaccaagcccagctaatttttgtatttttagtagaggcggggtttcaccaggttgg

SEQ ID NO: 125476 - DNA, 1924 bp, Homo sapiens
ggaagttgcaggcaatgagggacattgctatattaaaggaaaagcaggagaaagaaatacagacattacaggaggagacaaagaaagtccaagctgagacagcttcaaagacacgggaagtacaggcccagctcctccaggagaaaagattactggagaaacaactgagcgagccagacaggaggctactgggaaagagaaaaagaagagagcttaatatgaaggcccaggccttgaagttggcagcaaagcggtttatttttgaatactcctgtggcatcaacagagagaaccagcagttcaagaaggaattactgcagctaattgagcaagcccagaaactaacggctactcaaagccacttagaaaacaggaagcagcagctgcagcaggaacagtggtatctggagtccttaatccaggcgaggcagagactgcaaggaagtcataatcagtgcctaaatagacaggatgttccaaagaccacacccagtcttccccaaggcaccaaatcaaggattaatccaaagtaacttctaaaataacactgattaaataagaactggagcaagtactcttaagtgctacattaacctggttagaaaggctgttggattccagattgctattgtaaaatctccatcatgatgtgttggagtgaaggattagatggttttatccaacagtcctactagatatttggtaaccagcttcccttaactagctttttctttaaatactcgttaataagctattccacaaacctccagttaacctaacacatgaccctaacctagccatttaccatacatcaaactagctaaaggaaaccaacctaaggaagtgaaaacagttgtgatttatttcatctagctaaattgtatttctttatagagaaagtacctttaaggatagcattccaaatagactttgaatagcgttctgccagtttatcctcattccttttgaccaacttagcagacaaaagcagtttttacaagctctttgtgagtttgtgccagtgaccaggtagctccttctagttttctcatgagtgaaaaagcattctgataacagcaagtccagtaagtgctaggcagagtgacctttcatctgatgctaagcccctacaagtttgagaaggtaagaaaagatgaaggagacatatattaggtcagctcttacttttgaaaatgttttatttgaagaaacacctgtagcattgaggtgactgaatgcctccacttatttcaggaaaacgtatccaaaaaaagttgaaatatttggacaactttttttttaagtgccatcgatttccctagcagcattctaaaagatagcaagtaaaatgatgtttgttatcctaaatgctttagttttaggtcatttattaattttcttacaggtgcactttctagtacatgaagtatcctttgtaattaatgtgtgccatatgtttattcccatttagtataactataaattatattttaaattatatatttttaggatagttatattttttttgggttctacgacattgaagttggactagtgatttatttgaatgctgaatcctagtataggggaatataatcttatattttaacaggggtcctctatgggaaaataggatgaactttgtttcccagaaattgttaagtgatgaaaaacttcaaaataattttcctgcattttctgctttatttacatgtaaagtgaattccctgaaaattggatttaaaaagcattctccttcaatgtgcctttaccttggagctttaacaacttttctgttaaatatgtagttttttattaaacaatgttattaaataaaaacatttatccactgattttattactgttccaatgtaacacattttctacttcatcactcttctgttaccactcttaaatgtcttat

SEQ ID NO: 125477 - DNA, 896 bp, Homo sapiens
cgtcctgagttaaggcgagcgccgtaggcgcgtactacagatatccctctacgtcggcctctattgcgcctacccagtctgacatgtttcagagtggattccatagtagatgatatgttatgatcagctctgctctggacgactgtttacaagatcgaagacctggtgaaaacctggaggctatcgtgatctgccgtccagtgaatcctaagatctgcttgtgtgacataattggacatattagcctacactatatttaaaaggctcctcagtggtaaatatctaatacaactgtataatgtgtgtactatgatgttagtgcttgctgcttgcatagattttgcattgtgatctgtagtatgaattatgaaacataggtgcactttctagtacatgaagtatcctttgtaattaatgtgtgccatatgtttattcccatttagtataactataaattatattttaaattatatatttttaggatagttatattttttttgggttctacgacattgaagttggactagtgatttatttgaatgctgaatcctagtataggggaatataatcttatattttaacaggggtcctctatgggaaaataggatgaactttgtttcccagaaattgttaagtgatgaaaaacttcaaaataattttcctgcattttctgctttatttacatgtaaagtgaattccctgaaaattggatttaaaaagcattctccttcaatgtgcctttaccttggagctttaacaacttttctgttaaatatgtagttttttattaaacaatgttattaaataaaaacatttatccactgattttattactgttccaatgtaacacattttctacttcatcactcttctgttaccactcttaaatgtcttat

SEQ ID NO: 125478 - DNA, 859 bp, Homo sapiens
ggaacgtgttcacaggctgttgtgtggcaatgaatgtcatgataacccactctggaatatgtgtcctgaagaccaagtctggacactgaggctccattccaactggaggaggaggcatctccatctgggctgctaggaaggggcactcatcccatcctagtacctttgtagcccttcgtcatgacactaccgtcctcccggtgaaggcttgtgaagcaagaatggagagtccaagtttgtgatattcaaacccatcttgtaaatcagcaaacacattaaccttccatcagtcagagaaataatgttgtggctgtgtgtttccttaatgctctccctcctgagggaggagaagaccctgctcaactttgctgcccaccctgcagtgacccctgaatgccacaccatgggaggactcattcattggctttgtagtggcaaatattcctctagttctataactcaactagacattttgtagtaaagaattcttgaaattctctaataaaaagcaattcttactgtaatatttttagtttggggacacaatttcctaaggggggattaatgaacatttttatgcattagcccaatttatgaattccatgtttattatatggtagtactgatgaaaagtacctttctatctgtatctttgcagtttcttcgttactcatatgtaagcctcatggtaagcagtgctctagtaactgcttctctgtacaaatctcatcgttctacttacctgtcaaagcacattctacatgtactgtaaacagatacactttagtaagatttagtcttaaggatttttccacttttgtcagtaacagatatttatggattaaaaaataaagccgtt

SEQ ID NO: 125479 - DNA, 434 bp, Homo sapiens
aactgcccattttgaggagagaagtctgcaggtatagttagtgctgctgagacatttccactctggcattctagagttctctggcttgcccttgttgctttaaagctggttccaacttcgtgggctttatgattgagcaacactggtgattgtgatttctaataccaccctccagattcatgtcacaggtgaaagtctgcctgtggggagagctttcacattctcctggagttgaaccaaaataaggaaaacatcaacaaacacagttaccaaaagcttccaaggagggatggaggagaaattctgttcattgcagatggggagaaattaaatgacatcaagtgcataatggaactgggtaggattcaaactcaagtcccctggttcaagtccttgactccactctgggcatggctaagtctggcctgtgtctc

SEQ ID NO: 125480 - DNA, 345 bp, Homo sapiens
atctagaggatcccagctcaggggcgagctgtaactcaggtgcgagctgctaactcagtgtgcgagctgctaactcaggtgcgagctgctaactcagtgtgcgagctgcctgcctttggagagttgggttgtagggagttcctgctgggtttctggggcaaaatggtccccctctgcctccaggttctaccgaggccctgcttgggctgtgacaggtggctctgtcaaggtgggagtctgtgtgtgcacatgtgctggctccaggcgagggaccaggctggcctgtgcagcagctctggcacctgcctgcctccctggtgggtccccctcctctgtgcagctcct

SEQ ID NO: 125481 - DNA, 695 bp, Homo sapiens
tctgtacttactgttaatattacttcaagtgtaaatggattaaactccccaatcaaagggcatagagtggctcagtgaattaaaaaaagacatacccaaccatatgctgccttgaacagacttggctgaacacgaaggaatatcttattccatgtaaattgtaaccaaaagagagcagaagtggctaaacttagacaaaacagactttaggacaagaagtgtccctagagaggaagaaggccattaaataatgataaaagattcagtttaacaggaggatacaacaatttaaatatatttgcacccagcaacctaacacataaatatataaaacaaatacaaatctgaagggagaaattggcagcaatacaataacagtaggagacttcagtggtccactctcaataatggatagaatatccaggtagaaaatcagtaatgaaacagctgaattacaacagtatacactaaatgtgcctaagaaatatgtacaggattttctacccccaaatcagcagaatactcatccttctcaagtgcgcatgaaacgttcttcagaatagatcatgtgttaggtcacaacacaagtctttagaaatttaagaagatggaaatcataccaatatcttttagaccgcagtggaatgaatctagaaatcaataacagaaaataggaaaattagcaaaaatgtgaa

SEQ ID NO: 125482 - DNA, 296 bp, Homo sapiens
cactgcacctggctccagaattgcttaatctgacgttcggtaaccgagaatcctagtttttaacgatcatctatccttacttttcctttaaattagggctccattatcttccaccccccccccctttctgagacagtcttttgctgtcactaaggctggagtgcagtggtgtcatctcggctcactgccacctccatctcctgggttcaagggatcctcatgcctcagcatcctgagtagctgggattacagacgtgtgcccccacgtccagctaactttcagtagagcaggtttt

SEQ ID NO: 125483 - DNA, 306 bp, Homo sapiens
gaaattgtgagtgattagaggatcccatagtcacggttggtactagtccacggtgtatagtccacggttggtactagtctacgctggaatggaatgccagtcaggtatggtacatgttgaacagcaggcagatactgcgacaggtagtgtgacagtggatgttgccagcacttctgcaaatggaagggaagatcatatttttcagcatgatctgtgtactacacactgccaaatgttatcttaacgctcccaactcatactagggatcaaatagagttatccccatatcatcaaaaagaacaaggt

SEQ ID NO: 125484 - DNA, 378 bp, Homo sapiens
gggaggaaacacgaggagaggcgacgtgcttagataagtgagactccagggatctcggaggtactcaagtagaatcgaattttcctcactgtttctaaggagccttttaagcgaatcacggaagcggcttcacaacaggggccagatgagatccgcatggattagaatctcggtgcagccaccaacagcctcaggctggccccaaacatgcccgttgttcctctgtaaataaaacccctgcttcctctcagccctgagagcagcacgggaagccccgtggacaggccctatggacgcactctggacaggcactgtgaacactcctagacccacggcacaccgtcacatgtgtgtgtgcacacgcgtcaagcacacaca

SEQ ID NO: 125485 - DNA, 283 bp, Homo sapiens
aaagtgaattggaatggataggactattaggagatattacattccagacgaagaattgtgacggctgtgaccaagacagtgcagtgagagtggagaggaggtcatggattaatctgctgttttttgtggggggcagggggtagacaacagttggttatcaattagttgtgagtagtgaggggaaaagagaaaggttggctccaaggctcttggcctaggtaattggttgagaatatgggctattcatcaaaataggaaacacaggagggaaaagacaatgttg

SEQ ID NO: 125486 - DNA, 315 bp, Homo sapiens
accacattctggaaaccccatgctggggcaccatcctatcctatcacctcctccgcaacagtgccaaggggctgtctgtgccacagtgccttctatccccactgaaaatcttggtcccttttgggagaatagataaatctgtcagatagaattctaaataactaatgtaaatacaacccctacaggaggtacagctgaactccctcttccttaaatgacctccttccaaagactgcagcagtatggaaagaagggaaaagagtcacttgacagtggagtcacttgacagtggagtcccctgacaaacactacctg

SEQ ID NO: 125487 - DNA, 777 bp, Homo sapiens
agagtgacattggtggcaattagagaagaaacacctatctgacagtgaaaatgaaggcagtgaaaatgaacacaagcctgaagaaataacatgaagtgaattaacaggacaaggcagcttgtaaattgtagtttcgcaatagtttttagaaagaacaaacaaacaattttacctaaaatgaccattgatctttgttgattggctaaatggattccactagcaatgatagtttaaaggatgataaagcatcatattgcttcaattaaatatataaataacatggtaattcttagaatgtgatttttgatagttttatctttcaaatatatcagtagcatattcacatcccttgtgattctttgaagctgtttggaaggctgtacaggttataacccataggcagcattttgctctagtttttttcgaccacagaacattgaggcctacactgaatcttcacttgtgccattgtttttcacttgtgtcagtttaaaaatgcatttcacatcttctgtaattggtaatcccattttatatctcttttatttattttctttgcttcagtttattattacatacaatcacatgcagtcctaacagattttggtgacaaatacagtcaggtacaaacatagaaggaattcccacctttatatttgtagaagtattttcaattaccatcactcttgaaacaaaatcacaaagaacatacgggagaaattgttattctcattttataaagacacaaatgcccaaagaagtgatatatcctatgta

SEQ ID NO: 125488 - DNA, 417 bp, Homo sapiens
caaagcaaactgcatgtggaaagacagctcttgtcatatgtgctgagggtcatgtgtggcttgcaggtgaacaggggaaagggggcaaagtggttgaaacatgagagtttaagaagggctaagctttagagaaatgtgtcagatgagactacaaaatatgcttggactgcggttcttggtgtgaatccacagaagcccccactaccaaactcagagctaaggaaatatgttcactgtggcactggggcatccatttttgtccttggcatctccttcccgtcactgaacacacaaacgaaaaatcatctcccctcctccctttccgtttcatccatctttttcatgcttggtccaagaaacatccaaagacagcaagagagctcattttattgtttttagcatttgcttggtcccatt

SEQ ID NO: 125489 - DNA, 151 bp, Homo sapiens
gtggtttacttttacatatgataataatcacaatgcttctttaaatgtcatattttagacgtaacattataaatgaatagaacttcattaatataatactcccaggtcacagcaatctatctgggttttgtttcccctggtgtgaccttgg

SEQ ID NO: 125490 - DNA, 286 bp, Homo sapiens
cttctgagagtactcactggtacctttagtacctgggatccagtatcttccctaatgagattccttagaatttcatcccatttctcatcagggacatccttgtccagccctgttacctcggcagtaggctgaccagcagctgcatcattatatccaaccagcaaagcattaaacttgttagaaaatgaaactgtgtgcccagactttcactgtgttttactgaaggcttgtgtcagagactgtaagatcagtgagaaggaattcctaaagatactattaagggagg

SEQ ID NO: 125491 - DNA, 222 bp, Homo sapiens
agaggcatttagaatgggaatgccaaccagttagagttaaggaagatatttttcagagcatggccaaagtttttcctgtattaagatactttcaggaaccctgcaattagccaaatcacagatttccagttatttcggtcttgttaaaaacaaggctgatcacatctgtcttaagttggagtatgtgccttagcaatagaagctcttgcaaacctttaatta

SEQ ID NO: 125492 - DNA, 403 bp, Homo sapiens
tctgcttctgaaaggagaccaggtggactgatttgggaaccaaaaacaaccagaaatctagagggaaggggagaaggcaaggagagatcttgatctaggtgcaccagaacttatatgcaaaatgctgtttttaagtgcataggtattaatatttattagaggaagagataccatagcccacatcagcttctcaaaggagtctatctcacacacacacacacacacacacacacacacacacagacacacacacacaatagtttaaaaatgactgatctagagaaattaagagccaagagaaagaagcagatgagacaagaggcccacaatcatccatggttggaatgagccatctccatggacctaagacttgggatcaggggtggcggaaagtataaacaga

SEQ ID NO: 125493 - DNA, 248 bp, Homo sapiens
acgagggcagactcgagtcagccaatcccaggttcagattccggctcctcctccccttctctttgtggccctctctgaaccccattgtgaagcacgggtgacagtagcaggtgattagaagcttcagtgcaatggtttgtgttatggtgtcatgtgctctgcacagggcctggctccccgacagccctgggtcaggggccagttaggatgatggatgattactgccagcagctgggtttcccctccac

SEQ ID NO: 125494 - DNA, 779 bp, Homo sapiens
gattacatagtgtctatgagacttacttcatatgtaagaacatatatagactacaagtaaaggaatgggaaaaaagttccttgcaagtggaaaacaaaaaaagaacaggagtaactatatgtatataacttactatataactcagtaaaatatgcttaactaaaaaatattataaagagacaaggttattatataacaataaagggtaatacaggcagaggagatgacaattataaatatatatgcacccactataagagcatctaaatatataaagcaaatatcagtgaaagagaaaaaagtgagagacagactgaaatacactaaatactgaaatacagcaaatacagtaatgcgagatttcaacataccactttcagcaaggaacagatcatccagataaaaaattaacaaaaacatgctggctttgaactgtactctagaccaaacaaagtcaatatgctttgcaatagataccttgaaatttatttttcgtgtctaattagttctttttaaatgcttggtgggattctacagttaaaccaggtcctgggcttttctttgatgagagacattttattactgatttagtttaaagacctgcaaagacaatagcctctcgcttatcagatattttattactgactgaacacatttacacaatattctatccaatagttgcagaatatacatttttcacaactgcatgaaactttctccaggatagaccatcttttagcctccaaaacaacatatgcagaagactgaaatcatatatt

SEQ ID NO: 125495 - DNA, 270 bp, Homo sapiens
tagcctggcccggattccttcactaataatcatctgatttagacccacaaagactttagattctgtaattataatatacgggatttttaaaaagaatcagatttaaagaaataaaagatgtaatcacaagaaaggtctgcaataacagcaataaattacaagtaattacgcagacagattttaaaaaagcaccaaataaaacttttagaggtaagtataattgtcaaaataaaaaatggagtggttgagtgaaacatcagattattcata

SEQ ID NO: 125496 - DNA, 466 bp, Homo sapiens
caaaaaagaaatagtgctatacaaacaaatgcaagtgcaagatatgatgatgaggtaaatctcatatagtctagaatgggagctctgctataacaggaagggaaagaatgaggcaagagaattcaggatgagttctctccacaagcaaatatttcatgtcactttgtccactggatacaggctaggagacaattaaacaggagacaatgccgatgacagcacaaagtcattttcttctatacttagcactggccagactttcatcataaagtgatattagaggatttggcctgtgtccagaggacaatggtcataagatctaaaggagatagaaggggaaaaaaaggcttgagctttttcaaagtaaaacaagaagacaatgagtattgggccaaaatggtccatgttaagctgtacttggtggcgagttcacattctctcctcaactagtaatcctgttttcaaa

SEQ ID NO: 125497 - DNA, 230 bp, Homo sapiens
gctaggcctggccagactcactgtggacagaggaggccttgaagacacgggctcagcaggcaaatacctgggccactccaaaaacccgggactggggagtccaggactcaaatcagggctcacatggagcaaaccagctcccatcccccgagacccccacaccctggggaggagcctcagaaatgcacccgtcccctacagtgaactccggctgccccaagatgagccct

SEQ ID NO: 125498 - DNA, 717 bp, Homo sapiens
gaggttatgtcccaatacgcccaaagtaaattgaaaatactgtaagtcaaaaatatatttagctaggcgcggtggctcacgccagcactttgggaggccgaggtgggtcacttgaggataggagttcgagaccagcctggccaacatggtgaaaccctgtctctactaaaaatacaaaaattagctggtcatggtggcaggcacctgtagtcccagctactctggaggctgaggcaggagaattgcttgagccttggaggtggaggttgcagtgagccaagtgccactgccctccagcctgggcaacagagcaagactccatctcaaaaaaaataaattgtatttaatacacacctaacctaccaaacatcatagcatagcctagcctgccttaaaagtgctccgaacacttgcgttagcctacagttgggcagaatcatttaatgcagagcctattttataataataaaaatgttattaataatacaaaatagaaaagatcaaaatgcaaagtacggtttctactgaatatatattgctttcacaccatcatcaagtcagaaaattgtaagtcaaaccatcgtaagtcagggagtgtctatatttgtatatatcgtctatatttgtatggctgttgtgagaaattaacaaaataatgtctgtgttggtacttggaaaaccgtaaagtgccatggaaatatattgtcttggttatct

SEQ ID NO: 125499 - DNA, 705 bp, Homo sapiens
agggtgaagttagggaaaatgacttttaaagttttgtagaaactcctgggctcacctctgatctgggcatgaatagatctgaccctcaacagtatatacaaaacttgagaactaaactgcactgcaaagtctttgaaaactgaaatcatgttgggtcagtttaccaaaaagatccaacggtcctaaatgtatatgctcctattaggataattttaaagtacataagcaaaaatggacagaatggaaaagagaaatagacaaatccataattatagttgaagacatcaacagtcttctgtgagaaactgacagaacagacagaaacagatagatctgatggaaaatcagtaagagaaggaagtactgaacaccatctatcagctagatttaatttacatttatagaaccctccaaccaacagcagaatatacacttttttcaagtgcatggagcattcacccaggtagaccacatcctgggtcattaaaacaaacaaactaactaaatgtaaaagaacggaaaccatgcaaagtatgttccctgaccataatagaattagactaaaatttaataacagagagatagcaaggacatctctaaatgcttggaaggtaacttcttcaaacaaataaagagcatctacaataaccctacagctaaaatcatatttaatagtaaaagactgaacacctttcccctaagatc

SEQ ID NO: 125500 - DNA, 520 bp, Homo sapiens
agcgcataaccaggactcaagtacaaccccagacctactgcccatcaaccaagtaacctttgaaatgcacttccctcattcttttgctgatgaactcttgtgcatcccttaagacccaactcaaacatcacctcattcgtgaattatccccatttcctccagggggaaggagtgtcctccactctgggcttctgcgctcacattcataactctcaccacagcactcgtccccctgagctgtgattcctgctgtgtctatcttccctgctagatgctgagctccttgagagcagagactttgtccaatttatcttaaggcccccagcccctttccctccagtgcccaacacagtgctggcctagtacatcccaggcattaatcaatgcagaatgaatgaatgtttgatggaatgaattcactttgcttgctaagttgctcacggagcagaccctttgtgctgagtgactaagtggagcaggtcagtcacctgggattcaccaattgttgatggcctctctc

SEQ ID NO: 125501 - DNA, 252 bp, Homo sapiens
caggaaggctgagtgcaaagtttgcaatcaggcgtgtaaacttagccagctccctagctagatgggagcctcttggaggcaacctgcttcacgtaaaaggaatcgtcagcgtcgctgttgcaaccttggaaaattcccttttaataacatcttcacaatggagagaaaggtttgttgttcttcttcttacttgaaaacactgttaatcctaccacctggtggagagtttgatgaataaagaccgttgctcag

SEQ ID NO: 125502 - DNA, 554 bp, Homo sapiens
tgcgtaaaccggcacttgttcccttggggctcctttctccatagggtaagtatcttaagtgttcaatatactgaatgctggtgttatttccccacaactgcagtaaatcttcaaaaatatgctgaaagtagtctgtagatacattaacccataaggaagtccaattccctgtgagttttaacaggtaagaccccatccataccactaatcagactttcccaggcaggaagttgggtttttctctaaaacaacaaaggtaacgcatgctaagtgggttagttattttgctacctcaagtacagctggcccttgaacaatgtgggggttggcgcacagaccccctccacagtcaaaaatctgagtagaacttttgactcccccaaaaattaactactcatagcctattgttgaccttatcagtaacatagccagtcaatgatatggtttggctgtgtccccacccaaatctcatctcgaattgtagttcctttcatatggagcaaagaaagtatctaaaattcaggcgctaatgttcttttcatgtgtttggcccc

SEQ ID NO: 125503 - DNA, 426 bp, Homo sapiens
cgcagcacagctgccaccgggtatcacagcccatgctgtggccacaaagccaacctgggagccctcagggactggggccaactcacctcatcccattctcatcaccagttgtcaggtcccggggtccgggtccagcccatgctgaagtccagagggagttggtggatgagcagaaagaacactcggggctgaaggcaggtgaatgtggttttattcagcagcagcttttattaacagctttctcacactagctctctcacactgtttgccctgtcgcagctgcttgagccagtggctcccacaaacagctgtgcatctggctcttccttgccttcagggtcagcggcttaactctttttctctctgggcatgagcaagccaagctgtgtgctggctccctcctgtccatctgcaagacggacagct

SEQ ID NO: 125504 - DNA, 631 bp, Homo sapiens
cgcagtggctcacgcctgtaatcccaacactttgagaggccgaggtgggcggatcacctcaggtcaagagttcgaaaccagcctggccaatatggcgaaaccctgtctctatgaaaaatacaaaaattagctgggtgtggtagtgtgcacctgtaattctagctacctgagaggcagaggcaggagagtcgcttgaactcaggaggtggaggttgcagtgagctgagaccacaccattgcactccagcctgggcaacagagcgagactccgtctcaaaaaaaaaaaaatgtttacagaacactgcttcagggcactacggtgggaacagtttcatcccacaggttcgcctgcacacattagagaccatgcataatagttaaggcgcatgaggaaaacgaagtgaggatgtggctgggctgccatcaggctggaaaacgaggtacctgcttctgtacataggggtgatggtgtaccctggccaggcccgtcctgggcaggaatataaagtgttaaatattctggagagtgggaggcaaggagttcatggaaatcagagcttgcagagacttagttcagagacttaagaattcatctacaaaggaatgatcatgagtccacagtagtataaat

SEQ ID NO: 125505 - DNA, 665 bp, Homo sapiens
gtaagcatctatgacatgacaaggaaaactgaaaaagaacaaaatagttctcaaaataagaatgaataactgaacggatgacttaagagcaggaaagatacaaccagggagagaattcatgaacttaaagaaatgatacaaaatagagttcaaaaagaaaaacagaaaatagaaaacaaaagctacacaagataaacgcagaagtaaaacattaagacaaatcaatactctggaagagaagaggatgagacatagccaacagctgtttttaatactctagctatctcttaagatttctaccttaacttcattcttggtctgaaaatacagagaacttcccagaactaacaacagatacacattcacacatttaaaaggaccaatgaacgcaaagcaaaataaataaaaagaaatctagaagttctggctcccagtaacaggcacactccaccctgtctctccacaacgagaaaatacctctataaaaccaggggagaattcatggagcgctatttgaggaacctagaaagtagagtagcagatgaaatgggatagaagattctaattaaaagtaccaccaaaccagtggtgtgtttgagtttgttcctccattatcactcagcatagactcaaggcagcccaaatactggacgtggacatcagca

SEQ ID NO: 125506 - DNA, 453 bp, Homo sapiens
atctgtctccatgtggctctggtttacacataaagtataactggcaaaataaggctgaaaatcctagaatttctgaagtagcgacacagctttcaattcaagtcacacatcatttctgacacaaaaataacagcagttgagtacgtgagaggcctttccctccagaagtgtaggctctgatcccacaatgtcgtcattcatattccagtccagaaggacagaccttctcccagcactttcagctagatctgctggcttcttttatggttctaaacttacccaatatggaaagcagaatgctggtccctgaaagatgtctgcatcctagtcccctcaacctgtgactacatcaggttacatggaaaagggggagtcaagattgccagtcagctgaccttgaaatagggagatttttctggaggatcagggaggctcaatgtccttaaagtgtcc

SEQ ID NO: 125507 - DNA, 252 bp, Homo sapiens
tcaaagaaaactgtcacgtccaggctgttcagaagaattcaaagatgactgttctctgtccttatttcttctacattatgtcggttccacagcatcagttggatataagttccaccattatatccctagcacctaatttagtgctaagtatacaaaagaaccaaaggaaatatttgttgagtccatggactgaagaaatgaatgagtaaatctaccttttctgccactaccagcttacttatccaatgaagg

SEQ ID NO: 125508 - DNA, 191 bp, Homo sapiens
gagcccagaagtggaggttgcaatgagcagaaatgcatcccagcctgggtggcagaatgagaccccacctcaaaatacaaaaacaaacactctacaaaaactattttcaaaaacagttgtattcattaaagcaaaaataaacgtctgcaatcaccaaagcaaaagcttctgtgcttatacatccttggctt

SEQ ID NO: 125509 - DNA, 109 bp, Homo sapiens
ttgagaataaaacagaaccctaaacaaacatgtccccagtgaacaatctttagaaatcaactcatttttctaaaaacaatgaaacattgttgcttaatctatgtgtaaa

SEQ ID NO: 125510 - DNA, 612 bp, Homo sapiens
gcattgtgcattgagtgagactataaaaaacatacttttattcccgcatagattttctgtatgttttttctcataaaaatctattctgaaaacctgttttcattttatgctatttttgtatttgaaggacagtagaaataaaaaatagacagtttttggttttgttttcatttttctttttataaatgagtctatgaaaaaaattggaaagaatctttgaaaaggttggaatagttagaacccatgctgctgttttcttatgagataaagcctgtctgttctcaggatggcagaggtagtttgtcatttagtctgtgtttctttaaattcaaatgtaataccaatggttaaagtaaaatgtggttttatatatcttcatgtaaacattgctaaaattttaatataatctctgacagcagtaagagaaaaagtaaaccacttttgctttcagaactttctccaagatatctatggatttggggtggtaaaaaaacatgcagcaaagtgagtatgtgccttctggcccatggacttcactcacagtgttattgccaaggaagccgcctcagtagtactgcccatcacagggcagcctttcaaatgcttggtgtt

SEQ ID NO: 125511 - DNA, 641 bp, Homo sapiens
aaagtctctgtccagagaacattctcagagttttggggattcttcccctttcttatcttgtatttagtccaggtcagttaccaggtttttcttccataagggagttaagctattttggtaagggaaagctttgtatttatggtttatgagagttccatctatgctgaggtggtcttacctcctggaaattcccaagccagggttggaaatccctagaccatgttgcatcatactgctaattgacacatagtgtcagccctgcaagatgtttgcatgggccttacggctatcattaatcttatagccacaatatgtctctaacagtgtattacaacatgtcagatttaaagacataaatggattaaaagtaaaaggatggaaaaagatatttatgctagcagcaaccataagacagttggaatgactatacttacataaaataaaagggatttaaaaagttaccagcaatatagttggacattttataatgataaaagaaccagttcatccataatatataacaaatataaatgtatgtgcacctaacaatagagcaccaaaatacacgaagcaaaaactgacaggtttgaagggagaaactgattaatagtgtgatcaactattaatcagaccactgatta

SEQ ID NO: 125512 - DNA, 332 bp, Homo sapiens
aatttctctaaaagtgaaactgctttaactgcatcccaaagatttttatatgttgtattttcattcccttcagtgtatttttacatttcctttgagactttctctttgaccattggagtatttaaaagtgggttgtttaatttctaattgttttgtgattttcctggtatctttctgttattattgatttctagttagattcattatgaacagataatatattttttatgatttcagtccttttaaatttgtgaaggtttgttttacatgacccaggataggatgtggtccatcttggtatctatttattagttgccaaggccattttttcc

SEQ ID NO: 125513 - DNA, 276 bp, Homo sapiens
ttattaaataaattgtttttgactgtccttgagttgatctatatttgctgatatggaatgatcaggtgaagggacccttagtacccctgaactcctagaacactcctagcgcattctctgcctctctgtctcactcctttccctggaagaaggagtgcctgatctaagtgctgagagactgaactgagcagagagcctgaaatgagcagaaagcccaacccctctgaactccctttcagatctgcctgcagtggagcaagctgaaagagtatgaac

SEQ ID NO: 125514 - DNA, 303 bp, Homo sapiens
gactgcagtgcagtggtgtgatcatagctcattgtaacctcaacctcctgggcttaagggatcctcctgcttcagtctcctaagtcactgggactatagacacacaccaccatgccccagctgcatccccatctttgtgacacaatccttgtcagcctgaccagaaaactcttccctcccccatccagtcagtctcgagtcccctctattctctccccatcatctttctgaaatctgtcccctcataataatagcagtgatgaggataatagcagctcttgccaattaagcacttgttatgag

SEQ ID NO: 125515 - DNA, 789 bp, Homo sapiens
gttgttttgtggccattaccttctttctatttgggtagagatgaatggaataatgcgttttgttctcagggatccttctgtcaagaggtgacacttactgcctttcctaggacatctttcgctatttctctgttttagcactttcttctgtagaactagcagagtgcacttctgtgggggcaagatgcaagggaacatgtgggcttaagcacagataaagccaaggaaccagagtgcatcaagtctgggtgttagagatcatattcctgtccatgagttttcttgaaatggaagtttggaaagttgtgaatttgggtggtcattcttcattttgaagctctgattaacttgaaaaatactcctccccaaaggctatctctagttaattgcaattcttgttttaaaagcaaaagaatgagaatgtatatatcattcggtttgcaacatatatagagataatatataacaataattgcacaaaggggggaagagggaatagacttatataggagtaatatttctatatttcactagagctaatttaatataaacttgaagtaaattctgataagttaaaatgtatactggaagccctagagcaaccactaagaaaataactaaaaaaagtggaaaaatcttttaaaggaattaaaatgttatactagagaaaatattcaattagcactacacttatcagcaacataatacacattctcctcaaatgtacatggaatattctccaagacagaccatgtgctaggccatataacaagcctcagtgaatttaag

SEQ ID NO: 125516 - DNA, 168 bp, Homo sapiens
ttagagcatacaattccatggtttgtaatatatttccagagtcacgcagccatcactgaaatcaaattgtaaaatactttcatcacccaaatgaaaaccgcatccctctcagtggtcattccccacccactggcacccacacgtccccctcctgtctctgtggatggg

SEQ ID NO: 125517 - DNA, 708 bp, Homo sapiens
ggttcaagcagttctcctgcctcagccttgtgagtagctgggattaggtgcccaccaccatgcccagctaattcttatatttttaatagagatgggctttcactgtgttgaccaggcttgtcttgaactcctaacctcaggtgatgtgtctgccttggccttgcaaagtgctgggattacaggcgttagccactgtacccggccttttcttattttttttttcaatatttctaagctatgttgttcatctgttttctctaattgtcacaaattttctaaaaattttccaatactcatcatttatgttaaaagatccatatatattaatgagtagaccagtgcagttcaagcccatgttgttcaggggtcaactgtacttgttactgggaaataaacataactttaaggaataaaattaggtgatgtgtccagcttaccttcaaatggttcattaaaatgacatatacatataaacagagatacctgtaaaaacaaataggcaacatctaaacagttgatatatctggataaacagtagttcattgtattatttttgcacctcgtctataaatttgaaattacattaaaatgtaaagtcatacacataaaccaaccccatgccacacactccccctcaagaaaaaaaaaatagcttttagttcaaagtgtataggggatgaaaaagtacctcgagtgccagtctgatgt

SEQ ID NO: 125518 - DNA, 309 bp, Homo sapiens
tgagccactgcgcccgaccttatttttgcttttttaaaaaagatactaaaacatgtttgtaagctgatgagatgatccataaaagagcaaaatgatgatacaaatgagagggcatagttacaggagcaaaatacatcttacacctttggctttaagcattaaataatggaaaatactactatttacatttctgtcttattatttataagtgaggttatctttacaacttttggttaatgattctaaatgtaaatatgactgtactatggtatagttctctaatgttctaaaaatcctacctgcttttgt

SEQ ID NO: 125519 - DNA, 171 bp, Homo sapiens
acttttccttcaaaagaataaagattagaatgaggagagagatttcttacttgatacagtgcaagccagaagacaatgaagcatcattagagtgctggaaaaaaaaatcaaactggaattctatatggaatttaaaaatgaagttaaaatcttctttcaggcacacaagag

SEQ ID NO: 125520 - DNA, 306 bp, Homo sapiens
aataggtaggcctctcatccaaggttgatgattacgttttatttgtataaaaagacaggttcatttgcctgtagtctacatgtacaacattactgatgggaaaataggatgctttgttaacctcttttgttaaaatagcaaaacattaatgtattttaacaggaaatggttctagaatggtattttaaagcagtttactgccaatcacagaaatgactctagaatggtattttaaaacagtttactgccaatcactgaaatgactctagaatggtattttaaaacagtttactgctaatcacagag

SEQ ID NO: 125521 - DNA, 343 bp, Homo sapiens
gagacctagtaacttgcccacaacactggaaccagagcccagattctaggattatgtcctgttgttcacttgaccttgaagaacggctaacatttcagcagcataggtgatgggaagggattgcagagaagctaagagaactccaggtagagggatcaacagaagaaatttcacagagtctggctctgaaactgagagactaatgattgtgttcaaggagtgtcagagtaaggaggctggaaggcaactgaagatgaggctttgtgatgggagaagagatagtcttagactcttgtaacacaaaagatcagaatagagggttagaggttttgggggtttgttt

SEQ ID NO: 125522 - DNA, 792 bp, Homo sapiens
tagtttccccatctttgacataactatataggactaggcaaattctcagcttagtccttggagtggaagggagcacagctacaaatccttgtctccttatcaggaatttacctgtaatccagatggggatggcacatatggcattgtgcaaaatgccagggaaggagcctgctgttcggaggcttgtgaggagggaagggatggtaaaggcttccagagccagagagctaaatggaagcccccagggaatcagccagtaccaggaggaaagagtcagagcctttcttggcatccctggaaagaggcaaggcagagggaatcatggaccctagggtgatggatttaagtgtccctgatacaaggacacagccactaaggagtcacgctctgtgttgctgctagctccccaaaggaaaaaggccagagattgaagttgtattgcccatgaaatgggaccactaccctccctgcactcccattaccactcacatccagcaatgacaggccacctgtaagctctcaagcttcctgagccaattgtctcccctaaactgcagaacaggtgcccccaggagactgtccttgcccaaagtccacgtcccttatgattcccccgcctcagtccagcctctgcttcctgattgagtacatctgtgaaacctgagctgttcgtacccccactcttccagcatcctcagcagcttcctgctgtccacgagataaacttcagctccttcaggtgtggcatttgaggtcctcttgcatgccatctcctttcttactgtagcactt

SEQ ID NO: 125523 - DNA, 512 bp, Homo sapiens
ggtggcctatcagagtagtaaggacaaaggacagatatcagagcaaagggaaaatgaagagcatgaaacgctgttgcagagggaaagagcaagagaagttactggtgggtaacaggatcctacttcgtatttagataatataattatggctgccttatcattttcatctttccaaacaaagattatgggcttctggaatgaggattattcaagaaatttaatgcatacttccacacacaataaactatggtaccttgggtggccaaatttaattcaaaacttgggacaatttttcagttacccaagtttacactaatcttagcataaaacttttagctttcacctaggtaaagattaaataaattctgatttaatgtattttctttttgctatttctgtaaaacagcccaaacagtctaaaaagtgatgatacactaataaaagacagattaacccacagaaagagctatggtatagtctgactcgccttaatcctaggctacattatatat

SEQ ID NO: 125524 - DNA, 382 bp, Homo sapiens
ctaaatacatgtaacttatataattaaaaatcatctttcgttgtagaaagtaataaatgggggaaaagagctatcattcaccttaagcagtatgtctgctaatattcccataattcacttttacctcatctcaaatgctattacttctcactttttttaatttaatgctaagtgtataattttgatgtttacacatgtatataccaacaaagccacaaccaagataaaactatagtacatttctggcatcataaaagttttcctcatgtggccttcacagtcaatacctaatgacaccatttttttctaatttctattatcaccataaatttgttttgccaggttttgaacactatataaaatggccatttgcagccgggta

SEQ ID NO: 125525 - DNA, 559 bp, Homo sapiens
tcatgtcactatggcagagaagtgggtaggagacttgagaacaggtgcgtctttaggctgctctaactcacccaatctggtaattgccctgctttcttgtctaagtgttgggatctgaccttgaccttggactattcattgccacctatggagaattaaggaaaggcaaaaccttggtcatctccctcttgctcgccattgggaaaatgccttctgatttagcgcagcaatttctcctcattaagctacaaggggctgggtaaaatgaggcaggagagagcacaaattctgatgtcaggggatgaagtttgaagccaggctctacaatgtcctagctttgtgcatttatccagatgggactcagtctgaccttcagtttcctcatctgtaaattgggaatagtaccaagacctactccatggaattcaaggaatcagcgaaactaaggtgttcagaatagcagttagccactgttgctattattcaatttccaaactgattctctgattttgaaaatgcaaagacaccactcatgggaccaaagaggactgaggtgtga

SEQ ID NO: 125526 - DNA, 655 bp, Homo sapiens
actctagaggatcgcgtgtcatacccctatcgtacgtagtgagtatctgaaaactggaagagaagacagcttctaagcaaccagaagttatgtagccaagttcatgcacaaaagccaggatgcttgacacctgtcttggctctggttttaggcactcacacgtacgaagcttgagattcttgtttaccagtccccacaaattataagccacagattaaaatgtcccagggctggcttggagaaggccctccaaatgcaccagagaagcttccggaaacttggcacctgagactaacgaaacagctttcagcagagtgggtggcagatgggaaggcttcagaagcaaggtgcctccctgagtgatgtcccaggagaaaaatgacatcaacccagccaacgagaaaaagccctgtcgtgctgtgtgggaaggcaggtgccgggccttacctagctccacatgctcatgccatacttgctggaagctgggatgatgggatcccttctccagggccacaggaagggagaggttcatgggtcctggatggctaggccctggctgggactagagagcctgggtgagagaattgccgctggggctctggaggtgctcgctggggaaggtggtccgcggcaccgaagaggaaggcaggccatc

SEQ ID NO: 125527 - DNA, 256 bp, Homo sapiens
gagaggctgagttatttttgcaaccccaaattaaatgatgcatggtcgctggctgtgcatgccacggggcttgatttccattcccctgattcactcttccctcctccagggcgctcaggctcatggaaactgagggaagctcagggccctgacgacccaccaggccctggccaggacactgcatcctgctggaaaggaatgccccgtgaggggctcacggtggatttttaatccctgttcaggttccctgccctca

SEQ ID NO: 125528 - DNA, 385 bp, Homo sapiens
agagtattggtgtctttaatctgttctggataatccttaaccatcgtgtcttagaatattacctttgtcctattctttctgttttctccttccaattatatatgtattagaccttctatttcatcttaacatgtcttttattttctctctcataaatttcatttctttgctgtatgtgctatattctggactcttcagatttactttctagtttactaataattttcagctatactgagtatgctgtttattgaattttaagttttaattattataaaaactatttcattcattttcaaatctgtctagttattttttgatagtttcctgtttctcacccatactttctatttcctttaaagttttaaaaagcatattgaactgg

SEQ ID NO: 125529 - DNA, 363 bp, Homo sapiens
gcatccacagggacacacccatgtatataaacaaataagtggaagaaaggaatcagttctcacgttagaatcaacagggctggaaggccatcaaggaaaccccgtggcaggggcaggggttcaaagagctggtggttgtagtctcagtgtctcccaccaccacttactagttacaaaggaaaaagaatcactttctagaggcaaagctggcgacaccacccgagccaagtgatccaagttaacatcaccaggaatgggacaggccagcttcaccaccctccggatggacagcctcggtagcagaactcctgccaaagacacagctgtccagggtcgaatcatccggagacacagggcaaaccc

SEQ ID NO: 125530 - DNA, 805 bp, Homo sapiens
tcatttagggttattagcactgggcagacttatcttcttggcttttagcataatggcctgcagatgtctgtgggataacttaagcctgcatcaccaccccagatggaccaccccttcgctctgcccctcgtcccagccacagcataccttagaaatgtagatccaggggcaggctgctgctagagttcttggacttcagagccaagagggtctgcttcaaaacgtggcttttaagaaatgtgcagacacacgtacatgtttgtttagacagagccatgtgggatgtagggctttgcctgttagtgtgaaacatttcttcagtgtttcctacagtgttctgatttgtactttggtgcttggacatttcctgttggatggcttaacggaggatggcaagcagccttctctgatcacttctaggagggttatttgcagttatcagctgctgggggtcagggggcatctctcgtgcctccatctgtagatcctgtgaaaactcccccctccttgccttcgtgacttctctgcaggatgactcgggaaagagaaggataaggaaagaaagtcaaagtgagcccctagatagctgtaaacctggttctattgtactttgaaaacaaagcatttctcttgtcctccacagtgaggacatcaggaagtaagcctcccctgggggaccatgcagataaaggcagaaggagtaggtcagaccccagaagatgggacttttctgattcaagaagttcagtatctttgtgaggaactgcgccacacgaatgttgatgcgcagttcagtgtgacaaag

SEQ ID NO: 125531 - DNA, 400 bp, Homo sapiens
ctgggtcatagatgtgcagtctgtatagccaaaaaggacctgtgatcagaagggccctgaaattgatttaatgctcattgttattttgacattcttaacagttttatctttaaacttgtgttctgtaagataagtttgatgggacagtggagtatatgtgtaggcagaggagataagcacaaaatatatgcttacctttctggctactgtatttgctactgtacatcagtgtttctgatgtcccatgagcacagaattcttgtgggcccaccatgtgtggatgttaggcgagtacaaggtaagcatgttgtatctatgactgtgcaagcaggtgaactgatagccctgagatgctaagctttctatttaagccagaatttgctttaaatgtaaaaagaag

SEQ ID NO: 125532 - DNA, 532 bp, Homo sapiens
ctgcctcgcatcccaaagcccgggattacagtcatgagccacaggcctggcctaaaagccctatcttcctacacaggcgtgtagtctttcttcttgattttgcttgaggataaagagtcagaaaaggcttttataagagagatgcttgagctaaatcttcaaaggtgaatataagtttgcctagatgtctcttcttcttctcaaccagacttcttcacttggcagcaaaaatgtgaaggtgtgaaactcaatgatgtgtgttaggggacttcaaattgttctatgtggctcaaatagagggtggggttagagttgttacatgagataaagttggttgggtgggctagggctttgcaggatagatttggattttgtcttgtcagcagtgggatttctttgaagaataaaatcaatcaactttacatcttagctcattctggcagcattgtgcaggatagattagaagggtacatgcatggaggagagacactaggagatgaaacagctcaagaagcaaagtttgagggctttg

SEQ ID NO: 125533 - DNA, 703 bp, Homo sapiens
cagcctcaggcggaatgtttgagggcagctgacctgaacagactgatccgtctgcctggaagattcttctaactcagctggagaatggctgctcaataatgcaggtatttttctgtatttacttgtcacttgctacccacgtggatgttaaagtgaccaggagccacacctgaggcctctcgtgaatgaacggagctacttctgtgtcaggttttggggttccacaggcatgagcaggccatgggtcaggctggttccggcatggctgtggtcggcccacttccacagaccaccaccgcatgctgtccatctatccactggagatggccgcagtggggaccaggacaagaggacaaatgaggccctgtgtgtctgaacactgaccacttgtaaatcagctgctagatacaatgtgcttatacacaacatgcttatcctcctgccttggaaaatacgttttcaaatgagagaaatcacaaaatacgtgcaaagcatgatttgcatggaagtcatcaacatatcaaaagaggaccagatttaatgattcttatgtacgtctggcattctattctgagggggtagcaatgttaggatttgcaaaaaaatacagacagaataattcataaagtacatatttatcctatgaaatattttgcctttaaaaaaatagaatcactccatatcctgtagcaatcaagatttt

SEQ ID NO: 125534 - DNA, 516 bp, Homo sapiens
cgtggtgcctcatgcctgtaatcccagcattttgggaggccaaggtgggtggagctcctgaggtcaggagttcgagaccagcctgtccaacatggcaaaaccctgtctctactaaaaatacaaaaaattagctgggtgtggtggtgggcgcctataatcccagctacttgggaggctgagacaggagaattgcttgaacccgggaggtggaggttgcagtgagctgagattgtgccactgcactgtagcctgggcgatagggtgagactctgtcttaaaaagaaaaataaaaaaaagattaggatgatgctaaagtgtggaaggatggtgggtggtcagctgtgattaccactgtctacatctgcatggcctttaagtgcttctcactgcacttgggtcaagggacttttgaaggagtcttcctgcatttctgtctgcccagataaacccagagactatactgggacgtaggacctgctttcctcatcagccaggacctatagacctttctcatcc

SEQ ID NO: 125535 - DNA, 204 bp, Homo sapiens
atttctgttttcattaaagtttcagcctctatggattttttttaacctcctgccatctcagcaatgcatgaaaaaacacattttagcatattcagcacttcagtctgagagttgtttaggatatgtagcccgctatattgctggatatagaagtcttttatcaactccctcctgcccaataaacattgactttctagagacaag

SEQ ID NO: 125536 - DNA, 189 bp, Homo sapiens
catgcaaaacatatatctgataaatgatttatattcagaatacataaaacaattcttaaaactcaatttaaaaaacttaaaaatgggaaaaagatttcaatagacacttcacaaaagatacacagagagcaaatgaggttttgaaaaggtgctcgtcagacatggtggctcacgtctgtaatcccagca

SEQ ID NO: 125537 - DNA, 544 bp, Homo sapiens
ctgggccaaaatgtggaaaatccatgtaaacagcctattctctccctgagggcagacctatatggtagccaaattgtaattaggcctcttggtgaggctgtgacagagggaatcaggtgaccccaagactggattgggtgcctttcttctctgctccataaaatctcaggttcacattagatatgccatgccttcaggaatgcctgacagaggggatgctaaataaatatttattttataaaggaacagattcttctcaaaatagagatgattttaccagtggacaataatttctttacttgtcttcctgtcttctagagcatcagaagatcatctaaggtcaagcactagacttgtcctctaaacaagtctagtttagaggatcagtttagtataggctgaatgtagccactatcaaccttcaagtaaatcaaagaccttggagaaagagcttaacttgatgatcttccaatcagtcttgcaatgtgaaatctactgtcttgcatcttactgcttctattgaaattgtctacccatccccagt

SEQ ID NO: 125538 - DNA, 813 bp, Homo sapiens
gtaatcacaaaatttgtcttgcatatcaatttgttcatgagtgtttttcaaaaagttttatgtaaattaaaacattttggacttttagttgtactgtttagtgaagaatatctgtataaaccagcagaatccttgaaagattatatttgcatatatttacaataaatgcttggaagatttcattgtttttccccataatgatgactgtttacccgtaagattttaagccagtacgaatattgaacttttgtaatgttacttatgattattctgtcaggtactattttgggtagtacctgaaaaaagtaatccttagagtgtcacctcttagaagctgggcgcggtggcttacgcctgtaatcccagcactttgggaggccgaggcgggcagatcacgaggtcaggagatagagaccatcctggctaacacggtgaaaccccgtctctactaaaaatacaaaaaattagctgggcgtggtggcaggcacctgtagtcccagctactcgggaggctgaagcaggagaatggtgtgaacctgggaggcggagcttgcagtaagccaagatgccaccactgcactccagcctgggcgacagagcgagaccccgtctcaaaaaaaaaaaaagtcacctcttagattatatggaaattcattgtggctgacaccatacaaattatttcacaggcctggcatggtggctcatgcctgtattcccagcattttgggaggccagggcaagtggattgcttgagctcaggaattcaagaccagcttgcagcctgggcaacatggcaaaaccccatctctacaa

SEQ ID NO: 125539 - DNA, 710 bp, Homo sapiens
tactgtgcctggcctgaacatctttttaaaaaagatttattgcttatttatttttgtagcgatggggtctcactaagttgcccagtccagtctcaaactcctgggctaaattgatcctcctacctcaacctcctaagtagttgggattacaggcatgagcccttgacccaaactgaacatctttgttctcttttttttttttttgagaccagctctcactttgtcacccaggctggaatacagtggcatgatgatctcggttcactgcagcctcgacccagtctcaagtgaccctcctgcctcacccctccaagtagatgggactacaggcctgcaccaccacacccggctaatttttgtatttttttttgtagagatggggtctcaccatgttaccgaggctggttttgaactcctgagcttaagtaatctgcccgcctgggcctcccaaagtgctgggattacaggcatgagccatcatgcccaaccttattcttatttttgagcgttggtgaaaatcacttcaggatattattcctggaagtagaattgttgggtcaaagagtagggacatttaaaattttaattcattgtcatttacacttgccaaaggtttttaccaatttatgttactgtgatacaaaaattacgtgcttgccaacagtattatcaatgtttaaaactttgccagtctaagtggcaaaaacaga

SEQ ID NO: 125540 - DNA, 293 bp, Homo sapiens
cttaatcctgctgttagaactatgtgacattgggaggttgcttatcctctccatgcctcagtttccttttttgtgtaaatgggataatgatatacctacatgagtggtgattgtgaagtttaaatgagttcatatatgtaaagtaccagaaaagtgcctgccatcaaatgctcattaagtgttcctcataattgctatcaggaaactgaatgtcacagaggttaaattacttgtaaagataatgttagagtagctgaatttaaactagaatctttgactcctagtacaattgt

SEQ ID NO: 125541 - DNA, 538 bp, Homo sapiens
tggtgatagttgttctagaggatcccaactcagaggcgatctgccatcgagtgcctacagcgtgcctggcaccgacatccaagccagggatagaacaggaaggaaacccggggttgcatcccgagcgtagccagttaattgcaatagcagcgctgtgggaactcagtttataagggggtaggaggagagatttgtgcagcggggtggagaacggcattccacctgtcttcgttttattaatgtttcctgagcgcctgttatgtgtcaggcacagttctaagagcttaggactagagctgtgcacacgacacgtcaggtccacgttctgtctgatggaggcagacaattaaccagcacgttaataaaatgatttcggataatgttaaatgccatcaaggaaagaaaaggtgttgtgccaagaacaactttagatagggtggtaacatttgatctgagacctgaatggggagtattaaatgggtgtagacttcattctacatttcatcttttaatcagttctaaaaacacaaccattgaa

SEQ ID NO: 125542 - DNA, 599 bp, Homo sapiens
catggccggaacgccagaggctactggggagacacaggagcgaccaccatgatccacagaccaggactgtacagagcacttgaaggggcggcctcaagaattgtgccggaacagtgaacatgagggctcctggctcccctctgaggacaagggttaggtaggaggggacaggggcagggctgaggtgggtcggcttggttcatggcagggcttggggagtgaggagagtgaggagtaccgggacccggggtccctgctctgctcacctgctgagaatgagccagtgttggcctctggtctccatgtctgtagagaggcttctctgcttcccctcctgtagaatgggaacgacaacatccagccatagagtgctgagaattcagggacaggacacagcgaaggtgccccagtcccccttcctgaccccagcctggcgtcaccctctatccaagggaagaagcagggatctgcctacgaatctctcaggatgtgaagtgtggcccccagcctggtgcctttgcagtgggcccaggacggagggtagccttggcacctggggaggacaggtgaacctggatccagactctgcctcaggtgac

SEQ ID NO: 125543 - DNA, 204 bp, Homo sapiens
gcagtgacccccccacccccaatattgttaaatccatgaacctattctaacttagtcctcatcctacttaacttatcagctatatttgacagagttgatccctctttccttcttaataactttcttcacctgacttcagaacaagacactcaccaaaagatttccttctatctcacaggttgctccttatcagcttcccttgct

SEQ ID NO: 125544 - DNA, 532 bp, Homo sapiens
gaacctcgtctctacaaaaagtttcaaaattagctgggcctggtggcatgcacctgtagtcctagctactcatgaggctgaggtagaagaatcacttgagcccaggaggtcaaggctgcagtgagccttgatcacaccattgcattccagcctgggcaacagagcaagaccctatctcaaaaaaattaaaaatttaaaaggaaagaaatatcctaagaaaataatcagaaatatgggcacaattttatatgtaaagatccataaataagttatttataaatagtaaaaaactggaaacagtctaaatgattaaagaatatctaaataatgatatgaaattatgaaatgaaatattttgcagcttacctttacaaactttttgatgtcaaaggaaagtgcttatgataaaataagtttttttatgtgtgtaatattatattctgattgtggtcacaatttcaaaaaaaatgttcattgaaagaacgagcgtatcagcctgggcaacgtggcaatacccgtttctacaaaaaaa

SEQ ID NO: 125545 - DNA, 200 bp, Homo sapiens
atgaattggtggatgccagagatgttggccttggtgcttggtttcaagcacacatacctagtgttgctagagcttctgatggacagtcacgtggcaaaactccactgaagaatggcagttcttgtaaaaggactaatggaaatatacatcataaatcaaagagaacataaataaattggacaatgtactctctacatcta

SEQ ID NO: 125546 - DNA, 519 bp, Homo sapiens
gcctacagtcacttaatacatcgtttgcccatttccaggtatgttattaatagtattttaggtagtaattacaaattggtattatatatccgtggtggcttaggcttaaccagcaaagcaatccttgtttgagttggtaatcttgtctgcttttcttaccttatttcagttatattgtgtgttagttgaacaccagaggcctagttttgctgaattgctgcataatcacagagtttgggggtcactcaattcatgcttctgggtcccagttccatatctagaggttcaacctgataatttgaaaagggatttctagtaaaacctcttgtagtgcataatcagttttgacaatgagaaattaatgcctgagaagcgtgtatatgtaaaatcctccctgtccacttttcatcttctcctgtttcgtaaactcaaaactaaagacacaaagcatgaactcatgtaagtgcagagatactggagattacagagaatcacctgcagagcctggggcagggattg

SEQ ID NO: 125547 - DNA, 254 bp, Homo sapiens
ctactctccacttaccttgctttctctcctctccccatctatttccaggtggtggagaagaatatgccattggctgctagctttcacttgtattcctatagtggtcacaacaaatattgggtgggaagggccctagatggtgcttaaaaatgaatgaagcttattgttcatgttaaatcttcacttattccacttccagcctcacatccttttcctcccccacacttataaggggaaaaatcagcaactagatg

SEQ ID NO: 125548 - DNA, 260 bp, Homo sapiens
catgtataaaatgtttaaagaaagacattcaaaagtgaccagatttgaaacacaaaagaacgtttagaattaaaatacatgaaagactgagtaaattaaacatagattagcggccaggcacggtggcttacacctgtgatcccagcattttggaaagccaaagtgggaggatggcttgagaacagaagtttgagaccagtgtgggcaacacagcaagacctcatctctacaaaaaataaaaataattagctgtgtgtgac

SEQ ID NO: 125549 - DNA, 268 bp, Homo sapiens
acctgggggcctttgctttgcctggaacatgttctctgcctcatggcctgtttcgtccaccttgtcagcgagacctctcctgacctctctcccaccccattcccttccttgctatagttttctccatcgcatcttttcagtactctatattaatggtttgttttctgtcttcctccactaaaatagatgctccaggagggagaacagcatgtctcttgggcctgtatccctccccagtgccaggaagagcacctggaacctagcagcc

SEQ ID NO: 125550 - DNA, 475 bp, Homo sapiens
tccccccgctgtgcacccaccccagccacccttctcacctacactagtgcaatcctctcccacctgggcctattaccagtgccacctccctattcaaactcctccatgcttcccatggcaaaatcctaagtgaggttacctaatgctttcatccttctaccattttcacttacacacgagccccctttctgggtctggaacacgccctgtacattcctgcctaaggacttcacagttgcgccctcaatctgggtctctcttccttggatggttacatgcctggcttctcattcttcaagtttcgatgcaagtgtcacctcctcagagaggccttccccctgggtagactcctgaggctacttcttcattgactctgtgataccaccatttatttccttcaatatccttatgtagagattactctgcagaactttatataaacagactttctaaagaatacctaatgcatgaagaa

SEQ ID NO: 125551 - DNA, 218 bp, Homo sapiens
gtgtgtattagtttttttgttttctgcttatttttttaactgctttgtaacaaattatcaccaacttagtggcttgaaacaatgctcactgagtagctcacagttctgtaagtcagaagtgcaggcatggtgtgcctgggttctctgttcagggtctcagaagctgaagtcaggtgcctgctgattagttctcttggttcctatttccagcttaccca

SEQ ID NO: 125552 - DNA, 763 bp, Homo sapiens
aagctgaagtattaatacacacaaccaccaccactgcaagaacaaatccagatatgcaaaataagttttaaacttcatttatgttttctgataataattaatcagggtgtttcaaactcattaagttattaattagcttgaccttacagggaataaataccttggggtcttttgacttttttgttgttgttgttgttataaactataaagtatctaggaagtttctaatttcctgtagatggtaaccaaaagatttatcttaccacatattacattaggatgtggtaactgaatcagaacttgaattactctctggaaggggagtaaagggacagcttttaatttttatgttgatggatggtcttagtgcagagaagaacccagccaaatatatttatatttgatgctgttatttttgatgtactgtacctttgagcaatttgtattgatttaagtaagatttgatagcactgagaatcttttggagaagagaagctcattttaatacatgcaattctattaaattattttcctgtaccagctaatgacctttagacatttatctagtcatctaattctattgcataaaaactcctatagaataaatgtttttctgcccctttaaaaatattttgttttcattaataattatttgcatataaatgaaatagataaaacttaagaaacaaaaatctaacatgtgtataaaagttggcattgccactgttagatggagtcttccaggcagagaaaaactgaatac

SEQ ID NO: 125553 - DNA, 287 bp, Homo sapiens
atttggaataatggattttctggtacaaaagtaagttttctgaattacattcaaaagcgattgtatgctaagtaaattccttcaaaacttggatcttaaaagttaagataattgcaaaatgttattagactatgatgtagctcaacaaaagaacttgtggcagagtacttaatgagaagtgtactggaatggtgattccacatttactatagtcatatgctaaattgtgcttattggactagtggatcacaaatattggccatcccatacctactaaacattctaga

SEQ ID NO: 125554 - DNA, 192 bp, Homo sapiens
tttagatataaagttattaaacagaaaaagttactgaaggtagataattattggctatttcatgtgatttttctggtggttactgtagtcaattttatagtattgccaagtttctgaatccattctgaataatgtgattgtttattcttatgctttgggcctgataatttttgtagagcagcagttcttatc

SEQ ID NO: 125555 - DNA, 491 bp, Homo sapiens
agggggcttggctggggtaggggtagcgggtggaggcatggctgggagaggatgtggcaagctaggaagtggctgttcagggaagagtgctgggctctgggaagggcaccaaggggaagggctaggttaggtgagagatgggaggtgggacgtgggggtcccctaggctctgactccagctatttttaactggtgtgaaactgggtcagcggctgagggagcaagatgggggccaagtggcccagctccctttcttgacctacttaaggcggggcagtgcaggggggggccaccagcctctccttcctcctagactcccaagccactgcctctgaggcatagacaccccctgggggaggaacacacacagaagcacaggtaactttcttctccctcatctctcgcttgtctcttcctctgagcagcacctctctggatctctctttgggaccctcccaggctgcccacagcaaagccgactgaccaggccc

SEQ ID NO: 125556 - DNA, 376 bp, Homo sapiens
gatttggatatctgttctggagatgttgcacaaaatgtgcacaaattgttttactctgttccttttaccaaaagagaaattaacattctccttccttcctctctccctccttccttccttccttctttctttctgagaatgcactattatactgcatactcaaaatgggtaaggtaaattttttgttatatttttgacaatctaaaaaaaaaaaatctctgaacaccaaaagcttggggagctttgggttggcaatattctgcatactgccacacattaagatgctagcaagacaaaacattcctgagaacagtggaaacttagtgtttgggaaccctcccagaccttgttggctggttatgatttttatatcctt

SEQ ID NO: 125557 - DNA, 421 bp, Homo sapiens
aggccaaggcaggcggatcacctgaggtcaggagttcgaaaccagcctgatcaatacagtgaaaccctgtctctactaaaaatacaaaaattagctggggtgtggtgacatgcacctgtaatcccagctactcaggaggctgaggcgggagaattcgcttgaacccaggaggcggaggttgcagtgagcccagattgtgccactgcattccagcctgggcaacagagggaaagggacaccctgaaaaaaaagaaagaaagaaagaaagaaagaaattttgcctcccctacatatcatataggacagcgcagagaacattttcatcaccacagaatgttctagtgaacagcactggtctagaccctagaggcttgctagtcaaagtgaggtccacagaccagcagcatcagcctcagcatca

SEQ ID NO: 125558 - DNA, 448 bp, Homo sapiens
ttttgagaggtttcatatgcagacacaattttaaattttattttttttgcccccaatgagatgtttggagatggtggtactagaacaggaaggaatttataagtattggggaatttttcatcccaattcccatatcctcctataattcaaggagtgaatgggtagtgtttttgtttttgtgagaggggtggcggagggtagagagagaaagagagagagacagagagagattacatagaggtgtccaaaatgaacacagtaaaaaccagttttgattaattctgcaatattaagtaggcagccaaaaattttggtctgcttaattcttagctcatctaagtctccagttgactgattgattgattgaatgacttattcaacatgcgctagccagacactggtctagggcccaggaattcagcaataaatgaaacaagaccaaaaaaaa

SEQ ID NO: 125559 - DNA, 186 bp, Homo sapiens
catcctcaagtaaggggcctaaaagggtgaaaaggtctagtgtcctttaatttttactgtgcttttgaatgtgccccattaaagaatcaaattatgagtatatttttacagtactaattgggaggctggccagcataactaaatatcaaggagacatgtttaatacttttgtacccagtagaattt

SEQ ID NO: 125560 - DNA, 879 bp, Homo sapiens
tagccaggcgtggtggcacatgcctgtaatcccagctactctgaaggatgaggcaggagaattgcttgcacccaggagacggaggctgaagaaaaagtagttaagtcttgcttctgtctctgagctctggagttcattccagtttttactgtgtatattcttattttcacattcttagaagaaagttggcatgctgtatatgcttgtgacacttgatttttttttttataaattgtgataaatgcatagcaatagaaattacccaaaataaaaccaaagataaaaaattccaaaaaaaaaaaaaaaacggaaattgaaaaaagggctcgcgggagtggcggaaaacacgaaggggccaaaatatggggataataaggggcccacagggacacgacaggaagggccagaaaacttttttggaaggaaccctggcccaaaagtttcccaactgtgggccaaggcgcagggggccaccctggaatcccaagattggggagcccgagagggtgtacaccctgaaggcagagttgaacaccagcggcaaatgtgaagaaaacccttttttataaaatttccaaatttgcgcgcgcggtgtggcacatggcctggaccccaaaaattggaagcggaagaagaaggaccggtgaagatcagacaggggtccgacaaattcggcctaaggccccgagtggggaactggggaccgacaacgccggaaattagggtgcaacaaaaaggggcccgggtgggagagagccacctaggattgagtacagccacgtaaggtggtacaggagacccgcggaaattaaatgaagacccacttgtgaaacgcacaaagatgcgggccacaacacaagaacaggggacacacaacaa

SEQ ID NO: 125561 - DNA, 268 bp, Homo sapiens
acagaagatagataatagatggataaataggtagatagatggatgatggatggatgatagatgctgcatgcatacacacataacatatattttggatggatgatagatgatacattagaagacggatggaagatagaaggataggtagatagatggatgatggatgatggatggatgatacatagatagatgcatgcatgcatccacacatacacagatgacagatacatagattatggatggatagatagatggatgatagatgata

SEQ ID NO: 125562 - DNA, 266 bp, Homo sapiens
caaaaggcacacaagcattgattacagaaccaacttgtttgaaaaaccaaaaaaaaattccagatgtatctgtaatcccaatttgtaatgaatcctgatattttgtccattgtgattcaaaactcaaaaaatgttaaaccttccccctaatgtctagtcaccagttccccagtgttaaaagcaggtagaatacatacaactttctaagaagcgtcagtcccagagaacctgccttgtgcctacaacccccaggtctcgccagcaat

SEQ ID NO: 125563 - DNA, 797 bp, Homo sapiens
tttccaccttgttaagccaggaaaatttggaatttcccggccctggtgaaccgcccccctggggcctcccaaaggggttgggatttcaggcataagccacccacgccggggccaatttacattttttaaacttcttcctcttctcctaaacctaagggctccaatgatactacttatcagggaagaaagtcctgtatctagataaactacccttaagtattacaggcttagcaagttgaatttctagaaaaaactcattcataatttatttatttatttttttttgagacagagtcttgctctgttgcccaggctggagtgagactccgtctcaaaaaaaaaaaaaaaaaaaaaaggaaaaaagaaaaaaaagaccaagtatactttgtccacatgccacactttttttttttacccaattaacatcttaactatgtattcaaccaagaatgcaatactctcccatgaccaagacacaactcaagttaccaattgtgtgaaatttttcatctgcctcattaaattataatgaattatttccactatgcatccaaacacacctcaatgtagtgcttattactgttgcattttgattttcacatgactccctcctcctaatgaactgattccattgatggccaagtccaggtcataaccatcttcattttcctagtacaccagatataagatagtaatcaaatctaagatgccactgactaagctaccaattatagtgacatgccattaacccattcatgctagaggttgcaaattttttctgtaaaaaaaaaaaaaaa

SEQ ID NO: 125564 - DNA, 231 bp, Homo sapiens
atagtttatataactcctaccacctgccattcagtcacctttgtaactatcatttttaataatgcacattctcagtttattctttacttaccgagttccatttaccttggaagtaaaaacattttttccaaattcttacagctatctgcttcagcaaatggttaaatacaccctaaattaaatactttatttaaatgaattaatcatatctaccaagtcatatatgatttt

SEQ ID NO: 125565 - DNA, 509 bp, Homo sapiens
tgagctcggttccgcttttggggtctttgctggcagacaaatctaggtcatgtcagtgtttgccattaaattaagtcctcccataacccctaaaatagttttcagaacttttgggatttcaaattataagtaagagaatgtggacctgtagttaaaaatagtcttttcccttatccacccaccaccaaaaatagtcaagtcagaaaacatttctattcatgttaaatgaaaatctttaaattgacattttctataaaattccattgcattactgcaaatgaagattagttagttgttagggttttgttaggagaatcttattaagccatgtggtttttttctaatataacctattataattcataacagctgtcagtcccctgctgatacttttttccccattaaaaatgcatttttaaaagaatataaaagtacatcacattccactaatatatgcaacaatcgaataatttttcaaactagaaaatgatgagcaaagaccccaaaag

SEQ ID NO: 125566 - DNA, 409 bp, Homo sapiens
gaatacttcatgcttctccatgaccataacaaacagaattgttctacttcctttactaattgttctacttctttctataatatctaccaagtattatcctattgccatcatattttcaggttggtactttcttcctgctatcctttttatgggggagacagagtttcgctcttgttgcccaggctggagtgcaatggcatgatctcggctcacggcaacctccacctcccaggttcaagcgattctcctgcctcagcctcctaaatagctgggattacagccatgcgccaccacacccagctaattttgcatttttagtagagagggggtttctccatgttggtcaggctggtctcgaactcctgacctcaggtgatccacctgcctcggcctccgaaaagtgctggga

SEQ ID NO: 125567 - DNA, 350 bp, Homo sapiens
aaggcagtcaaggggcctgggcgccaccacagcgatggcgatgagcccatttacagggacgctcaagtacaaaggcacattacatgtgcctaagaccttaacatcagaggctttggcagcgtctcctgaatatggtgcaggaggttggtatggtccaggggccccacgtgagccagacaggtcccagaaacaagctgagggagccatcatagttgttgtgatagatgccagtcagctctatctcgtctcctggcttgcagctgtccaccagatctgcgaggagaatggcgtccttggagcggggcagccggccagccgccactttgcctggactctcctggattcggata

SEQ ID NO: 125568 - DNA, 489 bp, Homo sapiens
cagactctgaccgagttccaccattagattcatttttaacattttctatgttggctttatcaatatgtctatattaataattctttatgagtaattttaaagtaaactgcagatgccacgacatctttgcctttaaacgtttcatatgtttatcttctcaggatatggacagtcttctatatagtcataacaaccatgtgtgtacattttgtatgtatgcagtaggtgacttgttgccttagcaggttaacgtctgctactggtgtgtattttttgacatggttaattttcttggtgtttacactttcgtccccatggttagttattaaatatatgtaatacaaagtatctgttttatttgttaagatctccttccttccctactttgcaaccaacccctgagggcaaatcaacaaaaatcatttagttcattaaaaacaaagttgctctagacaaaagtacccatttgctgactgctgtttggtattg

SEQ ID NO: 125569 - DNA, 332 bp, Homo sapiens
atcatgtacttttagaaacccaaatgatattacactataaaaataagttatatttcccatgcaaaataaatggataatgaaaacatctgagagttatttatacaatattataaatttatgaaatgctatcatttggtggggaaagatttgccaggaaatgagactgaagctgtcatatagttttggctagattgtagtttataggatatcgttagactttatttatccatgtactctcttatctgttattagggtaacttaagatttgaccaggatttgtttttgaattttttggagcgatggaaacgttctgcatcttgattgtggtgatg

SEQ ID NO: 125570 - DNA, 581 bp, Homo sapiens
ggcggagggtgcagtgagccaagatcgcgccattgcactccagcttgggcaaggagtgaaactccatctcaaaaaaaagaaaagaaaagaaaaaagaaaaagaaactaaataaagaagggaaaattaaacccaaaacaagcaaaatggaggaaataatagataaaagcagaaatcaatgaaattaaaaacaaaaacaataattggtgatatgaaaggatgattgcttgaaatcattaataaaattcataaacttctggttaggctgatcaagaaaatgagaaaggatacaaatttccaatatcaggaatgaaagagggcatatgactacagaccttacattcaaaggataaaaagttaattgtggaggaaatgggccaatttcttgaaagacaaatcctaacaaaactcataaagaagtagataacacaaatagtcctatatctattaaagaagttgaatcagtatttaaaaccttccaacaatgaaaactccaggcctagatatttttgctgttgattgcaaccagccattaaggtaataatagtaatcctattcaatccatctcagaaaataggagata

SEQ ID NO: 125571 - DNA, 225 bp, Homo sapiens
ctggagacagaaccctcagtcttgagatcttcatgacagtccatgagtggagaggggaggctagaaaggaaggctcagctgtgagttactatttggggaactgacaggacacagactagcagtacaggattgggctcactggctgtgagccctgtagccaagttacctgggttcaagcaccgaggtggcacttcctgttccccttgggtaggctcctaaatttat

SEQ ID NO: 125572 - DNA, 172 bp, Homo sapiens
ctctttcttcagctaggcataatctcttaggtatatttggtaaagtgttcacttctggaatttctatttggttttttgcaaatctattaagttgggtttttcccccccttttcttttttgagacagagtcttgcactgccacccaggctggagtgcagtggtgcgatctcag

SEQ ID NO: 125573 - DNA, 229 bp, Homo sapiens
ggcatttctaggaaggcagaggaaatttcctgggtgtctgataaaattggagctagttccgtattcagatgcacttgacatttcactcttgaccgggcagcagtgtgtattgagatgaggctgggcagtgtcagagcatacctgctagaaaagaaattggttttgcagattatattttagtaaaatctgaactgctcagtgaagcacactattactatctatgtacaca

SEQ ID NO: 125574 - DNA, 377 bp, Homo sapiens
gaccaataaggaggataatcatgaatttaagtaactttaagtgggagaaagtaacctaagtcacatttaatgggaggatcattctgaggaatatgagagttgtgggaaactgcttctcataatcgtgataattcacatgagcaggccatctgctttaaattggagatgaaaaattggagaagtattgggaaagagggggacaggtaatatacccggcatggatcaaaggagagagagccaagaggagagagaaagacagagggaatcatttgttagggaagccagagagaaacttccttctactgagctggagaaacccgtgttcccctcgtttagcatcagaatgtcctgctgtgctatcaaatgttgttgaagtt

SEQ ID NO: 125575 - DNA, 960 bp, Homo sapiens
cagatgacctctatgaaagatggaggattagctgtggggagtggctcattgagctgtttgtaggataaaaatattttgtttagaatttagttttgagtcaagttctgtcctgatgtagtcacctttcttctgtcagatacctccatggcccacatctagtcatccattacccaggatgactgattccaagcttgtggaggttgtttggtgggaggaaatgtgtttgtgtgtgaggggggtgttttcttacattaaaatactaagttttataaacataattttattggcccttctcagtgcctagcaaggaaggtaggttaggtatatgctccttttttcgttgaggaaactgagctcaatgtttttgtgtgtgtttttttatttgtttgtttgtttgttttgagatgggcagcctttgctgcccaggctggagtgcagtggtacaatctcggctcactgcaacctccacctcccggggtcaagcagttctcctgcctcagcctctagagtagctgggattacaggggcctgctaccacacccagctaatttttgtatttttatttttattttatttattatgattattttttgacatggactcttgctctgttgccaggctggagtgcagtggcgccatcttggctcactgcaacctacactcccgggttcaagtgattctcctgcctcagcctcccgagtagctaggactacaggcacgtgccaccacgtccagctaatttttgtatttttagtagagacggggtttcaccatgttagccaggatggtcttgatctcttgacctcatgttccacctgcctcagtctcccaaagtgctgggattataggcgtgagccaccacgtttggcaatttttgtatttttagtagagacggggtttcaccatgttggccaggctggtcttgaactcctgacctcaagtgatccgcctgcctcagcc

SEQ ID NO: 125576 - DNA, 739 bp, Homo sapiens
ggggtgtgcacggctgcaccatctcaaagggcctcgccaggatgtgcccacgatgacagcggcaggggctggagcaccgtttcctctgcacccatggggcattcttcttcccaccagaacaaaccttccaagtaattgagcacattcctcagttcccattttaaccattttcgggacgtttttttctaaaacacttcttgaatgtttcccactcatcttcttgtgggactgaccataggctccaggccatgggatgccttcaggctcctccctcccacccaaacacccagcggcctcccttcagaggtgctccctgattggctgttccctcttctggtgcccctgcccacatcccacttccagtcagccctgatgagacaaagcagccagccaggcccaggcaaggcgctctgtgccacctcgcccttccagggcagttaggcttcgcagagcatgcttccggtcctctctcccctgctctccaccccagctccctgtcatgcattctggatccccagggcctaactaagcggcaggtaagaatggggccgggcctgtggatctgcctcctaatttatggaaaatgctggggacgaggagcacagcaaaacccagtacagggatgtaaactgcaaacaaagaactgtgtttcttcaacttaaaccccaagggaaaaaaagacattgcagggaccagagagattaattaaaagagatgtcagagacacataaaccaatca

SEQ ID NO: 125577 - DNA, 814 bp, Homo sapiens
aatcttagaaatcatatttctttttctttcatagtcttttcttgtgtacgtgttttctttcactctattcattttttgctcagctatcctcctgtaacctcataacattcttaatgaagatgatgggatggtaagtgtctggcaaagcgggagataatatctttttccctcctgtattctactgaactcattgttccttctcagccttacttaatcaagttaaacttatacaccacagctctgcatttagtttcctgaccctgtgggttaggtagaatttagatacgaaaatggctggaaagatttataaaaatctattatgttaatcattggtggggaatccataacatggcatagaacttgaatgtatggatttgagaaaaaatatttacattaacttaattatatgatgatggatgctaattgataagcagtaggttgaaattcactgttacataattcactattatgtcatggttgctggttgcccttaactgaatgattttgaaggaaagctgataactattttgagttaaatttttacaagtggttccttatatggtgcaatgccgctgcaacaaacagtaggaattttgtagcaaaaagtcttaatagtatccatttaaataactgctgcttatttaatgcccatcagtgctaggcccccatctaaatgtgattgttacagtcattaattttcacaattctacaatggctttagaaagaggaaacaaaaatttaggttaaacgacttacctaacatgatttctctagtaagagataaaactgtgattcaaatctatgttagacatgt

SEQ ID NO: 125578 - DNA, 203 bp, Homo sapiens
atcccataaagaaaattctttgtctcctttggccctcaaatacaactgtcaagtcttatgaatgctaattatttattactggaacttgtcaattatttcctattctaggttttcatttagataaacaccaaaggcctacttgacttcctggtttgacattggcaatctactcccacaacaagattcttcttcttctttttttt

SEQ ID NO: 125579 - DNA, 423 bp, Homo sapiens
tcacctctccctatgaaatgcttgatggtgttttgtttaggacctgtgggaaggaagaggagtgaggcataacgcggcctaggagaaggaggggagtttgattaagattctttagtgagtcctgaagcataggtaagagttctccagaacacggaagaggcaaatgaaacagttcattgtaaggtttagagtaagaacaaagtatgagatgtttaaggaaccacatggagtgtcttgagtgacaaaaagaaaaccagtgaccaccagagaaaaaacaaaaggacttttaaaaaattcctgagtcatagtttcaggcaaaacactcaagggagacaattgccaggaaataacatcaagaggatgcctctgagcattcaggtgatgtcatgtttagctcactcttccctggtagggaataccacc

SEQ ID NO: 125580 - DNA, 517 bp, Homo sapiens
aatcacctaccactgcccttcctgaatgtgggggcatcttggtggctaggcagtcattcccttcctcccctattgctccatgtgtgtctcttacaaaatcacaagctcagttgaattttgtgtatttatcacacagaaaatccttccttccttccttcccacaaatattcttcagcacccaccctagagtgagtgctgttttagatgctggggctggagcagtggacaagaccaagattcttctctcagagcttacatttgggtttgagctaatggtgatgggtagagaaagaaataaccaaggcaatttcagacattggtaagcaccgtgaagaaaaccaagataataaaatagagagtgactggagatggggaagcctagcagattgggtggtaaggcgaggggtctttgaggaaggagctaacttgtgagtgaagagcaggagctgctttgtgagcattaggggatagagtgctccaggaggggcccccagtagtgcaaaggccctgagacagg

SEQ ID NO: 125581 - DNA, 483 bp, Homo sapiens
gacacaaagaattttattatcgtaatgtagcaacaacatgagtaacatatttgtgtcagttcccccttgcctcccaagccccatgggcatgatgctgagaggcccaggtagatgctgcccacacagcagattcacatcacagctgaggaccctcatcttagtgatctgaatgttttgtaatgggcaagtaaacaagccttcctgagctttgctgcagtgggaggcattgtgtattcatgatactggacagtaagcaaagctgtcctgtgctcctgaggaacagtgctgtccgctatacaaacaattctcctgcctcagcctcctgagtagctgggattacaggcgcataccaccatgcctcgcaatttttgtatgtttagtagagatgggtttcactgtgttgttggccaggctggtcccaaactctcggcctcccaaagtgctgggattacaggtgtgaaatcctcgaagatataatctgga

SEQ ID NO: 125582 - DNA, 204 bp, Homo sapiens
gcagaatcaagaagatgaaacagccatgcttaaaacagaaaaagtgacaagtgaagatgggacagggagcaagaaagagaagaaccaagggcaagacagagcaagccagatacagtgaagcatctcctcccctgtgccactgaagtggtatgggagtactatgagttctctgagtagttagccagttgggcaggtcatggttag

SEQ ID NO: 125583 - DNA, 356 bp, Homo sapiens
aaataacctgagcaagccctctgctctggatctgttaaagtcagaagagtctgcttttctctggggcctacaaatacaggcacaactccttgctaaggctaggcttcctggcaaccaagggagtgaccgagtagcaggccctgccaggtacaggatgctagaagtccacctgcccaaagtctctagaaggacagccccaaaagccaagctctcaacgactgggaggcaaacctgttccaccatgctccactgcctcaaaagaggccagattagagcaaagcagaagaatatgatgagctgaagcagaacccaattcaatgtccagcatggttggtccctgggctgcggtgagaaaa

SEQ ID NO: 125584 - DNA, 726 bp, Homo sapiens
ttgagcagatcatctcatctttatgtcacagttccgtcatttagaatatgtggatattaatagcacttactactacctggctattgcatggagtaaatgaactagtgcatgtaagggacatataacagctcctagcacctaggaattactatagaaatgctagttactattaagaatttatttagagcactgactcttctactgaactgtgaggatcttgtaggcattggtcattccttaatgtttttatatttttttccccaaagcaagcttagttactgctggttaaaagaacagagtgactttcatataaaagtgactaacacagcatctgacaattaatgaatccagtgagtgagtgaatgggtgaatatggagtttgtggaatagtagttgacacagaataggcattcgctaagtctttcaagatgaagaggcattgtcttcatcaccgaggcatccgctggccttacagctggatcccactgagtcttcaattgcttttattgaggtattctgcggttgtggtgtcctaggtcagattcttcttgtgtgggatttcagggtccagggaccagggtggtctggagttgtcaaaaagcatcctggagaaaacacgtgaagtgagcttcaagaatagaccagtaatcaagagcctggggaggagagagggcctgccagcgcacagcttgggtctccttttgcttgatgctgtgtgacaaaaca

SEQ ID NO: 125585 - DNA, 396 bp, Homo sapiens
cttttggtgtctttgctctttttgggtctttgctcttttggtgtctttgctgtaaattagaaatacaagaaaagcaggccgggcacggtggctcacgcctgtaatcccagcatttctgggggctaaggcaggccaatcacctgtggtcaggagttcaagaccaacctggggatccaccagccttagtgctgggattacaactgtgagccactgcatgtggcctaaaatttcgaattttaggactattccacttagaaatttttgttacaaattgaaattttcataagtatgcatattaaaaaacagtgtcttgatatattaaaactatccaactattttaatgaaacattacattaattatcctcagaggatacttaggtgtagcccaattgttct

SEQ ID NO: 125586 - DNA, 369 bp, Homo sapiens
cccaggagttctttatatattctgaacccaagtcctttgttacttttatgtgtcacattatcttctcgcaccttgtggcttctcgtttcactcttttcatagtatcttttgataaccagaacttttttttttttttttgagacaagagtcttgctctgtcactcaggctagagtgtagtggcgcgatcttgactcactgcaacctccgcctcctgggttcaagcgattctcctgcctcagcctcccgagtagctgggattacagacacatgccaccatgcttggctaatttttttgtacttttagtagagacggggtttcaccgtcttagccaggatggtctcgatctcttgaccttgtgatccgcccg

SEQ ID NO: 125587 - DNA, 352 bp, Homo sapiens
ccaggctacaacagggaggggtctggagagctaactgtgtctgctgtggtctctctcagctggagagcaggaggcaggggccatggcatctcaacagtgtgacagcccaagagggttatgagggaccccagtaaacactagcagctttcagttagagccaggatggggcacaaaaaaggaggacgcatttgcacccggaagctcagggcatacaggagtataggggctgaaggtgaaagttgtagggtccaaggagaaactggcacattctcccctcacaggcagatctgcaataagtgacggcccaggcatgactgtgagtaggggtgtccaatcccaccgagggggaaga

SEQ ID NO: 125588 - DNA, 128 bp, Homo sapiens
gaagcctgccctctgctttatagtcttggttctaggaaagttgcttaaccttttgggaccctagtttcctcatatgtaaaatagggtttctggttggtcagaggagtgtcttaaagaggggttaagct

SEQ ID NO: 125589 - DNA, 418 bp, Homo sapiens
ggagggccgggggaggcaggaccgtgagctgcaggaggttggtgttggccctgggatgttgggacagagatgttatcctgggagaacagcgtggccaggctatgctgggagcagggtacacgctgccccactgggctgcatgacttcccctcccgcgcccctcagattcctgggtggccttagaacttgggccaaggccacggacgggcagggaggccaggccccccccacagctgcaggcccaggacctttgcccacggtcctattcttcggtgttatcgcttactaaatgcaccccttcttgtccttggctggcaggttgagtgttatgttctccatggcccctggctcgttccacctgcaccaccgccgctcccgtcaggccttttccccatccccactagtggcacaggggatg

SEQ ID NO: 125590 - DNA, 729 bp, Homo sapiens
ggcataagccacagcccctggccggcatcaggatttttaaaagctcccaagtgcagtcaaggttgagaacagctgctatagtgtgacttaatacagcattcaaagcctctcataatctagcctcagcctaatttttccttccagcaccccatctcagcctgtacataagccacagagacattctcactgttctctgaatgtacttggctcattcatatttccaggctttcttgcacacacattgtctgactctgggcacctaaggaaagctcagctccaatgtcctctcctcttccgtgaaacctttcctgtcaagcccaccttcactactaagtcactccttgctcctagatcagatggaagaatgctttggcatatctctactggagcccttctcactttacattaaagataactgtatataggttagcccactcctcctccctaatagcatgtggaccctttgtagtttcagcagtaagcacagggcttggtttctatgaatacttattgagtgaatggatgaatgaatgccaatcttgtacattgttgatgttcaccacattgaacccagttctcaaaccaggatcacttgggagattctgagtcaataatttgaaggtctgtatcattcctactcaaagtgtggtccataagccagcagtggctatattatctgggagcttgttgcaaatgcagaatatgtattttaacaagatccccaggcaa

SEQ ID NO: 125591 - DNA, 515 bp, Homo sapiens
aactttcacagggaggcaagcaccctggcatctgctaatactctgctgcagcagccataccttggtcccaccatcacagtgggctgctaaccttgaggagccagagaacaaagttggggcccactacaagtcttgcagagttacagcatgcagaccaggagttgggagctaagtgttggccccctacagtctttcagaaatgaagccagttggtttaatcaaccttatgccacaatcaaactctcaaggtcatcaaataggataaaaggggcaaaaaatccaaaggtcagcaacctcaaagattgaagatagataagctcacaaagatgagaaggaatcactgcaagaaccctgaaaactcaaaaagccagagtgccttctttcctccaaatgaccacattacctctctagcaagagttctgaactggctgagatggccaaaatgacggaaatagaattcagaatatggataggaatgaagaacactgagcttcatgtgaaacccaatccaagga

SEQ ID NO: 125592 - DNA, 224 bp, Homo sapiens
cccacctcacagaatgaagtttgtgggaagccttataaatgcaccagtcatgaatgcacttcagagtctctggggtgctgtataaatgctccttatgggaagggcagcatatctgcagctctctcactgagcactcaatgtgtgctgagtgctgggccacgggaatgagggctccatgaagaaagagactcgtctagttcaccactgaatccccagcgtctaga

SEQ ID NO: 125593 - DNA, 244 bp, Homo sapiens
gagttgagtaaagagagaccattgggacatacaacccaaaatatttactatctggttctttaaagaagaatgtttaccaactcctgttctaaatcataaaaattatcttgcggggaaagtttcttcttttcagccctttaaaatttttattcgcttcttatgcctcagggtaactagacaattgaagtctcttaggtgctattctggagaagatttctctctatgtattaattgccagataaga

SEQ ID NO: 125594 - DNA, 181 bp, Homo sapiens
tggtgactctagaggattccgtctagcctgccagtgggaagctaagagcgtgcctgcctcccatcctgacctcctgccccttcagaagcgtccctgcagctcctgcctgcacctggcagggagcaccgctacagagtttgctgctgtaccggctcagaaacgggagttcccggcacagggc

SEQ ID NO: 125595 - DNA, 867 bp, Homo sapiens
actaatgagcttaagctgcttggaatattaattatgtagtttttacattccattttaaaacaaaaacttagaaaaggtgctggcattctgaggcctgcaattaggccacatagcagaagcttgctccttccttatctgggtgaaatattttatttttgcactttgagtcatattcccacccctgtataagctacataggagcctgaatgaattgggtaggaaaggaaattatgcaaacaagtctcagctagtgctgaatgaccccaatttgggtctgctgtgaacatcatttttgtatttctcacttgagaaatgctgcaaggcaattcaacttttatgcttttaaatctcacaactcagaatctgatatcttaaatcactgattctgttacatgctaggaacaaaatgccaacatctcatgtaaagaagttgcataatcatgaaaaataaaggatgtttcctatgccagttagagtggtttgacccttcaggtaaaaagatatgttactgttatttttctacgtgacagaacagactgaatttagctagggaggcagtgatgttggcttttgggaaagggttcaaaaaactgtatggcaacattaatgctaaaatgttaagccgagtgcagtggtgcaaggctatagtcccaggttctgaggaggctgaggcaggaggattgcttgaggccaggagttagaaactagagtgtgttataacgcctatgaataaccactgcattccagcccgggcaaggtagcaagacccattctcttaaaaacatggctgggtgcaatggctcacgcctgtaatcccagcactttgggaggccaaggcaggcggatggcttgaggtcaggagttcga

SEQ ID NO: 125596 - DNA, 860 bp, Homo sapiens
actaatgagcttaagctgcttggaatattaattatgtagtttttacattccattttaaaacaaaaacttagaaaaggtgctggcattctgaggcctgcaattaggccacatagcagaagcttgctccttccttatctgggtgaaatattttatttttgcactttgagtcatattcccacccctgtataagctacataggagcctgaatgaattgggtaggaaaggaaattatgcaaacaagtctcagctagtgctgaatgaccccaatttgggtctgctgtgaacatcatttttgtatttctcacttgagaaatgctgcaaggcaattcaacttttatgcttttaaatctcacaactcagaatctgatatcttaaatcactgattctgttacatgctaggaacaaaatgccaacatctcatgtaaagaagttgcataatcatgaaaaataaaggatgtttcctatgccagttagagtggtttgacccttcaggtaaaaagatatgttactgttatttttctacgtgacagaacagactgaatttagctagggaggcagtgatgttggcttttgggaaagggttcaaaaaactgtatggcaacattaatgctaaaatgttaagccgagtgcagtggtgcaaggctatagtcccaaagtgctgggattacaggcatgagccaccgcgcctggacaaatatacatgtttttataccttttttttctattttttttgaggtggagtctcgatctgtcgcccaggctcgagtgcagtgacactatcttggctcaccgaagcctccacctcccaagttcaagtgattctcatgcctctgcctctggagttgctgggattacaggta

SEQ ID NO: 125597 - DNA, 746 bp, Homo sapiens
tgctctctctcgcctgctgccatgtaagacacgcctcttccccttttgccatgagtttaagtttcttgaggcctccccagccatgcagaactgtgagtaaattaaacctcttttctttataaattacccagtcttgggtatgtctttatagcaatgtgaaaatggactaagataccaggtgaccctctcatttctcaaagatataagccctcatctcaagcatcaatgaatagcttcagtgattttatatttgtctactaggttctcactaaactcataaagaaatatttttgtgggtactgtgagtatttctggactgtggacatgtgagaaaaatcccaaaatgagtggctttattttacagccatgaccagctgttcactcatgttactatgtcagatctgtttgattaatggtgcccacacatatacatacatatatatctttgaagaattgcactattgattagaaaattttaaatagcttaagactaaatcataacaggatttctctatactgctcgggatttgtctagcttttaccaaccagaaaacacggccattagaatgttaaaatataaaatctacacagtacaacataaagttgggcatttggggttaattcattaattttcatcacaggaatcatgtgaagcaaaatttccatattttcttgagtaggagggcaatttgagtagaggaaggattccccttcctcctgcttttgactcacgcagtgtctgtgta

SEQ ID NO: 125598 - DNA, 576 bp, Homo sapiens
ggggtttgatagggatggggttttgccatgttggtcagggtggtcacgaactcctggccacaggtgatccacctacctcagcatctcaaagtgctgggattacagatgtgagccaccgcgcccgaccaagtacaaactttttaatgcgccacaaatcactgtgaggttgtagttggggatttgaccatctttgccaaaagtaccagaggcgacaccctccttaatctgatagcacagataggaccaattttcttagttcttaccagtcctagctacaaggctcaaagccttccccttcctgctacttgacagaatttcctcatacagtagcaacttcttggaaagtgggagggaaggagaaagggagatactggaaagaaagccagagaatgacctgcagacaataccacgccctctgtctcctgtctccccttttccttccataaaccttggagttgctgacctctgcagtaattgttagagtcctattttatatatagtagagattaaaaactcaatccttatattttgtatttctatacatagaatttatttgatgttaataattgtttagtg

SEQ ID NO: 125599 - DNA, 409 bp, Homo sapiens
ttccagtgagccgagatcatgccactgcactccagcctgggtgacagagtaagactccatctcaaaaataaatatagatatattttctcttttcctttgtaattattttccctgtccaattaaaaggcatctagttaaaacagtaattacaaatttgtattgatggatataaaagtagaaagatacattttatatgacagtaacaggacaaagtagggggtgaggaaataatgtatgtaggagcttttatacagtattgaaattaagttggtattcgtaaaaactagattgttataagatgttcactgtcatccctaggttaagaattaagaaaatttatacacacacatgcatacatatacatacatgtgtgtatatgcatgaactgaataaggaagtaaaaatataa

SEQ ID NO: 125600 - DNA, 322 bp, Homo sapiens
accaggtctagaggactagtatcctttttaaagcctgatcaatatgaaggactctttatgtaatgccagggggtcaagtccaaattacatttccacatcaggagaactttcaaggctaatgcagatgccacaggcctctagggaggggttactgctgtgcttggtagatttatagtcacatgtctactgtcccaggaaaggaggaagggacacctcttgcattctgggagtgctctcggctgctcaccactaatcaggagtttcttcaagctgagagacttctggcttcattcttttcatcccaaacacaatttatttatat

SEQ ID NO: 125601 - DNA, 425 bp, Homo sapiens
tagccgggctgtggtggcacatgcctgtaatctcagctactcaagaggctgaggtgggagaatctcttgaacctgggagacggaggttgcagtgggccaagatcacgccactgcactccagcctgggagacagggggagaccttgtgtcaaaaacgaaacaaaacaacccccccgcacaaaacgtatccacaatctacatagaatttaaacaagacccagcaccttatcacataatatttaagatgtccagaatacaacccaaaattgctcagcatacaaagaatcaaaattgcaactcaccaagagaaaaagacaagcagtagacgcagagatgacataagtgctggaattgagtgcaaagaggttagggctgtgagtaaagcatttaaagcagcagaaagcaacatgcctcactgacaatacc

SEQ ID NO: 125602 - DNA, 142 bp, Homo sapiens
tagaaattttcaacctttgctataaaatgttaaggtcctcacaggtgggaagttaattgctatctgagaagattcttagggataaatcccagatagcagcagtcactagttacataacagttttttaagagtcactgctcat

SEQ ID NO: 125603 - DNA, 353 bp, Homo sapiens
ccaccacgcccggctaatttttttgtgtttttaggagagacggggtttcatcctgttagccgggatggtctcgatctcctgaccttgtgatccgcccgcctcggcctcccaaagtgctggaattacaggcgtgagccaccacgcctggccgaactcctgacttttaagtgatctgccagcctcaggctcccaaagtgctgggattacaggtgtgagacaccacgactggccatgatttcaattttatgagttttgacggggatctatatggaaattttttttagagtatttaagtactaaaaatctacagcctttcatagagtaatagtctggaaagtatgtgacatgagcat

SEQ ID NO: 125604 - DNA, 474 bp, Homo sapiens
gtggtatgagttgtaatgtctccattttcatttctgattttattgatttttgagtcttcccttttttgtctttgaaagtctcatggtttttcaatgttgtttatcttttcaaaaaatcaactcttagtttcattaatcttcccatattgtttatttagtctccatttatttttattccgacttttattattcctttcattactatgagtgtcatttgttctttttcgagttccttgagaagtaatgtttgtttaaggtctttctcctttcttaatgtaggtgtttattgctataaacttccctcttagaactgcttttcctgcgtttctcaagatttggtatgttgtttccttttgcatttatttcaaaatatttttaaattaaacttttaacttcttccttgacctactggtacttatcatgttgtttaatttccacatatttgtgaatttacctaaattcctcctgttattg

SEQ ID NO: 125605 - DNA, 557 bp, Homo sapiens
ccctgggctaggctacccatggcagccagccactcgggcccccaggcagccctggcttgtccatgccttcagtcctgctctgctctccctgtctgccactgtccaaaatgggaagcctgcccactctgcaaggctcacctccagtccagcctgtctcaccctctacacggggttgtgctttggtgtgcctgggtcagggtgaaccctgggttctaggggtgccgggaactgctctcctctgcaactggcccatccacaggcttcatccttcacttgggccttctgttcctgggccctttttagggtcaccttctttgagcctttggttaagatgatgaaacctctttcctaaagcaattgctttgacatacgtagatagttttgcataaattttaaggtgttcatagagcctaaaggccaaatataaaccaaaggtttttaaaaaagaaaaaaccgcggcctatacacagtggcttcccctacctaaacatgaacttgttgttaccaagccaccactgcatttataaccaaatggccatgtaaaaaacacgacagca

SEQ ID NO: 125606 - DNA, 246 bp, Homo sapiens
agtcctttcatagctttattttatcttaatctttgaaccatggtttgatttgtttgatagtaaatagtagggcagaggttaagcctcttgggccaggtgttctaacacaattggatgagtaactatcgtttcctaattctaattgtctcctttattgtaaaccaaattctcatatgcagtcagtctattccttggctctcttttcttgtacatttgtttaagttctttgtagattctggatattag

SEQ ID NO: 125607 - DNA, 255 bp, Homo sapiens
aaaaaataaagctgtgtctttagggagacccaataaagaatgcaatccatgccataagcaggagttgatacaccaccttattagctaaaaatatatataacacaatatgagtaatgtttaagatctgttttaaatttaaaacaatgaattgaatgctctaagaggctcctacaggcgctccaggccactctcagagactcccaggagttgttgaactatatttggagaaaacagccactgaatattatcatttct

SEQ ID NO: 125608 - DNA, 228 bp, Homo sapiens
cgttcagaggatccagtggaagatgtgccaggcaaaccctaagaaaccttatcctgactgatgaggaagaagattcagagaagattatatattttcaatatgagggacttgcccttatgttttgtttatgtagtggcaaagaatgggaacttaggagatatataagaaccagaacaagaatttaatcttttcattatcaaaaataagtaacagagcacttcttccaag

SEQ ID NO: 125609 - DNA, 368 bp, Homo sapiens
cctcccaaagtgctgggattacagacgtgagcctccgtacccggccccacacacttcttttgatgataggaatacatgggtgaacaaaacccatgcagtccctgttctcatggagcttagggtcgctgggggaggactgacattcaattagtaagtagcacaataaagactgaggagggatggtataggtttgcttatgcatagctaagtgtgttattcttcagtggttttccttcatctttgggataaaatctaagcttcatagcacgtacatatggctattctggaactgacgggagcctcttgatatacttacagatcctctccacgctcccgccccatgtctgcgcttcattggaatgccttgg

SEQ ID NO: 125610 - DNA, 371 bp, Homo sapiens
ggagacaaaattgctttatttggaaaggaatttggcagtagttactaacattactcataatctttaaaccaaaaattctacttaccctgaagaaatatccacccatataaacaaaaatgttcactgaaacagtgttggtaatagcaaaggactagaagcaatctaaaaacccatcaattacaacataatgtatagtacacctttactatcattaccatgcagcacttaacaaataacatggcaaatctctatacactgacatggaaatatctccaagccatactgttaagtgaaaaaacaaagcaaaacaaaaagaaccaacatcttggaatatttagtatgattcttttttttttttttttttttttttt

SEQ ID NO: 125611 - DNA, 377 bp, Homo sapiens
agtaagaccttgcctttaaaaaaaggaatgtgaaaacattattaatatttacttatcttagcaaggttttctatcctaatgcagaagtcaatattatgttagcctctcttcaattacaaaagaactattaaataagccaaaattttctgaaagtcaatctccacttagtagttttcttaaagaattgattaatggctgatataataaaccatttttcttttggctggaaaaatactgttaaaccattcaatttcataccaataaagcagtttttagacaaatgttataattgaactggataactattaatttgattcagacttgctaggatcagccaagcaaccagtatttgctagtctgttacaataaaggcttaa

SEQ ID NO: 125612 - DNA, 613 bp, Homo sapiens
gtgacaagcagctgggaaagtgtacattattcatcgttccgccttcctcactggaaggaacgtgggtgtaggataaataacattattcccagtgtctaggccaatttgggatgctttgcatattttattaatcccctgctattgagaaagataattcatttggactcatgagcactgaactatgaaaagccaagattttccttttgttggaaattttctggtatgtcaaagaaacaaagtaatagaactaaagacatcatatatccaggagggttggattcaggtctcaatttatttgaagaaagattagacaagtatcaactacagtattgttgtttttttcagcaaacgtttaaaaataagtgtgcccctttaggctgttggggttctttgggaatgctataatggttcaattcaggaaggagcaactaatgagaccctgtagttctccgcaccccaacccccgccccagttcccgaatatttgcaattagttaatcttccctacaggaaaccaaaagtttaatgattccttacaggtaattcggcatggggcatgagtgaaaaggtgagttgaaatgaagcacaaaatagaaaacagtggattcccagaa

SEQ ID NO: 125613 - DNA, 204 bp, Homo sapiens
ccattctggtaaggaaacgatggcagcaagaaccaaattaaaagtctttccatgaccattatcaatagtgctgtgtgaaaagctaacagggacttgggttacctcaaaaacaacacctaagtgggaggtagtaacatgccacagcctaactcacagccacaaccttctcatcctttgtacaaaatcagtctcttaaatacagct

SEQ ID NO: 125614 - DNA, 335 bp, Homo sapiens
ccctcctcccaaggttgtcttcctcttgtatttaccacacttgcttttgcctcctgagaggccccagggctcctacctgtgggcagggatgctgcctcgggccagcgcatagcagatgtgttccaagaacgaatgagtgaaaagccatttggggaaagcacatcatgtctccaatgcccttcccggaggaagtcaactgtggttctgcaaacacagcagcctgggtaaatgaacgctgtctgctggtttatcttttctatgactctggatttccacttattcattgacatcaaatgaagtattactgtgggatcttatgtaaggtcataaaaaga

SEQ ID NO: 125615 - DNA, 373 bp, Homo sapiens
tatgtttggagagttagaggggcttggcttaaatgggtggaggggatgactgtaggtgctgggcaatatttggggtgatgagagactgtagacggaagcgcagctgagcccctctgggagaggggaaccctctcctgcccctaacgtgctctccagggagcatggaaaatgagcaagactctactttgccatactctgtcttctccactggggaaaacaaaaatgggcagcagacctcagagtaactcccatgaagcctgtgacccctcagagatccaccactatgaatctctatgggattcccatgatgtcctatgggaggacatcagcggcctaacccagcctctcacccaaagcaggaaaccttctatgg

SEQ ID NO: 125616 - DNA, 470 bp, Homo sapiens
aggaattagaggctaattattctattaatgagtctccgaagcaatactggctggatcaaaagataagaaccccacaagttttcctaggttgtcaaaccaagattaatggcacagcagtcaggaggagctattgccagtgtagtgcaacatgacagcatattctcttttttgcaagtaaagcaattcactcggccatctctagagactttcaaaagcgggtagatctccacattttcaacactaatagcgttccatcctgtcaaccataagaagccacagctgtgagacatgaatttactgtagccgtccacatatccagttggttctaccacccaaattttacttgcaagtatctgtttgtttccatctctcatgatcataatgaccacatcctgggatctcacatggattactttcacctcttggtctcccttcttgccctcttcgagtccattctccaccagcagcca

SEQ ID NO: 125617 - DNA, 336 bp, Homo sapiens
tttgctgccgtccctgatgtgacatattaccaacaagaggactgattttagccatagtgatttgtataacttccctcctttgggtatggtcctctgtccccgtttcctggttacatgagtgacatccactcattttcaatagcaatctgagctgactttaaaaattcagctttgtcttaactagaacaactcagttaaaccaaaatggacatttatggctgggtgaggtggctcacgcctgtaatcccagcactttgggaggccgaggcgtgtggatcacttgaggtctggagttcaagaacagcctggccaacatggcgaaaccccatctctact

SEQ ID NO: 125618 - DNA, 412 bp, Homo sapiens
gtcttacccgtaatggcatgttgatttcctgtggtaggccagctgtggttggttggtggcggctccctagaccactggattgactggggttcagagtgcatgaggaagaagatctggcatgagggaatggtgacatgtgtctgggcatggaacaggggagtggcggataatgcttggggtctgccatcttggacagtttatcttacccgggtttgttggtttttggctactctcatgctgagctcagacaacttctagtggaggctctgacttaaagattggcctcagaggtagtcccttgccatcagctgttgacattgaaatcctcaactgtcactctctaaagtaaagcccccttttgttcctctcaccccagtgtggaggcctgtgcttgtttgccagggccagccat

SEQ ID NO: 125619 - DNA, 443 bp, Homo sapiens
gtcctgccttctaagctgtcagcagcacagaaatccttcagtaatacccccttatatctggttctgaacacagacactgtacaaagaaaatcaaggagatgccggttttatggcttataagagaaacctgttgttttggataagtaggaaaattgcacacatctaaccacatggaatcgcagaatttcagagctaacagatctttagagattagtctaatatcctcattctagaagagagggacttgaggcccaacagggttaagggtacaggtggggggcgcttgtttaaagtcacccagttaacccagttagttatagcactgtgaggactagcaaagagaactcgtgaccttggttcagggcctttttcacttcaccattgctgagcattgtaccaaagcaaaactcactgtcaaaaatcaaggataccacagtcgtccc

SEQ ID NO: 125620 - DNA, 195 bp, Homo sapiens
ccacctgtctacttaacatctatctgtccatctaccgatgatatatctatttacctacctaacatctatctatcatctgttcgtctacgtcttatctatatatctatctctccatcatccatctacctgtcatcagtctagtccaaggaaactcttttccctattctgctccaaacctattggcttacttctgca

SEQ ID NO: 125621 - DNA, 509 bp, Homo sapiens
ctcccagctcagcctcctgagtagccaggtctgtaggcacatttcgccgttccctgctaatttttatacttttggtagagatgaagtttcaccatgttgcccaggctggtctcgaactcttgacttcaagcaatccacctgccttggcctcccaaagtgttgggattataggcgtgagccactgtgcctggcctgaagtccttttcttagcataagtgactttcctctgctgcagatgaaaaaaataatgtttttcttccatctcttctattcctttgctctaaaggcaaagagagaagaagatgccaagagcaaaacctgcactaaagacgtctgttttctctttctagcctgggacttggaggtagtaagaaaccagcctgtgttttttccccttctggtttgtagcatctctgagaagtggacagaaagtcagcattccttatttgttgaactggctgctagaataaaggatatggggcaccatggggtcagtggaacttgcctac

SEQ ID NO: 125622 - DNA, 529 bp, Homo sapiens
aggggagaaagtcacttccagggaaagctgtcagtaaggggaaaagagtacatagaaagcctggcatgagccacagatcaggggctgctcatagctcctaaattgggactggagtgaccatgaggggagtagggtgcctcatcaacacttcccctccccacctgcccccatcaatgccctctatgcaggaatcatcactgaggggaaacttcctttcctctccagacactactccacactcaaacaaaacacctaggacaaatgcaccatcctagacccactttccccttccacacagagtcaggagacctacaacctgaccctctctgtgctcccagcctgggtgctgactctccccagggaagccagaatggagggattcagagccctcccaggctcaagagcctgtgactccctgccagtcccacccctgcaaaaccccagtgccagctaatggattcccatacatccctcagaggctagctacaggctaaagtgtgtgttccccacaagacagaggtcagagcaa

SEQ ID NO: 125623 - DNA, 653 bp, Homo sapiens
acctcgtgagggggcggagcctcaggggcggagtcttagtgtccagaggggagtcagggcagctggaggtccagggcgggaaccattgaggctgggaccctacgagaaccccctaccccgtgcccttcggcctctcttggtcttccaaggtgcccccgtggcgcgcgggctcagttctccatgatttcttggatccagtcaaggtagtggcatacgctggtgtagactgcggggcgccggggtctggagcagggctcagcacccccagacaccacgcctgccaaggttccattgcaaaccagggggcccccagagtcaccctgtacgcgagagaagggcagaggaactgttaggccactctgttcatgacaattacacgggccacttcctccctcccagaaaggccccagccccttcctcctccaacatccgagagtcctccatctccagcctcttcttcctcagacccaggagtaaaagctcagagggcccacctccccgcaggacctaacctcctcctccccgaggactcagactctggacgcccagcccactcctcctgtagatccagaagtctggacctccagaccttttctcttttacactaaggagtccaggccctggtcccgtcctctcccaggaaccaggtatcc

SEQ ID NO: 125624 - DNA, 390 bp, Homo sapiens
atcaaatttgagcatatattggaatttgtttcaacaatcctattaaaacacagattgctcagccttactctcagagttttgaatctatcaggtttgggtcagggccagagaatctgcatttcatccttttttctttttttttcagacaaggtctcactctgccgcctccttttgagtcccgcttgcacgcttcctagctctactgcatgccccgtacattcctagaactgtctctgtctttgacaaccctctctgattcccctgcctcaacctcccaaagtgctggaatttcaggcgggagccaccctgccagccaaatctgcatttcaaacaggttccctggtgatgcccatgcttctggtgaggtggaggagcacacattgggaatag

SEQ ID NO: 125625 - DNA, 514 bp, Homo sapiens
gcaccagctgcaaagtgagaagacatggagggcaagtgaaaatgggatcagaccacaaagcagcatttactgcaacaaccacatgctttcttgtctatctcttttcacttacacattaggtaaaccaaacttcctttacattttgtggtatcagctagctttttggtgttaatcataataatctccaaggcaacaaataaatctggggctctatgaattcacaacatttcccacaatttaagaacattctctttttagagacaagatagatacaggcaaacacaaataggaattagcatgggaaagatggcccaagataaatcatatgtggtaataacacaatttcaagaacgattatgtaagaaagaacgtgactgaaatatgactaaacctatagtgtgtaaaaaacagagtatctaaaaatctttaaatttaaatattattttcattgcttttttttttttgagatggagtctcgctctgttgcccaggctggaatgcagtggtgcgatct

SEQ ID NO: 125626 - DNA, 280 bp, Homo sapiens
catattccaacatgggcagtgattaaccaggacacatacaaaccaactgttttatctagcttgcatgcatcccaagctacaagttggtgcattcctcagactaccagcctcttctccataaacgcaggtgaaaactaggggctctttttccctcagctattcaatccaacatgaatagctgcaatttgcaaattagaggaaaatgacagtgttttctctgaatggttttactccccagccataacgctaacgctaacattgggttactttctcctcagct

SEQ ID NO: 125627 - DNA, 617 bp, Homo sapiens
gaaattttataatgataaaagggtcaattcaacaggaatatataacaattacaattatatatgcatccaacagtagaacacctaaatatataaagcaaacattggaaaaacagaaaagagaaatagggagcaataaaataatagtaggaaacttcaatactatttgcaataatggatacatcattcagacagaaatctgtatccataagaaaacagcagacttgaataacacaatagaccaaatggaccaaacagacatatgcagaatattccaccaaacagcagctgaatacatactcttctcatgtgcactcagatccttccccaggataagtcacatattaagtcacaaaataagttataacaaatttagaaagattgaaatcacaccaagtgtctttctggccacaacaaaattaaactataaatcaataacagaaggaagactggaaaaataaaaaatacatagatattaaacaacagactcttgaaaagtcattgagtgaaagaaggaatcaagaaggaatttaaagtgccttaatacaaatgaaaacaaaaataaaaaacactaaaattatggtattcagcaaaagcactattaagaaggaggtttactg

SEQ ID NO: 125628 - DNA, 580 bp, Homo sapiens
gtcacagtttggcagtgagagggggtggcctgtcgggttaactcagaggtcacaagtcacagtttggcagtgagagggggtggcctgtcgggctaactcagaggtcacaagtcacagtttggcagtgagagggggtggcctgtcgggctaactcagaggtcacaagtcacaatttggcactgagagagggtggggttttaaaaatatgtccaggatagttagaagggcaaggtgttgaagagatgttgatcaaaggaattttttttttttttttttttgagacagagtctcgctctgtcacccaggctggagtgcaatggtgcgatcttggctcactacaacctccacctcccaggttcaagcaattctctgcctcaacctctcaagtagctgcgattacaggtacccactaccacgcctggctaatttttttatttttagtagagatggggtttcaccatcttggccaggatggtctcgaactcctgacctcatgatccacccacctcggcctcccaaagtgttcggattacaggtgtgagccaccgtgcccggccgatactcctcctttcaagaggta

SEQ ID NO: 125629 - DNA, 542 bp, Homo sapiens
ggatcccgtctgagcaagctgggaggtaaggtaggttagagacacttcagagatggagatgagcaggtgtgagtcacgttttcaggggaacatgtaaactggtttggtcagagggtttgctggatgacgtttaagacatttttaacctcaagattctgtgaccaagggatgtgagtacaagaaaggagaaagaaaatttagagggagaattgggaatatttatatgtgctagaaactctgttagtttaatcttatgaggttgactatggcatggtagatctgaaatgtacaaatttaggtcatgtgtgtgtctgtgtttggcctgagactctgccagtggatggagaggactgttaggtctgtttgcttgctcagcccctctgctggccttttcttctccctccaacctttcctttccgaggtgatctcgtctcctcccatactccagggctcacctctgagctcatgggtcccagaatctcaaggtcccactcccagctccttacctggcactgacccatccataccatagcttgttacac

SEQ ID NO: 125630 - DNA, 705 bp, Homo sapiens
gcaagtctgcccctgcaaataccacctgctccccaacccacagcagggagcaggcgaggtcagacagcagcagcccgggaaggaccgagccccagcagggaaggcagggcccgagtgaggtctccacacccaacgcacagtgctgtctctaactggggccacctccgagtccccgccacactcttggccctttggagtcctgggctccaggtgtctcccaagggcccatctgtgcaggggatgcaaccccccgaatgtcctcatcccactgtggagctcaggtctctgtctgctccctgggtcctggcagggtaggacaagtccgccaggatgtccccatgcagactctgctccaagagggagctggagagtcagggccttggtgagggagtcaggatcgggttccccccagctcagtcctcccacctgccagcccccagagcacagggcagggccacagcccctgcttccccctccaggagagtcaggacatgctggccgctgctccactggggccccgccctccagcccccaccttggtctgtgtgctgcatgcccacgctcgctctgccagcccaggactctgaggaaaagacctcagagtcccagccctgcccagcctcggcctgtgccacccgctgcatcaggcttacaaggaggcccagcccatgccctgggcagtgcccgagcccccctgcacttgct

SEQ ID NO: 125631 - DNA, 839 bp, Homo sapiens
agctaattgttttattttttgtagagacagaatctctctatattgtccaggctggtctcaaactcctggcctcctgctttggcctcccaaagtcctgggattacaggtgtgaatcactccacctagttggaatgatgtttagaatcatgttatgaatctccgtctgccaaaaaaatcctagcttcccaaccagggaattccacctgagctttgtgtccagagttttttgttgttgttgttgtttgtttgtttgagacggagtctcgttctgtcccaggctggagtgcagtggtgcgatctcggctcacagcaacctccacctcctgggttcaagcgatcctcctgcctcagccttccgagtagctgggattacaggtgcgcaccaccatgcccaactaattttcgtatttttagtagagaaggggtttcaccatgttagtcaggagtccaacaccagcctggcaacatggtgaaaagcccgtctctattaaaaataccaaaaattagctgggcgtggtggcaggcacctgtaatcccagatactcgggaggctgaggcaagagagtcgcttgagcctgggaggcagaaggtgcagtgagctgagatcgtgccatgtactccagcctgggcacagagaaggagtggaagactcatgtctctcacgaaacacagaaaaaggaacacacgacaaccggtgttgcgggccacgagggcccgaaaagggattgtaaaaacggacagcgtgaggaacggcagacccagaacggcaaggcgacgctggacaaacgggtcgccacaagagacccggcgcaaacacaagggagggaccgcccagatac

SEQ ID NO: 125632 - DNA, 339 bp, Homo sapiens
tcctggatagagagggcatgcttttcttggggcttttcttttctgggtctcctccattggcgtttttgcgttgctggtgtctccagtatccagtctgaaatacatgagacaaaaagaaaacccaaagtattgatcatcattttgttccttggatcctgagctcccttgtcagactgccaccttctctccttcttctgaaaacagttttgcaggaacatataatttaatttacaaaagttatattatgcataacctaagaagagttgacactgtagttgctcactaattacttgttgaattgaaatcaaaaataggtgcgtatttcttgagatatttgta

SEQ ID NO: 125633 - DNA, 444 bp, Homo sapiens
taaatggcaaatggaagggaatgggttctggaaggccccaggtgggctggggtgggttctggagaccatcttccaactcctgttcaggaggagggttggtcagatcagctctgtggccacctgggctctggaggggcgagatacgggcaggtgcggccacaggagggagagcaccatgtgcgggggaagcccacagctggaaccaaaaggccccaggagggatcctggctctgacatctcccagccgtgtggccttgggcaaggtccctgacttggacctcagcctcctcatctgtaaaacaggcagaacagtaataccgaccttgtaggttgtatagagttcatatacatcaagcacttaccacagtgcctggcggaccgcatgccctaaacacacaatccgtgaaatgaatccatcagcaagcagctgctaggggcagtgtg

SEQ ID NO: 125634 - DNA, 673 bp, Homo sapiens
tgagttcaaggtgactttgagaagcatgtggggttataagtaggaatatctgagacaaagtagatagccaggtttagaggttggaagacagttatgggctggagatagagttgggcaggaaatgtctcccctatgagccttaggttccttatctgcaaaatggggatgtaatctacttcccagagttagtgtgatgattagattatgtaacattgatggcagtggtggcctgtctagagtggccactgccatgatgcaggctgcagtgggggaggtgctccacagaaccagcaggagccgggaacaggcagaagccctgccgtcttctgagttgacagggtggaagcttcatgctccttgggcgcagctgcagctgcccaagccagggctgcagacccaggcatctctgcactcttgggggcccaggaaggcccccctgcccctgcaggctcagaaatgcctgcttccactgcctggcctttccctgctcctggcacctgcttcgatttcagagcaaagttgaggctgatcccaggcactgtcgcaacccagctgggtgtgtgcatgcttggggcagcactgacacaccagccccctgccaccttggcccacttcagactttgggcacaaactaacatggaagggagaccaaggaagggctgagggcagctca

SEQ ID NO: 125635 - DNA, 219 bp, Homo sapiens
gaagctgcttataagcatgaaattcaaacacttgtgctcaagtgaccttttcacacagtaaatacagatggaaggatatgtaagagcaagtacatgactttgccttagaccttttttttaactcatcatgtctgtcaccaaacatgacaaatatttacccttccaactgtatggtggactggttctaattaaaaagaaaaataatctttggaaacctgt

SEQ ID NO: 125636 - DNA, 765 bp, Homo sapiens
tccgatctgcactgttttcacgctgacagtagattagcattttccactttcatgtaatcagctagcacctgatccacacagctcatatcctctccttttttcaaattcaacctcacagaagcaccaagtgaaatcatcaatacctcatttttccatttccacttcctcagtctgtcaactctagccatttcctagctctcttatctgtgagtcccttttcttattttttaatcttcataactcagcccatataactcctctaggaaaaaattataaaacataaaaactttcagactccgaaattaacacggcaatgcataattttctaagcacattaagtttctaacaataataaataattacatcattaaatagcataaaatactaaagtttgagtgataaacattgtaattcttttgctagtgtcttgtttgccttatgataaataactgactttgacttttaaataggtcagtgtgagctgagtttttatttgacaggttgataagttagtgttttctgtgtaaaatgtgagtttcaaatgtcaattttccatgcatatacataaaatgttaatgcatatataatgtgaagtattttaaagtacttgagatttatctaaaacctatagtatactaatttatttattcatttatttatttatttatttttgagacagagtctcactctgttgcccaggctgttttaagtcggacaactaatcttttttggtttagagttcctctttggatatatctaagaata

SEQ ID NO: 125637 - DNA, 252 bp, Homo sapiens
gagcaccagtgggggtctagatgagcgcagcggcagtgtggatggagcatgagagctttagaggtgggtgtgagaggtgctggcacccaatgggtctcttggccagggctcaggctcgttatattaattattaaagccaatgtgtactttggcctgggtgtagagagagagtgcataggtatttgtgtcatagcacggccacttgggatcaatcactggcaactgaacaatgaatgatttggggtcagagct

SEQ ID NO: 125638 - DNA, 405 bp, Homo sapiens
gtctgagatgatttgctttgataagactttaattttaccaaaactgggatttgctctagtttgccttggatcatcatagtcaagtgcatatctcaccgccaagaacttcacacatttggagtgactacggtggagccatgtgccctagaaatggtcaaactggtttgtgcttagagctgtgggaaaaaatgcattcattcatccattcaacagatattaatgagcatttactatgttccaagcactgttctaggacctgggaatgtggcagtgaactaaacaagaaaaaaaatctctgtccttgtgaattctaaaggaaagagacaggcaaacataaaaataagaaaattatacagtatgttaagaggcaattaactatggaaaacataaattagggtataagga

SEQ ID NO: 125639 - DNA, 120 bp, Homo sapiens
ccagaccaggatttggaagatcactctggtagcagctcaaagcaccttaaggagcctgcccttttcagccaggtgcagtggcccacacctgtaacctcaacacctgggagaccgaggtgg

SEQ ID NO: 125640 - DNA, 324 bp, Homo sapiens
gggaggtaaagtctgcagtgagctgtgattataccactgcactcctgcctgggtgacagagtgaagccgtgtctcaaaaaaaatgctttggaggtccaggaaaggggaccttggaactgtggtgctgtatcctgcaagactctcctgaaaactttagagaagtgtttgtctcccataattgatttctgtgcaacagccatgggttgagaccaatttaagaaaatcttaagtgtggccgggcgcggtggctcacgcctgtaatcccagcattttgggaggccgaggcggtggatcacgaggtcaggagatcgagagcatcctggc

SEQ ID NO: 125641 - DNA, 285 bp, Homo sapiens
gatggaaataaaaaacacacctaagctttctacgtagctgggaggatcttagttcatttatttcccttttcagtgtttttttccctagtaggtagtaaggattatggatgtgcaatccaccagctataaacaattagaggatgtaacaatttttgtggagggtattgcttttatcctccttgctgcaagatattttattaggcttttcatttataaacataagaaattttgctttcctaatatttagtatacggattgaatattaagttgtttttaggctttaag

SEQ ID NO: 125642 - DNA, 732 bp, Homo sapiens
gtacaagcaataaaagaataaataaaacagacttcaaaatttaaacgttttgtgccaccaatgataccaataagaaagtaaaaaagtaacctacagaatggaagaaaagttttgtaaattgtatatctgatgaagaacttataactagaatatatagataactcttataactcaataaaaagataaacaacccaattaaaaatgggcaaagatttgaatagacatgtctccaaagaatatacaaaaattgacaataagtatataaaaagatactcaacatcattagtcttcagggaaatgcaaatcaaaactataatgagatatcattttgcacacacaaggatggctgtaataaaaaggatgataacaagtgttggtgaggatatgaaaaaactggagccctcatacattgctggcaggaatgaaaaatggtgcagcctctttggaaaacagtttggcagtttctccgactgttaaacttagagctaccatatgactcaacaatttcacttctaggatattcccaagagaaatgcatgtctacacaaaaacttgtacatgaatagtcatgacaccattattcattacagccaaaaagtggaaaaaaactcaaatgtccatcagctgatgaatggataaacaaatgtggcatactcataaaatagactattatttggccataaaaagacgggagttgtgatacatactataccacaggaaaaccttgaaaac

SEQ ID NO: 125643 - DNA, 385 bp, Homo sapiens
ccctttccttctatttattcataatttcttctctttattcatagttacactgactgtcactctggtcatttcttgtgtctaaaaccctactaattatagccatatgttttgtacaaagttcaaattatagctgctgctaaactaacctttaagtgtacttatgttagcaaacccagtttgtggagaggcattagtttccttgccataattacgtgatgtgatttcttaaaggtcatctggttcatggtaatttgaaggaccatgcatatctcaaagcaaaaccgtaatggaaaggaaagatgaagtgttaaatgccccacttttttccccaagttatgctggaaatcattctccacttttacaaaactctttatcttaatgctta

SEQ ID NO: 125644 - DNA, 760 bp, Homo sapiens
ggggatggaacccatgtgctaaacataaaattcatttatgttttatatacaccttatatacatagcccaaaggtaattttgtacaatattttaagtaatttgtacatgaaataaagttttggctgcaacccgatgcatgaggtcagttgtggaatttacttgtggcatcatgttgatgctcagagtttcagagtttggagaattttagatgtcagatttttggattggggtgctccaaactatgtattctgatcacatgccttggcttcctttactgaagcatcattttcctctatacacagcattcctgaagaattcatcagttctgactgatgtctttctgcctttttgccagagggcttaagatagcagacattgtaggccataaggtaatagatttacctcctttagtagcgataccatcactatgcttaaagttgggacaggggaaatccaagccatgggagaccgatagcaaatagaaggggaagaagtagtgaagtgtacatttatttgatcctgcatgtatattattttttggtgagaggattttcataggaaatgatattaatgttttagagattatctttaccagccatttgttttactgagggccacaatgaataagtgacttaaggtcacatagccagttaacagtagagccaggatcatataaagaattcctaacttcacatcaaatattattcttactattagaggttttttattaaaaaatttaccataagtgatagatccccct

SEQ ID NO: 125645 - DNA, 257 bp, Homo sapiens
tgactggtcatggttgtccttgaccaccagaatcaggattttagagtgacatgatcagagggagcagtgtttagtatgggttggagaaaggagactctgggaattgagaaacctgttaggccttgcaggatctcagagttggggtaaagagggcctggacttgggtactggggttaggagcggagaggaggggtaggatttggagaagtagtacaacctggattaaatgtggaccttgcaggcaggtggtagagggg

SEQ ID NO: 125646 - DNA, 560 bp, Homo sapiens
gttggaagagatcgttagtattactagtatattaatgttttgcccattgatgttttctgggttcatccactgactttttctttaacttcacagatgatttggatttccctatagcaagtggcaaagccacaacacttctgaattagttatcacacttaaaaagtcaagatgacaacaaccatagtggatctatttattgaagcagacaggctcttttagcggaatgatcaatgtcttacctctttctgaaaggcttttcagaggtaggaaatcatcaagcatctgatataaagtaatgaacaaggcttttgattggtcaagtttctggagcaggcttttaagtatttctgcctgtaaatgtagaaatctgagtgtgaaaagtaaaggcaacagcaaagatttactgggtgcatctatcaccctggcttttagagtctttgtgattaatacctgtttaattggggactgatctagatgctttggacgtcagaaagctaaatgttacagcattgtctcatgggttcctaacacagcaggacgattagcagctgtctgagtaa

SEQ ID NO: 125647 - DNA, 834 bp, Homo sapiens
caggggcagcctgtcccctgggatagtcacccactaaggcatggagttaaagcaagtgtgctttgcccaacttgactgtatgatttggagtgctttgagattcatgtagtcttggtctgattttcacacagttacagaacaggtatgtagaagcaaatcttcatgtgctaaaatttgcctaagaggaattcaaagctggagacaagtagtttttattcatgaagatgttcattgggctttatctataacaacaaaaattgaaataattgaaatatccaaaaataggataatgtttacaaaagttatattaccctaatggaatgaaatattatgcaatcattatgtgcaagttgtacagaaaacaatttggcaaagtttcagaaatttagaaagttcctattctccaagccaaaaataccacttatgaggattataccaaggaaacagtgtgatgtaaagaaaaattatgcacaaaaaatattaattttagagttatttataagagtgaaaaataggagaaaactaaattttcaataatggggtatggttaaataaaattatgatatagctatgtaacattgttaagttattaaaattagatgtgcagaggatttttagtggttttttaatgatacataatagttttatatattttgggggtacgtgtgatattttgatatattccaaaatgtggaatgatcaaataagggtaatgggatattatcatctcaaacaatctttttaatgttggggacattctaattcttctagctattttgagcaacacaaaaaactactaactacaccctactgtatattgaacactagatctta

SEQ ID NO: 125648 - DNA, 479 bp, Homo sapiens
gaatttgcactttgaaattgcaaatgttcctaagacacaattggaggtagaggtaatgcctgcaaaaggttagtgaatgctcataagtagaaaacatttattactaaagcaaattattactaaacattttaatatgctttgatcactttttaaggatacagaaaaggtaattgagatagtaaagataaggtgtttgagcagaagagcaagcatgcactggatagttctacttagagtgtgatcacggttaacagtcatttctgtagcattcagagtacctgaactcattataaaatgtgttacaatagcaaagatctcagaagacataataggtcataccttactttctgaaatccacacgcctgcacagacatgagcagaatgtcattgacatgtactagggaagctcagtatttataggaactttatttataggaacttctttcagtaaattttctccattaggtgaaaaaattttt

SEQ ID NO: 125649 - DNA, 428 bp, Homo sapiens
ccttttaaagtctcacactactaggagagtcaatttccaaaatagtttcttaaaattgttatcattaaacttgaaagaaacagtttcaagtttaatgggtaaggaagatgtgaagagtccaaaagcccaaagctgtgactagacagctgcgtgtcacttccatctacaaggcagatagaagcatcagctcagcagctcagcagattacaagcaagatttacaaactgcatatggattccaaagcaaatacactttccctcaatattgcttcatggaagctagagtttaccagaaatagacgaaactccaaaaaaataactgatgaaattcagtgtggccttggcattccacacggatgctccctggaaacacaaaatttcactgaaactatttttcttttctttttttttttttttttttgagacaga

SEQ ID NO: 125650 - DNA, 376 bp, Homo sapiens
  misc_feature (113)..(113): n is a, c, g, or t
agttgtataatattgtgaatggtacctcaaaggtcactgaattgcacacttccaaaaataactttatcttatgtgaattttacctcaataaaaagtaataacaataactatcngggaacaagaattgataattatcaataattatcaactgtagaattcctctcacaagaaaagtccaggaaaagtccaggaattttagtcagtcatcactgaggtcatagaattccctagagatctggccatctgtgaccctccccccaacaccaccaccctgtaccgtttgaagccagctggatttaatgtaccacttaaagattctatttttaaaaacaacttctaacagcaattttttggcacaaataaatagccataatgg

SEQ ID NO: 125651 - DNA, 153 bp, Homo sapiens
ctctgagcctataattattgtagaatgaaaaggtttttaaaaagtcatttgaaaataatgattttgaactgttaggaggctgtgcaactcaatcaatagagcagtgtacacaccacacttatagagctaatttttatttagcttaccttaaaa

SEQ ID NO: 125652 - DNA, 474 bp, Homo sapiens
cacctataatcccagcactttgggaaggaggcagggggaatcacttgaggtcaggagttggagaccagcctggccaacatggtgaaaccttgtctctactaaaaatacaaaaaattagctgggaggcagacattgcagtgagccaagatcacaccactgcactccagcctaggtgacagagcaagtctcaaaaataaataaataaataataaataaaggtgacattgggaatgtgacttgctatgcatgatttccccttcctcacctaaaagtaaacactctggctgggcgcagtggctcacgcctgtaatcccagcactttgggaggccgaggcgggcagatcacaaggtcaggagttcgagaccagcctgaccaacgtggtgaaacctcatctctactaaaaacacaaaaattagctggccgtggtggcaggcacctgtaatcccagctactcaggaggctgaggcaggaga

SEQ ID NO: 125653 - DNA, 483 bp, Homo sapiens
cttatttaaaagataaatttagctagtatacacaatagtggccaattagattgtatgctataatacttgtaagaaaaatgattgcatactctttgttttcttgtttgagacagagcctcactctgttgcccaggctagagtgcagtggcacaatcttggctcactgcaacctccacctcccggtttcaagctcttctcgtgcctcagtctcccaagtagctgggactacaggcacacaccaccacacccagctaacttttgtatttttagtagagacagggttttgccattttggccagactagtctcgaactcccgacctcaggtgatccacccgcctcagcctcgcaaagtgctgggattacaggcatgagccaccacacccagccaattgcatactctgaatcaaaaaaccatttccctcaagttagaatatgcaatatttattgtacattgagtgccctctggtgcttacccaaagctt

SEQ ID NO: 125654 - DNA, 316 bp, Homo sapiens
gaaagacttgcccccatgtttcaattatctcccaccgggtccctcccacaacatctgggaattatgggagatacaagatgagatttgggtggggacacagagccaaactatatcagtgcccaaaggaaatgctcaccggagctctgttgtccagtgaactagaaccacagggaggatggcctgaaggaagctggagagaagggctctctgatgggacatggaaccataaaaagattcaactactgccagcgaaaataaaggaagtagagagagatggaaaaaacttcccaacatagatccaactcccacccactgg

SEQ ID NO: 125655 - DNA, 144 bp, Homo sapiens
cctctgcacccaccccaggaaaccttgttcctacccctcagaggagctggatcctgtacgggttctctggagactctcctgtcccagctctttgtctcatcacaacctgggagggtagcgtccccaggggtgggtggagagcgg

SEQ ID NO: 125656 - DNA, 518 bp, Homo sapiens
gtatttttagtagagatgggaattcaccgtgttggtcaggttggtcttgaactcctgacctcaagtaatccgcccacctcggcctccgaaagtgctgagataacaggcttgagccactgcaaccggccgtgaaacattttaaaaggagttgtacatctatatcttttttgtaggtgaagtttggaaagtaacacgatgtacaatttcatgattaaagaacataaaaagcactaaaaacctgtgttagcatttaactcaaatatagcagcataaaaaatatagcagcataatgttaatgaaactgttcaaatgcagacatagtatttggctgttgtttttcatttagtgaggattgctttgaattgcttcctgaagtcttccttgcaaccttctacattcatttgtaagaaaaatggctggaaaacagtgcatctgtgactatggaacagagtaggccagagtttcatttcatcattaacattgcagcaacaaatttggtcagctctgtaggaatatag

SEQ ID NO: 125657 - DNA, 340 bp, Homo sapiens
ccagcctctgccttcttattcataacttagggatgcagaaagaccttatcttattcccctactgtcctgtcccgaccattttccttcttctggtaaaatttaaattcctctctgcccagcatcttctcctttcctagaagcagtgatcttaaccatctttcttcctgaagccatgcttgcgtagatcctggtcatatatgagcttacaggtcatgaaagccatcactgaggttacaagccaacaattttaaggggttacacactcatttctacctcaagccttgatattgggcatttgccaaaatgcgagtggtctcctaataacaggtcactgattcgc

SEQ ID NO: 125658 - DNA, 491 bp, Homo sapiens
gtgcaagtcggcgggggagggaagcacggggcgacctgagactctgtgaagtccgagcttcgtcgcaaaacacgcagttcagtctttaaaaatcagcaaacaccgtttccaagcacagtaatgacgtgatcgactgcgaataaagacctgggaacagcctgcccagcaaatggtaacactcggcagaaagtggggccgtcacgaacgctggacaggagggttcaagttaaaaacagtctagaaggtctgaaaggacagggagggcatctcatggtgcccaccgaacggtcattaccgaccgcctggcaccccacagccaagctgcctgcgatgaggaccacggcagacaaaggacagtcggctggggggcggcacggggcccacccactgcaacagggtacacgcacgcgtgtgagtgtggggtgatgatccacggggcccacccacagggcacacacacgtgtgtatgtatgtgcatgtgtttgagtgtg

SEQ ID NO: 125659 - DNA, 223 bp, Homo sapiens
ggaggcagaggttgcagtgagctgagatcacaccactgcactccagcctgggcaacagagtgagactgtctcaaaaaataaataaatacaactacttaatgacataaaatgtaaccaaaatatattaagttataaaatgtattcataatgttacaaaatgatcgaattttgtgaaaacccaaactatgtgaaaaaaatggaaagtaaatacaccagataattt

SEQ ID NO: 125660 - DNA, 301 bp, Homo sapiens
aagtgtctctctgtgtgtttgcaacttgcacccaaatgactgacagatggtaaattattttaaaacccttttttctctttttgcatatatccttcacctgcggcttgctgtattgccagggtaccaggcctggatcagggatgtcaggtttgagaactggaacctgttcaaggggagctatttgtaccgagggagaggggcacagcagagaagaggatggagttgggcatccagatgtttgctgaaagtttccaactggaaatacagtggactacagtggtgagggatttatgctatgctt

SEQ ID NO: 125661 - DNA, 758 bp, Homo sapiens
gtgcttttaaatcagcattccccaacatggtctaatagtttctcaagatgatccatgaaaataaagtgtttttttcattagtttgggaaatgatgtatgggatagctcttcaacccactctcaaatagatacaacgtatgttagcatattaaggttcgtgatcaggccgggctcggtggcttatgcccataatcccagcactttgggaggccaaggtggacagatcacttgaggccaggagttcgagaccagcctgggcaacatggtgaaaccccatctctattaaaaatacaaaattagccaggcgtggtggtacgcacctgtagtcccagctactcggaggctgaggcaggagaatcacctgaacccgggaggtagaagttacagtgagccacgattgggccactgcactccagcctggggcaacagagtgagagtccatctcgaaaaaaaaaaaaaaacaaaaaaaaaaaaatttgggggcgcgcctttgggagctcggggaaaagtttttctaacacatcatcttgcgttggggcgcgcggcgccccagtgtgttaggtcacacactgggccaagaagcggtctcccacagggaagaaccgggcgcgaggacaaagggggtcggttgtccccaccaaataaaaaaagcggcggcgggaccacgcagggtttcggaaccaactccgaggggctcggaggcacacgggcgtctccacaggggtcaaggaacgtattcgcgcgcctgggggtgggct

SEQ ID NO: 125662 - DNA, 351 bp, Homo sapiens
ataaaggttgttttgctgaggatgggtgacgttgggcgcgggacccaaatgagtggtttgagcagaaagtcgcctccacgctggactaatgcttggcaacattatgggaaaatttctgagcccagaagtttatcatctattcacagttcagagggatccaggggtcagatacgatgcttcagttcttttttaaaaatatatagtacacaatctttatcaacaagagaagacaagggacatggaggacaaactgtgcactctacataaagtatacatgtaatgagaaaagtcactgtccactgtttaaggtccagggaagaaaacaactaggaaaagagaaacttcaaaaac

SEQ ID NO: 125663 - DNA, 425 bp, Homo sapiens
gggatgtgagtgaacagaacatcaaacaacactccctctgctgcatttacatttcagtggtccctgacttcagttcatccacacgctgtcaaatgccagtcaactatttggagcattgcagagataggaattttcctaggagatctaaaggttgtgtgaattatttttgtattaatgaaaaaaccaaggtttgataaggtgtgaggtgcaagacagcaagcctgcagaggggaggggctggcacggccagcttctgaggaggcctgtcccggctgccccagggagggtgaggtcacgccttgtgggcaaacatgcaggccctccgtgggctgaaggctgtgtgtgcagcaggctgagggcctgcttgatgaacgcatcctcacacacacctcacacagaccaagacatacatccgtgggtggttt

SEQ ID NO: 125664 - DNA, 299 bp, Homo sapiens
acagccccgtacacaaggagagcatgatccagcacccggcgccaggtctgctctgacggcacggccagaacagcgggtcccgcacgttcccgctcatggaaatccagcgcccagcgccacatctctgactgcagggccaggacggtgggtcccgcacgttcccgctcatgtggaaaggctacaccacttagtagaagagggttttatcacagaagctagtgctaaggggactgcagcgtgaccgccatccctcatcttgtttgctcactgtgtgcgccagcacagaccctgccgacccg

SEQ ID NO: 125665 - DNA, 105 bp, Homo sapiens
gttgaaagtattgcataaactgtttttcagttagcttattatcttggaaggcatacatgaataggagaattaaaatgacattttgactttgacattgtttcctag

SEQ ID NO: 125666 - DNA, 369 bp, Homo sapiens
acctctcttttaaatgctttggctattttaacttctgatacgtagaatcaaagaatattagcattagagacctttgagggcatgcaattcagggatatggaatacgtttcagttgtgcaccattacccatccagtgacgctggtcgctgtgttgaaaaggcttcctaggctgaatctgggctcaatcagtgagaaacagtatataccatacccagtgcagcctagtgtcctcatagctgtcaatcatcattcaccatatgtttgagaacctctgtgtgccaggcacttctctaggtgctgaggatatggcagtgaataagacagagtgagcctgccttaccagaatttatgagtcagaggagcagggtt

SEQ ID NO: 125667 - DNA, 434 bp, Homo sapiens
ggtgtgagccaccgcccagcctgtcttttcattctttgaacaatatactcataaagcagaagttttttattttaatgaagtccatttttattattctgctgtggtttgtaagaactcattgactaactcaaggtcacaaaaattttctcctttatttttttctagacattttatagcttcaggttttatactgaggtctatgatttatttgggattaattcgacaaatgtaaatttgtcgaaaagactatttttctttactaaattgcttttgcacctttatcaccaatcagttgtctgtatattcatgggattatttctaaactctctattttattccactgattgttgtatttttgtatttgcgtatttatacaccaccaccacattattttgaatactgtagttttataataaatcttaaaatcatgcagt

SEQ ID NO: 125668 - DNA, 173 bp, Homo sapiens
tggaaaaatctcaagcacaaaagtagataaaaataatatgatgaactttcctcagcccagattctagaattatcaagtttgccctcttgcttcactcatcccttttacctgaagtattttaaagcaaatcctagacattttgtcatttcaacctctgccccccgccccctacc

SEQ ID NO: 125669 - DNA, 450 bp, Homo sapiens
tgagattattcagctagggtgccatagtgcgagactgacagcagacttttcagcaatgaccatgaaatgccagaactggccacctagcatttctaaatccagcactttgggaggccaaggcgggcggatcacctgaggccagtagttcgagactagcctggtcgacatggtgaaaccccgtctctactaaaaacgcaaaaattagccgggcgtggtggcacgtacttgtagtcccagctcctgaggaggctgaggcatgagaatcacttgaacccgggaggcggaggccagaaccccagagttctttttcacctgtccccttctagtcactactcttgccaaagagtagctgatttgatttccaacagcatagatgaggttagcctgcctgtacctcctatcaagtggatttgtacagtatgtattcttgtatctggctgctttgttcaa

SEQ ID NO: 125670 - DNA, 731 bp, Homo sapiens
ttctgggtgtgagaaccagtcattgcttcattctgaaaataactaacagattctaattagaagactagattctctgcaactcctaatactttctgtaattcctctgatatatatttaaaatgtttcaactatgagaggctgacaagacattcacttaaagtggtgaaatacataaacctttaaaatgactagactgagccttgaagtgaaatctattttctgccctaagtgtttccattgtgtacaattccctcggaatggtaggcagctgccatttagaactctgtgatgaataaagaaaaatctatatggaaacagaaatactatagaaatattatactctccaggcaaagaaaagtgggtgattgaggcaaatgcaccgataatttggggtcagggagaacacttgtctgaattacacagaaaatgttttcataaccttcaactttttaatcacagaaacatgcactaatatgcaaaacaagtgtgacagaatcatgggataaaagtatttacttgaaaggtctaaaatatcatcaaagtctaccatctacccaatattttaattcatatcatacaattcctatcaggaggttacctaatgatgaggacgtcactgcctcttacggagcatatttcatctttgggcagctctgattattctttaaatctttcactgaacaccagatggccatctgaagtgctgtgataccatactttaaaaaaaattg

SEQ ID NO: 125671 - DNA, 509 bp, Homo sapiens
agggttttctcattgtctggtggccctctcaccaaagcagaagtgaacatagccatgggcaggttcagcggagaggtgggtcccagagcgctgcgtggctggcctcccactcctgccctgcacaccatccttgagggactcccttgcgcccatttcctcctggcctctacctactttctgctgctgcttcctcccatacccacagagttcacgttgagctgagtgggccactgtccccactgtggacacactcttttatcgcagctacagcacaggaggtgggctctgccctctttcacaaataaatgacttgttccaggtcacaagccagaagtggcattcccaggccaggcagcccagctggtggcacccgcagtctcctaccccctcccctgccatttcctacttcaggaccaggcgtcgcaggagtgggggaaaacagggatctgtccacacggctctggtttaacacagatgcagcccagcagcctttggcgtcctgctgatgg

SEQ ID NO: 125672 - DNA, 480 bp, Homo sapiens
acattctttcaacaccttttcagatgctgacttcggatatcatcatttgtatcaacacatcctaaatgcagaaacatgggtgtacttaaaaatattttgactgccttttctgtttatctttgtccgtgaggctttttaatatactctttcctacggatccctgacctatgaattgtcgttaagtgtggtcacttcccccttctcagaagttcctagtcctggtcaaacccttgcctttgcctgtactggttgtcttccataccatctctttcattttctgcctatcatggaatacaggaaaggtggagggagggctgttgagagatcacaggatgcaaggtggtaacattaccagtcagttgagccgagaagggtctgaagtctggaccttagctcccacttgcagttgctttggggctgcagaagccaactggtattttcacctctgatggcggcttcttcagatctgtcctcattgct

SEQ ID NO: 125673 - DNA, 791 bp, Homo sapiens
aagacccacccccatgattcaattacctcccactgggtccctcccatgacgtgggaattatgggagctatgatttaagatgagatttgaatgaggacacagccaaaccacatcacccactatccataaaactgtcaccatcgccacctcctttctctctcccatctctgtcatatgatcctgtcccaagtgcctcggtctgatgggattggatccaccctggagccactctgcctgcaggtaggcggtggcctccacagccagatggccccaggccatctgtgcagggaccgctggggaaaacacacatctgggatcgctgctaaggaacaaagaaagccataagcgactctgaaattgacctagagcccagctgtgcttcagggtcactggatcactggatgggaggcaccatcttaggaatgtctcacccccactctgccccacacccatggccacttgcactggctccttcttccttctgtttgacctctttgagacctccctcccaatagtcccatgagggagggaggctcaagtgaatcctattttacaggtgagagaactcaggcttagagaagcaaagccatttgcccaaggtcacacagccacttgcaagcaactctgtccggctccaatgctaactactcctccgtgtgcctccatgtggctctggagacagagccgccagcaggagcctcccttcacatgccccgagagtggcctcctgcagagatataaagtgcctggctcggggctggccatgaaataggttcagaaagaccagtgagc

SEQ ID NO: 125674 - DNA, 446 bp, Homo sapiens
tacttttccagggaagtatttgaaagtttcaaatattaggacaggtgccgtggctcacgcctgtaatcccaaagctttaggagactgaggcaggaggattactcgaggtcagaagtttgagatcagcctacgcaacatagtgagagctcatctctacaaaaaaataaaattttaattagccaggtatggtggtgcatgcctatagtttcagccactggggaggctgaggtgggaggattgcttgagctgaggagttcaagtccagcctgggtaacagtgagaccctgtctcaaaaatataaaagttaaaaaataaataaataagagagttttttgtttttttagtttttaaataggtcctatagcttttgaggatttgagatttctactaggttaaaatttattttaaaatatacgtgacaagatttcgaaagtacaaaaagataa

SEQ ID NO: 125675 - DNA, 343 bp, Homo sapiens
cctcttacctcagcttcttaagcaactggaactacaggtgggtcccagtatgcttggctaatttttttggtgttcttagtagagacagggtctcactgtgttgcccaagctggtctcaaactcatggtctcaagtcatgctcccacctcagcctcccaaagtgctgggattacaggcgtgagccaccgcagccagcctcagatggatttcttgttctgacgcgatgctgtgtggaatgccatgatggtgggtgagcatgctttgagtctgcagatggtagtgacagcaaacgcattaaaggcagggaagcacgttcgtgtctgggatatctgtctattccagt

SEQ ID NO: 125676 - DNA, 323 bp, Homo sapiens
ctttgaggccattatgctaagtggaataacccagtcacaaaaagataaaatactctgattctacttatttgaggtatgcagagtagtcaaattcatagagacagaaagcagaatggtgattgtcagaggctgcatgatggggagttattgcttaatggccagaaagttttacttttgctagatgaaaagaatactagaaatgggccaggcacggtggctcatgcctgtaatcccagcactttgggaggccgaggcaggcagatcacgtaaggtcaggagttcgagcaatccccccacctcaatgagtttttttaaatatgata

SEQ ID NO: 125677 - DNA, 229 bp, Homo sapiens
agcgggaccgaagtggggggggggtgcggggggggctcttctcgaagcattcggctgtagccagcgtatggtggtagtctgtgaacctgccgcaccgagacaaacacaaatagaaacagttatgagagcaaggaatttggagccaggagacagaaggcagtggggcacaactctgctgcctcttctttgccaccccaatacactggcctctttctccttcctcctggct

SEQ ID NO: 125678 - DNA, 334 bp, Homo sapiens
caatggctgtgggcctggatacaagtcttagcctctccacttctccacttcctggctctgtaagccttagacaagttccttaactccacacttccatttccatgtaacaaggggttataggccaggcattggtggctcatgcctgtaatcccagtgctttgggaggccaaggcgggaggatacttggggacaagagttcaagaccagcccaggcagcacagtaagacattggctctagaaaaataaaaataaaagaaatcatccaagaatggtgacttgcctactattctactcgagaggctgagaggggaggatttcttgagcccaggagttt

SEQ ID NO: 125679 - DNA, 421 bp, Homo sapiens
tatgcactacttaagtccccgcacttgacaccatctatggataagataagcaagccctccttaaatgtaggtttcacatgccatgaagactgtattttttatctgcatttggtttgggtgcggatgcaaaacccacagagagagccaagtatatttttgttaagacaataatgtgagagagaagcacactaatatattttgtttcaagaaaagcaaatttcttgtatttgaattattaccatcctaaattaagatacttgtagaatagtgattatcttgaaatatttttcttagatgataattggattttttctggtttcagaaaaataagttgagcaaggataatatttcaagagttcacatttaatacaaaacatttctttgaagtagcactttcagttttgttcttttttttagttct

SEQ ID NO: 125680 - DNA, 419 bp, Homo sapiens
  misc_feature (31)..(31): n is a, c, g, or t
  misc_feature (33)..(33): n is a, c, g, or t
ctagtctgagaagctgggaagaggactggcnangaatttccaggtggggtggagagaaaataagaaaagtcactgaggaaggcagaggggtatctgagcatatgtcaacatagaaacagggtgcgcataggcaggagaattcaactaagttacaccataagcagttaaggccgactcggcagggatggagatttggagttggagatgtgtggtgaactcatagccagctctcattacctggaagcctgctgaggcagaagctccacgagtctcagctgggagcaccagttctgaccaaaatcagccctatcattaactgtgtgactttggacaacacactcaacttcactaggccccagcatcctcatctgtaaactaagggggttggatatgatgagctttcccaggtagagttagca

SEQ ID NO: 125681 - DNA, 552 bp, Homo sapiens
tcttagtccactgaggctgtgacaacacaacgctgtaggacgggcagtttctatacaacagaaatctgttcctcacagttctggaggctggacgtccaagatcaaggtgccagcaggctgggtgcctggtgagggcccacttcttggtcaaaagacaggtgtcttctgtgtccttacatgatggagagggcaagggagttctctggggcctcttttaggagggactaatcccactcatgaggactttgcccttgttaccagatcatctccccaaaagtctccacttcctaataccatcatcttggggattacaatttcaacacaaattttggggagatataaacactgaaaccatagcattctgcccctggttcccccaaattcatatccttttcacatgccaaacaaattcattctatcccaataaccctcaaagtcttaattcattccagcatcaactcaaaagtccggagtccaacatctcatttaaatatcatctaaatcagttacggttgaaactcaaggcacaattctacctgacacaaaattctc

SEQ ID NO: 125682 - DNA, 168 bp, Homo sapiens
agtgctgggattaccaccactaatcttactaatctttaaaatggcaataatattagcccttactaagtggttgtgaggatttaattcattaatatatataatcctcagaagaggggctaggatctctaaaggctacacacatatatatatttggggttaagagtcacc

SEQ ID NO: 125683 - DNA, 708 bp, Homo sapiens
agctgcaaagttgagtagctgcgacaaacactgcagggcccagaaagcctaatacatttaccagttggcttgttacagaaaaagttgctgacttctatctaaatctttttctcctttcccttacttttgttaattttactgattctactaagaactattaattgtagcaattttttttaattttttgggatttggggggttttttgaaacaaggtctcactctgtcaccctggctggagcactatcatggctcactgcagcctcgacctcctgaactcaagcaatcctcccacctcagctccctgagtagctggaaccacagtggcacaccaccatgcccggctaatttaaaacaatttttttgtagagatgaggtctcactatgttgcctaggctagtcttgagctcctgggctcaagggattctcccaccttggcctctgaagtgctgggatttcgggcatgagccaccaagtccagactatagcaacttttaaaaactaaaagcagaaaaacttttctgatcttatgtaaaggccataaaattaattggcatataaagaaattggagttaactgcagataatatttatctttgtggtttatatttatttcaataaaacttcttattattaagtacctacaaaacagaatatggcagaattatatacttttttctattgtcttatcagcctgagggcacagaatac

SEQ ID NO: 125684 - DNA, 235 bp, Homo sapiens
tgcaacaaaaaaggtatcatttataacatagcaaaaaaatataaattcactaggaatggatctaaaaacatgaaaaacttttatagagaaaactgaacttcaccaaaaggcaatgaagaggacctcaatacatgaagagacataccatgatcatggaggaaaaaaacactctactataaaaatgccagttccatcaaactcatccataagttcaatgtaatcccagtcaaaatct

SEQ ID NO: 125685 - DNA, 438 bp, Homo sapiens
ggaagaagaaaagaaaattaattagattttaaagcacaacaattaaatagaaagcaaaccaagatagtacaatatgtggagggcaagagaggagatcatttggaatggtgaatctttaccgggacagttttgccccctaggaacattcagcaatgtctggaaacagaaacacaacccagtgggtgttaatgcccactgtaggtaggggccagggatgctgctaagcatcctacattgaaaagggtagctcccacgaccaagagttatccagctatcctacattggaaagggtagctcccacgaccaagagttatccagctatcctacattggaaagggtagctcccacgaccaagagttatccagctatcctacattggaaagggtagctcccacgaccaagagttatccagctatcctacattggaaagggtagctc

SEQ ID NO: 125686 - DNA, 459 bp, Homo sapiens
tatatacagctcctatgagaataatcaatactgaatatcaacaaactgacacgcatgtggctaccaagtctctagaatgacccactgaaattcagtaaaagcttagagagcacagggttaactgccatgctgcactatttcccctcttacttgaacaaagtaacacttgctgatgtaactgtgcttgccaagtttttgatagtaagtccatcatgtctcgtaacttcaaagagtctcaaaagtgtcaagatcctaagacaggaaacttctggtagctgacaatgtctggttaatagggggtttggtgaaagcacaggcaatgggcacagtagagaagcaagcagcaaacaatggagatgtccaggaccatcctggcacgtgttctccagcgtttctaggaaaggtctctggtctagttatcaaccgctgtgtaacaaaccatcccaaacttagtgagat

SEQ ID NO: 125687 - DNA, 360 bp, Homo sapiens
attcattcattcaatagttatttatcacacatcaactatgtgttaggtaccatcgtatgtgtggatacacagtggtgaattaggtagacatggtctctcccctcacatagtttatagaccagtggagaggagagaaaataaagaagtaaacaaaggtgaactgaagactcagagagaggctaaattcggcactgaagctggagtccagaaggcggttcaaaccaaaggatggattgcaagctaagtttgctagaggtaattgccaagaatttctcctgagcaaagattttccagtgaggccactctggacccctggtgatcccctccctggagtagccctgtctgaaaccctgatcttca

SEQ ID NO: 125688 - DNA, 597 bp, Homo sapiens
gatttatgctttgaaaaccaaagcttttcttgggttctgcaagaaacaaatggcacccttctcgtccaggttgtagcttccttcattttgctaaattagttagattcctctatctactttccatctatctaaaaatttgttgaaatcactcatcttctactttatcttcttctaatctttttgttcttgtgggcatcgatttatctacctacctacctacctacaattgaacctcattattcttggtagctatgttctgtaaagtcattgtgaacagtgcattagtgactattgaaccattgcccataagagaaatatagggttagggtcttggaagcatctggtcgcaacagttttgcaaactgatcaatatataaccttgtttaatagatagtgttgattcatgaacattgaacttgcagccaacagcactataactcatgcctgaacaaagctcactggtatttgctttgtaaagcacatcatagcattcctgcacttaggaacactaggcaacagtacttcagcactatgcataggggctatttttaacagctaaatcaccaacaaaaagcacaaaaatgtgaaaaatgtggc

SEQ ID NO: 125689 - DNA, 291 bp, Homo sapiens
cgttgttagctttagtcaactttcatttcctgtggagattcaaataattattcagaaagtaacacaaggggaaaaaatcaggaattcggcaccatgacaatttgatcctagatgtgaattctctccctgaaagtgcagaagtgatatgaatgattttattcagcccaacggttggatatcaaggtcttaataatgaaacctcattctgacagcttttactgttggacagcaggcttcgttatattggccatgttgatttattacttttaacttcttttacatatgtatgca

SEQ ID NO: 125690 - DNA, 366 bp, Homo sapiens
aaactgaaatgtttgggatatgctttttctctctgggtgactcaatgccttgagttcataaatgcaatgtccctgaagaataaaagagaaatgtgccttaatgagcttgaggcatgaaaggtgtaagttccctctgcagcaagcaaaagtccacagtaaaagtaactgagacctaccgtgaagagagagaacagcatccaggtggcaatcatgacctaactttccctcagttatatctgatcttcagaacccactgtgcctacagcttcgtcccagtttccctttcttcagtaggacatccgatgtaaggacacaggaacacagccctctgccaggtcacaggatttcaggggaagcaggactgag

SEQ ID NO: 125691 - DNA, 567 bp, Homo sapiens
tggggcgctgggaccaggcctcactacccagggtgggtgctctctccgggcttttgccctttgttgggatgagccaacgaacacaccaacctcacctccttcaaagaagatagtgtgtctagattgagtctacttagcacctctttcccgaagactgtcgggtgtatggagaggcgcctgggggatgagcaaatgctgtgtggggagctgaacaagaagctgtggagcacacggaggcttcacaccatgagacagacgtcagggagccttccctcagacctctcaggacccctggtgctgaaggagtttcttctcctcccatgttttgaacccatctagctttaaggaagtttgacacttctctaagggcaggcctgttcagaccagtacacaccgcctgcccctctgacctttccttcccagctgaggagatggcagccctgatcctctgaccctgcagtattggcccatcaccacatggctaccagagatggaattagcctgcaaaggccattccctttcatgaaccaggagctagggtgccacctaatcacctgggcctctaag

SEQ ID NO: 125692 - DNA, 251 bp, Homo sapiens
aaagtgtcctgggcatgcctgcctgccagctccattcaccctctaatgcccctaaatgatatttggctatctttagtttgacctgaatatgagtacagtcctatataatcctaaaagcaggtaacatggggataaccatatcccatagggttaagtttaattttgtcaaaattgttatctttcctttctcgtgttagcaaaactgcgtcctgcagttcatgaagatttatatttcttctaaaacatgacac

SEQ ID NO: 125693 - DNA, 178 bp, Homo sapiens
gaggccacaaggcaggaaaaaaatcacaatggtgttgctttactaactatcgttgttaataaaataaccaccttacctactagtcttcttcttctttactttctcttttggaaacaaattctcttccggcgccccaggcggaagtgaaggggcaaaaccccgccccagggaaacttcc

SEQ ID NO: 125694 - DNA, 581 bp, Homo sapiens
tgcatacaacgcgtatgggagctctccatataggtcgacctgcaggcggcgcgaattcactagtgattgtgagctgagatcgcaccccttccctgcttcccaaatgtgggatctcctaagggtttattcccaggacaacgagcattccgcttgccattctctatttcagaaatgtttctcttagaggtgtgtattagctcattttcacgctgctcataaagacatacccgagactggacaatttgcagaagaaagaggtttaattggactcacagctccatgtggctggggaggcctcacaatcatggcagaaggcaaggaggaacaagtcacatcttacgtggatgacagcaggcaaagagagagcttgtgcaggcaaaatgccatttttaaaagccgtcagatgtcctgagacttattcactatcatgaaaacagcacaggaaagacctgcccccatgattcagttatctcccactgggtccctcccacaacacgtgggaattatggaagctgcaaggtgagatttgggtgggacacagagccaaatcatatcaagatgctacttaattaaatttacta

SEQ ID NO: 125695 - DNA, 651 bp, Homo sapiens
gagatggagtctcgctttgtcacccaggctggagtgcagtggcgcgatgtcagctcactgcaagctcttcctcccgggttcacgccattctcttgcctcagcctcctgagtagctgggactacaggcgcctgccaccacgcctggctaattttttgtatttttaatagagatgggatttcaccgtgttagccaggatggtttcaatctcccaacctcatgatccaccggcctcggcctcccaaagtgctgggattacaggtgtgagccaccgcgcccagtgactagtctttaaaaaaatgaataatataaatttttttaaaagatgaaaacatatatataccctgtaacccaagagtcccactcctcagaatcttctcaaaccacactcttacccatgtgcaccagaatacccacacagcaccagaaaatgtccaaatgaccatcaaaagtggagagtacaaataaattgtgcagtgttcctggagtgaaatgaactacagcgacttgcaataactgtaatattgtcatattggataataatactgtaataacaaatgactcatcaatgaataaaacctacaaaagaatgcatacagtataattccttttagcaaaaatttaacagctggcaaaactgtattgttaaggat

SEQ ID NO: 125696 - DNA, 422 bp, Homo sapiens
tactagtccctgtatgttaaatatttgacctcttgtcttattatcccgtattgattgtaatttcattgagaagactgtatgcatttatctttgtgtcccatgtagtgcctgggtgctgtgccttgcacatagtagtagctcagtaaatatatattaatttgaaaattgccactcaatttctccctcagcatatttcttagtactattccaaacacaaaattcaagacaagatcatgtaactttaatacagtatactattcagcatgttcttacaccattattataaatatttattcactctattaatctccatgaagataaacaggccaagcataaagtatataaattcttgctattggcattttttcatgcttcacataaaggtttgcagctttcaggtgtttgatttattcattttggga

SEQ ID NO: 125697 - DNA, 311 bp, Homo sapiens
tgctgcacccctcccaccaaggtccaagctacagcagtgtcttgccatttctgcatcattgctgctgctgtacctggcctcatagagcctggggtagtgatatgtcccaccatcccaaattacagctattctctgctccctggacccaagcttctagagaactcctttttctaccaagctgtgccagtggtgtcccatgtccaccagggtcacaacctcagctatatttcagcactctgggcctaagatggtgaggtgcacctcagaggaacagaccctgccttactggggaaactgcattcatttgtatc

SEQ ID NO: 125698 - DNA, 426 bp, Homo sapiens
agtaatggcagattttatgaagaggcagtttggagggcgagtggcctgctggtaagtaacagaggcagaaaatcggggaataaggatgttgttcattgtatttgttgacaggcaaacagggcagaataagaagcttctttgactctcgaattttagcactagaagaaatagtgaggattatatatttcagaagttctcacccaggatatcagaacacattcagagtcctgatcccagttatgagaaagggccaccttcgactacaaattagaaattgcattttctaccagaacattaaacgacaaaggctgtctacactgggatgtatcagtggaagtgtctccaatgtcaacatgggtcatagcagaagaaacatggaaaaccactacatctttagtccaattacttcgttgtaagaaggaacaa

SEQ ID NO: 125699 - DNA, 554 bp, Homo sapiens
ctctggtacaagacttcagcatagacattatactcgtgagtatcgcaaatcataggagtacatgtcataaagaatttcctgtggcacagttggagagccgagtgaacattcccatgactagtccacacatgtcttcaaacttggctggtcgtgaccgccattcttcaatctattgaagatcaatagaaagactcaagaagaacgtaggctcaacaaaagaatctgagacacagttacacattaagcggcttatgatgtcaggtactggcagttcatcttaaccattaaaggtatcatttgtctctccccaaactgacaagtattcctaaaataatgaccttacctcattcttacgctagaagggcacactatgaaagctgaaggtaccagacttagtatagtccacatccactgtgaataacatacttgtggtacatatatactatggaatactatgcagccataaaaaggaatgagatcacgttctttgcactgacatggatggagccggaagccattatcctcagcaaacttatgcaagaacagacaaccaa

SEQ ID NO: 125700 - DNA, 465 bp, Homo sapiens
aaacaagccaacaaaacatgagaagtatactgcctttcaattaaatggtatattttaaagtgcataaacccataacaaataactcgattttagacatttagttaccaaaaattgtcttataattgactttaaatatgacagcaaatgttttcataatgttcatgtacacaaatggctgctacaggattactcctgcaaaacatcattttttctaagttatgcatcatcctgattgactgctaacatccaagctctatttatttatttatttattttattttttttgagatgaggcctcactctgtcggacaggctggagtgcagtggcacaatctcagctcactgcaacctcttccaggatgcaagcgattctcctgcctcagcctcctgagttgctgggactacaggcacgccccaccatgcccagctaattttttattttttgtagtagagacgggatttcac

SEQ ID NO: 125701 - DNA, 422 bp, Homo sapiens
ctacactcatgtacacatccacttgcatgcacaggtacacatgtagatgcacacactgatatatacacatgtacacacatagagggacacagagataccatgaacactgccacatatagacacagacacgcatacatacagatgcacacacaatgacacatccacacacaggggatgcacgcagacatgcatgcacacgggcaggtatcgacacacacaggcgaacgcatgcacgcatgcaggcatgcacacagacaggcatgcacacccagagatttggtggtgtacatcagccctggcccctggcaggtgctggacatgctggctgaatggagggaactggtgcattagcacctactgtgtgccaagcccctcagcacagggtccgaagaaactgctccatgaggtcagtcagccaaggc

SEQ ID NO: 125702 - DNA, 159 bp, Homo sapiens
ttggacaaccgtgcctttactttcatataagagtaatacattgattcacatacttctagttatactacctttccacaagctatttggagcctccatattccactaaaatatcattcttctttacagggattaactaacataagtgtatcttatactact

SEQ ID NO: 125703 - DNA, 360 bp, Homo sapiens
ctgcctcagcctccgagtagctgggattacaggcatgtgccaccacgcccggctaattttgtatttttagtagagatggggtttcatcatgttggtcacgctggtcttgaactcctgacctcaggtgatctgcccacctcggcctcccagagtactgggattacaggcgtgagccactgtgcccgacccaaaatctcaactctttatgcctacttggcacaacaagatctagcccttacctacctcacccagctcatctgccagatccccacactgttccaatcaacaactttttttttcacatttcctcaaagcaagcacattcctgcctcagggcctttgcacaggctattacctttg

SEQ ID NO: 125704 - DNA, 147 bp, Homo sapiens
tagcatttgaaggatactgactacatcttatatcttattattattgcctttggctaattaaattctgaagtgtctctcaacccagacagctcagagctgccataattatatgtcctatgttctaattattgggggtgccacatataa

SEQ ID NO: 125705 - DNA, 107 bp, Homo sapiens
cgagtaacagacatgtccaccgaggaacccaaatgttctgaacttctggggctagaaaacctgaactacatccccgtttccattggccagacatctaacactctcca

SEQ ID NO: 125706 - DNA, 337 bp, Homo sapiens
aggttaaacgtaagcaaaaggaaaaagatattccaaccaatcacaaatcataaaagagctggagtggctctgttaatatcagacaaagtaaatgtcagaacaagcattaccatcagagataaacagaatgtttcatgataataaaaggatcaattcatcatgaagacttaacaattctgtaagtatacacaccaacctacagagcttcaaaataagcacagaagaagctgagagaaatgaaaggagacacggttgaaaacttcgacactcctgtttcaggaactgatagaacaagtaagagaaaatcgctgaaacctaaacagcactatcacccacc

SEQ ID NO: 125707 - DNA, 387 bp, Homo sapiens
tcactatcttcatctggcaccatttcctactaacccctgcattcaagccatatcaatgtcaatgttattgactttgtcaactgccaatgtcaattgacactgactcgtcattgtcaatgacttatctaaattgccacagtttctcaggcctccttgccttctcaattactatatcctcctcttgggaagttacttacctcctgcacttggcaaaatcatatcatccttcacaacttggctgtgtgctcccaactccacctacactcaaggcaagttaactatctcctactctaaactctcctactacactaggcatatctctattcccactgactacatagtattataattgttaatttactgtaatgttactaacatcttgtatgt

SEQ ID NO: 125708 - DNA, 416 bp, Homo sapiens
tgaggtgatctgagaaagctgagtcttgctttgtggacaattcacccacttgaactccctcaatggagcatcataggcccagagagacatggctatggacttagtaccttggcatcacttttatcccctcatggaggagatggcattttactctgaaaacatagggttctcctttgacacttcttggtgggagaaagcaggtcagagaaagtgggtgttggagtgctttgggatccctcatgacctcttttgttggtatacatgaagcctgggagtttagttcttattctgagcacttgtactactctcatgagggtagagataatggcatagcggacagacatggagaagagaaacaagagaacaggtagtgagaagtcgagagtcagtaattttcttacttaatattgtgggga

SEQ ID NO: 125709 - DNA, 502 bp, Homo sapiens
gactctacccttcaggcaggttatgatgtcagcaatccttaggtttacattcttacagccaaaaggatggtaattccttccactataccagttattttgctacgtagtgacaaaatgattccctaaataaactgtaagcagtgctgaatgatagccactcagctaatcaaagccacatttttcattttacaaatatgttccacctttaattgggaaagcaagccaaaaggagaccccctagttatcacaacatcccaccatacttaatgatcccaccctggtgttctctgtatcctggaattctcagaagttatacaactctcataggccaaaaacaaaagagcttcatttcacagccatctggaggtgccttcatgacactcaattacggctgcagactcagatgacttatctacaccccaaagggtctgcctctgctgctggaaatgctagacccagaagcccttggcactaatttggaccacacaatggactacgggga

SEQ ID NO: 125710 - DNA, 364 bp, Homo sapiens
aaggttggggaccactgctttaagagacctggagtgtaccagttgttacagtaactttttaaaacaaccaccaccaccacaaaacaaaaaactcacagtgttggtagaagataaccctagctggccccagttttagtctcttttcctaaagccggatgggaggaagagaatactctctacttgatcggcaacctcagtgggctctagtggtaactcccaactagttagcctttcttaatagtgtatcatttagttcagtggttctcaggcatgaggttgatttgcctgttttagaattgctgcttgtctcacaggatagctgataggaagttctgtattatctatgttgtagaacaaaactgcc

SEQ ID NO: 125711 - DNA, 396 bp, Homo sapiens
acagcggggccactggatgccttgacgcagaacttttcaaaaaatttcaagcaggatatatcaccaccccattaactccctgccattaatctactcctaaaaacctggagttttcccaaaaggaactggaacggggtgaaaaacggacccatttggtaaattctgtaaatcaggctggccttctctcctcggcctctccagccttggtgatgggttgctgcgtgggagggtagatctgcagccttccaggctttcgagggagtgtccccaggatggatgtcagtcttaaggggctgctgtactttatcctgctctggcctatggggtcactgagtgaagtgttctgtaggggtgtgggggtggggggactgtcgtcaggaagagctgcagagaatg

SEQ ID NO: 125712 - DNA, 817 bp, Homo sapiens
  misc_feature (215)..(215): n is a, c, g, or t
gcgggtggatcacctgaggcctggagttcgagaccagcctgaccaacatggagaaaccccatctctactaaaaatacaaaaatggccaggcgtggtggcacatgcctgtaatcccagctacttgggaggctgaggcaggagaatcacgttaaacccgtggagggcagaggttgtggtgagccaacatcaggccactgcactccagcctgggcgancaagagcaaaacttcatctcaaaaaaacaaaacaaaacaaaacaaaactacagaatattcttcaggctaaaaagaaataaaatcagattaaaataagaccttcaggaaagactggatactgccagaaataatctgaaaaaaacaaaacaaaacgaaacaaaaaacaaaacataaaagattatccattttttctgtattctctcaaaagacaagtagtgttttttttttgtttgttttttgttttttaagacagggtttcaaaaaaaaaaaccacaacggacacaaacagacccaacgacacgcagggcagcacccagaccgaactaacagacacggcaaccaacagcaaacagaacggtgcgggcgccgcccgacccgccgcacggagagagcgttgtgacaaccacacatgtgggggggggcggccccgccaagagtagctagcaggaacggcaggccgctggttgtcccaacagggaacactccgtgcgacaacacagcgcggggggggccccccaccaaaaaaagacccgcgggggggagacagcgtgtcgacaaaccaccacgggggggtgctgcggcgacgagggtaccacacggcg

SEQ ID NO: 125713 - DNA, 441 bp, Homo sapiens
gctcctcctcctcctccctcttcactgtggaccgaggggcgctgtgagtcaggaattctgtgcgactctctctggacctggcttttcttgctgagctcactacatctggggtccccagtgtgactcaacaactttctcccttgcccagcttccctcatcccacgggctgggtgtcctcttttccaggtgtgggacccctctagagaaagacatccacaacctaccctcggaacctcagcccattcatggattccttctcctgggactgaagtagggctacgtagggactgtggtttgtttggtaggatattaggtatttagttgtgatgcttttccattttggaagcagcgcagcaggaatcttgctcacgatggtgctggactagggtggggtattggatttgttttgtgttctcagaaggctgagggtaggagggaccc

SEQ ID NO: 125714 - DNA, 341 bp, Homo sapiens
tggctgtctagaggatcctcaaaagccatttctaagctatatacagtaggtgcttttttttttttctttaaggcggagttcactcttgttttgccagtgatagatgtgcatgggtgcgatctggagtcaccgaaacctccgcctcccaggttcaagtgattctcctgcctcagcctcccaagtagcgggattacaggcacacacccccacgcccagctaatttttgtatttttagtagagacaggttttcaccatgttggccaggctggtttcgaactcctgacctcagatgatccacccgcttcagcctcccaaagtgctgggattagaggcatgagcca

SEQ ID NO: 125715 - DNA, 136 bp, Homo sapiens
ttgtgttatacctcctctgactgccatgtgaaaaagtgcctgggtgttttttgttctctctgagtgtctgggcagctcttcatgggcactggctgctgattaacactcatggttgctattgctaaatttttcttgt

SEQ ID NO: 125716 - DNA, 169 bp, Homo sapiens
ttggcacgcctcctacagagctagaaccctttgcccccagacctagtcagcagctgtctcactttgccaaattcatttctggggaagctttctctaggaatgccaatcactcctggcccctaactcatgcttccagacctcggccggtgcctctgggacctgggcaccc

SEQ ID NO: 125717 - DNA, 744 bp, Homo sapiens
caggatcttgcttctcactctgttgcacaggctgaagtgcagtggtgtgatcacagctcactgcaggctcaacctgcctggctcaagtgatcctcccaccaccctcccaagtagtgggactacaggtgtgcaccatcatgctctgctaattttgttgtatttcttgtagagatggggttttgccatgttgcccaggctggtcacagctttgtcttttttctgtagtctgtaatttttttttaaaccttattgtgtgaatccagtgtcaaactacttttcttagatgttcacaaatggataattattcacatcggtatttgaagatctcttaacaagatccataaataccacttagaattgctcttactagtttaaaaactttgtaggaaagtaaaattgtagaatacataatatcaatctactgaataaaagcatttaaatgaactaaaataaaattttattatcaaatgtttgtgtgcttctcaatgttttatttttcaaacagaaaactctttaacttgaaatgttcatcaatttaaagattaaatcagctgaaataatattagaatttgatatatgatgaattttagtcttctgaactataactcaatttggtacatgtaatcagtttattatggcaattggtttattcctgatgaatgttggtatgaaattttttcaataactacaacaaaacccctaaactcttaaaaagcaaatgactgtaattttattaaaagacaa

SEQ ID NO: 125718 - DNA, 325 bp, Homo sapiens
ggtctatatgaaagtacttaatactgtgcctggcataagttattatcttagcaactttgacattatcttttaatatgaaatatgatcatcttgtatatctaaacccacaactggatagcagtgttggtgagctttgtgatcagagagaaaaagatagggaagaaccaagacaaacttttcctctgccagaactgactggtctcatgtgactgtgctgaagtacacctataagcaaaaacatactgccatgcctccttagccatgaatagcaagttatgccactgtctcatgaaatagatgttctgtgacagtgcactacactgga

SEQ ID NO: 125719 - DNA, 290 bp, Homo sapiens
gcccctgggtgtctgtggagggaggaacggcgctatgtgataagagagaagctcgctatgtgataagagagaagctcatgggggcaaagggttgggggtgggtaagccagggcttggggcagcatggggaccttagcgctccacgtcttatttggcaggagaggctggaaacgagcgggcgccagctgcaggcaaattgcaggctttcccagcccttgtctgcagagagaatcattacctgtggatggcgcggggaatcccttgccctcagtagccccgcctggagagac

SEQ ID NO: 125720 - DNA, 350 bp, Homo sapiens
tgaccatttgtcatgctctgcgactttgtgtacatccttcctgtacttaggaatcagccacctgtgatcctgctgcctggaggaagaagacatttattttcctatagcctctcttgcgtgtggagtgaatcatcctctgttgactttaagtgaaaaatattaacttttatttaagtgactgtatttgggggtagcttagcctgtgctttaatacacaagcaaaatgattagattctgaactgctttactgcagatcctaccatccctgtattcgctatgaacttacatttgtgggtgtgttagatactactctaaactgcgctacccacctccctctagaccccagagag

SEQ ID NO: 125721 - DNA, 321 bp, Homo sapiens
tctttccttccttctttctttctttccttctttctttctctcctttctttctttctctccttccttccttccttcctttttctttctttctctctttctttctttctaaatacatttctctttattctttttcttacacgcttccttatccgaaaatgggagaattgggctaaatgatcattacatgttttttggaagttttgacgattgtaagagatgtttagagaattgacttcttggactttcatttttagtggtgggattactttcatgttaaaaatttgcacctgttctaatagaacattatatggctagacattt

SEQ ID NO: 125722 - DNA, 238 bp, Homo sapiens
aaaaaatacctttatttcatttcttttcctaacctgtgtgttggtcaattaaaaaactttttaaacataagtcacaaatccataaaaaatgttctgtaaatgttctttactgagatatattactttttacaattttaaaaaagaagactttcttattcattcttcgttccttccctgattaattcctttagtgagtaggcaagaagcccggttcaaatgcttttttttccccacatta

SEQ ID NO: 125723 - DNA, 417 bp, Homo sapiens
ttgaccaaccgtcgtccacagtaagtagtacccgtgctcctaaagcttccctgggattaatattgcactgatcacattggcttcagtgatgtttttccttccacttcctgctctagtgtagaactcacagggcggggacaaggttttcatatacccagcacggggaacagcagcccttggttaacatgtactgaatgaatcacaggaagtggtggctggagctcattcacactagcatgtaaatgactaatatacatcctttcctgaaaacaacccttgatggaggagaggaaggggaaatcccagagccccgggcaagtgaagccagggaagcagccccacctggagagggacaggtccagggagttgggaggcccagcttcaaccctggttatgaaggtgggctcggttctgcac

SEQ ID NO: 125724 - DNA, 418 bp, Homo sapiens
cagtaattaaagcaactgggggattctggagcagctgttcattttgttgaacaagagtagctggggggcccactgacccaggcaagtggttctcaaacttgagtgagcccgagaacctcctggagagcctgttaagctgttgggcccagccccagagttactgactcagaaggtctgggccaggggtctgaggatttatgtgttccgtggtgctgctgctcctggcctaggggctgcactttgtgaacactcatctggcctctggtgaacactcatctggcctctggtgaagactccaacccccttcctctatccattttctccccaaggcagagaaaggaggatgggaggctagggggtgtttaggaacccacctcctctgctctttctggattctctacctgtccaccaacagacc

SEQ ID NO: 125725 - DNA, 416 bp, Homo sapiens
ctgttgtttcctttgcttcaggtaagggactctgaaacaactatttgggcagcagaacagcctcttttgtttgctttctcattgtctactgtgttctgcataaataaggttatgaattagctgttgttcatatgggtgaaagatttgcatctgtggacgcttagatagcacatatggtaaacatagaacttcaccatttataacctttgaacaactgatacacttagaaaagcagtttttggctgggcgcggtggctcatgcctgtaatcctagcacttttgggaggctgaggtgggcagattgcctgaggtcaggagttcaagaccagcctggacaacatggtgaaaccccatctctactaaaagtacaaaaattagccaggcatggtggtgggcacctgtactcccaactactc

SEQ ID NO: 125726 - DNA, 353 bp, Homo sapiens
agtctgtaaattatagcattggtctccccttgtctgccttggccatgggatcttccccattttcctgcgtggtgtctgcttggagctgtgcagtgtcctgtgatgaacctatcaagaggagccatctgcagcatgtccctgtggttaataaactgacccatgctaccaggcccctggataatacagcctgtcagcactggagcacatcttacctgggccatttctattctggggcattgcatttcaaactgttctttccagtagaaagactataggtgagcccattcccaatttgtggttaaaagtaggatgtcaatatatggcaagccaaatgatgggcaatggtagaggtc

SEQ ID NO: 125727 - DNA, 231 bp, Homo sapiens
atatgagctcggtaccgccccgtcttttggtctcagcctcccaaagcgctggcaccataagcatgaaccactgtgctcagcctgagtttttaaattatagttcgatgactatgaggaagctaaggaccaaaagacggggcctttcccaaggtctataaccagcaagtgagtggcagggttggcattcattcctttttctcccatttcagcttttattcctttttctcctca

SEQ ID NO: 125728 - DNA, 336 bp, Homo sapiens
gtttacctgtgttccccccgctccgcgtagggtctctttgcctgtgttccccccgctccgtgtagggtctctttgccttgttccccctgctctgggtagaatctgccctagagactcgcggggcctccacctcataatgtctgagccgagctcagagctgtgccctctgcggcctcgtctgttgcaggggagcaggcaggtcccaggaagtgcgtgtccttcctcccgcaagcagacacgtgctgcctcgaagcctcagcagccagccgggcagcgatggcaaacaacaccccagtgtctcgggggcaggcgcagtgtgagctacatcctctgctg

SEQ ID NO: 125729 - DNA, 2925 bp, Homo sapiens
ctcggaactcgccaggggcgccgccggcggcggagggagcgtgactgcgctgcgcagggcgctaggaggcattgtcgccgctcaggcccttttgtgagaagcagaccagcctgggggctggcggcaggacacctgtgtctgcatgctgaagaagatgggtgaggccgtggccagagtagcaaggaaggtcaacgagacggtggagagcggctctgacactctggagctccacctggaggggaacttcctacaccgcctccccagcgaggtcagtgccctgcagcacctcaaggccattgacctgtcccggaaccagttccaggacttccctgagcagcttaccgccctgccggcgctggagaccatcaacctggaggagaacgagatcgtagatgtgcccgtggagaagctggccgccatgccagccttgcgcagcatcaacctccgcttcaacccactcaacgccgaggtgcgcgtgatcgccccgccgctcatcaagtttgacatgctcatgtctccggaaggcgcaagagcccccctaccttaggccaccctcctcatgcccacccagcaagggacagaggccacaggcctggaaccctggaagggagggaggcccatgggaggccaagcctgggggctgggggcgggtgggccgagcagcacgtggtgggtggggtgcagctggtctggatagatagcttacagcagtagtgggctctggaatgcccaagggaagaggcaaggtggggcctgcagcctggactcggcactcacagctgctgtgcaaactcaggcagatctcctgccctctctgagccttgtcacttgaaaaaaacaggaccctttccctcctttgggctccctggaggtttttaagcagtacgtgcctccaagttacctccagatcagcaggcacaggtgggcattgccaggtattttctgagcccctgcgggtttgaggccttgtttttagtgctgagagccagttgctgccctgagaagagaagacaacctccatctatttattgcttcctgagaactgacctggatgcggccctctgcagggcccagtcttcagtcctgtggtccctggactggtgggaacctgaactaggagtcctgggagagctgtggtgggaatatgggctggcactgctgcagggcaagaacattcatgtaggagcccgaggaccagcaggctgggaatggggagcaagtcacgtcagctctgtcattccccacagttaacaaattggcggggtgggaagtcctgagtgctccgtccctctagcatcactcctgagctgcgggagaggtggcccagagaacagcagagtcagttacacctgcagctcttgtctaaagtgattagatggccaccctcaccactgtccagtccagcagcagcctggctgccttgtcatggcctcctgggggcagaaggcgatgtggaccacgggatttgtagccagccagctcccaggccaacgcccaaagccctgatgacctggttcttctgaggccctcaacctggcatcttagggtatggtcaggcaacagggtgaccagctgtcctggtttcccaggacatggaactttcaatgctaaaactgggacagtacccagcaagtggggatggttggtcccctaccaggagagggcctggggctcttgcttcccgagaacgcctgtggcttgaagaaccttgactgcttggtcctcaggtatctacctcccaccttctcctcatctgtggagcaagccaactcagtgccccagaccccacctgatctgcatctttgtttgcatctccagagacacctgaggccccagagcttgaggcaaagccaggccgtccaaatcctgtgtgccgtggacgagtggccactttactactcctaaggctaagatgttgagagctcagaccactgctcagagcagtaatccctgctcagaatgctcccagttccctcgtccctgcccaggtctcttgtctcttgggaaggaactgataggtcgggccattgttgggccatcactgagcgctcagtatctcaagagactctgttcattctgctcgtatcccaaggcctggttggtcaaactctgggcaaagggttttcaggatgaggaggtcaagacaggatgtccagagctaccgagttcatctgtgggtgttgggggcaagtgggggctgaagtcctgtgcaggctgcgctggccccacctgccttgtgccctggagtggggtttctccttgttgaagaagaggcatccttctctgatgtgcacaaacacaatgtatgaccagagccttgcaactcaaagtgtggtctgtggaccagcagcggcagtgacacctgggagcttgttaggaatgcagagtctaggcctcaccctatacctcccgactcagaccctgcattttagcaagacccccagctgattcctataagcactttagagtttgagaagcaaggacctaggctggggatgtcctccgagcagagggtgaagtttctctcagttctctccctgccacttccagggatctgagcctgtgttcagcctcctccctaacccaccctgggagacacttggcctgttagattgttccagagtctgcatggcactcctgaagaagggagtgggacctgcagtcaccaggagatgagggttaggtgtgcccagccctccagacccggcctttctggttaacccctgcatgccaagctgcctgctgccccaggtcctcacctcaggcctttgaaggggcagcttctggaagttgttttctcctctgcttggagagtttgcccttgtctgtcttggaaagtgtgggcagccacagatgcccccaaatcagagctcacagtgagtgagcccctaagcttcagtctgcaataaagaatgcattggtttc

SEQ ID NO: 125730 - DNA, 3075 bp, Homo sapiens
ctcggaactcgccaggggcgccgccggcggcggagggagcgtgactgcgctgcgcagggcgctaggaggcattgtcgccgctcaggcccttttgtgagaagcagaccagcctgggggctggcggcaggacacctgtgtctgcatgctgaagaagatgggtgaggccgtggccagagtagcaaggaaggtcaacgagacggtggagagcggctctgacactctggacctggccgagtgcaagctggtctcctttcccattggcatctacaaggtcctgcggaatgtctctggccagatccacctcatcaccctggctaacaacgagcttaagtccctcaccagcaagttcatgaccacattcagtcagctccgagagctccacctggaggggaacttcctacaccgcctccccagcgaggtcagtgccctgcagcacctcaaggccattgacctgtcccggaaccagttccaggacttccctgagcagcttaccgccctgccggcgctggagaccatcaacctggaggagaacgagatcgtagatgtgcccgtggagaagctggccgccatgccagccttgcgcagcatcaacctccgcttcaacccactcaacgccgaggtgcgcgtgatcgccccgccgctcatcaagtttgacatgctcatgtctccggaaggcgcaagagcccccctaccttaggccaccctcctcatgcccacccagcaagggacagaggccacaggcctggaaccctggaagggagggaggcccatgggaggccaagcctgggggctgggggcgggtgggccgagcagcacgtggtgggtggggtgcagctggtctggatagatagcttacagcagtagtgggctctggaatgcccaagggaagaggcaaggtggggcctgcagcctggactcggcactcacagctgctgtgcaaactcaggcagatctcctgccctctctgagccttgtcacttgaaaaaaacaggaccctttccctcctttgggctccctggaggtttttaagcagtacgtgcctccaagttacctccagatcagcaggcacaggtgggcattgccaggtattttctgagcccctgcgggtttgaggccttgtttttagtgctgagagccagttgctgccctgagaagagaagacaacctccatctatttattgcttcctgagaactgacctggatgcggccctctgcagggcccagtcttcagtcctgtggtccctggactggtgggaacctgaactaggagtcctgggagagctgtggtgggaatatgggctggcactgctgcagggcaagaacattcatgtaggagcccgaggaccagcaggctgggaatggggagcaagtcacgtcagctctgtcattccccacagttaacaaattggcggggtgggaagtcctgagtgctccgtccctctagcatcactcctgagctgcgggagaggtggcccagagaacagcagagtcagttacacctgcagctcttgtctaaagtgattagatggccaccctcaccactgtccagtccagcagcagcctggctgccttgtcatggcctcctgggggcagaaggcgatgtggaccacgggatttgtagccagccagctcccaggccaacgcccaaagccctgatgacctggttcttctgaggccctcaacctggcatcttagggtatggtcaggcaacagggtgaccagctgtcctggtttcccaggacatggaactttcaatgctaaaactgggacagtacccagcaagtggggatggttggtcccctaccaggagagggcctggggctcttgcttcccgagaacgcctgtggcttgaagaaccttgactgcttggtcctcaggtatctacctcccaccttctcctcatctgtggagcaagccaactcagtgccccagaccccacctgatctgcatctttgtttgcatctccagagacacctgaggccccagagcttgaggcaaagccaggccgtccaaatcctgtgtgccgtggacgagtggccactttactactcctaaggctaagatgttgagagctcagaccactgctcagagcagtaatccctgctcagaatgctcccagttccctcgtccctgcccaggtctcttgtctcttgggaaggaactgataggtcgggccattgttgggccatcactgagcgctcagtatctcaagagactctgttcattctgctcgtatcccaaggcctggttggtcaaactctgggcaaagggttttcaggatgaggaggtcaagacaggatgtccagagctaccgagttcatctgtgggtgttgggggcaagtgggggctgaagtcctgtgcaggctgcgctggccccacctgccttgtgccctggagtggggtttctccttgttgaagaagaggcatccttctctgatgtgcacaaacacaatgtatgaccagagccttgcaactcaaagtgtggtctgtggaccagcagcggcagtgacacctgggagcttgttaggaatgcagagtctaggcctcaccctatacctcccgactcagaccctgcattttagcaagacccccagctgattcctataagcactttagagtttgagaagcaaggacctaggctggggatgtcctccgagcagagggtgaagtttctctcagttctctccctgccacttccagggatctgagcctgtgttcagcctcctccctaacccaccctgggagacacttggcctgttagattgttccagagtctgcatggcactcctgaagaagggagtgggacctgcagtcaccaggagatgagggttaggtgtgcccagccctccagacccggcctttctggttaacccctgcatgccaagctgcctgctgccccaggtcctcacctcaggcctttgaaggggcagcttctggaagttgttttctcctctgcttggagagtttgcccttgtctgtcttggaaagtgtgggcagccacagatgcccccaaatcagagctcacagtgagtgagcccctaagcttcagtctgcaataaagaatgcattggtttc

SEQ ID NO: 125731 - DNA, 2682 bp, Homo sapiens
gcaggctggtaccgctctggcgatgtatgggcacctgcagcacctcaaggccattgacctgtcccggaaccagttccaggacttccctgagcagcttaccgccctgccggcgctggagaccatcaacctggaggagaacgagatcgtagatgtgcccgtggagaagctggccgccatgccagccttgcgcagcatcaacctccgcttcaacccactcaacgccgaggtgcgcgtgatcgccccgccgctcatcaagtttgacatgctcatgtctccggaaggcgcaagagcccccctaccttaggccaccctcctcatgcccacccagcaagggacagaggccacaggcctggaaccctggaagggagggaggcccatgggaggccaagcctgggggctgggggcgggtgggccgagcagcacgtggtgggtggggtgcagctggtctggatagatagcttacagcagtagtgggctctggaatgcccaagggaagaggcaaggtggggcctgcagcctggactcggcactcacagctgctgtgcaaactcaggcagatctcctgccctctctgagccttgtcacttgaaaaaaacaggaccctttccctcctttgggctccctggaggtttttaagcagtacgtgcctccaagttacctccagatcagcaggcacaggtgggcattgccaggtattttctgagcccctgcgggtttgaggccttgtttttagtgctgagagccagttgctgccctgagaagagaagacaacctccatctatttattgcttcctgagaactgacctggatgcggccctctgcagggcccagtcttcagtcctgtggtccctggactggtgggaacctgaactaggagtcctgggagagctgtggtgggaatatgggctggcactgctgcagggcaagaacattcatgtaggagcccgaggaccagcaggctgggaatggggagcaagtcacgtcagctctgtcattccccacagttaacaaattggcggggtgggaagtcctgagtgctccgtccctctagcatcactcctgagctgcgggagaggtggcccagagaacagcagagtcagttacacctgcagctcttgtctaaagtgattagatggccaccctcaccactgtccagtccagcagcagcctggctgccttgtcatggcctcctgggggcagaaggcgatgtggaccacgggatttgtagccagccagctcccaggccaacgcccaaagccctgatgacctggttcttctgaggccctcaacctggcatcttagggtatggtcaggcaacagggtgaccagctgtcctggtttcccaggacatggaactttcaatgctaaaactgggacagtacccagcaagtggggatggttggtcccctaccaggagagggcctggggctcttgcttcccgagaacgcctgtggcttgaagaaccttgactgcttggtcctcaggtatctacctcccaccttctcctcatctgtggagcaagccaactcagtgccccagaccccacctgatctgcatctttgtttgcatctccagagacacctgaggccccagagcttgaggcaaagccaggccgtccaaatcctgtgtgccgtggacgagtggccactttactactcctaaggctaagatgttgagagctcagaccactgctcagagcagtaatccctgctcagaatgctcccagttccctcgtccctgcccaggtctcttgtctcttgggaaggaactgataggtcgggccattgttgggccatcactgagcgctcagtatctcaagagactctgttcattctgctcgtatcccaaggcctggttggtcaaactctgggcaaagggttttcaggatgaggaggtcaagacaggatgtccagagctaccgagttcatctgtgggtgttgggggcaagtgggggctgaagtcctgtgcaggctgcgctggccccacctgccttgtgccctggagtggggtttctccttgttgaagaagaggcatccttctctgatgtgcacaaacacaatgtatgaccagagccttgcaactcaaagtgtggtctgtggaccagcagcggcagtgacacctgggagcttgttaggaatgcagagtctaggcctcaccctatacctcccgactcagaccctgcattttagcaagacccccagctgattcctataagcactttagagtttgagaagcaaggacctaggctggggatgtcctccgagcagagggtgaagtttctctcagttctctccctgccacttccagggatctgagcctgtgttcagcctcctccctaacccaccctgggagacacttggcctgttagattgttccagagtctgcatggcactcctgaagaagggagtgggacctgcagtcaccaggagatgagggttaggtgtgcccagccctccagacccggcctttctggttaacccctgcatgccaagctgcctgctgccccaggtcctcacctcaggcctttgaaggggcagcttctggaagttgttttctcctctgcttggagagtttgcccttgtctgtcttggaaagtgtgggcagccacagatgcccccaaatcagagctcacagtgagtgagcccctaagcttcagtctgcaataaagaatgcattggtttc

SEQ ID NO: 125732 - DNA, 2907 bp, Homo sapiens
ctcggaactcgccaggggcgccgccggcggcggagggagcgtgactgcgctgcgcagggcgctaggaggcattgtcgccgctcaggcccttttgtgagaagcagaccagcctgggggctggcggcaggacacctgtgtctgcatgctgaagaagatgggtgaggccgtggccagagtagcaaggaaggtcaacgagacggtggagagcggctctgacactctggacctggccgagtgcaagctggtctcctttcccattggcatctacaaggtcctgcggaatgtctctggccagatccacctcatcaccctggctaacaacgagcttaagtccctcaccagcaagttcatgaccacattcagtcagctccgagatgtgcccgtggagaagctggccgccatgccagccttgcgcagcatcaacctccgcttcaacccactcaacgccgaggtgcgcgtgatcgccccgccgctcatcaagtttgacatgctcatgtctccggaaggcgcaagagcccccctaccttaggccaccctcctcatgcccacccagcaagggacagaggccacaggcctggaaccctggaagggagggaggcccatgggaggccaagcctgggggctgggggcgggtgggccgagcagcacgtggtgggtggggtgcagctggtctggatagatagcttacagcagtagtgggctctggaatgcccaagggaagaggcaaggtggggcctgcagcctggactcggcactcacagctgctgtgcaaactcaggcagatctcctgccctctctgagccttgtcacttgaaaaaaacaggaccctttccctcctttgggctccctggaggtttttaagcagtacgtgcctccaagttacctccagatcagcaggcacaggtgggcattgccaggtattttctgagcccctgcgggtttgaggccttgtttttagtgctgagagccagttgctgccctgagaagagaagacaacctccatctatttattgcttcctgagaactgacctggatgcggccctctgcagggcccagtcttcagtcctgtggtccctggactggtgggaacctgaactaggagtcctgggagagctgtggtgggaatatgggctggcactgctgcagggcaagaacattcatgtaggagcccgaggaccagcaggctgggaatggggagcaagtcacgtcagctctgtcattccccacagttaacaaattggcggggtgggaagtcctgagtgctccgtccctctagcatcactcctgagctgcgggagaggtggcccagagaacagcagagtcagttacacctgcagctcttgtctaaagtgattagatggccaccctcaccactgtccagtccagcagcagcctggctgccttgtcatggcctcctgggggcagaaggcgatgtggaccacgggatttgtagccagccagctcccaggccaacgcccaaagccctgatgacctggttcttctgaggccctcaacctggcatcttagggtatggtcaggcaacagggtgaccagctgtcctggtttcccaggacatggaactttcaatgctaaaactgggacagtacccagcaagtggggatggttggtcccctaccaggagagggcctggggctcttgcttcccgagaacgcctgtggcttgaagaaccttgactgcttggtcctcaggtatctacctcccaccttctcctcatctgtggagcaagccaactcagtgccccagaccccacctgatctgcatctttgtttgcatctccagagacacctgaggccccagagcttgaggcaaagccaggccgtccaaatcctgtgtgccgtggacgagtggccactttactactcctaaggctaagatgttgagagctcagaccactgctcagagcagtaatccctgctcagaatgctcccagttccctcgtccctgcccaggtctcttgtctcttgggaaggaactgataggtcgggccattgttgggccatcactgagcgctcagtatctcaagagactctgttcattctgctcgtatcccaaggcctggttggtcaaactctgggcaaagggttttcaggatgaggaggtcaagacaggatgtccagagctaccgagttcatctgtgggtgttgggggcaagtgggggctgaagtcctgtgcaggctgcgctggccccacctgccttgtgccctggagtggggtttctccttgttgaagaagaggcatccttctctgatgtgcacaaacacaatgtatgaccagagccttgcaactcaaagtgtggtctgtggaccagcagcggcagtgacacctgggagcttgttaggaatgcagagtctaggcctcaccctatacctcccgactcagaccctgcattttagcaagacccccagctgattcctataagcactttagagtttgagaagcaaggacctaggctggggatgtcctccgagcagagggtgaagtttctctcagttctctccctgccacttccagggatctgagcctgtgttcagcctcctccctaacccaccctgggagacacttggcctgttagattgttccagagtctgcatggcactcctgaagaagggagtgggacctgcagtcaccaggagatgagggttaggtgtgcccagccctccagacccggcctttctggttaacccctgcatgccaagctgcctgctgccccaggtcctcacctcaggcctttgaaggggcagcttctggaagttgttttctcctctgcttggagagtttgcccttgtctgtcttggaaagtgtgggcagccacagatgcccccaaatcagagctcacagtgagtgagcccctaagcttcagtctgcaataaagaatgcattggtttc

SEQ ID NO: 125733 - DNA, 3415 bp, Homo sapiens
tgctggaggctcagtccgaggatgcctagatgttagcgagggagcacgcgctgagcttcccgaaccccatgccacaaaaacaaggcgccagcaggtcccgctcacgtcccagcgggcttctttccctggggtggggaagtgggtcaacttcgttctgatctgaaggggggtttgggactatttgggtcgctcctcacctccccacccgctccccggcttggcatggtccagagcccgggctggagccagcggtagggccagcttgcacacatggctccggaggctccggttgcccatccgagcccctgccaggctctaacgttcccaactgacaacaccagtaactaaatataggagcagatggtggggacgggctgtcgcagcggctcctttgcagaggtctccggactgcagataaggctcaggcccttttgtgagaagcagaccagcctgggggctggcggcaggacacctgtgtctgcatgctgaagaagatgggtgaggccgtggccagagtagcaaggaaggtcaacgagacggtggagagcggctctgacactctggacctggccgagtgcaagctggtctcctttcccattggcatctacaaggtcctgcggaatgtctctggccagatccacctcatcaccctggctaacaacgagcttaagtccctcaccagcaagttcatgaccacattcagtcagctccgagagctccacctggaggggaacttcctacaccgcctccccagcgaggtcagtgccctgcagcacctcaaggccattgacctgtcccggaaccagttccaggacttccctgagcagcttaccgccctgccggcgctggagaccatcaacctggaggagaacgagatcgtagatgtgcccgtggagaagctggccgccatgccagccttgcgcagcatcaacctccgcttcaacccactcaacgccgaggtgcgcgtgatcgccccgccgctcatcaagtttgacatgctcatgtctccggaaggcgcaagagcccccctaccttaggccaccctcctcatgcccacccagcaagggacagaggccacaggcctggaaccctggaagggagggaggcccatgggaggccaagcctgggggctgggggcgggtgggccgagcagcacgtggtgggtggggtgcagctggtctggatagatagcttacagcagtagtgggctctggaatgcccaagggaagaggcaaggtggggcctgcagcctggactcggcactcacagctgctgtgcaaactcaggcagatctcctgccctctctgagccttgtcacttgaaaaaaacaggaccctttccctcctttgggctccctggaggtttttaagcagtacgtgcctccaagttacctccagatcagcaggcacaggtgggcattgccaggtattttctgagcccctgcgggtttgaggccttgtttttagtgctgagagccagttgctgccctgagaagagaagacaacctccatctatttattgcttcctgagaactgacctggatgcggccctctgcagggcccagtcttcagtcctgtggtccctggactggtgggaacctgaactaggagtcctgggagagctgtggtgggaatatgggctggcactgctgcagggcaagaacattcatgtaggagcccgaggaccagcaggctgggaatggggagcaagtcacgtcagctctgtcattccccacagttaacaaattggcggggtgggaagtcctgagtgctccgtccctctagcatcactcctgagctgcgggagaggtggcccagagaacagcagagtcagttacacctgcagctcttgtctaaagtgattagatggccaccctcaccactgtccagtccagcagcagcctggctgccttgtcatggcctcctgggggcagaaggcgatgtggaccacgggatttgtagccagccagctcccaggccaacgcccaaagccctgatgacctggttcttctgaggccctcaacctggcatcttagggtatggtcaggcaacagggtgaccagctgtcctggtttcccaggacatggaactttcaatgctaaaactgggacagtacccagcaagtggggatggttggtcccctaccaggagagggcctggggctcttgcttcccgagaacgcctgtggcttgaagaaccttgactgcttggtcctcaggtatctacctcccaccttctcctcatctgtggagcaagccaactcagtgccccagaccccacctgatctgcatctttgtttgcatctccagagacacctgaggccccagagcttgaggcaaagccaggccgtccaaatcctgtgtgccgtggacgagtggccactttactactcctaaggctaagatgttgagagctcagaccactgctcagagcagtaatccctgctcagaatgctcccagttccctcgtccctgcccaggtctcttgtctcttgggaaggaactgataggtcgggccattgttgggccatcactgagcgctcagtatctcaagagactctgttcattctgctcgtatcccaaggcctggttggtcaaactctgggcaaagggttttcaggatgaggaggtcaagacaggatgtccagagctaccgagttcatctgtgggtgttgggggcaagtgggggctgaagtcctgtgcaggctgcgctggccccacctgccttgtgccctggagtggggtttctccttgttgaagaagaggcatccttctctgatgtgcacaaacacaatgtatgaccagagccttgcaactcaaagtgtggtctgtggaccagcagcggcagtgacacctgggagcttgttaggaatgcagagtctaggcctcaccctatacctcccgactcagaccctgcattttagcaagacccccagctgattcctataagcactttagagtttgagaagcaaggacctaggctggggatgtcctccgagcagagggtgaagtttctctcagttctctccctgccacttccagggatctgagcctgtgttcagcctcctccctaacccaccctgggagacacttggcctgttagattgttccagagtctgcatggcactcctgaagaagggagtgggacctgcagtcaccaggagatgagggttaggtgtgcccagccctccagacccggcctttctggttaacccctgcatgccaagctgcctgctgccccaggtcctcacctcaggcctttgaaggggcagcttctggaagttgttttctcctctgcttggagagtttgcccttgtctgtcttggaaagtgtgggcagccacagatgcccccaaatcagagctcacagtgagtgagcccctaagcttcagtctgcaataaagaatgcattggtttc

SEQ ID NO: 125734 - DNA, 1906 bp, Homo sapiens
  misc_feature (90)..(90): n is a, c, g, or t
atgatgcatcttaaatacaggaggtacatgtatgtggcaaaaatggcaacatcttgtgaacaacgtcatgattcaaacttgacggggagnggagcagggaggaaggtaacctgcaccctgacgtcttcaggggaggacacacaagcaccctatcaggtggcctctcttgaaaacccttgcccccacgactggcgccctgctttccccattcactgccttgtctccacccctcgacctccttgctctcctgctgctgactttgggacccctaccctgcaggctgtcctggaatctcctcggggatgaggcagctgccgagctggcccaggtgctgccgcagatgggccggctgaagagagtggagtatgaggggccgggggaggaatgggacgggctaaagggggacctacatcccgggaacaccaagaggccactgggtcagtcccctgcctcccagaaagcccttccttgagttgcacactctggcctgttccaagcccctgccaggcttagttccccctgggttctagccttcagccttcccgctgcacctgccaccagtcccctgttgtcttttgggttccctgagaaggtagtgtgggagactgtgtcccctgaccttggcctgaggaagggacctaggaaactctcacacccattctcatggccgtgtttctctttcccctcccctcactgtccactgagaagcctggagaagaatcagatcacagctttgggggcctggctcctggctgaaggactggcccaggggtctagcatccaagtcatccgcctctggaataaccccattccctgcgacatggcccagcacctgaagagccaggagcccaggctggactttgccttctttgacaaccagccccaggccccttggggtacttgatggccccctcaagacctttggaatccagccaagtgatgcacccaaatgatccacctttcgcccactgggataaatgactcaggaaagaagagcctcggcagggcgctctgcactccacccaggaggaaggatacgtgtgtcctgctgcagtcctcagggagaacttttttgggaaccaggagctgggtctggacaaaggagtaccctgcattacgtgggatatgtgtgatcaattggggacatgcgacacacaatgagggtgtcatgacaatgcatgacacgtacggttatatgtggcagtgtgaccccttgacatgtggcgttacatgaaagtcagtgtggcacgtgttctgtggcatgggtgctggcatcccaagtggcaggatacatgattgttggtctatatatgacacatgacaaatgtccatgtcacaggactcatggctggccagatgacctcaggctggcccaagatctaatttattaatttttaaagcaaatacatatttatagattgtgtgtatggagcagctaagtcaggaaaagtcttccgcccgagctgggaggggagagtgtccatgcactgaccagtccaggggctcaagggccagggctctggaacaagccagggactcagccattaagtcccctcctgcctcaatcctcagcctacccatctataaacttgatgactcctcccttacttacatactagcttccaaggacaggtggaggtagggccagcctggcgggagtggagaagcccagtctgtcctatgtaagggacaaagccaggtctaatggtactgggtagggggcactgccaagacaataagctaggctactgggtccagctactactttggtgggattcaggtgagtctccatgcacttcacatgttacccagtgttcttgttacttccaaggagaaccaagaatggctctgtcacactcgaagccaggtttgatcaataaacacaatggtattccaaaaaaaaaat

SEQ ID NO: 125735 - DNA, 3388 bp, Homo sapiens
  misc_feature (18)..(18): n is a, c, g, or t
  misc_feature (25)..(25): n is a, c, g, or t
ccaggttggttacccccncgagttntggatatcgtcgacccagcgccctcggtggctcttccgcttggacatcagctttgaaagccaacacatcctcctgagaggggacaagacaagcagggatatgtgggccactggatctttgccagacttcccggctgcagccaagttcttagggttccgtcagcgctgcatccccaggagcctctgcctcagtgagtgtcctctggagcccccaagcctcacccgcctctgtgccactctgaaggactgcccgggacccctggaactgcaattgtcctgtgagttcctgagtgaccagagcctggagactctactggactgcttacctcaactccctcagctgagcctgctgcagctgagccagacgggactgtccccgaaaagccccttcctgctggccaacaccttaagcctgtgtccacgggttaaaaaggtggatctcaggtccctgcaccatgcaactttgcacttcagatccaacgaggaggaggaaggcgtgtgctgtggtctctcagcaaacctgctgggcgacagcggactcagatgccttctggaatgtctgccgcaggtgcccatctccggtttgcttgatctgagtcacaacagcatttctcaggaaagtgccctgtacctgctggagacactgccctcctgcccacgtgtccgggaggcctcagtgaacctgggctctgagcagagcttccggattcacttctccagagaggaccaggctgggaagacactcaggctaagtgagtgcagcttccggccagagcacgtgtccaggctggccaccggcttgagcaagtccctgcagctgacggagctcacgctgacccagtgctgcctgggccagaagcagctggccatcctcctgagcttggtggggcgacccgcagggctgttcagtctcagggtgcaggagccgtgggcggacagagccagggttctctccctgttagaagtctgcgcccaggcctcaggcagtgtcgctgaaatcagcatctccgagacccagcagcagctctgtgtccagctggaatttcctcgccaggaagagaatccagaagctgtggcactcaggttggctcactgtgaccttggagcccaccacagccttcttgtcgggcagctgatggagacatgtgccaggctgcagcagctcagcttgtctcaggttaacctctgtgaggacgatgatgccagttccctgctgctgcagagcctcctgctgtccctctctgagctgaagacatttcggctgacctccagctgtgtgagcaccgagggcctcgcccacctggcatctggtctgggccactgccaccacttggaggagctggacttgtctaacaatcaatttgatgaggagggcaccaaggcgctgatgagggcccttgaggggaaatggatgctaaagaggctggacctcagtcaccttctgctgaacagctccaccttggccttgcttactcacagactaagccagatgacctgcctgcagagcctcagactgaacaggaacagtatcggtgatgtcggttgctgccacctttctgaggctctcagggctgccaccagcctagaggagctggacttgagccacaaccagattggagacgctggtgtccagcacttagctaccatcctgcctgggctgccagagctcaggaagatagacctctcagggaatagcatcagctcagccgggggagtgcagttggcagagtctctcgttctttgcaggcgcctggaggagttgatgcttggctgcaatgccctgggggatcccacagccctggggctggctcaggagctgccccagcacctgagggtcctacacctaccattcagccatctgggcccaggtggggccctgagcctggcccaggccctggatggatccccccatttggaagagatcagcttggcggaaaacaacctggctggaggggtcctgcgtttctgtatggagctcccgctgctcagacagatagacctggtttcctgtaagattgacaaccagactgccaagctcctcacctccagcttcacgagctgccctgccctggaagtaatcttgctgtcctggaatctcctcggggatgaggcagctgccgagctggcccaggtgctgccgcagatgggccggctgaagagagtggacctggagaagaatcagatcacagctttgggggcctggctcctggctgaaggactggcccaggggtctagcatccaagtcatccgcctctggaataaccccattccctgcgacatggcccagcacctgaagagccaggagcccaggctggactttgccttctttgacaaccagccccaggccccttggggtacttgatggccccctcaagacctttggaatccagccaagtgatgcacccaaatgatccacctttcgcccactgggataaatgactcaggaaagaagagcctcggcagggcgctctgcactccacccaggaggaaggatacgtgtgtcctgctgcagtcctcagggagaacttttttgggaaccaggagctgggtctggacaaaggagtaccctgcattacgtgggatatgtgtgatcaattggggacatgcgacacacaatgagggtgtcatgacaatgcatgacacgtacggttatatgtggcagtgtgaccccttgacatgtggcgttacatgaaagtcagtgtggcacgtgttctgtggcatgggtgctggcatcccaagtggcaggatacatgattgttggtctatatatgacacatgacaaatgtccatgtcacaggactcatggctggccagatgacctcaggctggcccaagatctaatttattaatttttaaagcaaatacatatttatagattgtgtgtatggagcagctaagtcaggaaaagtcttccgcccgagctgggaggggagagtgtccatgcactgaccagtccaggggctcaagggccagggctctggaacaagccagggactcagccattaagtcccctcctgcctcaatcctcagcctacccatctataaacttgatgactcctcccttacttacatactagcttccaaggacaggtggaggtagggccagcctggcgggagtggagaagcccagtctgtcctatgtaagggacaaagccaggtctaatggtactgggtagggggcactgccaagacaataagctaggctactgggtccagctactactttggtgggattcaggtgagtctccatgcacttcacatgttacccagtgttcttgttacttccaaggagaaccaagaatggctctgtcacactcgaagccaggtttgatcaataaacacaatggtattccaaaaaaaaaat

SEQ ID NO: 125736 - DNA, 3474 bp, Homo sapiens
  misc_feature (18)..(18): n is a, c, g, or t
  misc_feature (25)..(25): n is a, c, g, or t
ccaggttggttacccccncgagttntggatatcgtcgacccagcgccctcggtggctcttccgcttggacatcagctttgaaagccaacacatcctcctgagaggggacaagacaagcagggatatgtgggccactggatctttgccagacttcccggctgcagccaagttcttagggttccgtcagcgctgcatccccaggagcctctgcctcagtgagtgtcctctggagcccccaagcctcacccgcctctgtgccactctgaaggactgcccgggacccctggaactgcaattgtcctgtgagttcctgagtgaccagagcctggagactctactggactgcttacctcaactccctcagctgagcctgctgcagctgagccagacgggactgtccccgaaaagccccttcctgctggccaacaccttaagcctgtgtccacgggttaaaaaggtggatctcaggtccctgcaccatgcaactttgcacttcagatccaacgaggaggaggaaggcgtgtgctgtggaggttcacaggctgcagcctcagccaggagcacgtagagtcactctgctggttgctgagcaagtgtaaagacctcagccaggtggatctctcagcaaacctgctgggcgacagcggactcagatgccttctggaatgtctgccgcaggtgcccatctccggtttgcttgatctgagtcacaacagcatttctcaggaaagtgccctgtacctgctggagacactgccctcctgcccacgtgtccgggaggcctcagtgaacctgggctctgagcagagcttccggattcacttctccagagaggaccaggctgggaagacactcaggctaagtgagtgcagcttccggccagagcacgtgtccaggctggccaccggcttgagcaagtccctgcagctgacggagctcacgctgacccagtgctgcctgggccagaagcagctggccatcctcctgagcttggtggggcgacccgcagggctgttcagtctcagggtgcaggagccgtgggcggacagagccagggttctctccctgttagaagtctgcgcccaggcctcaggcagtgtcgctgaaatcagcatctccgagacccagcagcagctctgtgtccagctggaatttcctcgccaggaagagaatccagaagctgtggcactcaggttggctcactgtgaccttggagcccaccacagccttcttgtcgggcagctgatggagacatgtgccaggctgcagcagctcagcttgtctcaggttaacctctgtgaggacgatgatgccagttccctgctgctgcagagcctcctgctgtccctctctgagctgaagacatttcggctgacctccagctgtgtgagcaccgagggcctcgcccacctggcatctggtctgggccactgccaccacttggaggagctggacttgtctaacaatcaatttgatgaggagggcaccaaggcgctgatgagggcccttgaggggaaatggatgctaaagaggctggacctcagtcaccttctgctgaacagctccaccttggccttgcttactcacagactaagccagatgacctgcctgcagagcctcagactgaacaggaacagtatcggtgatgtcggttgctgccacctttctgaggctctcagggctgccaccagcctagaggagctggacttgagccacaaccagattggagacgctggtgtccagcacttagctaccatcctgcctgggctgccagagctcaggaagatagacctctcagggaatagcatcagctcagccgggggagtgcagttggcagagtctctcgttctttgcaggcgcctggaggagttgatgcttggctgcaatgccctgggggatcccacagccctggggctggctcaggagctgccccagcacctgagggtcctacacctaccattcagccatctgggcccaggtggggccctgagcctggcccaggccctggatggatccccccatttggaagagatcagcttggcggaaaacaacctggctggaggggtcctgcgtttctgtatggagctcccgctgctcagacagatagacctggtttcctgtaagattgacaaccagactgccaagctcctcacctccagcttcacgagctgccctgccctggaagtaatcttgctgtcctggaatctcctcggggatgaggcagctgccgagctggcccaggtgctgccgcagatgggccggctgaagagagtggacctggagaagaatcagatcacagctttgggggcctggctcctggctgaaggactggcccaggggtctagcatccaagtcatccgcctctggaataaccccattccctgcgacatggcccagcacctgaagagccaggagcccaggctggactttgccttctttgacaaccagccccaggccccttggggtacttgatggccccctcaagacctttggaatccagccaagtgatgcacccaaatgatccacctttcgcccactgggataaatgactcaggaaagaagagcctcggcagggcgctctgcactccacccaggaggaaggatacgtgtgtcctgctgcagtcctcagggagaacttttttgggaaccaggagctgggtctggacaaaggagtaccctgcattacgtgggatatgtgtgatcaattggggacatgcgacacacaatgagggtgtcatgacaatgcatgacacgtacggttatatgtggcagtgtgaccccttgacatgtggcgttacatgaaagtcagtgtggcacgtgttctgtggcatgggtgctggcatcccaagtggcaggatacatgattgttggtctatatatgacacatgacaaatgtccatgtcacaggactcatggctggccagatgacctcaggctggcccaagatctaatttattaatttttaaagcaaatacatatttatagattgtgtgtatggagcagctaagtcaggaaaagtcttccgcccgagctgggaggggagagtgtccatgcactgaccagtccaggggctcaagggccagggctctggaacaagccagggactcagccattaagtcccctcctgcctcaatcctcagcctacccatctataaacttgatgactcctcccttacttacatactagcttccaaggacaggtggaggtagggccagcctggcgggagtggagaagcccagtctgtcctatgtaagggacaaagccaggtctaatggtactgggtagggggcactgccaagacaataagctaggctactgggtccagctactactttggtgggattcaggtgagtctccatgcacttcacatgttacccagtgttcttgttacttccaaggagaaccaagaatggctctgtcacactcgaagccaggtttgatcaataaacacaatggtattccaaaaaaaaaat

SEQ ID NO: 125737 - DNA, 672 bp, Homo sapiens
cgtccactatagacgatcccctgtattggtggtgctggcatcccaagtggcaggatacatgattgttggtctatatatgacacatgacaaatgtccatgtcacaggactcatggctggccagatgacctcaggctggcccaagatctaatttattaatttttaaagcaaatacatatttatagattgtgtgtatggagcagctaagtcaggaaaagtcttccgcccgagctgggaggggagagtgtccatgcactgaccagtccaggggctcaagggccagggctctggaacaagccagggactcagccattaagtcccctcctgcctcaatcctcagcctacccatctataaacttgatgactcctcccttacttacatactagcttccaaggacaggtggaggtagggccagcctggcgggagtggagaagcccagtctgtcctatgtaagggacaaagccaggtctaatggtactgggtagggggcactgccaagacaataagctaggctactgggtccagctactactttggtgggattcaggtgagtctccatgcacttcacatgttacccagtgttcttgttacttccaaggagaaccaagaatggctctgtcacactcgaagccaggtttgatcaataaacacaatggtattccaaaaaaaaaat

SEQ ID NO: 125738 - DNA, 5824 bp, Homo sapiens
caccatctgaactgtttccaggccctgttcctttttgaattccgccagctcaacttgatcacgaggttcctgacaccgtccgagctcctttttgatctgtacctgagccctgaatcggaccacgacactgtcttccagtacctggagaagaacgctgaccaagtcctgctgatctttgatgggctagatgaggccctccagcctatgggtcctgatggcccaggcccagtcctcacccttttctcccatctctgcaatgggaccctcctgcctggctgccgggtgatggctacctcccgtccagggaagctgcctgcctgcctgcctgcagaggcagccatggtccacatgttgggctttgatgggccacgggtggaagaatatgtgaatcacttcttcagcgcccagccatcgcgggagggggccctggtggagttacagacaaatggacgtctccgaagcctgtgtgcggtgcccgcactgtgccaagtcgcctgtctctgcctccaccatctgcttcctgaccacgccccaggccagtctgtggccctcctgcccaacatgactcagctctatatgcagatggtgctcgccctcagcccccctgggcacttgcccacctcgtccctactggacctgggggaggtggccctgaggggcctggagacagggaaggttatcttctatgcaaaagatattgctccacccttgatagcttttggggccactcacagcctgctgacttccttctgcgtctgcacaggccctgggcaccagcagacaggctatgctttcacccacctcagcctgcaggagtttcttgctgccctgcacctgatggccagccccaaggtgaacaaagacacacttacccagtatgttaccctccattcccgctgggtacagcggaccaaagctagactgggcctctcagaccacctccccaccttcctggcgggcctggcatcctgcacctgccgccccttccttagccacctggcgcagggcaatgaggactgtgtgggtgccaagcaggctgctgtagtgcaggtgttgaagaagttggccacccgcaagctcacagggccaaaggttgtagagctgtgtcactgtgtggatgagacacaggagcctgagctggccagtctcaccgcacaaagcctcccctatcaactgcccttccacaatttcccactgacctgcaccgacctggccaccctgaccaacatcctagagcacagggaggcccccatccacctggattttgatggctgtcccctggagccccactgccctgaggctctggtaggctgtgggcagatagagaatctcagctttaagagcaggaagtgtggggatgcctttgcagaagccctctccaggagcttgccgacaatggggaggctgcagatgctggggttagcaggaagtaaaatcactgcccgaggcatcagccacctggtgaaagctttgcctctctgtccacagctgaaagaagtcagttttcgggacaaccagctcagtgaccaggtggtgctgaacattgtggaggttctccctcacctaccacggctccggaagcttgacctgagcagcaacagcatctgcgtgtcaaccctactctgcttggcaagggtggcagtcacgtgtcctaccgtcaggatgcttcaggccagggaggcggacctcatcttccttctttccccgcccacagagacaactgcagagctacaaagagctccagacctgcaggaaagtgacggccagaggaaaggggctcagagcagaagcttgacgctcaggctgcagaagtgtcagctccaggtccacgatgcggaggccctcatagccctgctccaggaaggccctcacctggaggaagtggacctctcagggaaccagctggaagatgaaggctgtcggctgatggcagaggctgcatcccagctgcacatcgccaggaagctggacctcagcgacaacgggctttctgtggccggggtgcattgtgtgctgagggccgtgagtgcgtgctggaccctggcagagctgcacatcagcctgcagcacaaaactgtgatcttcatgtttgcccaggagccagaggagcagaaggggccccaggagagggctgcatttcttgacagcctcatgctccagatgccctctgagctgcctctgagctcccgaaggatgaggctgacacattgtggcctccaagaaaagcacctagagcagctctgcaaggctctgggaggaagctgccacctcggtcacctccacctcgacttctcaggcaatgctctgggggatgaaggtgcagcccggctggctcagctgctcccagggctgggagctctgcagtccttgaacctcagtgagaacggtttgtccctggatgccgtgttgggcttggttcggtgcttctccactctgcagtggctcttccgcttggacatcagctttgaaagccaacacatcctcctgagaggggacaagacaagcagggatatgtgggccactggatctttgccagacttcccggctgcagccaagttcttagggttccgtcagcgctgcatccccaggagcctctgcctcagtgagtgtcctctggagcccccaagcctcacccgcctctgtgccactctgaaggactgcccgggacccctggaactgcaattgtcctgtgagttcctgagtgaccagagcctggagactctactggactgcttacctcaactccctcagctgagcctgctgcagctgagccagacgggactgtccccgaaaagccccttcctgctggccaacaccttaagcctgtgtccacgggttaaaaaggtggatctcaggtccctgcaccatgcaactttgcacttcagatccaacgaggaggaggaaggcgtgtgctgtggaggttcacaggctgcagcctcagccaggagcacgtagagtcactctgctggttgctgagcaagtgtaaagacctcagccaggtggatctctcagcaaacctgctgggcgacagcggactcagatgccttctggaatgtctgccgcaggtgcccatctccggtttgcttgatctgagtcacaacagcatttctcaggaaagtgccctgtacctgctggagacactgccctcctgcccacgtgtccgggaggcctcagtgaacctgggctctgagcagagcttccggattcacttctccagagaggaccaggctgggaagacactcaggctaagtgagtgcagcttccggccagagcacgtgtccaggctggccaccggcttgagcaagtccctgcagctgacggagctcacgctgacccagtgctgcctgggccagaagcagctggccatcctcctgagcttggtggggcgacccgcagggctgttcagtctcagggtgcaggagccgtgggcggacagagccagggttctctccctgttagaagtctgcgcccaggcctcaggcagtgtcgctgaaatcagcatctccgagacccagcagcagctctgtgtccagctggaatttcctcgccaggaagagaatccagaagctgtggcactcaggttggctcactgtgaccttggagcccaccacagccttcttgtcgggcagctgatggagacatgtgccaggctgcagcagctcagcttgtctcaggttaacctctgtgaggacgatgatgccagttccctgctgctgcagagcctcctgctgtccctctctgagctgaagacatttcggctgacctccagctgtgtgagcaccgagggcctcgcccacctggcatctggtctgggccactgccaccacttggaggagctggacttgtctaacaatcaatttgatgaggagggcaccaaggcgctgatgagggcccttgaggggaaatggatgctaaagaggctggacctcagtcaccttctgctgaacagctccaccttggccttgcttactcacagactaagccagatgacctgcctgcagagcctcagactgaacaggaacagtatcggtgatgtcggttgctgccacctttctgaggctctcagggctgccaccagcctagaggagctggacttgagccacaaccagattggagacgctggtgtccagcacttagctaccatcctgcctgggctgccagagctcaggaagatagacctctcagggaatagcatcagctcagccgggggagtgcagttggcagagtctctcgttctttgcaggcgcctggaggagttgatgcttggctgcaatgccctgggggatcccacagccctggggctggctcaggagctgccccagcacctgagggtcctacacctaccattcagccatctgggcccaggtggggccctgagcctggcccaggccctggatggatccccccatttggaagagatcagcttggcggaaaacaacctggctggaggggtcctgcgtttctgtatggagctcccgctgctcagacagatagacctggtttcctgtaagattgacaaccagactgccaagctcctcacctccagcttcacgagctgccctgccctggaagtaatcttgctgtcctggaatctcctcggggatgaggcagctgccgagctggcccaggtgctgccgcagatgggccggctgaagagagtggacctggagaagaatcagatcacagctttgggggcctggctcctggctgaaggactggcccaggggtctagcatccaagtcatccgcctctggaataaccccattccctgcgacatggcccagcacctgaagagccaggagcccaggctggactttgccttctttgacaaccagccccaggccccttggggtacttgatggccccctcaagacctttggaatccagccaagtgatgcacccaaatgatccacctttcgcccactgggataaatgactcaggaaagaagagcctcggcagggcgctctgcactccacccaggaggaaggatacgtgtgtcctgctgcagtcctcagggagaacttttttgggaaccaggagctgggtctggacaaaggagtaccctgcattacgtgggatatgtgtgatcaattggggacatgcgacacacaatgagggtgtcatgacaatgcatgacacgtacggttatatgtggcagtgtgaccccttgacatgtggcgttacatgaaagtcagtgtggcacgtgttctgtggcatgggtgctggcatcccaagtggcaggatacatgattgttggtctatatatgacacatgacaaatgtccatgtcacaggactcatggctggccagatgacctcaggctggcccaagatctaatttattaatttttaaagcaaatacatatttatagattgtgtgtatggagcagctaagtcaggaaaagtcttccgcccgagctgggaggggagagtgtccatgcactgaccagtccaggggctcaagggccagggctctggaacaagccagggactcagccattaagtcccctcctgcctcaatcctcagcctacccatctataaacttgatgactcctcccttacttacatactagcttccaaggacaggtggaggtagggccagcctggcgggagtggagaagcccagtctgtcctatgtaagggacaaagccaggtctaatggctactgggtccagctactactttggtgggattcaggtgagtctccatgcacttcacatgttacccagtgttcttgttacttccaaggagaaccaagaatggctctgtcacactcgaagccaggtttgatcaataaacacaatggtattccaaaaaaaaaat

SEQ ID NO: 125739 - DNA, 1042 bp, Homo sapiens
  misc_feature (18)..(18): n is a, c, g, or t
  misc_feature (25)..(25): n is a, c, g, or t
ccaggttggttacccccncgagttntggatatcgtcgacccagcgccctcggtggctcttccgcttggacatcagctttgaaagccaacacatcctcctgagaggggacaagacaagcagcctcagtgagtgtcctctggagcccccaagcctcacccgcctctgtgccactctgaaggactgcccgggacccctggaactgcaattgtcctgtgagttcctgagtgaccagagcctggagactctactggactgcttacctcaactccctcagctgagcctgctgcagctgagccagacgggactgtccccgaaaagccccttcctgctggccaacaccttaagcctgtgtccacgggttaaaaaggtggatctcaggtccctgcaccatgcaactttgcacttcagatccaacgaggaggaggaaggcgtgtgctgtggaggttcacaggctgcagcctcagccaggagcacgtagagtcactctgctggttgctgagcaagtgtaaagacctcagccaggtggatctctcagcaaacctgctgggcgacagcggactcagatgccttctggaatgtctgccgcaggtgcccatctccggtttgcttgatctgagtcacaacagcatttctcaggaaagtgccctgtacctgctggagacactgccctcctgcccacgtgtccgggaggcctcagtgaacctgggctctgagcagagcttccggattcacttctccagagaggaccaggctgggaagacactcaggctaagtgagtgcagcttccggccagagcacgtgtccaggctggccaccggcttgagcaagtccctgcagctgacggagctcacgctgacccagtgctgcctgggccagaagcagctggccatcctcctgagcttggtggggcgacccgcagggctgttcagtctcagagactccacaaggcacacagagaaactgtccttccccacactggaggcctgtgctttgggatttaagaaaaaaagaaagaaagaaagaaagaaggtttcagaggata

SEQ ID NO: 125740 - DNA, 319 bp, Homo sapiens
gactcctgcttcctagcacttctcataagtgaatagcaaactgtaggacttcatttgatcagcatttatttacccctacaccataagctccttgcaggcagatactgaatcccacatactggactagatgttccaaaactgtcgtctccctgtctgtgtccaggttggctcactgtgaccttggagcccaccacagccttcttgtcgggcagctgatggagacatgtgccaggctgcagcagctcaggtcagcgcctggaaactctgtgtggggccctgagttctctggttgaccctggtacctactccaggccatgtg

SEQ ID NO: 125741 - DNA, 387 bp, Homo sapiens
gctgacccagtgctgcctgggccagaagcagctggccatcctcctgagcttggtggggcgacccgcagggctgttcagtctcaggtacctcctcccccgctgcctccgggaggggccatggcatgaatgggagcaggggtgggcactggagtaagaggcccccaggatcatggccccagtcatttcctgtacccacaaccctgccatctggaccctgagcaaaccctgtccatctgtcccagagactccacaaggcacacagagaaactgtccttccccacactggaggcctgtgctttgggatttaagaaaaaaagaaagaaagaaagaaagaaggtttcagaggatactgaactgaggacaaaaataaactgaaacgaagttctt

SEQ ID NO: 125742 - DNA, 349 bp, Homo sapiens
cttagctggcatcactatctcccagggaggaaggttgagttggaggactcaggaggcaggtgtggggtacaccctctccctaggtcagctatgctggtctaacacctgcctctgccaggtaactctaggcacagctctacctttttgggcctcagcctcccaatctgcagatacgacagatggcagagatgggaggatgaatgagtgcctatatctgtgccccacagcctctggaataaccccattccctgcgacatggcccagcacctgaagagccaggagcccaggctggactttgccttctttgacaaccagccccaggccccttggggtacttgatggccccctc

SEQ ID NO: 125743 - DNA, 3519 bp, Homo sapiens
caccatctgaactgtttccaggccctgttcctttttgaattccgccagctcaacttgatcacgaggttcctgacaccgtccgagctcctttttgatctgtacctgagccctgaatcggaccacgacactgtcttccagtacctggagaagaacgctgaccaagtcctgctgatctttgatgggctagatgaggccctccagcctatgggtcctgatggcccaggcccagtcctcacccttttctcccatctctgcaatgggaccctcctgcctggctgccgggtgatggctacctcccgtccagggaagctgcctgcctgcctgcctgcagaggcagccatggtccacatgttgggctttgatgggccacgggtggaagaatatgtgaatcacttcttcagcgcccagccatcgcgggagggggccctggtggagttacagacaaatggacgtctccgaagcctgtgtgcggtgcccgcactgtgccaagtcgcctgtctctgcctccaccatctgcttcctgaccacgccccaggccagtctgtggccctcctgcccaacatgactcagctctatatgcagatggtgctcgccctcagcccccctgggcacttgcccacctcgtccctactggacctgggggaggtggccctgaggggcctggagacagggaaggttatcttctatgcaaaagatattgctccacccttgatagcttttggggccactcacagcctgctgacttccttctgcgtctgcacaggccctgggcaccagcagacaggctatgctttcacccacctcagcctgcaggagtttcttgctgccctgcacctgatggccagccccaaggtgaacaaagacacacttacccagtatgttaccctccattcccgctgggtacagcggaccaaagctagactgggcctctcagaccacctccccaccttcctggcgggcctggcatcctgcacctgccgccccttccttagccacctggcgcagggcaatgaggactgtgtgggtgccaagcaggctgctgtagtgcaggtgttgaagaagttggccacccgcaagctcacagggccaaaggttgtagagctgtgtcactgtgtggatgagacacaggagcctgagctggccagtctcaccgcacaaagcctcccctatcaactgcccttccacaatttcccactgacctgcaccgacctggccaccctgaccaacatcctagagcacagggaggcccccatccacctggattttgatggctgtcccctggagccccactgccctgaggctctggtaggctgtgggcagatagagaatctcagctttaagagcaggaagtgtggggatgcctttgcagaagccctctccaggagcttgccgacaatggggaggctgcagatgctggggttagcaggaagtaaaatcactgcccgaggcatcagccacctggtgaaagctttgcctctctgtccacagctgaaagaagtcagttttcgggacaaccagctcagtgaccaggtggtgctgaacattgtggaggttctccctcacctaccacggctccggaagcttgacctgagcagcaacagcatctgcgtgtcaaccctactctgcttggcaagggtggcagtcacgtgtcctaccgtcaggatgcttcaggccagggaggcggacctcatcttccttctttccccgcccacagagacaactgcagagctacaaagagctccagacctgcaggaaagtgacggccagaggaaaggggctcagagcagaagcttgacgctcaggctgcagaagtgtcagctccaggtccacgatgcggaggccctcatagccctgctccaggaaggccctcacctggaggaagtggacctctcagggaaccagctggaagatgaaggctgtcggctgatggcagaggctgcatcccagctgcacatcgccaggaagctggacctcagcgacaacgggctttctgtggccggggtgcattgtgtgctgagggccgtgagtgcgtgctggaccctggcagagctgcacatcagcctgcagcacaaaactgtgatcttcatgtttgcccaggagccagaggagcagaaggggccccaggagagggctgcatttcttgacagcctcatgctccagatgccctctgagctgcctctgagctcccgaaggatgaggctgacacattgtggcctccaagaaaagcacctagagcagctctgcaaggctctgggaggaagctgccacctcggtcacctccacctcgacttctcaggcaatgctctgggggatgaaggtgcagcccggctggctcagctgctcccagggctgggagctctgcagtccttgaacctcagtgagaacggtttgtccctggatgccgtgttgggcttggttcggtgcttctccactctgcagtggctcttccgcttggacatcagctttgaaagccaacacatcctcctgagaggggacaagacaagcagggatatgtgggccactggatctttgccagacttcccggctgcagccaagttcttagggttccgtcagcgctgcatccccaggagcctctgcctcagtgagtgtcctctggagcccccaagcctcacccgcctctgtgccactctgaaggactgcccgggacccctggaactgcaattgtcctgtgagttcctgagtgaccagagcctggagactctactggactgcttacctcaactccctcagctgagcctgctgcagctgagccagacgggactgtccccgaaaagccccttcctgctggccaacaccttaagcctgtgtccacgggttaaaaaggtggatctcaggtccctgcaccatgcaactttgcacttcagatccaacgaggaggaggaaggcgtgtgctgtggaggttcacaggctgcagcctcagccaggagcacgtagagtcactctgctggttgctgagcaagtgtaaagacctcagccaggtggatctctcagcaaacctgctgggcgacagcggactcagatgccttctggaatgtctgccgcaggtgcccatctccggtttgcttgatctgagtcacaacagcatttctcaggaaagtgccctgtacctgctggagacactgccctcctgcccacgtgtccgggaggcctcagtgaacctgggctctgagcagagcttccggattcacttctccagagaggaccaggctgggaagacactcaggctaagtgagtgcagcttccggccagagcacgtgtccaggctggccaccggcttgagcaagtccctgcagctgacggagctcacgctgacccagtgctgcctgggccagaagcagctggccatcctcctgagcttggtggggcgacccgcagggctgttcagtctcagagactccacaaggcacacagagaaactgtccttccccacactggaggcctgtgctttgggatttaagaaaaaaagaaagaaagaaagaaagaaggtttcagaggata

SEQ ID NO: 125744 - DNA, 5861 bp, Homo sapiens
caccatctgaactgtttccaggccctgttcctttttgaattccgccagctcaacttgatcacgaggttcctgacaccgtccgagctcctttttgatctgtacctgagccctgaatcggaccacgacactgtcttccagtacctggagaagaacgctgaccaagtcctgctgatctttgatgggctagatgaggccctccagcctatgggtcctgatggcccaggcccagtcctcacccttttctcccatctctgcaatgggaccctcctgcctggctgccgggtgatggctacctcccgtccagggaagctgcctgcctgcctgcctgcagaggcagccatggtccacatgttgggctttgatgggccacgggtggaagaatatgtgaatcacttcttcagcgcccagccatcgcgggagggggccctggtggagttacagacaaatggacgtctccgaagcctgtgtgcggtgcccgcactgtgccaagtcgcctgtctctgcctccaccatctgcttcctgaccacgccccaggccagtctgtggccctcctgcccaacatgactcagctctatatgcagatggtgctcgccctcagcccccctgggcacttgcccacctcgtccctactggacctgggggaggtggccctgaggggcctggagacagggaaggttatcttctatgcaaaagatattgctccacccttgatagcttttggggccactcacagcctgctgacttccttctgcgtctgcacaggccctgggcaccagcagacaggctatgctttcacccacctcagcctgcaggagtttcttgctgccctgcacctgatggccagccccaaggtgaacaaagacacacttacccagtatgttaccctccattcccgctgggtacagcggaccaaagctagactgggcctctcagaccacctccccaccttcctggcgggcctggcatcctgcacctgccgccccttccttagccacctggcgcagggcaatgaggactgtgtgggtgccaagcaggctgctgtagtgcaggtgttgaagaagttggccacccgcaagctcacagggccaaaggttgtagagctgtgtcactgtgtggatgagacacaggagcctgagctggccagtctcaccgcacaaagcctcccctatcaactgcccttccacaatttcccactgacctgcaccgacctggccaccctgaccaacatcctagagcacagggaggcccccatccacctggattttgatggctgtcccctggagccccactgccctgaggctctggtaggctgtgggcagatagagaatctcagctttaagagcaggaagtgtggggatgcctttgcagaagccctctccaggagcttgccgacaatggggaggctgcagatgctggggttagcaggaagtaaaatcactgcccgaggcatcagccacctggtgaaagctttgcctctctgtccacagctgaaagaagtcagttttcgggacaaccagctcagtgaccaggtggtgctgaacattgtggaggttctccctcacctaccacggctccggaagcttgacctgagcagcaacagcatctgcgtgtcaaccctactctgcttggcaagggtggcagtcacgtgtcctaccgtcaggatgcttcaggccagggaggcggacctcatcttccttctttccccgcccacagagacaactgcagagctacaaagagctccagacctgcaggaaagtgacggccagaggaaaggggctcagagcagaagcttgacgctcaggctgcagaagtgtcagctccaggtccacgatgcggaggccctcatagccctgctccaggaaggccctcacctggaggaagtggacctctcagggaaccagctggaagatgaaggctgtcggctgatggcagaggctgcatcccagctgcacatcgccaggaagctggacctcagcgacaacgggctttctgtggccggggtgcattgtgtgctgagggccgtgagtgcgtgctggaccctggcagagctgcacatcagcctgcagcacaaaactgtgatcttcatgtttgcccaggagccagaggagcagaaggggccccaggagagggctgcatttcttgacagcctcatgctccagatgccctctgagctgcctctgagctcccgaaggatgaggctgacacattgtggcctccaagaaaagcacctagagcagctctgcaaggctctgggaggaagctgccacctcggtcacctccacctcgacttctcaggcaatgctctgggggatgaaggtgcagcccggctggctcagctgctcccagggctgggagctctgcagtccttgaacctcagtgagaacggtttgtccctggatgccgtgttgggcttggttcggtgcttctccactctgcagtggctcttccgcttggacatcagctttgaaagccaacacatcctcctgagaggggacaagacaagcagggatatgtgggccactggatctttgccagacttcccggctgcagccaagttcttagggttccgtcagcgctgcatccccaggagcctctgcctcagtgagtgtcctctggagcccccaagcctcacccgcctctgtgccactctgaaggactgcccgggacccctggaactgcaattgtcctgtgagttcctgagtgaccagagcctggagactctactggactgcttacctcaactccctcagctgagcctgctgcagctgagccagacgggactgtccccgaaaagccccttcctgctggccaacaccttaagcctgtgtccacgggttaaaaaggtggatctcaggtccctgcaccatgcaactttgcacttcagatccaacgaggaggaggaaggcgtgtgctgtggaggttcacaggctgcagcctcagccaggagcacgtagagtcactctgctggttgctgagcaagtgtaaagacctcagccaggtggatctctcagcaaacctgctgggcgacagcggactcagatgccttctggaatgtctgccgcaggtgcccatctccggtttgcttgatctgagtcacaacagcatttctcaggaaagtgccctgtacctgctggagacactgccctcctgcccacgtgtccgggaggcctcagtgaacctgggctctgagcagagcttccggattcacttctccagagaggaccaggctgggaagacactcaggctaagtgagtgcagcttccggccagagcacgtgtccaggctggccaccggcttgagcaagtccctgcagctgacggagctcacgctgacccagtgctgcctgggccagaagcagctggccatcctcctgagcttggtggggcgacccgcagggctgttcagtctcagggtgcaggagccgtgggcggacagagccagggttctctccctgttagaagtctgcgcccaggcctcaggcagtgtcgctgaaatcagcatctccgagacccagcagcagctctgtgtccagctggaatttcctcgccaggaagagaatccagaagctgtggcactcaggttggctcactgtgaccttggagcccaccacagccttcttgtcgggcagctgatggagacatgtgccaggctgcagcagctcagcttgtctcaggttaacctctgtgaggacgatgatgccagttccctgctgctgcagagcctcctgctgtccctctctgagctgaagacatttcggctgacctccagctgtgtgagcaccgagggcctcgcccacctggcatctggtctgggccactgccaccacttggaggagctggacttgtctaacaatcaatttgatgaggagggcaccaaggcgctgatgagggcccttgaggggaaatggatgctaaagaggctggacctcagtcaccttctgctgaacagctccaccttggccttgcttactcacagactaagccagatgacctgcctgcagagcctcagactgaacaggaacagtatcggtgatgtcggttgctgccacctttctgaggctctcagggctgccaccagcctagaggagctggacttgagccacaaccagattggagacgctggtgtccagcacttagctaccatcctgcctgggctgccagagctcaggaagatagacctctcagggaatagcatcagctcagccgggggagtgcagttggcagagtctctcgttctttgcaggcgcctggaggagttgatgcttggctgcaatgccctgggggatcccacagccctggggctggctcaggagctgccccagcacctgagggtcctacacctaccattcagccatctgggcccaggtggggccctgagcctggcccaggccctggatggatccccccatttggaagagatcagcttggcggaaaacaacctggctggaggggtcctgcgtttctgtatggagctcccgctgctcagacagatagacctggtttcctgtaagattgacaaccagactgccaagctcctcacctccagcttcacgagctgccctgccctggaagtaatcttgctgtcctggaatctcctcggggatgaggcagctgccgagctggcccaggtgctgccgcagatgggccggctgaagagagtggacctggagaagaatcagatcacagctttgggggcctggctcctggctgaaggactggcccaggggtctagcatccaagtcatccgcctctggaataaccccattccctgcgacatggcccagcacctgaagagccaggagcccaggctggactttgccttctttgacaaccagccccaggccccttggggtacttgatggccccctcaagacctttggaatccagccaagtgatgcacccaaatgatccacctttcgcccactgggataaatgactcaggaaagaagagcctcggcagggcgctctgcactccacccaggaggaaggatacgtgtgtcctgctgcagtcctcagggagaacttttttgggaaccaggagctgggtctggacaaaggagtaccctgcattacgtgggatatgtgtgatcaattggggacatgcgacacacaatgagggtgtcatgacaatgcatgacacgtacggttatatgtggcagtgtgaccccttgacatgtggcgttacatgaaagtcagtgtggcacgtgttctgtggcatgggtgctggcatcccaagtggcaggatacatgattgttggtctatatatgacacatgacaaatgtccatgtcacaggactcatggctggccagatgacctcaggctggcccaagatctaatttattaatttttaaagcaaatacatatttatagattgtgtgtatggagcagctaagtcaggaaaagtcttccgcccgagctgggaggggagagtgtccatgcactgaccagtccaggggctcaagggccagggctctggaacaagccagggactcagccattaagtcccctcctgcctcaatcctcagcctacccatctataaacttgatgactcctcccttacttacatactagcttccaaggacaggtggaggtagggccagcctggcgggagtggagaagcccagtctgtcctatgtaagggacaaagccaggtctaatggtactgggtagggggcactgccaagacaataagctaggctactgggtccagctactactttggtgggattcaggtgagtctccatgcacttcacatgttacccagtgttcttgttacttccaaggagaaccaagaatggctctgtcacactcgaagccaggtttgatcaataaacacaatggtattccaaaaaaaaaat

SEQ ID NO: 125745 - DNA, 1410 bp, Homo sapiens
  misc_feature (3)..(3): n is a, c, g, or t
ggnccactctagagtatccccacctcctaccccacgactggcgccctgctttccccattcactgccttgtctccacccctcgacctccttgctctcctgctgctgactttgggacccctaccctgcaggctgtcctggaatctcctcggggatgaggcagctgccgagctggcccaggtgctgccgcagatgggccggctgaagagagtggacctggagaagaatcagatcacagctttgggggcctggctcctggctgaaggactggcccaggggtctagcatccaagtcatccgcctctggaataaccccattccctgcgacatggcccagcacctgaagagccaggagcccaggctggactttgccttctttgacaaccagccccaggccccttggggtacttgatggccccctcaagacctttggaatccagccaagtgatgcacccaaatgatccacctttcgcccactgggataaatgactcaggaaagaagagcctcggcagggcgctctgcactccacccaggaggaaggatacgtgtgtcctgctgcagtcctcagggagaacttttttgggaaccaggagctgggtctggacaaaggagtaccctgcattacgtgggatatgtgtgatcaattggggacatgcgacacacaatgagggtgtcatgacaatgcatgacacgtacggttatatgtggcagtgtgaccccttgacatgtggcgttacatgaaagtcagtgtggcacgtgttctgtggcatgggtgctggcatcccaagtggcaggatacatgattgttggtctatatatgacacatgacaaatgtccatgtcacaggactcatggctggccagatgacctcaggctggcccaagatctaatttattaatttttaaagcaaatacatatttatagattgtgtgtatggagcagctaagtcaggaaaagtcttccgcccgagctgggaggggagagtgtccatgcactgaccagtccaggggctcaagggccagggctctggaacaagccagggactcagccattaagtcccctcctgcctcaatcctcagcctacccatctataaacttgatgactcctcccttacttacatactagcttccaaggacaggtggaggtagggccagcctggcgggagtggagaagcccagtctgtcctatgtaagggacaaagccaggtctaatggtactgggtagggggcactgccaagacaataagctaggctactgggtccagctactactttggtgggattcaggtgagtctccatgcacttcacatgttacccagtgttcttgttacttccaaggagaaccaagaatggctctgtcacactcgaagccaggtttgatcaataaacacaatggtattccaaaaaaaaaat

SEQ ID NO: 125746 - DNA, 417 bp, Homo sapiens
aatgtctgccgcaggtgcccatctccggtttgcttgagtaagtggaaagcagcataaaggacagatagcaaggaggaaggctcccctaggccaaaagcatgatgggggctccttctgagggcatcccccagagcaccagaggacaaggactgtggagggcaaggggcaattcttcccttgccttcactcccctggccttgggtcctttcctctgtccctcacacccaccatgggcagatcctccaccaaacacccaagagaggctgtgattcgtggcagggtgacacacccctacagccaaactgacctggggacagggaagcaacattccatccccaaccagctgatgcgggattgcagctgcctggctcctggtccatcccgtccctgaaattcttctgacccaatctgtggaac

SEQ ID NO: 125747 - DNA, 582 bp, Homo sapiens
tgaagctgggaagtggaggttgcagtgagccaagatcatgccattgcactccagcctggatgacagagtgagactccgtctcaaaaaacaaaaacaaaaacaaaaacaaatcaatgagccaatagattccttagtaattccataatgagcacacattgtggagttggactgagtttaaatccagattatactgtgctctcttcggcagcacatacactaaacaaaacaaaaagcagattacatcactttttagctgtgtgattttgaataatcaatttaacttctctgtgcttcccatctataaaagggggagaataaaagcatgtacttcataaggtcatggtaagtatcaaatgagataattgacataaaaacttttaggaaggaagttagcacatggcaattaatcagtaaatggtttttatcattattacatctatccgcaaaacatgtccatttaacaaatgctcgccattctaatcataaccccatccttcctaaatgctcaacctcagtgtttccaccagcacaataccaacaggaaaaccaatttgtcttgcatccctgttcccaagtgcctga

SEQ ID NO: 125748 - DNA, 371 bp, Homo sapiens
aggattgcagaggaagggttgatgccccttgaccccccagcccggccccgctaccttcattcccttgccatgcccaccctgtccctctgcactctccctttgaagtgcttgcctgtttagggggctgccaacttcagcgtggcccctctcagcctcttatgtcctctgtgtcccagcctggtaaccttgggaacggagtgagcgggaatatctgtctgaggctgtgagacccttgctaaagacccttggggtccttgagggagcgcctggtggcctctgctgcctggaggcagaggatggcccagtgtccagggacacctgcaggtgaagctccccggagccacctttccagaggctggatgccaactctc

SEQ ID NO: 125749 - DNA, 311 bp, Homo sapiens
tgctgggattacaggcatgaaccactgtgcccggcctgataatatatttaaacctgaattgcacaacaagctgggccttccccttgattttctaagttcctcacagaccctgtctgttcctagctcttttatgatgttctaaaactttgtcgctgcttataaaatggaggagagacttactggtaatttgttctgtgtgagtttgcattagatgcttctaattcatagaaaagttgattatcctgtgattggagaacgaagactcaggtgagcagtaatagttttaaatacagttttttacagctagaata

SEQ ID NO: 125750 - DNA, 188 bp, Homo sapiens
agcccctggaaggaggcctgcactgccaagagtctgctgcatgaacccaggaagggaggaacccacacaccagggcacacaggcagctgccaggtcagggaggcggcttgtggcttcctctcaggaactcttctgtcctcatcagggtaataaagaaaggtcccctcacaaggcgtgagtccccagca

SEQ ID NO: 125751 - DNA, 164 bp, Homo sapiens
gctaacaaatgtgtacatcttagctaccctgctggactaaggccctggagacacggcctgctgttcgaccctggatgtccttagagctgctagtttggtgtttggcaggtgctcactcaaccttgtctacggaccggcagcccctgtacccaccaccatcctct

SEQ ID NO: 125752 - DNA, 190 bp, Homo sapiens
cttaagctaagatcccttaaaatttgaattggtcagaattcaaatatcttggagtcttcaaatgttaataaatattgctgtattcagtttgtgtttttcattttagggatcagacttacaacttgagatatggttgctatgatttggatctagtttgcccctgacaaaactcatgttgaaattatatttt

SEQ ID NO: 125753 - DNA, 293 bp, Homo sapiens
ccattctctatcttttggagtagtgtggttagtctataaggtggttatgtgcaaaagtgccaaaaacctttatgttaataaatagtttggcaacaactgtgtggtaactttatcaatgtactcatctaccctaactgcttgaaaatttggtatttcagatgttcatgaggctgttaagcattcttgcacataaacataattttcggggctcaagagtttgtccctggctttagactgacgacatttctttttttcttttttgagacagggtcttgctatgttacccaggctgg

SEQ ID NO: 125754 - DNA, 188 bp, Homo sapiens
caggcttagtttctttttccatacaaagcccattcacatccatttacatctctgattctgaatattggcccccttttattttgcacttggggaatctgagaccaagagataacttgactttttcaaggtcattcagcgagtcagcagaggagcagggaccacagccttacccctaatccaaggcctag

SEQ ID NO: 125755 - DNA, 348 bp, Homo sapiens
gccaaagaggaaaagaggcacaggtttcatagtgacagagaagtcttgatttgtaatcttgggaaagctgttcacatccaggatgccatctgcttctgggtaaaataaatagctttcctggtcagccttaccttgaggtctctgattggtatacagtctgaagagtctagagaggccctcttgagttaagagatgtggatcaaagactcgaggtcctgaaattttactgcagagaacatgttggtattgttttttccaacagaattcaagggcagtcattctaggtctttttcaaaagacctaaactcctggttctagatagtgaaaggtctgattgtcatcagttgg

SEQ ID NO: 125756 - DNA, 763 bp, Homo sapiens
acctcaatatattctctgcttcaagaaatagtgatattaggaaagggcatatacaaacaactcaatctactttgctgtataaaaagttcacttatttatagaaaatttaaatataatacatattaagattctctgagctccctactaaataacaataacccctcacatttgcatagtgctttatacaagacacgtatattatcctcctcaattcttcagaggtaggtagaatctcatttattttatggataagaaactgagactcagaaaggttaagtaagttccacaagatcatggagcctagtaatttgcaaaataaggcctccaatcaaatcctagttttctttctataccccagctgcagcttttagtaatggtctagttcagcatacatataaatatttataaacattgtgtcattgttctgaatgagtatatcttactattttgactgttttatgacagtggagctgcgtagtaaagtgaacatttgcagaagtttaatctacagccattttatattccctctccctctgctttgagattttatcctttgctagcaacaacattcttctgtaacaacaaataaagcaagcatcttcctatttgccttcaaataaaacaggtttagggattatctgctcttttcacatacttaaacacaccttgagtttctttttatagactttcctttctcctgacactgtgaaatcccagtgctgtttcttatttgaatgttttatcatctgacacctaataataa

SEQ ID NO: 125757 - DNA, 243 bp, Homo sapiens
aactgatacagtatcccgcagcccaggctggccttttctccagtcccagcctctagagggtacccctcaatcctttagtccaagcaccacttagaacagacagtcatacatcccgctgtttgaatggtaaatctttatgcaaaaacccatctaatcttcacaaagtctcctgggcagacatcaggaaagggatcttttgtcccactctacagatgatgatgttgaggctcagggaacccaaca

SEQ ID NO: 125758 - DNA, 810 bp, Homo sapiens
ggcacattgtcagtaatcagaaaatacttctgagcaacaacatctgggcttcaattaaatcacctattgagggacagccctttcctccagatgcatctgcatttagtgtgggcctcacgtgaatcagtctcagctgtgtttccagcagaggtctctggtttatctctgctcacaatggaaatgcagtatcaaaatctagaatcctattgttttattggcttttgaaattgaaaagcatctgattcatcccagatatttatggactagcaaactatactggttaccattcacactccatctgagagacaaagtacacattgacatatatggtcagttctaggcccagttgtgagacagggtaaggattgtcatgtctatctcccccgtggtcaccattttttaattctacatgttgtgacttgtgttattacagattaatgattacaaccgtatggttggaaagtgtctgaaggtaggagtgcctttttctgatttgctccaagtcacggttcaggcttacaggggctatttcccttgcaggatgttctattacctctgggtgccctgagttctctttgactcttaggttaatgaataacctcaaatgaacacagggaatatggctattttgatgtagggatgatgcaacctacaaaatgtaggtttgatgtacggatgatgcaacctacaaaaaaaaaaaaaagaccattaaactttctgcatttaaaaaaatatttccaaggaatgtacaaagcatgttacttgggagaaggacacaggcgtttcatttgcatacatatttagtaataa

SEQ ID NO: 125759 - DNA, 346 bp, Homo sapiens
aaccccctcccacccatccccaatccgaggtgggaacttcatgttgaggaataaggggaggcagtacagcaaaacctcattaatccaaacccctgtggatttggaatttcttcataatctgaagaaaaactgagcttgcattttcctttatctgtgaagaaaaggtgtactaagcaaattagtggtggaaatatgtctgtaggaggggatatttaacccataccagaaaacagacttttgaatcctatctattcattaatgcatgctccctgaggagtggaaaaagccttgttcatcgagttctgtatatattttgaagacatgcatttcattaaatagacactgt

SEQ ID NO: 125760 - DNA, 413 bp, Homo sapiens
ggcttctttgtatcatccccacccgcaaacgggattgtaagcctcatgaggagaggcggttggctactgaaggggcacagatctgggttaaaatcttgtgtccactccttaatagtcgggtgaccactctgagtcgtggtttccataacggaagggcaagggaaacatccttgacaggaaattaataagatatgagaatcaaatgtgaaaaaatatatgcaaaaaacacctcctaaaggtcatagcttataaaaatgcccagttttgtcatgtcccttgagactgggggattaagtctcatcactgatcccttccggggtcttacatctagaagcgggtctgagactgcttattggattagcagcagcagccatcagccaatgagggaagccaactctttatggaaaggaatg

SEQ ID NO: 125761 - DNA, 579 bp, Homo sapiens
attgtatgtgtttaagactctttttttttttgagacaggttcttgtctgtcgcccaggctagagtgcagtggcaccatcagaggctcactgcagccttgacatcctgggctcaggtgatcctctcacctcagcctaccgagcagccgggactacagatgcatgctaccacgcccagctaatatttgtagagacagggttttgccatgttgctcagcgtggtcttgaactcctggactcaagtgatctgcccacctcagcctctcaaagtgctgagattacaggcatgagccaccttgcttacccttgttaactggttattcctattcacttaatatcttctgcctattttttgactgagtgcttgatcttttatgacttctatttattaaagaaactagttctttgtgttttttttccctctagtttgtcatttgggttttgattttgtttatgccttgcacttgtagaaagtcattttggtgtatttgaattattaaatgtttttctttatgccttctgggtatgacgttaaactctgaaaagtcttctccaaaacttaaagtttcttccacggtttc

SEQ ID NO: 125762 - DNA, 505 bp, Homo sapiens
agcagtggctcacacctgtaattccagcactatgggaggccaaggccggcagatcacctgaggtcaggagttcgagaccagcctgcccaacatggcaaaaccccgtctctactaaacatacaaaaaattagctgggcatggtggcaggcacctgtaattccggctactcgggaggctgaggcaggagaatcgcttgaacccgggaggtggagcttgcagtgaaccaagatcacaccactgcactccagcctgggcaacaagagcaaaactccgtccccaccccactccatcccaaaaaaaggtaagagacatgccgggctgggtatatctgctaatgccagtcatcctagcactttggcaggccaaggtgggcagatcacttgaggtcaggagaattttttttttttagtttttttttttaaaaaaagacaaggccgggtgcagcggctcacgccgtaatcccagcactttgggaggccacggtgggtggatcacttgaggtcat

SEQ ID NO: 125763 - DNA, 404 bp, Homo sapiens
  misc_feature (17)..(17): n is a, c, g, or t
  misc_feature (28)..(28): n is a, c, g, or t
  misc_feature (40)..(40): n is a, c, g, or t
  misc_feature (79)..(79): n is a, c, g, or t
gctcaggggaggaaccnagtgaatactnattatccaaganactcaagagctcattttagttctcctgattatgatcttnaaggcattaagcgctcaagttaaactccttctgccccgctagccgtgtaaactgagtaggtacttgtaaatgttcattgaataagtacctgattaatagaatttaattcaagaagaatgtattgatgggcctgtgtggtcaccacagtactgagatgtaggtgggagctggctgaagggggaggcacctaaacaggagcgcagacagcggcacctacggatgatggcccgctccatcccaccgcagcgaaattgtcccagacctctgcagctccccccacacctagactgagagagagctcttcttccttctgtagggagcaggt

SEQ ID NO: 125764 - DNA, 419 bp, Homo sapiens
actgaagcaagggaggattttggtgtgtgtgtgtgtgtgtgtgtgtgtgtgtgtgcgcgcgcgcgcgtgtgcgtgcatgtgcttgtgtgtatgcgtgtgtgtgtgtgtgtgtgtgtatgcatgtgcacgcatgcagcactgcgataacggggcagggggagttaggtgattgcttaaagcacaagtgtgtagggaagaaacaaaggcaggaggggccattaaggagcctgtagagtgtttgggtcgggggctcacatttgtacagagtgagctgacagtggcctgagtgaggaggagtggggcagctgtaggtggggcagttctagtaggtggccctggagagcatgagagagcccttgggtgaaggctgtcaccaaggaggacaaggtctggggctggagggccaggctgttggacgc

SEQ ID NO: 125765 - DNA, 170 bp, Homo sapiens
atctgaaacaaactgataaacctagagcatgtgccggaggcagattaattcttccactttaattttgcctggtaatagcatccaagctagtgaaacttggccttcagtcccctagaaggcttgggacccttggcagcgaatgcggggctggtaatgacacctgaaatggg

SEQ ID NO: 125766 - DNA, 567 bp, Homo sapiens
tcaccacagtggccctctacagagggcccagaggatcccttcaaaatagatagctcagtgcaccactcctctacttaaagcttccccaaaggcttcccccggcagttagaaggaaacacagggtgccttctcagggatggcggggctccaacggcatggccctgcctactgcctctctggctgcacctcacacccgtttacttcccccttcctgttctagaccttcacacgagtctctttcagaccacaatactctaccctcactgtgtggctgttggctttttcttaccattcaggtctcaactcaaatgctacctactccaaaaagtcttcccgggctaccctagtcaaacactctctccctcaatcaattattgtggttcccaaactaagtgtcaaggtgtcccagggtaccatgggatatttttaatttgagagaaacacagggatcgtcgatatttatcagacacagagacaaaaattaaaaacaaacaacaacatggtgattgtcctcaaggacctaacaatgtagtgtaagagacagatgtgtcaagacatatagctggg

SEQ ID NO: 125767 - DNA, 237 bp, Homo sapiens
gggattacaggtgcgagccactgcgcccggcctgtagtggttaattcttaatactttgggggtcacagactcctttgagaatcttacctaagctacagaacctcaccacagaaaaaagcacataatcactttttttatcattttgtgaatatttcacattcatcatgataatttcacctggtcaagtggatattaaacgataagtaaaggctcatatatgtgtggagaactagtgca

SEQ ID NO: 125768 - DNA, 465 bp, Homo sapiens
ctcccatgaattgtatgataaattagatgagcccaaacaaaataaactacaaatgtcaggaattgtgaaggttaaatattctgggtaaggaaggtgacgtaaaacttgtaacacataaaaagatattcaagagtttgaagagtatagcatcaaaaacttaaactactctttgggaacaaattcaagagaaaacttctatagtatgctaaaattctaaattttcccactcttcccaatacatttcattctagtcatgggctcaaattatacctcaagattatgaagacaagacatcagcaatcatgttactgttataaaagtcatctccatgagtgccctgagcctttcttcatggctaatcagaactgctaccctaacaggctgcgaaaacatacagtttggctgtgtgtgtgtgtgtgtgtgtgtgtgtgtgtgtgtgttgggaggagggaaggggaaaacaag

SEQ ID NO: 125769 - DNA, 765 bp, Homo sapiens
gataaaaatctacatctaaataaatctgaaagagctctttcaataacatgaaatttaaaatttaagtattaacaaaatatcgtgtcatattttaatttgcaaagggaaacaattgactctttttgtctcttttaagaatatgcattatcacagataagacctgggccccagtcctttttctagagttgaaaatcagaaggaatatcaacctgcaaaataatgaaaatgtctgcataaatcgagtcagaaaaaaaatagaacaagatataaatttgagttaaaggtgcccttgggtgaaatatacaagcagcatattcttgacttttgctccctgtagtgtcccccaaaacactctggctcacatatgagaacattcaccatcgtttcagctctaatggtgaaagcaaggcacactacacagcttgaatgctcttttctatttgcttcttgcacctcataaatatgttcaagcattcaaattaaattgtatctaaggcagctcaacccaaaagataatattttctgctctcacagggcatttgccctatttattccagaccacattcaaggaaaacatacttctcttagcattttcttattttgctggaagcagaacgtatgtaaaggacaccaaacttaattagcgcattaacataatcacatcaagtgtagacatagaacttgacaataggaaattgagtaaatcagcgcgaatgttttcagccccgtgctttataattaggggaaataaaaggatagcttaaa

SEQ ID NO: 125770 - DNA, 690 bp, Homo sapiens
gagtagaaaacagaattaatatttggcgacaccataggacaaaagtgatcctatcaaatagactccaagtttagcactatacccttgagacaaaaagcaatgaagtgtgtaagacaggaagtggtgactccagtttaatgctaggttgtgaaccacaaaaggccacgataagccaagagaggccagggatcatagttgagaaggaggggcaggaaccctgcaaatcattattgatatagtttaatttggtaaaagtcctgctgggtgtggtggctcatgcctgtaatcccagctgctcaagaggctgaggcaggaggatcacttgaggccaggagtttgagaccagcctgggcaacatagcaagactccatctcttaaaaaaaaaaagtgttaacctcttggtataacatatcaacatttattgagtgtccagtatgtttaggactttgtattggctctttagggtgcagttattacccatgcctttggagagcttgtagtctaatattagagataaaatacatacctaagtaaattacaaggcagaatgggatatttgtccttagaaagctatgaagtattacaaaggttagaagaggaagatggcaagaggtcacatagtggtagcaggaagagggtgtgtaatcagaaaagagctcagaaaaaagaaacatttcatttaaagaatgg

SEQ ID NO: 125771 - DNA, 150 bp, Homo sapiens
tgtttttgagaatgttacatgttaacctgtctttaaagtatttgtatttgaggttttgagaaatatatctattttatttatttggggagagttccataagataaacatcacagctagtaggaattctcaatgtgtttcccagattcaagg

SEQ ID NO: 125772 - DNA, 482 bp, Homo sapiens
ttgatatactctcttcacttggctttcatgccactacaggctctttttttcctcctacctgtctggatgttcctgtgtcctcttgctggttcctcctcttctcccctaccttttagcgaaaagccttttgacttgttacatggtcttctttatccactggtggtcttatcctgccccctaactttaaatgtacaccagttgattccaaatttgtatctctagcccattttaacttgtataaactgtgtgacttgtggcgtcttataaataatgcactgtaaagattactgaatagttgtgtcatgttaatgtgcctaatttcatgtatcttgtaatcatgattgagcctcagaatcatttggagaaactatattttaaagaacaagacatacttcaatgtattatacagataaagtattacatgtgtttgattttaaaagggcggacattttattaaaatcaatattgtttttgctttttca

SEQ ID NO: 125773 - DNA, 262 bp, Homo sapiens
acaatatatgcaacatatgactaacaggacataattttctattgaattttaggagcttaaatcaatttctgcactgctgatcataattttaaatggtacaaatacactttgggaggttgaggttggtggattgcctgagctcaggggtttgagaccagcctgggcaacatggtgaaaccacaactctatcaaatatacaaaaaattagccgggcatggtggtgcaggcctgtggtcccagctacttgggaggatgaggtgga

SEQ ID NO: 125774 - DNA, 450 bp, Homo sapiens
tcctcataagctctcacgcagtggacatcagcatccagttgtccaagtcagacactgagacatcacatcgcctcctcctccacagtaaccactggctgaggacccctcattcgccctcacacacatatcttctagaactgcccactcctctacctcctcgccccagcttcctttatccaagccactgtgtctccttggtctactaaaaaagctgcctaactcatccctgccttcaatctttccccgctcggatccattctctatgttttccgaaacaaatcagactctgactttcctgcttaaaatccttcagtaacttcccattgcccttaaggtcaagcccaaagcccccctaataacttctaacccaaatgagaagtcataacacacacttctgttgcattatctgccagacattgttctaagcacttaacatggattgtctcatcc

SEQ ID NO: 125775 - DNA, 397 bp, Homo sapiens
acccccattaggaatcatcacactcaggctctggagaggctgccaacagaagggatggggctccggcattacagagctcctctctacattccaggctttgacccatcacagtctccaatgaggaagctggggcccacagaaggtcagccacctgcctgagttgacacaagaaaaacttggtctctctggcaaagatccagctcccttgggaagcctgcttgttcaccccacagctaacaaatcgggaggcctcaaggaggtgggcagggtcagtgcgggtctcattcctgccagccaggaacttaccccagaggagcagacctccagccacatccacacacccctgacccctctgcccaagtctcctctgaaggtgctgaatcatcagtggtgccac

SEQ ID NO: 125776 - DNA, 182 bp, Homo sapiens
gccatcccctctgtgaccccggccctgtgccagatctgggcaaggcagcccggagaccttgccgtgggctttgcagaaggtgatcagtaaaccagaggcctggaggctggtaacagacctggttaggccagggttctgttagcaagttaccacgttctgttggcttcagtggggcagcaagg

SEQ ID NO: 125777 - DNA, 740 bp, Homo sapiens
tggggtgtggggagtgtgtgtgtggggggggggggatgtgtgtgcatgtccatgtgtgtggtatgtaaccagtgagataactgtgccttcaaacaaatctattggcaccgtgaaaggatgtaggaattcaaagaactaaaggctactgtaatggttcaaataaaagataaaaacctggactaggccaggcatggtggctcacacatgtaatcccagcactttgggaggccaaggaggtgggctgatcgcttgagcccaggagctcgagactagtctgggcaacatggcaagaccccatctctacaaaaaatataaaaattagctgggtgtgccatcagatggccaaatcattatttactggaccagaccttttcaaaactatcaagcagatagtcaaggcctgtaaagtgtgccaaagaaataatcccctgcactgcaggccatacatttcaatccctctatctttaacctccttgttaagtttgtctcttccagaattgaagctgtaaaactacaaatcgttcttcaaatggagccccagacagtccatgactaaaatctaccacagacccctggaccggcctgctagcccatgctccaatgttaatgacattgaaggcacccctcctgaggaaatctcaactgcacaacccctactacgtcccaattcagcgggaagcagttagagtggttgtcggccaacctccccaacagcacttgggttttcctgttgagagggg

SEQ ID NO: 125778 - DNA, 148 bp, Homo sapiens
ggaatgacagcctgtgccaggacattgtagcttgtggatgcctactcttttcaagtgactcatcggtacaggttaatattttgagtaaatctttcggaattaaattcagtactgtcaacaatgagaatctggctagtttatgtagagc

SEQ ID NO: 125779 - DNA, 1233 bp, Homo sapiens
taggagaatgcatttcagttctgggagctcataatcctgtgattcttttattttaagttttaaaatacattaaaattttactggttaatcataaaatattttatatttgaaaataggatggcaatctttatttttccaagatatttgttggaaaaaaatgatcgttggtattattttttctttcagctatattccatggtatctttaaaattgttcagaatataggacttttactaaaaaaattcaattgtcagagtctaaaaaaacaatgtcctcaggaatacttcagaaatagaaggtatgcaatcccttagtggggggcaaacacatttcagatttcgtctttatttaaaaggatcttcagtctacaacatttgcttttttcgtgctttggaaaatatccttgtgcagataagttcttctgtttgaaacaagcatgaaacattggtccaataacctaagaatgtggagatttcttgatattctgtattaattaaagttctctacatgtctcaaatggagatcacaaaacatgaaaaggaagaaatgaaatatcttttcttctgggatgagtgtcaattttaatgtataattgtcataatcaatcagccaaaagttacaatctgtccctcagagacattgggggaagctgatggatttccagtaaggaactgtggtgggttcaaactcaggctgccacaaatacattgatatggtaggtaggaagtaggactaaatttgaaagaaacttatgggataaagttcacaattttaaaaaggttgccctccagtttttttgtttgtttataaactagagtgatttttaagtaacccttatatttaaggctgcaaaaaatgtacaagagtatgttttcaagtaaagggaacataattcttcaaaaagctgttgaactggagttatgataggttatgacagagagcatgatcagtgctgatactgacaagtacttttttaccttaaaatcaacttctatggaactacaagatcaatctagctcccgagtgacattttccattgtctgtaataatgccctcggatgagttgtgtctaaaattaagttcatctttatttatatgcgaacttaactgccatagtccctaatgtattgcgtttgtaacctgatcgtattatgtttacagctgaaagatttcatctagacatgtctttcgtccttattattcaaagtgtaattgaaagagatatttagtatt

SEQ ID NO: 125780 - DNA, 684 bp, Homo sapiens
ccaacttgtgtgcctgattttctaaaaaactaggggcatctcaaacaaaactaactctaaagtgattatttattcccaagagacctcttatattaggggaagactaccaatttacatcaaactagattccgaagggcattttcaggatctgtacttttcattttaatataatataatttttaatatataagtacccaagaacctaccctaaacaaaatctgggatcttgacagtaatctgtctttatacctcaccaacctatctctctgcctacccctatttgaactaatcatcattctggaccctatgtttctatttgcttgcttttctttttatatagttttattgcatctgtatgcattctctctctctctctccctgcccccttgctgtttttaactaaaaaataggggattgtgttgtttataatcttttgaagtacatttttaaaattcagtattatactgctcagaatcatccatattgttgcatattatagtcattcataccttttgactgctctgtaatattcaatgtgtgaatataacagcttgctatggcttgaatatttgttctttccaaaactcatattgaaatttaatccccaatgtggtggtatttagaggtggggcctttaggaggtgatttgcagtagtatttctgtgcataacattcaagctgaga

SEQ ID NO: 125781 - DNA, 161 bp, Homo sapiens
ctgacaaccccgtctcatattccagttctgctttatttttgcccaaaagtaaattccgtctacaggattttctagaatacaagctccatgaggaaagggatcttatctttctggttcacagctgtattcccaggacctggaatacatgaggagggcaggtc

SEQ ID NO: 125782 - DNA, 838 bp, Homo sapiens
  misc_feature (365)..(365): n is a, c, g, or t
ctagaattagaggttctagtcttaatgtccattatattttaaacattaatgagttatatgtttttaatctggacaagtcagtggcctagaaattcagggaattgttagaattgaaatttcaattctctatttatctgttaaagggtttctattcattttcagggggaaaaaccttagttaagatcataacactaaatgtaacaatgtcatttgggttccagtccgtgagttgtaggagaaaggagtttgccgtccattttttttttttttgggtaaagtccatatcctgggaaaaagggagagggaggaaggatattggggacggggtaggatgaaacattttggggagaagatagaagttgganggggaacaccgggaagaacagaagtaggggagggcgaagaaaaagattagagaagcatggggaatttagaaagataaaacctttcctttagaacgaaacaaggataattttaaccctgaaaggttaggaggcagaagaacaaggcactgctgggaaacaaaaggctagggcaaatggtactactttgagaggaaactgggggatttgacccaggttggaacctggcacctttgggtcagacgtttccgacttgaaagtgaacatcacgcttagaccaggttggagaagtttagcaagctaggaaaatttaagccaaaagttgggtaaactaggctgaaaaacaacaacaaaaaaaacttgtggcggccgccgaagtttcaacctggtgggggcgcccagaatgatgtatgtgtcagaactgaacagttggtcccaaaagcggggggggaaaccgggggtagtacggggccacg

SEQ ID NO: 125783 - DNA, 680 bp, Homo sapiens
cagctaagcacattttctacatccccaaagtatttggaatcacagcattgtaacttgtgattgtcttacctgtaacagactccacagtcatgctggcattgtgacctgaagaattacacagtgcccttcttagattctttggggttaaggtaacttcttgaataatgtactaatgaacgatagtgtttcaggaaacatgccctagctattggaagttcgtatctaacttttaccccttgtgtgtcatgatacatttaagttggtagctacatttttggaataaaggaaatgtaaaattatttgcagaataataacctgggatttgctcttctgcctaaacatcgaactagggaactttaaagacaaagggtgcatcttttgtgcaagtatctaagcgggcaaaatggggaaaacatgaagggcaagtcctttggggatgacttctaattaatgcagaagtcatttgctttggccaggttgggtgggactctgagattgcacactcttgccctgttggcagaaactagcccatcttaagttagtcaatgaatcctgagtcaaaatgaaaggttgctaaatctaagatcgagtgtataaataaaataaccccttcctccagtgactgtgcatttattttgtaataaactcattttggaatgttttagcaatgaattggtatc

SEQ ID NO: 125784 - DNA, 290 bp, Homo sapiens
ttcctttcaaccgcatcttcccacgtagctgtggacacaggcacaaggtatcacatcccggctaatttttaacttttttgtaaggacagggtttcaccatgttgcccaggctggtctcaaactcctggcctcggcctcccaaagtgctgggattacaggcgtgagccatcgcacccggtctcccctttgttttaagagttttacagtttttggctcccagtatttttataagattctctccacagttgttaagttcccaactttaattttgagatctaatctctctagga

SEQ ID NO: 125785 - DNA, 548 bp, Homo sapiens
ggcttttctgctatttttaagatttgttaagtcaggcctgctttgcatgggagctccacctccacaatagccactttctccttgggatctgacttggatccccacctcagcattgtcaaaggccccgtggagcctctgaagctctccctcctgtggccttttgagtctagtgcctgtgctgtgcatggctcatcacgctccataagtatttgtgaaatcaaaatgtctccttcttgcccaacacacacccatggctcctcacagcccaactcccctgctgtaacccatcagccaatccagtcacattagacctcttgcatcccctgaaaaaactctatgcctttcctttgcctaaaatgcccttctcccccttcacccactgtctcattcctcaggacccttctcaaaagtcactccatcaaaaagcctttcagattccagcaaacacaagggaacttccgcttatccccattcctcaaatcactttgattgtgaattaattaattaattaattaatttatttatttattttgagacggagtcttact

SEQ ID NO: 125786 - DNA, 351 bp, Homo sapiens
ggtttaaaatgcattgcggtccacttctgcccgcagttccttcttccaggaaaatgtgaaactaacgatttccatgatggcttctggccaggcacaggagctctatgggctgtccctggactccaggagccagggaaaacaaagaggatttccagccattgtcctctgtagcactgagcatcaacaccactgttaatttcttgatggtatcatttgcagcatgaaagttcttaatcttgatgtaatccaatttatctattagttattttgtcacttgtaccttcatttcatatctaagaaaccattgcctaacccaagtaaatgaaaatgtacttctaaattttctccttg

SEQ ID NO: 125787 - DNA, 339 bp, Homo sapiens
cactgtctccacgctctacttgcgtaattcaaatttagaaaagtcggcattccacgggcagcgtcctaactctcacgtgcctactggtcctttccggtccgcagggggcactcagcgggccgggtgtgtgcgaggcctctgcacctgctgtttccctggcctgcgatgctgttcccccaagtcctggcggggctattccactgcaggacacccatcccaacaagccacatgtgaagcagccccctgcagccattcccccacccaatgcagtacagggcaaaccgcttctcactcttcagaatatttttatttttgttttttttgagatagagtttcgct

SEQ ID NO: 125788 - DNA, 231 bp, Homo sapiens
caaatgtgtagtatagaaataatttttgtggtcagaccacaataattttgtggtttcttccactgtcaatactattataaggaaaagtgcctgttcgcggatgggaaaatgagattggcctaaatataaatgaatgttcatggtcttagaggttttacctcttcttctgagttgatttgaagaaaaagtcataaatgtctgctttttttttttttttcctctgcaggggtt

SEQ ID NO: 125789 - DNA, 117 bp, Homo sapiens
cttgagccagtccctgaacttcttggtgctcaagattcctcccctgttaagcggtgctggtcattcctgccatgtggtgaggatgtgtgcgttagcagtggtgacatccagtgcctg

SEQ ID NO: 125790 - DNA, 488 bp, Homo sapiens
tatactgagtcaagctacttgaccaaaacatctgatttaggaaagcacttagctttatagcacaagtttttccatctacagttactatcttcaaaggaatatacatcacaatgttgacaaaaaaaaaacctcctggttccttttgaataatgcacaataaattcatgatgttaactccatggtgagtcaaataggtaccaaaaaaacaaaaggaacaattacacacagttcagtaagtatcattttggttttctccatgtataaattaaccaatgaaataaaacatatcaactatagatgacttgatttcaggaaaaccacatttcaaaattacaattacattatttcctcatgtcatcttcagtcattgacaggaattttgtaggccaccatgctatttactttgtggattgtagtagtaaatgaacaaaggcagacttcctcagaattggtaataaactgtggtcccgactcttcccatttttcag

SEQ ID NO: 125791 - DNA, 342 bp, Homo sapiens
aagatctgccttgtggcaagcaggatagggagcattgtaaaatactgattcctgagtttaagatattacgataatatcatggagaaaataacatggagaattagagcacagttagatgctaaattatatccagaacagggagacagagaagaaaaaaaaagaacactcacagtttactcttccatcctctgagactagagcactgattctgtcattgatcccagatcctaccttaggatatatgaagctttgtaagattcgtaagctttaggcaactagattacactaaagggcctacacttttaagtcagcaaggctgctctcatttataggctcggcttt

SEQ ID NO: 125792 - DNA, 371 bp, Homo sapiens
ttcgagctcggtatccccttttggggtctttgctccattgatgaataactgaaattgcaagagaggttgggaaatgtaggttttagctaggtgtgtgtatgtaaagcttaggggtactattactaaagaaaggaggagaggctgggtgtagtggctcatgcctataattccagctacttgggaagattgtttaagctcagaggtttgaggcagcagtgtgattgtatcactgcacttcagccaggactgagtgggatcctgtctcaaaaccaaccagatcaggaaacaggcttttcaaggaggtaaaataagctactaaagatcatacctaagaagtagtagaatgggctttgaatacctttctgatacaa

SEQ ID NO: 125793 - DNA, 399 bp, Homo sapiens
tagccagagtagaaacaacgcaaatgtccaccaattgatgaatggttatgcaaaatgtggcatatcctacaatgtgtattatttgcaataaaaaggaatgaaatacatggatgaaactgaaaacatgctaagggaaagatgccaatcacaaaagaccatacatttcatttatataagatgttcaaaatagacaaatctttagagacagaaagtaagagactgaggcaatgaaaatgttctaaaattagacagtgatcgtgagggctgcacaactttggatatactaaaacccactgaatggtacactttaagtgggcagattttgtggtatgtgaattatatttcataacactgtttacaaaatacattttaaaaatacaaaaaagaaaagaaacagag

SEQ ID NO: 125794 - DNA, 579 bp, Homo sapiens
cagtacggatgtggacggtactgctacaagtggcatctgccagactcacgagcagcaggtgtcacgctctggggaccaggtgctaacctgcccctgggatctgcttggagagagtcaattctgcaggtagggagtgagaagacgtgcattcataaggaagggttctgagtggagaaccctattggcttggcggggagcagtaaaagggtatattggcagtcatctaagtcctgagctgtgcttgttgccagaggttgtgggtcagtgctgtgttaactatatttggtttggctgttgtgtttttattcattcctttggtgcctctatacctatcttcatctccgaatagctccagtagattcatcccgtgaaagtagctgtggttccttgctgtggctttgctagttcatgctgagctacttcctggtagaattgtgctgaccatttatattcacaacagcaagggtgaaattgcaggtttgctcttgtcgttgccactaaatattacaaatatcaaaagtaagtcataatctgtagttatttatacttttatatttgtttttaaggccttatttttta

SEQ ID NO: 125795 - DNA, 123 bp, Homo sapiens
tgctggtattacaggtgtgagccactgcacccgcgctagatcattgtttttatcctgtattatggatgacaagcagcttgtagtagagtagggaaagtgttaactttgattttttcccctcta

SEQ ID NO: 125796 - DNA, 731 bp, Homo sapiens
tgagaatttcccttagccatcagaagccatttcatcttgaaatgcctgggaggtaatttcttcatcctagtactgtccttatccagccaataatggagtcataaaagtgtacaatattctaggcctcctgcttcagtttttgaggacacaatttaagctccattacttacatctggagagctgcgtgtctttttatcactatcctagagtaactaatggaaacagcttcaggaaacagacttaaagatgggtttcatcgattggattgaaaatatatttgagagcattggagatatcattcttgctgtgagagatggaaataatacatgttgtgtgttggcaacatggttattcaaataattactggtggaagcatgaaataaaagcaggatgaagagagaaacccaagacagagagcaggattgaagatgaatctgcataaacaaactatactaaaataacccctgtcctactccatttgtgctgctataacaaaataccagagactgggtaacttataaagagcaaacatttatttcttacagtatgcaatctgcaaagtttaaaatcaaagtatcagcaaaattgctgtctggagatggctgctctccacttccaagatggagccgtgttactgcatcctcagaaggggagaaaagctgtgtcctcatgtgatggaatggatggaggggcaagaagtgtaagctctttctgaagcctctttcataagg

SEQ ID NO: 125797 - DNA, 2088 bp, Homo sapiens
ggcatggatgatatgaggtaataaatgctttgaaaaccatgaagggccacacaagtgctagtgttattgctgtgggacaaggtctgggaatatgagaaccagcagcagcatgggtgcagctgagaaccagatggtgaacatctgtctccaaagtgcaacattcctgagcaccggatttataaggcatttcttactcgacagaattgacttcatggaaggtatgtagtttgactttgccttagccatgttgatcaaataggagtattgtgcatgccgcagctagacagagtcctgggccctttaaaaaccttgtcagtgactcccattgcaggcccagcgcagtggttcacacctgtaatcccagcatttgggaggctgaggcaggcagatcacttgaggccaagagttcgagaccagactggccaacatggcaaaacctcctctctactaaaaatacaaaagttagccaggcgtgatgttgggtgcctgtaattgcagctactcgggaggctgaggcaggagaatcacttgaatccaggaggcggaggttacagtgagctgagatcataccactgcactccagcctgggccacagagaaagaacggtgattctttctagcagaaattagcagagtaagtgtttttggaacaattgctaatgaaaagaaggaaaaacagaaaaaaaaaattttctgtttatgggaggtgacttatttctctatcaatcctgtgagtgatttagcatggcaattcatgaacactgagttgtttccttgctctgattgtctgttgctcaatgaaatggcttttagcagggctcaaaggtgaagccagattctcctgcactaataggataagcatggagacaccagtgttcagtgtggcctctggttgtctgaaattttgctgtcaactctaataccttgaaagaattaggttcccagggagggaagaggggcgacagatatgcagctacacaatgtttttactatcttgagttctttttacccagattccatagctaaatccagatgtattaataggtagagactacttcagaaaggatgagactattttcttgcttaattatccacacagtaattcagaaatgtatattgaacactttttatatgccaggcactgctgggcactggaaatataaaagtaagcaaaaatgaaaaactatcctgtcctcctgaggcttagcatctaagggagacaggcattagtcaaccccgtgtggctgtgaatcagccatgatgctgagtgctacaagagaggactgtgcggctgggagggcttataacaggatttgacctagttagggaagatctgaggaagtgatgaaagaatggaaatcaatatgtaagagctcacaagtcagagtgagatgtttcttcctatactgcctgcttctaatgagcatccacttcattgaaccacctcttcattgagccaaacctaccatacagggatacattctctggaggaaagttgagcaactattgcatttgggacattagagtatgggtgggctgacaggtatgtgtatgtttattatccaagacagccaaggtgtttatcctgttacaacatcccagaggacagaggctcttatttgtgactcttttttcttacctgtaacaccagaggcataacgtacatcataatgctgcatcttgttgacgcttcaatgctcacaattcaaaggtgatttctgaagcactttgttacactggggacagctcctaaatcctcccactcttttttttgcctcaccttggagtcttgggctctgttgatcactgactctgccaggtctttcagcaggcaagacagctcagttaaattgagtttggactccactgtagtgcatgcatgagacagcacccccaatccccaacacccacacacaaactttaaatatttgtaacagaattgttaccattaatattgcttaaaggctaacacattagccagaacctagatgtcttctggaaattttttattgcaatgttacttcatctacataaagttgtccaatcactgaaacctccaactgaaataaatggtaagctttttgttctc

SEQ ID NO: 125798 - DNA, 360 bp, Homo sapiens
taatagaaattcagaattcctaggcatatgacctagactaaaatgtcttcataactacaaatgaaatcagggtcatttatagtacaaactaccacagaagtcagtagttaggggatggagatagatatgaaaaaaaaaaaaagcaaacccagcctaactcccagggagggaagaggggcgacagatatgcagctacacaatgtttttactatcttgagttctttttacccagattccatagctaaatccagatgtattaataggtagagactacttcagaaaggatgagactattttcttgcttaattatccacacagtaattcagaaatgtatattgaacactttttatatgccaggca

SEQ ID NO: 125799 - DNA, 223 bp, Homo sapiens
ggttaaatgttatttgtaatcactgagagaggagttgtaaaaatactcccgcgatgcagatgtggaagaaggactggaaagaatcaggagtgcagttaagaggctgttcaagtagtttaggggagaaataatggcgccttctactagggtggtgacattggagatggaaaaaagggtgctgatgtgatgtgatggctattttaggtaatgagacaggatttgg

SEQ ID NO: 125800 - DNA, 631 bp, Homo sapiens
gcaaactataacctgtgagctaaatctggcctgccacctagttttgtacagcctggaagctaagcatgatttttacattttaaatattatacataaaaattatacaaaattcaaatttcagtgttcataaataaagttttattagaacatagctacctacactcattcatttacatattgtctgcggcttctttgttaccatgttggcagagctgagtactagcaacagagaccatatgctccacaaagcccaaaatatttactatctgcccttcacagaaaaagtttacctgcccctggcttccaacgtgttcaatttttaatgttttaggtgttcttgaaaaaaatctgtactctccagataacatatgcagggttttatatatgtttattagattaatcttactgactgtattacacaaatttatatacttataacattttgtctgcttaatctaccaaatactgagaaatgtaaactaaatttcctactttggcagtggatctgttaagtttgtattttttgtttgtttgttttggggctttttttatagttctgtcaattttactttataaattcatagtttaggtaactagaagcaaataagtttagaattgttatctcttctca

SEQ ID NO: 125801 - DNA, 1092 bp, Homo sapiens
gtaattgaggcacctgtatctagtttgggaattaactgtatttccatgaggaaactggcagggcacagtgtctcatgcctgtaatcccagcactttgggaggctgaggtaggaggattgcttgaggcaggagtgcgaaaacatcctggccaacatgtcaagaccctgatgcatgcctgtagttctagctacttgggaggctgaggtgggaggctagcttgagcccaggaggtcaagactacagtgagctctgattgtgacacggcacagcagcctgggcaagcgaacaagaccctgtctctaaagaacaaaacaaaacacattgtgagatggtgaataagataggattgttcttcatttctcacaaatgcccttctattttaaatgcttcctagtttcattctgtgtgacagtgggcaaccctttctttctggatgaaacatttcaggccatggcactctgactcaaacattcccatgtggtagggaatgtaattaaacatttttattatttatgtaacttatgagacaaaagtctcaaaagtttattttttcttgtaacttttccttgtccttggggtatattcaataatagttacttgactaataaaatctcagagtaaaactctttaaaaaattgagctagattccctggaaactttccacaactattaaattttattccaatggtttttctcctgcctcagcctcccgagtagctggaattatcggtgctggacaaagatcagaccagatgtgaggaatgctgaaaatgaaagtggaataccaacttcatgtacacttggcttattcagcacccataaaattcaatggaccaccatccggacaaaaggataaaaacagaacacatcaagataatgaattttcttcaaactactgaggtacaatgaaaaatggaaatattatctcagaaattacaacagagggatgaagatatagcatatgctgtacctaaaagatacatcaaatgggacattgggaatatggattgatgaaatttaatttgcgattgtcctataatgccttttcattacagtaccacacaaattgaggcaataaatgtatatttgacc

SEQ ID NO: 125802 - DNA, 466 bp, Homo sapiens
tcttatctgatcctcacaaaaacccctaggaaaaagaaagggcagatagggttcattgttgataatggatgttaaaggggctatgcatttttaaattattattttcattttgcagatgaagaaactcaggctctgggaagtagctaagatgtctaagctccgaaccatactctccaacttccacgtccagcgctctttccacttcaaaatctttggtcattccttattccttgggtaacgctcaggccaaggtcggagggataagaaagtcagtagaggctgggagcgtggctcatgcctgtaatcccagcattttgggaggccgaggcgggcggatcacctgaggttgggagttcgagaccagcctgaccaacatggagaaaccctgtctctactaaaaatacaaaaattagccgggcgtggtggcccatgcctgtaatcccagctactcgggaggctgaggcag

SEQ ID NO: 125803 - DNA, 667 bp, Homo sapiens
gggatgacaagcaattcttcccatcttcccttaaaaccttggcagaggttaatgagctagttggtggaatatattttcgttacggttgatagcgagagaacttgctgtcgcttcctaattagaaggtactgattacattctctttaccaggcaaggagttgttctctcctggattctgacttttctgattacttaatatttccagaattcccatgacatgctgtaagcagggaaaaattgaatctccaagacccacttcttgtatgctagtagcaaatgagatgattaaataagacatagaccttaggtaagatggggaatttagcagaagacaagttcatgcttgtgtgtaagagtgtttgccactgtgtttatcgggaggtggaggagcaggtgcaggagggtgttggccaggatgtgggggctgtgggtcactgtgctccactcaaatgaaggcttcctgcaggctggtgcttggcctgatactggggaaggagcagaggaaagagcagaatgggaagggaaaacatcatccctctactatttttataaccaaatcgacacaactatttaggttgttccccaacctttttcctccgacccctaaaaacccctcctaatactaactacctgattcttaccccttcacatcatggcagccaagcca

SEQ ID NO: 125804 - DNA, 459 bp, Homo sapiens
tcttttatttttcagttgcagatttttatgataaatattagcaatgtactactcaaggctcaaggaaagattagttacataatttttggggggggtaattgtttaaaataggctgtagaacaagcttgtccaacctgaggcccaggacagctttgagtgcggcccaacacaaattcataaactttcttaaaacattatgactttttcttgcgtttttttttttgtacctcatcagctatcgttagtgtattttatgtgtggctcaagacaattcttcttcttccattgtagcccagggaagccaaaagattggacacccctgctgtagaaggcttcaatgagaaatcattcatagtgcaatggtctttttgttgtgacttctcaggatactttgagttaaaagattataaaaccagacagacagtagccccctttgaaaaaaaaaagtatgtatgcatt

SEQ ID NO: 125805 - DNA, 364 bp, Homo sapiens
taaagtgtatgggaggatgtgcataggttatatgcaaatgctatgccattttatatcagggacttgaggacccatgcattctgatattctgaggtgggggggtgtcctagaaccaatcccccgtggataccaagggaccactggacctaaaggcaagattcttgagactgaatgaggagacagaggaagcaaaattttaaataaacagcacatcgaatggtggcattgatgggacagtaattctatatttatagtgggaattactgaggaattctgtcctcctgagaaccactaagcagagccaggcactgagtaatttggctggggcatccttaaaggaaatatcccttgcacatcttccaat

SEQ ID NO: 125806 - DNA, 481 bp, Homo sapiens
taactgatagtaaacctaagtaaaattttctctgagttctgggaaccattccagcaaattaataaaatgtgaggaggccgggcaaggtggctcaagcctgttatcccagcactatgggaggccgaggtgggcagatcacctgaggtctcaggagttcacgacccgtcaggccaacacggtgaaaccctgtctctactaaaaatacaaaattggccaggcgagctggcgggcgcctgtagtcccagctactcgggtggctgaggcaggagaatcgcttgaactcaggaggctaaggttgcagtgagccgagattttgagcccctctcctctcccgcagtttctccccttcttccctctattccttcttttccacttcatctgctccatcttgcaatttttttcctcttgttgctctttctctccaatcttttgattgtctccaatctccatatatttctgcctctttcttctcccatctgtg

SEQ ID NO: 125807 - DNA, 351 bp, Homo sapiens
gggcgtctctaaggagccagagggagcatggttgcaagaccccggcatccacgtgggccagtccccggcccctcctcaactggagccgaaaggcccagcagggcaagactggaggctgcccccagccctgtgccccagtgaagccagctccgccctcatccttgaagcacccagggtggccgtgagggccaggatccctgcacgcctcagccctggctccagctggcagcaagcaccgagcatgccctccccacccagaggacctccgggcaatgcctgtcccgcctcatgctggaggctgcctcgggcacctgcctgcccattaaagactggtcagacctgatgagccca

SEQ ID NO: 125808 - DNA, 346 bp, Homo sapiens
cacgcctgtcccaggggaaggggcctgacatcttccatcggctgggtcccctgtctgtgttctcagccaagaaccggtggcggctggtggggcccgtccacctgacccgaggagagggcggctttggcctcacgcttcggggagactcgcctgtcctcatcgctgccgtcattccagggagccaggccgcggcggctggcctgaaggagggcgactacattgtgtcagtgaatggcatgccctccccacccagaggacctccgggcaatgcctgtcccgcctcatgctggaggctgcctcgggcacctgcctgcccattaaagactggtcagacctgatgagccca

SEQ ID NO: 125809 - DNA, 337 bp, Homo sapiens
tcctcgcaagtgggaacaggtggggcctcagaccctccaggccaaaccctggctcctgccagctgcccttggggcaggtccaggcagctgggctgaatgccagtcagggaggcagcaggtgtgcctccctgatcctggggtcccagggtgcccactcagacttgaccaagggcagtgcccccactgcgcccatgagccagagccatcctgcctgtcatggggccatgcctagcctctggcccagtcccagaccctggactccagcccctgagatggctcttcccctcctccccctgggcatggctgtggctccctggctcagctccagccccctgtg

SEQ ID NO: 125810 - DNA, 387 bp, Homo sapiens
ctaacaagctctagggagacaagaaatagagctatactagtctagcttcttccaacttagtgtgtgtgcgtgtgtgtgcatgtgtgtgcctgcaaatgtctgtgtacatgatgcacgtgtgcttgtgcacgtgttccacatgaggtgttttcactgtgcacgtgtgtgcgcgcctgtgtgtgtgcccgcgtgcaaacgtgtacatgatgcacgtgtctgcttgtgcatgtgtgtctgtgtgaggcgttttcacattgcggatgtgtctgtgcatgtacctgtgtgcaaacgtttatgtacatgatgcgcatgtctgtgtgtgcatgtatgtgtgtgtgaggtgcgttttcacagtgtgcacgtgagcgttttcacaatgcacgcgtg

SEQ ID NO: 125811 - DNA, 778 bp, Homo sapiens
tgtgtaaaacggggtagtagtagtacttgtctccagagttgatgtaaggagttgacataagggtaaaaatcgtttggcatgtggtaagcgccaatgtgtttgccattattattcaatctttgtttctaaattaaaaaaaaattccttccttctgtggttatttggacttattctgagtttcattttataactagaaactgaacaattgaaataaaaagaagagtcatcacatgctgaatttctcaaccaaactttttctgggaaagacaggattgtttttgtaaaataatttatatctgattattattagaattttaaaaatttgtgaagaaagaagaatcagtgagatgggattaatctatgtgcagtttttaagaaccttggaaattttcatgccatcgattgttagagaaatgcaaatatcattcagttgaaagactcttacaccattcattcatttattcaccactcattcattcatttattcaccactcattcattctttcatcactcatcattcatctatccaagccacaaacatttccagaatgcctgggacactgctaagctctcggagacaaagacaaataatttattgtctcagcatctagaaaactctaatgaagaatttgcttcattatggggaggaaaaatttaagtggccccaacagtcctcctgaaagctcggaacagggaagatagttcacctgtaagaaggaaggatgaataagaaatttcaccatttggcccggccaggtgggtcacacctgtaatccta

SEQ ID NO: 125812 - DNA, 350 bp, Homo sapiens
attcatcctccaggtctagttatgccatgatgtctcccagaagccttcatctgtgtacccccacagcactcagttcaggcctccattatagtacttgtgctatactatgtatttaccaatctgcttctgcaactagattataagatcccagagagcaagttcatgatgttgtgtccagagttcttttgccagtgcttaacactatacttagcagagaggaaacactgcaagtctgaagaatgaaaatgtaatgaatgaaattttataatgaatgaaataatttgtttatgagaggttgggggaaaaaaagagtcttcctaagagtcagagtgctttacaacatcaaacct

SEQ ID NO: 125813 - DNA, 291 bp, Homo sapiens
tggcattcttccagtctcatttcgaatagtgctgccttcccccaccctggactgcctccgaggcctgctggcccccaccgtttcttgagctcaatctgcattctgatgtgaccccttgttatcatccacctcatctcccaccactctccccttccttttctgcctctccagtgttccttgaagtgggctcactgcagggcctttgccctggctgttctctctgcctggaacactcctctcccaaatttctttatggctcaccctttcatgctaatgaactcaaaataccca

SEQ ID NO: 125814 - DNA, 563 bp, Homo sapiens
ttgtttgcagctgctgagaatcattcatgtggcccaacacgagggcatttcccagggcaggtataagatgagtgctgtcagcaggaagcaaggaagccgcaccacttaacagggaggctagtgcaggctttcacgacagtatctcatgccaggtgggcaccgctcatggggctctgtcatatctgacgatggagacggaccgttttcaactcagaaccaaggactttttggtaaggtcagacgtcttctggccaagctgaagccagaggctctgcaggctgcctactggaccaatctcagagaaaagaggaagggacaggaacagagtggcctaccaggaactctcaggcttccaaagagtgtcccaaggggcagcagcgtgggaggatgccctgcctctccccatctcctccttccagctgaagaggctggcccacacccacaccccgtaacgaggcagcagtcttcttgcttgcagccatcctcagagaaatggatctaaccatgttctccccaatctgaccccctacttgagatctgtccagacccttccagaaaggtgg

SEQ ID NO: 125815 - DNA, 310 bp, Homo sapiens
tgagaatctggagtttgaggtcagaatgaaagagagcagccctagagggagaaagctttggcccagggttcttagtctggaatcaactccttgtctttggatgtatccccgtgtagtctgtgcacctgtgtgtgtatttcaggggaagggagcagtgcatttaatcagattgtcaaaagagtctaagaccccaaatggttaggtacacagggttagtggtggacagtctgaaagaaatgaacctcacctgggctttcctctgttgtgccatgtcaccacacacccattcactactgtgtgtttgcccatt

SEQ ID NO: 125816 - DNA, 881 bp, Homo sapiens
tgtggctgcagcaagggtccgcctgtcaggatgtgataaggaggcacttcctcaattgttagagtacctttattttattttattttattttattttattttattttattttattttattaatttatttatttttgagacagaagcttgctctgtcacccaggctggaatgcagtgagccgaggttgcgctgttgcactccagcctaggcaacaagagtgaaactccatctcaaaaaaaaaaaaaggaattccagaagagtttccttacagagcctgggccctctgaaagcttgcagaattaaggccaatgggttatactcagttggaccaaagtcaaaccctcaggggaaatacggtaaaaacaaaaaagtctccatcccaaaggacaagggaccagcaacttcaacaagataagggaagcccctgccctcagcagttgagaaggaccagcacaagaagttctgacaattctaaaacccagagtgtgttcttacctccaaattgatctcattagtcccccagcaatggttgtgtattccaaaattaaagcagttgaaatgacagaattcagaatctgggtggtagaaacgctccatgaacttacggggaacgttggaaactccatccgggacaccggtaatgtgtcccagaagttggaatgattgcaccaaggcccttttaagaaagaaccaactgacttctagaatggaatttactagggaatcccaaatacaattgaatgcttattacaacgttcctctggggaagagctccgagtcaaaacccccctttattcatgcggggagcaaataagagaatttagatgaactccgaatggttttgagagccccattctgggttcggaaaaggcgcatctggac

SEQ ID NO: 125817 - DNA, 392 bp, Homo sapiens
cctgagttgcctctcaaagtgctgggattatagatgtgagtcactgtgcctggccccacatgtttttacactggggcctgaaaatcatgtttccaaaactgcccagcaccaacctgccagctctgggaattccagctcagcatccctgagcaccccaggtgaagaagtggagaaaggagggggtttctagagcaagtgtttacaaggagacagaaaattgaggggccagcaagaaagtggttcaagtgatcaaccgagaaggcatctaggatgggtggagtcagcaggggactgatgtatcagaggaaaaggaaagagtctgggatctgggggtcttacacatagacaccactagttggagcagaggtagaagtgtgattgcaccagaagga

SEQ ID NO: 125818 - DNA, 694 bp, Homo sapiens
tcattatatgccattatatgccttttaaaaattaggattagatccagagtatgggtaattgggtagagacaaaacacaatgggaagggcagtgtttccaggcatgcttatgtggtatagacctaaagcagattacagactccttgagggcagggacctgtgtcttatacttacactatatacctacagctaatattgggctcagcacccctgtaatcctgtcatttattggttactccctgcagataatcttttttgtatgtcatttctttaaacttcccagtaacctgtgagacaggtattattattcatattatgtagatgaggtaaccaagaaacaaagcagaactcccaaggtcagtattcaaacttcagtttctctgattttaaatcatattttcttcattataccacactgccccccaataaaaatagctgccttcatttggttttattttttaaccaaatatatattgaacctttttttgtgtaagctgctatgctagattcaaggtgtgtagaaatacacataaagcctaattctatttaaacagctacacagataactgatatgaggtagcatgtggcagtcccataactaatgaaccagtgaaagactgtgaggttcacaagtggatgatatcacttctaattggtgcagattatcaaagccatcacgtaggagggggtgtttg

SEQ ID NO: 125819 - DNA, 666 bp, Homo sapiens
gccgcaatccgacaccaaactatactaaatgatgaggttattgaacaactgcgaaaattgttgcttagatgcttgggacaaaattcaagatgatggtaaagtatgcccatctttcacagccgtcagacagggacaacatgagccctacccagactttattactcgtcttcaagacgcagcagaaaaggctattcctgatagccacggccaaagacttgttgtagaacttatggcttatgaacaagcaaatccagatggtcaggcggctgtttgccccgccaaaggtaaaattccaccgggtggtgatatactcacctcctacattaaagcctgtgaaggggtgggaggaactctccatacagcaacgattatggcacaagctatggcctctattcgaatgcctggacaattctctggccaatgcttcatatgcggccagaagggacatgcagaaagaaattgccctcggcgtgcaggtggccgtcctttacatcaccaccaacaacaaaaagaaacttttcagcaacaagacaccccaccttctgctgtatgcccacgaagccaaaagggtcttcactgggcatctcaatgccattccagatttgatattgatggcaatcctgtacggcctttttaaaaatcaggaaacgggatgagggaccggcc

SEQ ID NO: 125820 - DNA, 284 bp, Homo sapiens
tgctggctggctccacagggtaaaggtgtggtggaatgatgaggacctggggctgtgctgggacaggagagggcaaagtacgggccctggggtctgggcagggtggaggaggaagttgggaagagggtgatgtgctagagggaaactgaaggatgggaagttgaaggtgcagtggggcagactgaatggacagtggggaatgttggagaggatggggaatctccaaggcggagccattctgggattgacaaggccaggtgtgtggctgcttgaggggagctgag

SEQ ID NO: 125821 - DNA, 396 bp, Homo sapiens
agctctctctgtgggggctgtggggaagtctcctgtagtagacatggtcaaatctggaaggagttacctgttggggtcatctcctcaggagctagtaagtgacggggcagaggatgaagggtaattcggtgtcacagtcagaggtggtgataccagcagctggcagattaagaagctgcaagcatacagactgtcagctgctgccccagatcctcatggtgggatggtttttgggtcgctaatgctactggaccattcactgcatgccaagcacaagactgatgcttaaacatgtgttatttcatctcatctctccatggaccccagaagaagcaattactattatccttatcttataatgaggaggctgcaactcagaggttcagaactgttccc

SEQ ID NO: 125822 - DNA, 427 bp, Homo sapiens
cccatctctataaaaaatcagctagctgggcgtggtggcgggcacctgtaatcccagctactcgggaggctgaggtgggagaattgcttgaacccaggaagtggaagttgcagtgagctgagacagtaccactgcactccagcctggatgacagagtgagatcctgtcttaaaaaaagaaaagaaaagcagcttgataagcaagagggtaatagtaacaaggctaagacaggaaccaaggaagttagtcagatgtttgattcccctatagaaactaaaagtaacatcttaacatatgcccctgagttgttttccagaaccctgaacccccaccaatgacccccactgaacagctctgctgtcacctaaacctcagataagggggagctgatggctgaactctctagctgaataatctcaaggggatc

SEQ ID NO: 125823 - DNA, 557 bp, Homo sapiens
tagcttggtgagcgcagaccgctgaactcttctaacatctgtcttagaggttatgtgttggctgctgcgttcagagctatcctaaaagtaactgaaacaagggatttttgactccatggctaaacagtttctggggagcagaccttgattctaccattacttagaaaacaaatcaaattagagtcagactagtgatgttgtcagaacttttcaaacataaagacccatgaatggacatgtacacttgggatcaaaagcactctcctcttccaaacagcagtctacacttggccttttgagaggctgagctattgccaaggactatttagatggaagatttgattgttggtcaaggagacactgaagaagagataagatggtgtactggaatggaaggaaggctctggacatcaaaactttgggccactgtactgctgtgtaaatttgcgaaacctacttaatccttatggactgtttcctcatctggaaaatgagttaaatgagatccattttataaaattgttgtaatgattatataagtaaacacatagtaatat

SEQ ID NO: 125824 - DNA, 737 bp, Homo sapiens
tatttccaaatttagttggagagcacctcattcacatactcaacttttatattttagctgcttggtattttttttgaattgattgattcctttataaaaaatttattaataattctaaacatacaaaaaagtttcagaaatagtgtaagaaactttcccctcacctgaaacatttgagagtaatttgctaacatgatgcccatcactcccaaatattttagtatttatttctctcaaagggatattttccaacatagtcataataaaaaattaacagatacattactaccctcattagagtatagatatatattgtagattagacaagttccaccattggtctcaataatatccttggtaaaagcaaaaggatgtcagtcagaagcacacgctgcattcacttatcattccctcttagtcttcagtcttcccataacatggatgatctcaaaagtttggaagaatacagaccagtaatttcggagaatgttcttcagtttatgtcggtttaagtgtttcctcacaattagattcaggttatgtatttctgggcaggaatatcacagaagtgatgctggggtcgtcgacgtggtataaaaaaaggtggtaaaacacatcaatgattgagacaacgggaaccaaaaacgggacaaccaaggacggaactaccagggagaacagataccaagcaccgggacaccccttgaaccgggggatacagaaaactccttagcccc

SEQ ID NO: 125825 - DNA, 304 bp, Homo sapiens
tatgatgtccatgaagctaattatagctgagatttataacagctgatcaatttggtgaaatggaaagacactcaaaagaattaaagagtaaaaatgttattatttagcattctttcatcagataatctttaactgctcctgccaacctggtatatgagagttggtttttccaaaggtaattctgaggcccttgatgataacatttttgttttctattgtgatcagtgaaaatcttacctctccaacaaattgctttgtacttcaggacaaagattgtctcctttacttcttttttttttttttt

SEQ ID NO: 125826 - DNA, 129 bp, Homo sapiens
cctgcctcagcctcccaaagtgctgggataacaggcgtgagccaccgtgcctggcctcattagcttttaagtgttaaaaatactttcacattcacagtatcctgtgtttcttcaggcttatctttggtt

SEQ ID NO: 125827 - DNA, 473 bp, Homo sapiens
ctgatgatggtggctggatggctggatgcatgtctcagtaatgtctggacagagacacaccaatagttcggtctcctcttccctcctgacagacccagaactcaggccaggctctgcactgcatcagctgctcaggaaggggcaataatacaagaggaaggagagctgaggagaaagcctgcctctgtcctctccccatgggggagggatcacccacctcctgttcccgactggtggcttaatttgcacctacaccaaatctgagctatcaagttcgcaacacccggggtaactcttgcctccaggcctctcaggcctgggcctgattaagctctgtggggcgcaaagggcagaagttgcccagacagaggagacattctggccaagaaagccttagcacaatagcaggagagggctagccggaagttgaggcgcccacaagtctagctgaggtgtcccaggcttgctccaga

SEQ ID NO: 125828 - DNA, 684 bp, Homo sapiens
atcctaaccatgctgaatactaatctcctcatttcaaaaataataatacagcttctcctctacaatctctatcttctaaggattttgtaaagataaaaaacaaataagaaagaaggtaaaagaggactgtggtaaaagtagttttgttaatattaacagtgacaattaagggtcatatcatacattataagttcttaacatggagttcattgtcttctaaagagatttgaattagctacacggtgtctatgtacacttgacattgcacacaaacaacattgtcaatgtctgttggagatgagagtggagcaggttaataatgtcgttcatcagatgtttaggggagtcgaattaacaaagtaaaaaacaaaagttaagaactccactataaatgtgttatagaggttgatttttttgttttgtcatcatacgtgtgtgatattaataatgtactacaggtacataagatgtaaccattggtttagctgaatgaagtgtctgagagactgcatgcacagggtttacattttcttgtgaatctataatcatttcaaaatgcaggtttttaaaaagtcattagactggaatgaaataaaatgaaataatgtaagaaaaatagaaaagaggattaaaacaattatgcttaataatactgagactatgtcacagagaagtttctaagga

SEQ ID NO: 125829 - DNA, 343 bp, Homo sapiens
ggagacaccaaagacagagacaagacatgcagtgccctcagctgcataaattttgcttttaaaatattttcgtggagtaaaattagtgtttagtctcatgtgaatttcatcagtgtgtctatggtgagcatttaaaatacggttttattggaggtgtggttcgtactttataatccctacctaacagtgcttactcggaattgctcccccgcctcccaagttactggcctcactgtgctccagctttcccagtagcagaggaaccctcttcccaaacgtgggcttgatttacaccgagtcattagttgtcatctaatggtggctcttcagtgtcactgcaatc

SEQ ID NO: 125830 - DNA, 732 bp, Homo sapiens
tggaggggaacaacacacactggggcctgttggatggaagtatgcgggggagggagagcatcaggaagagcggctaatggattctgagcttaatacctaggtgatgggacaatctgtgcagcaaaccaccatgggacacatttatgtatgtaacaaacctgcacatcctgcacatgtacccctgaacttaaaagttgaagaaaaacaaaaggaaagaaagtgaagaaatttcaagaaaaggccaggcgtggtggctcacgcctataatcccagcattttgggaggctaagatgggtggatcaccatcttaggatggtgtttgaggtccaggtcaggagtttgagaccaaacatggccaatatggcgaaaccccatctctattaaaaatacacaaaaattgggagtggtggggggcacctgtaatcccagttacttgagaggtggaggcaggagagttgctcgaacctgggaggcagaggttctagtgagccaagattgtgccactgaactctagcctggacaacacagtgagaatctgcatcacagaccaaaaaaaaaaaaaaaaaaaaaaaaatttttgtggggttgggcccgaaaaagtttctaaaccattgttgggggcgggggccatgggtatggaactgggcaaggtgtccagggaacttgggtggcatggggttggttcccaaaaaaagcggggccggggtttgaatcagggttggggttgggtta

SEQ ID NO: 125831 - DNA, 648 bp, Homo sapiens
gggattaaaagcctggattaaggaatattccagaaaatgtagaaatgctgataaaattttatcttgagctcaccaaagcaaccctgccaggtgactcagttacatgctaaaattgtagaaccattgaattactttatattcttaggacttttttttgaaaaggtaagggtaagtgagtgacactgagactggtcaaaactaaagggcagcccctagtttgtggtgacacatgaatgttaagggtccactcgtgaggtttcctggcaggcacccagaggctctcttcaagttagagctcaaacttgctttgcatatttctgttcaaacttctatgtctatcattgaaccaaagtgtaatgttgtccaaactatgttactgctgatatggtaaacctgttttttaacacctcctgctttgcgtctttagttggataaggaagagggaagaaggtaaaatgaaaagaatttaaaaagacaatgtcaatgcttaattaaacaaataaaaaacttttagtatttgaattcataaacaaataaaatgcatatttactcgtggcctttctaacactttttactcatgacaaagatgtgaataagaaccagtatatgagtaaactaactggataaaagcagagagaaacacatgtt

SEQ ID NO: 125832 - DNA, 764 bp, Homo sapiens
gaaaaaatacagtatatagggtttcgtactatccacagttttagacatccactggggatcttggaatgtatccccagcaaaaatggtggaaatgtgatcatttcaaaagcagtgaattaaatccaaactgatcaaagccctgccagccagattgattgaggaaaacaaaataaagaacaatttcacaatacatgtctatattatggaagtgtaaatgacagcctctttattttatggtttttattttgctgctaagtatcagttattagcaaataatgcaattcttttttgaaaagcgttcatctttgttgtgttggtaacttcactggcctgaatgccttctgaacattctgttagcattggaaatccaggctagaaattccaaggatgttctgcttgatgtagaaagactcaaatctttttcttatatctgtatcctagacatttgaacaaataagaaaacggaggataggcctgtttgttaaaatttgccacaaacgtgagtctttctagacttaactaaaatgcactatggcagcatagtcactgtattgcatttatagataatattggaaatcagtgtttcctaggacttgttgtctttagttagtgaaacttaatattgatacatctgaaaggcccccaaacctgatgttagataaattcaagagactaggacaatttttacttttacataaaataaatttgttaaattattttaagagtgctgcagtccttctaaaaacagaaccaagcaatctata

SEQ ID NO: 125833 - DNA, 228 bp, Homo sapiens
tttcagctggcaacgggcagactcataggaatgcattggaaatattaatctagattaccattcagacaaagtcagaggctcttgcaataatctaaggacaaaagaaaggcctgacatagagattgtcagtagaacttaaaagtaaagacagaggacaattatgtattaaaggaagaatgattgtgatgacaaatgagagcaagggagcagaaatcaccatgtcattta

SEQ ID NO: 125834 - DNA, 230 bp, Homo sapiens
tgttctgaggatcccggacggtgtactccaccggcaggtggtactccaccggcaggttgtactccagcgcggcaggttgtacttctgtctcagctctttggaaagaggggaagacatagtcttccttcgaatgtgggaaggtgcattgaaatgccttttgcgattcttgcttcggtcggaagtcacaaagggattaaacttcattttggccactcctgcttcggtgatag

SEQ ID NO: 125835 - DNA, 323 bp, Homo sapiens
cgcccatgtgtgaggcacacttcggaaaaccacttagctcctccaagcctcagcagcttcatctgcaggttgagggtgagtgcatcaagcacgcagacggcactcacacagctcagcacactgctcactagtgtcatgatttgctcaggaaaggcctttgtcattacttcattccattcttctctgccagggcatacagatatgacaagaagaaggaaagtggaggtgttcctggaggatagaaaaatgatttttcccatatcactgccaactgatagcaagagctctataccattggtggcagaatcatggactgggatttt

SEQ ID NO: 125836 - DNA, 369 bp, Homo sapiens
tgaaaaatatgcctcctatacagaaccaagactaaaagggtcgaggtggaataaaatgttcctatagttcgtaagcagccgtagtttggagtgctttggcatgtatcaatggaaagccaggatagtgtggttaggaatccatactctgtaaaaaaaaaaaaaaaaaaaaaaaccctgcctgtgccatttggcatgcttagttcaattattttgaatgctataaaaatagagatggaggagaaaaaaagatttcaaagtaggaaatgaaataggaagaatgttcaggcagagattgaggcaagaagggagtagagcccaggcagatcttatcaatgtgaatcagtctcaccataagtcctaacttccctg

SEQ ID NO: 125837 - DNA, 768 bp, Homo sapiens
cgcggtgactcacgcctgtaatcccagcactttgggaggctgcggtgggcggatcacctgaggtcgggagtttgagaccagcctgaccaacatggagaaaccccatctctactaaaaatacaaaattagccaggcttggtggcgcatgcctgtaatcccagctacttgggaaggctgaggcaggagaatcgcttgaacctcggaggcggaggttgcggtgagccgagatcgcgccattgcactccagcctaggcaacaagagcaaaactctgtctcaaaaacaaacaaacaaacaaacaaacaaacaaaaactatctgtcttttattaagccatattatttaaaagacctgcaaaaatgtaatacaatgtactcttctcactaatattggttttattctggacaacagaattattttctataaaaatgttatgttttataatagtttttatattattttcaataaattaatatatatctggctgggcacagtggctcatgcctataatcccagcactttgggaagccgaggcggctggatcacttgaggtcaggagttcgagaccatcctggccaacatggtgaaaccccgtctctactaaaaatacaaaaattagccgggtgtggtggcatatgcctgtaatcccagctactcgggggaggctgaggcaggagaatcgcttgaacctgggacctgggaggcagaggttgcagtgagcagcgattgcgccactgcactccagcctgagcaacagagagagactgtctc

SEQ ID NO: 125838 - DNA, 206 bp, Homo sapiens
tttaaatctatgagacagtttatcctttattactgttatattataggagaaagaatgttgtctaaatgcatccgaaatttacttaaaagcagggaaaacagcagggtatgacacaaagaacaagaaacaggaagacctaaaagacaacatgtgtgtgcactggcatgtgctcatgcatacttgatttctccattttcatttttttt

SEQ ID NO: 125839 - DNA, 835 bp, Homo sapiens
attgttgtgggttattatacaggctgtacagggtactttactcgcgacttacagtcatgctgggccttaatgagtctaactaaaagactttttagcaattttcattttgtatggattagagagtattagtggggcccatatggtcttctataaattaggagatcaaacaagagagtcttctgcagcaggacctcagctctggatggcgtctctaactcacccattcaagtcagtggggagcaactgcccccaagggttacacagcaccagggaccccagaggtcttggactctgtccccatgcaccattggagctgagatgaatggacttagccatccaatcatgagcatgctggcaacaatgattctgatctatctgttgtctggaaggttttaatatcacggtcatataaatttcaaccagttttatttaatggtgctttccaaacgagcagctgaagagctggagaaacacatactccagatgttggctggcccaggaagcaggatcagcactgaggaagaatctgccagcaaagtaatgattctactctcctaaaaagagagttaaagccaggacccaaactaagttcaggcgcatatctgggagggcatttattgaccagagcacacagtggtagtgaaaaacgaaaacaaaaccaacaaagcagataaacaaataaaactccccaaaactcaactgtttttctgttcaaaggtttctataaaaatccgttcatgtgttctcaaaaactcagtttgtttctgttctaaacatctcacttcgccttagagagcattcattattctctacagattgcttttggtgattctgg

SEQ ID NO: 125840 - DNA, 546 bp, Homo sapiens
gctggttccgtttgtttttggcttctcatgttgaagctctattttagcagggctggatgttcctaactgagcgagcgttgtaaaggcaaacacactaggctctcccttgtgtgggagagctctgctggcttctgaagatagtgaaattatgctcttgtgaataagccttaacgatttatgtacaggatttcatgttacatttaaaatgttgtggcacatttcagatgtaatgtgatgtctatttgtatgtgggctttagtagtttgatatctagagaattttctaaaaattttgggaattgatgctgaaaatacaactataaatgggagtcggataaccacataaacactggtagtatatatttggacaatgccagagatcatttgtgtaactttggacattttatgtagcttttgatttctttgtagacatgtgacattagatgattgttttaaagaaaaagcagaagtggtggaaagcctcccatcaatggagatagatcatcgtagtctaggccacagatggtgttagccttgttaccaaatt

SEQ ID NO: 125841 - DNA, 303 bp, Homo sapiens
agaaagccagtttgaaacgaatgtagcaatagatgtaaaaacatttaaaggcgttttaatgtggctttttaatgagctggcttatgcctgtagtcccagcacattgagcagctgagctgggaggatcgcttgagcccaggagttcaagactagccagggcaacatagtgagaccccatctctatttaaaaaaaaatgtttttaaagataaggaacagacttaaagtgatgattgattgctcatagaacgttcattttgggctccagaactaggaatgatgtagaatttattgttgtgtcattg

SEQ ID NO: 125842 - DNA, 718 bp, Homo sapiens
tattcttaaggttggaggtcactgtttcttcttaagagcactgtattccaattttgaataatatttcctagacaggaagcacgatcatctttcatttttatagtcattttttagtagatgattgttgagatggctgggtgctgaataaaacaaactgccctagtctagttgttctcttattgttgtgtgcatttcacacttgtgtaagcctatttgttaaggtcatggtagtcagatgtatttttcatctaatttcttatggcctgatattttttcccaatattgttttttcttgtcctgttaaatcattgacaactgagcagccttcaaaagtatatttttataaaagtgttttttgaaatatgtcttatttcatgacattttgtaacaactcctagactattgtctattctatttgtcttaagtggagctattgattatataatgcaaaaagctgtgaggttgtaactcagttcagtagtatttataaatatttgttttccacttttgtgcatattatacaaacgatggatataaaatttgttttgaccatttatgatgcttgctttgggaagaggatatcctcatagaactgaacgttatgatggatttttaaaatattctgacccaaatgatattgcattgtcagtactgtccctggttattaatttctcctggagtagaaaatgctttgttccttactatatcccatttaaac

SEQ ID NO: 125843 - DNA, 590 bp, Homo sapiens
ccctcaccggatgtgtcctctagatcttggacatccgagcctccagaactgtgagccaaataaacttctgctccttataaattacctacttggtggtaatggcagcacaaaacagactaagataacatcctaaccctccacatcccgctcgctgggaccatcccactctggtaatatcgggctgaaatggttcctctcctacgaaggcttgacttatacttccaaatgactgatgttttggttcccatgagacgttgtttataccttaatttcagcacttagaggtaacaaaattttatattatacaaggttttcatgtcttgcccactatcccatgacctctgagattggagacatttttataccaagagcccaccagagttaagtgtactatagaatatgctttatggtacaatgtaactttgtgttatatcattctgtgctttcctagcttgcctaaatgacctctgtggtcaggaacttctttgtatctccagattctattaaactgccaagaatgtagcagatgttttacaaacatctgacaaataagtaataacatgtgaataaagatgtattgcatgttccac

SEQ ID NO: 125844 - DNA, 315 bp, Homo sapiens
tgtcaaatttatgccaaggagcttacatatatctaatgcaaagagacaacaaacaagccaatgaataagaatttcaagaagataaaataaggtaatatggtacagtggtttgtggaggaatataatcagggaaagtctctcaggtgctcacatctgtttcaattgtaacctcaatgaggcacagacaaccccttgagaaattctgatgagggaagcagtgccaacgtggctcaagtttatccttctcaaggataaattgtccacaatgccttctttgctcgatggtagctatccagtgtctaaacaaaagtcact

SEQ ID NO: 125845 - DNA, 584 bp, Homo sapiens
ttcccgcccaggaaatgccaggagcactcccacccccaataaacaaccccaaatgccagggcaaatatgccaaacggccccccactccccccgcgaactacggtctccatatctagacactcaagcccaacaggacaccccccatcgtggacaggatccccgtgcagtgtggtcaaggacatagcagggtcttcactaacgatgcggacatcttggtcacaggcaccatggaaaagcacatttctcaagtccacagagcaagggttaaagactaaaaccagcaacagaggcaggcgatcatggcttccaatcctcacccgggaaggaggattctacaagaacatgcaacgtgggccacacacacgtgccaaggagagagaggagcccacagatcatttttcctgttacctaacaggacctactgtctatggaatcccaactttatgcatagcggggcagaggtggaccgcaaaacacattctagaatgttcatagcacccctaaactgaaacaacccagatcctatcaacaggacaatggatgaatcatcaaaatgatagagaaatcagagccctcatgcattg

SEQ ID NO: 125846 - DNA, 396 bp, Homo sapiens
tcttggctcaccaatgtgcatataatattaggaattctttattacacaaagcccctcttagtttcaacctgatatctcataacttctcatcataaatcctatgccctacctagccatgctaaactttatgccattcaaaggagatgacattccttctcagctttgtgtctgtgttgtgataacccatttcctggaatattcttttcttcttccttgcttatcagactgatacatacttttcaagacattacttatgtgtcatgattctttcagaactctctcccaaattcaaattcccccctctgagctggcacaggtttacctttatgtgacaaaagagcttgtatattagtctgttctcacactgctatgaagaaatacccgaaactgggtaat

SEQ ID NO: 125847 - DNA, 320 bp, Homo sapiens
gaggcatacacaacggaaaacaaatgtgtggtattctggaatttaaagcaaaacatccaaaacaatcccccacatcagatgattttggttaagatcagaatgcctgctttcagtggaaaagggatttatgggctggccagtgtatgctacgcgtctggcaagcaggcagtggaaacttgaaatgggatttcttgtttagaaagaggttaccttgggctggggcctccctcccaatcagccccaacatcctaacgccagtacacttcactgaagcttttctcctctccagggcagaggaagggctccaggtttttaaatga

SEQ ID NO: 125848 - DNA, 344 bp, Homo sapiens
tgtttaaatgccatgcaattgtcacaagaaaacttcactgattgtcaaccataacgggtaccagagaaaagggattcttcaccatcacgccaacttctgagaaaatcctaactttagagaattagccaaattcagttagattggatttagggctcgttaatatctactgtaatgggaacggtttcccaacacaaggaggctgttggtttgttgtggaagtttcagctcagtaatggagggtgagcaggtgaagaatatttcagatggggggcaactcacagtacacacgtgcagtgttcctgagctgggtgcccaccaggaacggaacacttaactggaaatgg

SEQ ID NO: 125849 - DNA, 610 bp, Homo sapiens
aatcatagctgtggggggctccatgcaggaccttgagggccccgaggccagtccctgtggccacagcaaggagcatctgctttagctagttggacaagactctctcctgcccagaaacaggcagaaggacttcccctgctccccacccatcatcgtatcccaaacacacctgtgtggatggtcacctcaacgtctcccctcagcccagtgcccgcgctcttcctgatgagggttaagcaggagcagcctcctctccccatgtccatgttgcaggcggctgccttctcctcagctcccaccgagcagaacaagagccagccagctctctccaatcccaggattttccagggatgctgataacgatgggggggccccaagaagcctccctaaagcaggcagggccttgtgagtgggtggtgggagggatcagggcttcctcagcatctgtcagtccctggagcatctgaaggggctccctacgtcaggaggaaagagtggggccggcccctgtgggttcccagagcctggcatctgccggttcctctgccctccctcacagacaccctccacagagcagcacagcaccgaggacagaggcagcagccccaag

SEQ ID NO: 125850 - DNA, 381 bp, Homo sapiens
taagaaaaaggttttctagtttcttctacattaaaaacaatccctccttctcataaagcacaattttacagaggaaaagggagatgtgaaactatacacaattcaaatctaattaatatataatttttttgtggaatacagatggagggaatacatcacaatactaaaggtgattatctttggatggtgggattacaggtgattatatattttttatatttctatagtttaaaaatattccatgatgacctataattacttttacttattttttgagacaaaatctcaccctgttgaccaaggctggagcgcagtggtgcaatctcggcttagtgcaatctcggtgtagtctcgacctcacaggctcaagtgatcctccca

SEQ ID NO: 125851 - DNA, 432 bp, Homo sapiens
cttttctcctcctagagaaattctcagacttcatgtcccagtcacctcttctgtgaagccttttctgattggccccaggactgtcacctcctctaagtttccacagtaccttgtgcccatctctctagcataacctttatcaattcatgttgtaagttttcagttacatgtctgctgatctcattgaggaagtgaaattcatcttttcacttttccttccctcttctccccctccaagtgcttaacagggtctagagcacagtacatcctcaataaatgcccagtggtagaaacaaaggctgccaaaggcgtggcctctgcctccatgtcaattcagtcttcactggagcagagatgaaaccaaggagccccaggaggccttaccttcccaatcattgggagtagaggttgatggaggataaatttggtcat

SEQ ID NO: 125852 - DNA, 248 bp, Homo sapiens
aaaggctgacggacaggctcggtcagataaggcaattccagggatgggggtttcatgtggaactggttggacatttgcagaacagccaagtaaatggccaaagtcaggtggtcaaggtgtgttttctgtttagagcagaaaaagtcagaaatcttgaggttaggatgctgaatgagcccccagctgatgcaagtatcaagaaagagggaccccttgagccaggtgtaaagtctggatcttagggagtg

SEQ ID NO: 125853 - DNA, 689 bp, Homo sapiens
tgcttttgaacgacaagcagtgtctatgagtatgctgcttattgaaataatttcctaggggtatatgtccagtagtgtggactttctgaaacagtcaactaagtaagtgatacagtgtttccttatgcagatgtgcgtgctttgcctcccggagggaattcgttttgggaatagtcaccactgttattattaagtccattattattattcagttaatacaactttttcaaaaagataatatgcctctttaaaaggcgatttagagtgggaaagtttttttttctttgtaaatatcacagcgacaaggagtgtaatataaacttccaaatggaaactgttctgaagaaaatactgactcaagaaatctacctgaagatttccatggtattgttgctgagtcggatgaacagatggtctacatggcaatgaaacttttcagggtgtatgtttcagactcctgtattctctatactcaatcattcaattagtgtggacctttaatttccttttttggtagcaaacagcattcacttacttgcataaattgtagttattttaaataaaacaacaatcatatcaacatgtcattttagaatttttcatagtgtcttttttcaaatggcatcttgtacattgattacagaaaatcttgttatttcgaactctgtttactcggcatacaagtccaa

SEQ ID NO: 125854 - DNA, 404 bp, Homo sapiens
caaatatcctctttcataatagatcatccagacactcagacacacgctctcactcacacactctgcagcacaccagcgagcatggcaccccttcccatctgtgtctgcctgccagctgctcttcctcctttcccacacacactcccttttttgagtggcttccaaaacatctctttctaatttgctataaagagtgagccataaagaatttattaagtgatgaaaaaaatcacagctaagtatcagattctccagaggaaataagattaaaaagaaattctggaaaacagttgtttttggagaagggaatagcattgggaagggggatattaataatgtttcatcttttttgtttaaaaaaaacaaatctgaagcaaatatgactactgagatgcaacaaagct

SEQ ID NO: 125855 - DNA, 132 bp, Homo sapiens
acttatttatcctgatcactgcatatagtcataaatattttcattaatgaataaaactaaagataaattaatcacttaggaagataaaaggaagaataccaaaatttagaaaaaagaattataagatagtat

SEQ ID NO: 125856 - DNA, 316 bp, Homo sapiens
cctgatgaggtggaggcatgtggagggctaagaggctgaacgtggagagtccctgcaattggctgtctagtcatagccagcctcaactcaaaatccctttttctcagtgggagccaggagactagactatataccagctcatgctctggggcattgttccctaggctcttggtagagacagataagtaaccatcaaatgttttcttctctgtcaaaactcagaatgcttttcttttcttttcttttttaagagacatgatctggccccatatcccagacttgagtgcagtggtgcaatcatagctcaagtgattca

SEQ ID NO: 125857 - DNA, 155 bp, Homo sapiens
agctagcctgcctgaaaaaaacccagcccaagccaatcctcctctgataattcctctggctgctcttacctccttgctcccatcacaagttacacagacttccatttcggcaacatcccactccactaaatcgtatatatatactggtattaatt

SEQ ID NO: 125858 - DNA, 1094 bp, Homo sapiens
aaggacataaatcaagaaagcttttgtgtgtgtgtttttttaaatgaatagcaaaatgaacaactaaaaattgaatggtggggaagggtaataagctaacactatagttacagctttctaaagtactttctagagtacacctaacatttacttactatgtgcacttactatgtgccagtcattattctaggtgattcacatcaatggtatcaatcagttaatcttcacaacagctatatcagttacattcttgcatagaataggtgtcagtaagtattactattgacggtatacaattgttattaattcaacaagtcacattaaacttcctgcagcagactgtatttttcaaaattggcagcaacagtatgttcaatcccatgtgctcttccaaaaaccctaccccctacctcaatcaagagatggcatctatgtcctttccccttgaacccaggtaggcttctcggacgggtttctgtgactgcacctctaaagtaatgctatgttggccaggcgcagtggcttatgcctgtaatcccagcactttgggaggctgaggcaggcagatcacttgaggtcaggagttcgagaccagcccggccaacacggcaaaaccccgtgtctactaaaaatacaaaaattagctgagtgtcatggtatgcacctgtaatcccagctactcaggaggctgaggcaggagaatcacttgaccctgggaggtggaggttgcaatgagctgagatcgcgccactgcattctagcctgggtgacagagcaaaactctgtttcaaaataaacaaaaataaataaagtactgctatgtgactttcaaaaccgcatcttgaaaggtagtacagcttccatctagctctcttgctcgtaatatgtgcctttggagcatataagtacatgaaaccaccgtgcggcagagatcacgtgaacagaccacgttaaaatagagtccgaggaaccctggctgttgaagcccgcagcggtttgagttttccctgtcccagtgccagacatgtgaatgattctgaggccctcaagatgactccagcattatccctgtctcatggcagccaggcaacaca

SEQ ID NO: 125859 - DNA, 286 bp, Homo sapiens
tacaccaggcaccccaccatgcctggctaattaaaaaaaattttttgtagagacagggtctcactctgttgccagggctggccttgaattcctggcatcaagtaatcctcccactttggcctcacaaagtgcgaggattacaggtaagagccaccatgtctggcccactgtacttttatacaactgaagcacagtaaacctactgtggtttcgtttacaccagcatcaccacaaacaccatgagtagaacattgtgctgcgacgttaacgatggctacaacatcac

SEQ ID NO: 125860 - DNA, 632 bp, Homo sapiens
gcttcaaccttccgagtagctgggattacaggcatgcgccaccatgtcgggctaatttttgtgtttttagtaaaggcgaggtttcaccatgttggatgatcttgaactcctggcttcaagagatctatctgcctcagcctcccaaagtgctgggattacaagcataatccaccacacctgacctacttttgtatgttaaatgtgattatacttctctttgacttgtcagcttagctttagctgatacactctggtgcccaactattattgtatcagtgaacttccactttcttttccttttctctcaatttttgttgtatcattcctaccttgtgaggacatataatatttacattctgttgtcatcctcacatttcttagttccacagtttaaatgtatttgaaactcaaaacattcccattaatctcttggtcagctgaaattaatgatttaatagtttccttaaaaaagactcatggaacaatttccctaaatttttgccatgtcaaatatgtttatctgtagcctttacacagtaaaaacaatttggctagataatacaattctcagttcatatttttctttggaatattaaagtattgctatagagaagcctaaagtcatgtgacat

SEQ ID NO: 125861 - DNA, 595 bp, Homo sapiens
agacggagttattctctgtcatcttggctggcgtgcagtggcacgatcttggctcactgcaacttccatcccccaggttcaagagatctatctgcctcagcctcccaaagtgctgggattacaagcataatccaccacacctgacctacttttgtatgttaaatgtgattatacttctctttgacttgtcagcttagctttagctgatacactctggtgcccaactattattgtatcagtgaacttccactttcttttccttttctctcaatttttgttgtatcattcctaccttgtgaggacatataatatttacattctgttgtcatcctcacatttcttagttccacagtttaaatgtatttgaaactcaaaacattcccattaatctcttggtcagctgaaattaatgatttaatagtttccttaaaaaagactcatggaacaatttccctaaatttttgccatgtcaaatatgtttatctgtagcctttacacagtaaaaacaatttggctagataatacaattctcagttcatatttttctttggaatattaaagtattgctatagagaagcctaaagtcatgtgacat

SEQ ID NO: 125862 - DNA, 220 bp, Homo sapiens
aattaagatttctattatttgaagatgcagcacatcaaagtgcttgagaagaaaagtattttaacatgaccaaaatatttgctattttgatataaaggaagactttcttgggaccgctaaagtattccattcaaaggaaggtggcttggtaaaagtattcttgaagaaacgactgaagacatgggtggaatgccagaattctgccttttttttttttttt

SEQ ID NO: 125863 - DNA, 534 bp, Homo sapiens
tgtttttgccaatattttccttgcaggaggttcagtgggaataggatagacaaggtccctgctcttgtgactcttatattctggttgggaaaactgacaatgaacaacaacagtaaacaaagaaataaaaataaatccatggtgataagtacccttatatggaatagagaatggtcaggtaggtaggtgaaaagagactgcacattagatagggtggaacaaatgaggtttttctgagatggtgacatttgcattgagagattaaagagttaactaaccactcattactttgtctaacttttacaacaacctgagataaaggtaacattagttcagcaggtataagcaaagaaattaattacccaactaggttaaataatttctctaagattacacagattttttcaatcctattgtaaaccaaaaatagaattctaggccccccaactaactgaatgaccgctccttatggctaaaggcattccatagttaacctgaaaaactagttaagaccctgatgagaagtggaggttg

SEQ ID NO: 125864 - DNA, 515 bp, Homo sapiens
gtagtgtttgaaatgagtaaaatctttttaaaatgatatacatagtataaattgatatagctgtgactttatgtataggcaatacgtatttttatatgtcttaatttattaccttcaatggctgcgagatacttattttattgatgtaccgtaatttacttcagtcaccatgaatatttagattgttttcagttatttgcctggagaaacaattattcggtgaatgtcattgtatacacattttgtacatttgcatgagtatacctgtggagtctatgttaataggatataactaaattgaggaaacgtttgagacggtcccactttcaggttacatttgacttaatagattatgaagacctgagaataaaaggagaaacagaaatggatttagaggagaatgaaaagggggaacagaaataggcttataggtaggatccacatgacttgatgattaattggttgtgtgtatcttctgagtagtgtcaggggtgactcaaaaatgtcatgcctaa

SEQ ID NO: 125865 - DNA, 305 bp, Homo sapiens
tgagcctcagtttcctcatctctacaatggatctaatactcccttgaacaaacaggatgccaacgaggcaaagtttggtgcccagctctcagtatatagaaactaaacttcttggccgggcgtggtggctcatgcctgtaatctcagcactttgggaggccgaagcaggcagatcacctgaggtcaggagttcaagaccagcctggccaacagggtgaaaccccaactctactaaaaatacaaaaaaattagctgggcgtggtggcccacgcctgtaatcccagctactcaggaggctgaggaag

SEQ ID NO: 125866 - DNA, 108 bp, Homo sapiens
gggtgggatctgggaactgggaggtggtgtcggtgttgactagtgtcgaggtggccatactgttgtttggggaagcacgccctggagtatttggtgcgatggggcagt

SEQ ID NO: 125867 - DNA, 290 bp, Homo sapiens
tgtgtacatgcaggggcgggattctatccatcagagaggctggagagggagttccacattagagatagcctaagctagaattctggtgtaccttccaattctgggagtctcatttgtaggcctaaattcaggcatgagcaagtgtaagagatcaaaggtctcccctacatcccccaatccttctccccagcaaatagagggttctgagccagacagaaaattagatttccatggttccttccagcttcaaaatgccataattttaggcttagactattcttcagcacaca

SEQ ID NO: 125868 - DNA, 121 bp, Homo sapiens
tgagagtaagatatgtcatctttctttcaggcctatcatagtgtctagtctaaagcaacagtaaggctccttgcatatttgttgaattaaattttcaatttagtttctgaattccttggtc

SEQ ID NO: 125869 - DNA, 654 bp, Homo sapiens
aaaaggacttggattgaaacctattgcctttctttacaagattcagatctgttagaaatctgtgtggagtcagtccccatggcacaggcctgtagttcagctgctcaggagactgactgaaggattgcttggtcccaggagtttgaggctgcagtgagctatgatctcgcctgtgaatagccactgtactccagcctggacagcacagtgagaccacatctataaaatttaaaaaaaaaatctgtctagaatataagaaaaagaaagaattgataaatcagtgcttttatttctaggcaacatgtctgtcctcctcctaggttttaagcctaaaaataaatttttaaaggtttaaagcatacagctacatcattatttttatggcagtcaaattaattcttccgtccaccacttgaagccaatggagattgacggtcctgttttcttactttaatgatgtaaacctcattgaaaatgaagattctggaggataaaaaatggtgctgtgactgctattgattaagtgtcttgttgccgtcattgttcatccctccttggcctcttgggcagaaggaggcccaagaataacattgctgacatttccttgaaaagatgcagtgcttgacaaagacagctgcatgcttaaaaaaaaaa

SEQ ID NO: 125870 - DNA, 710 bp, Homo sapiens
ctatgtcctgttcgtggctgatgccagtgcctaaaacaagtgcctagctcattataggctttcaataaatatttattgaatgagaaccataaatgaataagtgatagctaatgtattgtcagtgatactgtatcttctaaaatattaataagctactgtaaaattaatttctctttcctgattgacttttcttggttttgttctcattccagatgcttgggatggaagaagtttgagtgacctatcctgtgtttatcctccttgccgtagctgagttgatctttttgaaaccctcttcccagactcttggatttatttattttattccagtgtgaatgcatgttttttccctcatagatggcagttctggattagcagttttaaggtctcaactttgtttttagttatcttcctttaacaagcttcaatttaaaatactccttcttttctctcccaattatctttactgatccttagttgtctctttttattatctccaacagaaggaacttgctgtttaggtttactgaaactaaaattctgaagattgcaaaaaagtatataggtaaatgtgtgtagatgagacttaacgtgtacaagaattcacattaggattaaggttactatttttatctagaatatgaaatttgttaggaaagggtagcaccttactatctttttatcaccttgatcagtgacgtacagtaaaa

SEQ ID NO: 125871 - DNA, 428 bp, Homo sapiens
catcccagaacagttgtggtacattagtagatggcaaggtactgcatggtctgaaaagtcggggagacagctgggctaggcataaacaaatatgagttgctgactgctttggaagttctatatacaccatagtttttaataaacacacatcaataatcacagttattactactgtggttgcataatcaacaaaatcgggccagattagctagttttaattcagttcactccactgactgaaggcctatcaaatttgaatagattatgtagcagcagaataggagtaaaatgaaaaactagcttctagaagatctatgatctggtgggcaagacattcatattactaacaggaagaggactatgttcaagtatactcagagccctatagaaaaggaattcaggatgtcagagataaatttttggaagag

SEQ ID NO: 125872 - DNA, 349 bp, Homo sapiens
tagctggaagaaactttcatcatttctgaaggcaaaaagtaaaacaagatctcatgtccacctataagcaagaacatatgtagataccaaaggtactgactgttgaagtaatgagaaccacaggacagaaataagccaataccttgcctcctccttcatcaaagttttaaactgaggaccagatccccctgcaagagaggatttgtttcagaaaggtcacaccttgctgaaaacgggcatacccacaattcccacgtgccattactaaaactatgattttaagacaaaatcagttctaagaagtaaatactattatctccaatttccagataaagaaagcgaggtttga

SEQ ID NO: 125873 - DNA, 852 bp, Homo sapiens
catgatggctcacgtgtataatcccaacactttgggaggccaaggcagaaggatcgcttgagggcaggagtttgacaccagcctggggaacatagcaaggccccctatctacaaaattttaaaaaattcgccaggcgtggtggcacacacatgtagtcccagctactcgggaggcaaaggcgggaggttcacttgggcccaggagttcaaggttgcagtgagccattatgccgccactgcactccagcctggatgacacagtgagatcctgtctcaaaaagaaaagtaactacctcaattggcagaaagatagacaagctttaatcagaaagaatccaaatacagaactacacaaatatggtcaattgacttctgacacaggtgcaaagtcagttaaaaggagtaagaatagtcttttcaacaaatgcttctgaaacaaatgaacatttataggcagaaaagacaaatttcaatgtatacctaatactttatacaaaaagtaactcaagataaatcacagaccaaaaagcaaaatctcaaactataaaacttttaggaaaaaaaacaagacaaaatcttcatgactttgggttagacaataagttcttagttacctcatcaaaaacacaacccataaaatataaaattaataaactggactttataaaaattaagaaccagcaaaagacactattaagagactgaaaagaaaacctacagtctatgagaaaacgtatgcaaatcatatatctcatgaaaggcttatacccagtactctcaatacttgacaataagaaaatggcctagtttttaaaaaataggcaaaatatggacgggcacagtggctcacac

SEQ ID NO: 125874 - DNA, 145 bp, Homo sapiens
gtcctatagctgtctctgagtaagactgaattcataagaatttattaatttctctaaagagaggagactcagggtcccagtaactgaatgctgttcttatttcagtctttcctgtatcaccttcctggattttgccatatcaagg

SEQ ID NO: 125875 - DNA, 480 bp, Homo sapiens
ccatataacgagagcacgctcttcaaatcaaaacttcatcagctgacacactccctccaggcattctccaatgagtgatcagtttgtttgccaccagcacctcatatttaccaccagtactgaaatctaaacttttgaatttcaaaagcaatatcactcaactatataataacaagaatgtctcacatataccctagaaaaacgtgaacagagaaagaacgagaacaaagttaacagtggtctggataatatttcctttttaaatagtccattcagaagtgcgtaagtactaacatgttttgtgatgtggagcctaatgaatctaccgcctgttcctcatcttagcctcacccatgacagacatcacgacttgaacacaaaactttccctctgaacctggaggcaccctgagaaaccactgacaccatcctacaggcgaattcttatccactaaccagtgttggccactaaccagtgttg

SEQ ID NO: 125876 - DNA, 449 bp, Homo sapiens
ggagagactttctttgtcaacccaggagggcttgttagaagaagagggccgggcagctcagctctttccctcttcgtgtccggcagcaggaggccactcctgggtctgggcctcctggagttggcaagagctgctgactgagaacctgacccaggcccatgaaggcagtgtccaaggtgagccagcacagtggccgtccacatacctgtatgctaaggtgaagccaccgcagtgagaagctggtgcagaacattttggggcagctctaaatagaaaaggattttgtctcccgggcaacgtggacatgagacataagcctacacgcctccatgtaggctcccagactgcctgaaagctccggctaagttctccagagcgctcaggtgatagctcttcttctcagacgagtactctgaggccactgtcatgccagacatgtaagtggccaa

SEQ ID NO: 125877 - DNA, 400 bp, Homo sapiens
aaaaacaaaaaaacagaaacaaaaacaaacaaaaaacaaacaaacaaaaaaaccagatgccaaaaaaaaaagtgtgtgtgtgggggaatcttactgagaagagagagaaagaaacagaggaggaaggggaagtgaaaatgttatgatggggtggaagggaggaagataggatctggagagaagcagaagatttcttgccccaaactcctgagagagagcaaaaacaaatacttttgagcaaaatcagttgtccccagatgtccttagatgctccatcggtgactccgatactgccagggagtcccacctgcagaatcacggttctctgcctacacaagaccctggaaccagtccccttctgtttgtccctgctccacccgccagtacaacctgcagacca

SEQ ID NO: 125878 - DNA, 409 bp, Homo sapiens
tcagccgtattttattcaacactgaaccattaatgaatgctagctagtcttcctttcacttacagaatgtttatctatacatgactaaacaaagaaggagcgctggaaatgatcctgtgaaaaatactggctcacaatgtatcagctgagtttggggcaactgaggtagtaggaggcgccccctggacttctgctggaatttagatttaaatagatggatgaattagacaaaacatactctctgaaagagtgagaaatacaatattcaccaattaagtgaaggaaaaatctacactatgaataaaacaataaatgtggatacatttgaaaatttgaatttcaaaccccttaagataatgtgacaaatacaacaggcctaatttaacatcttaaagagatctgtgtgacc

SEQ ID NO: 125879 - DNA, 204 bp, Homo sapiens
atgttctcatttttgacgttaggaaatggagggtcagaagattagctggtggtgatagaaccacgattagaatccttatctgtccaattcatactttcatactcttcccccatattccagtatgaccctggaatttattctgtcaaatattattgttttctttctgtttctttttttttcttttttttttttgtttttgttgtt

SEQ ID NO: 125880 - DNA, 353 bp, Homo sapiens
ctatgcgtcaagcacccagctaagtattttagacataacctcattttgtcttcataacatgcctatgtagtttatcctcatccccgtttaacagatgatgaaatggaggatcagaggagatcagcagcaacttcccacagctgcacagctacacataaagcatctcctttaatgactgacatgaacatacctgtcaagcattaactatcagcattaatggaaacgactacagggaatggaaatggtatagccatcatctaaaaaccatctcccgggttggaaacccaccagcatttcccttcctggttctgtctggctcaggtgtacatggacaggaaaattaatttccatga

SEQ ID NO: 125881 - DNA, 478 bp, Homo sapiens
agccttcctagatcccacatcctcatccagttactgtcccatttttctgctttcctttatagcaacatttaagagctgttaatactgtctccattcctctcattcttctgaaccaattcaatcaggcttatcttcttaacactccaggaaatagctcttttcacagcctcagtgacctctacaccaccaaattaaaggtccaaacttcagttctcatcttatagggactagtaggagaatttgagacagtggatcactccttccttcttgagagtcagaacttcctaaccacatacgtaaaatagtgaaaaacctcatccctaacaccctagactccaactcttctctttcaccaggctctccccctcacaccgcttcactgaagccctgcacaacacctattgccacgacatatagatttacttttcatgaaatgtaaactctgtgattttggtcatgttacttaacctatcagaac

SEQ ID NO: 125882 - DNA, 181 bp, Homo sapiens
agacagttctcagggccacaaagaagtgaaaaaactccaggcaagctgtaaggtatttgatgcctttccccataatctgcccaccacgaagtgtgtggaatacttcccccaactcacagtttctacactggatctcagtcctggaaactgttccttaactcaatcaaaggagatgccaaat

SEQ ID NO: 125883 - DNA, 614 bp, Homo sapiens
ggagcttacactctagcagagggaggccagttacaaacaatatacacaataaatatacatgaaaggataagagctgtggtgaatggcacagcagagtaaaaagacaggaggaatgggtagagtgcaggatgcagtattagacggggtggtccttggaagtctaactgagaagatgggagctgaggaaaatcttgaagaagggagttagctggcagctccctggatgtgagctttcctgcaagaagctttggctagagcaaaggccctaaggtgggggtgtgcctggtgtgttcgagagatggcaagggagcccatgtggctgagcaggattaagagccagtgaggggaagaggtgatggagagccagagcagtcagttgagggctagagtcccagagtaactggaggcctgagtaactggaaggatggagttatccttggctaagatgcagaaggctggttggcagagaagatcaggagtttggtttgggttacctaaattgggaatctaatattgaattacatattaagattcaaaaattctgaaaacagactggtggcacatgggtaatatttaaagcatggccatcagctgacagtcgggataagagaagg

SEQ ID NO: 125884 - DNA, 234 bp, Homo sapiens
gaaagatcttcctcattgagccagatcagacatcagctccttagagaggctgaccctgttctctctcgagaccttccttccacagtatcttgtatatgcatgaccttcacaagaacactttgctttgtaggtgtctgttctgtgtgactgagctccctgaaggcaaggattatttttcaccaataccatgcatgtctagcagataacagtggtaaaaataataataatagcagt

SEQ ID NO: 125885 - DNA, 820 bp, Homo sapiens
agtcttgctggaattggttttggaactctaggtaataaatcagctttctctcctcttcaaactacttctgcttcttatggaggtgattcaagtctctacggcgtaaatcctagagtaggtatcagtccattaaggctggcatattcttctgcaggaagagggttatctggttttatgtcaccctacctaacacctgggttagtaccaaccttaccttttcggccagctttggattatgccttttcagggatgattagagattcttcctacctttccagtaaagactcaataacttgtggcagactgtacttcagaccaaatcaggacaatccgtaatgtatatgcccattctctctttctggagtttttccagcatacaatacatgcacgtgcacacacatacacacacatccattaatatacttcagtaagtatgtgagtggattatgaggtcttaaaatgctgggttttttttttttcaagcaatataataggtcttagatctgaaaactcttcattaggatttatcaagtgaaagaagtaaatctgaacattatatgtgccttgaataaagctatttcaggaaatatttaatgaattttctccctaaattatcatttgtaaacatttttattttaaaactagtttttattttattgaaaagtggaatttttagtgataaaatacatttgtaagtgtaaagcaatacagcataatagaatagaatataaaccgaaaggaagaactgaacaattaaggcaattctaaataattaccatttcaaaactgtttcttctattcctggttcataggaaagaaa

SEQ ID NO: 125886 - DNA, 318 bp, Homo sapiens
cgggcacctgtagtcccagctacttgggaggttgaggcaggagaatggcttgaacctgggaggcggaggttgcagtgagctgagattgcaccactgcactccagcctagatgacaagagtgaaactccatcaaaaaaaaaaaaagtcacagaaccaaagcatttatttttattcaataattggtcagattattttttctagtgaaggagatgagaacataggctttttgattgttttaaacagctttactgagatataactcacgtactacggtttacccatttaaagtgtatacttcagtggcttttagtaggaacc

SEQ ID NO: 125887 - DNA, 294 bp, Homo sapiens
tttatgaggaacagataaagggctgggagatacaggagaggtttgaaagacagtggataaaatgtcttaggatattccatctttcaaacaacttttaagtgttaagtgtgtatgttcttactctctgatattgtattctagacttccacgttttttgttgtcttaagattttcttagacaggcatgaggtgaatgaaccagttgtctcttttcatagattcttgaatatgtgatggttttcttaggtgagaattatgcttaaagagaaatctagatactctaatagggaacaaa

SEQ ID NO: 125888 - DNA, 512 bp, Homo sapiens
cccatggatcctaactggcccccttgcctcttctcagacctctctccaattctttcttcaccctccagtcagagtattctttaaaaattgtaaatctggaccaggtgtggtggctcactcctgtaatcccaccactgtgggaggatagcttgagcctgggaggcagaggttgcagtgagccgaggtcactccactgcactttagcctgagtggcagagtaaaattccgtttcaaaaagaaaggaagaaaaagaaaactttggtacagctaaaagcattatcaataaaatcaaaagacaaggcataaaagggagaaaatatttgcaaatcatgtaacagataaacggttatgaccggccgggcgcagtggctcatgcctgtaatcccagcattttgggagaaaaataaagtaaaataaaaaataaaaaaactaaaatgtttgggctatactttgaattctttgttgtgcgtactaattttatagtaaactaacagcttaaatcaagcttttct

SEQ ID NO: 125889 - DNA, 1045 bp, Homo sapiens
  misc_feature (1040)..(1040): n is a, c, g, or t
agctctaagtacactcatcttgaataggctaaaggttggtcttcaggttgtggcagtcaaggctccagggtttggtgacaatagaaagaaccagctctaagtacacctagcagttgtgtaactccctcatcattgaaagtggggcggatcaaaattttccaatccaaagatctaaagggtgggaaataataataatcgctcgtatgataaccacaaggtttctaaaggaccccttctacgatacttgaataccgatcacagaatgtctgaccgaacaagtctgccataatttcttccatgatctctcctctaatccattacctgcctgggatttaatattcttactagaagtcaccggaatcttcagataggatctggttcttgcgatcccgtgcgagtaggtaagagacccacacttccttatacgccaatatggtactttctgactgtccacggctcaagcgtggaagctatatataatactatttcctagccagggcattcggaagtaaatgcgtccccaatgatgtctactataaatagatgccggatacagaaagatgataccgtttggaattgcttagggttatggctgtgacgcggactgatatgaaagttcggattgcctcaggggttgactcggtgctgagtaatcacgctgtagtattttaccggtccggaatgtggaatcggcggagcttccgatgcgtatatcacgcgtccgtcaggataactccttcgttatacccacgggcggtaaaggatttaggggatcggcaggtccagggaagtactatgcaagatgggagcagtggtccgagccacgatccgcttctgtcacgaggggcgacgcctggttaacccgtacaaaggtgtgctagcaaacgagaagggggagcacacccatgcctcataggagagggttgaccacagagagggatgtggttcccctagggcgtacaggaagcaccctgtcataattatgattgcccacggagatgcggccacacgcagagaatgttttactatacagagatcgnggaag

SEQ ID NO: 125890 - DNA, 333 bp, Homo sapiens
agctctaagtacactcatcttgaataggctaaaggttggtcttcaggttgtggcagtcaaggctccagggtttggtgacaatagaaagaaccaacttaaagatatggctattgctactggtggtgcagtgtttggagaagaggggttgaccctgaatcttgaagatgttcagcctcatgacttaggaaaagttggagaggtcattgtgaccaaagacgatgccatgctcttaaaaggaaaaggtgacaaggctcaacttgaaaaacgtattcaagaaatcattgggcagttagatgtcacaactagtgaatatgaaaaggaaaaactgaatga

SEQ ID NO: 125891 - DNA, 706 bp, Homo sapiens
gctttttagttaacatctgaattcttaaaatctacttttcatttgagaaataattacaaaaattagtattgagcaagttttaatatacttattgttaattaaaatattgatgccaaataaacattgtactttaaaaaaaaaaaacaacctgggcttgcccatttgagctaaaataggaatctgatcttgcttgcttgtaaagtaattttcctttttagagatttgggtttctttgaggggactcaagttagattttgtgaagtctgttttaatgttgttgtttagttataacgagaagtaaagtttttttggaatgaactgtagaatttagtttattgttaaaagtctaatttaaaggtattatttaaaacaaacggtgaattgtgtgtgaattacatctcaataaagtcattaaaaaaaacttcagtgtcttaatagattactatgacttttttttttattatactttaagttttagggtacatgtgcacaacgtgaaggtttgttacatatgtatacatgtgccatgttggtgtgctgtacccattaaatcgtcattgacttattttattatcaacattccattgattgtttttttgtagaatgatcagtgatgtttaagactcatttggttaattgacataatgtataagtaaagagtaggtgtattacgtttataacttattgaatttgggagaactaaatt

SEQ ID NO: 125892 - DNA, 378 bp, Homo sapiens
acaatactgtaggaaaggacacctctacagagatagcaagagaaactaaaaccttaaagtaaggttacaaataacctaggggatgacactaatttcatagcaagaaaacacaaagggttataaaaaagcatagtaccaataaatgcaaagaaaaaaacaacctaagtccaaaagttgattaaaggtccacagaagaaactgtacagtgtttaaaaaacaaaaactacaaatatactgatatccgtatccatactatatatgaatatagaatagatatgaccatatgtatattgttacacactgttttttagcactggttgcagaagtcaagatcaacactcaccctgcaggctaagtaactgtggtaacagatgtgtg

SEQ ID NO: 125893 - DNA, 544 bp, Homo sapiens
aggcgttggaccagggactggggcagatggtgactaacacgtggttctgaccttgagcaactcagtgggacaatgagctatttagcaagtatggttcatggccccatgatgggtatgggacctgggagacagtgaaatggacctctctgagcctgagttccctgcagccatgggggtcctgtctgttccgcccacctgaccacctggttgtgaggattaaatgaaataacataggaggaagcacctagtccataacagacactcaactcattttcactcattcagaaggttgttttggttcttctcaaccacctcctttgttcctcaagttccagtaaaagaatgctaattagtcttcttgaagcagaaatagctgagtgtgcatgaccctaaatgaccccccgggggttattgttctgaggctccagctcaccccaccacccacagaattgacagctttggctcatcccttaatgcctgaggccaatgtgcttcctttcctatttttcatttttcttatctctaaaaagggcctgttaagacc

SEQ ID NO: 125894 - DNA, 413 bp, Homo sapiens
aattcgcggccgcgtcgacatacaaattccctgcagccatgggggtcctgtctgttccgcccacctgaccacctggttgtgaggattaaatgaaataacataggaggaagcacctagtccataacagacactcaactcattttcactcattcagaaggttgttttggttcttctcaaccacctcctttgttcctcaagttccagtaaaagaatgctaattagtcttcttgaagcagaaatagctgagtgtgcatgaccctaaatgaccccccgggggttattgttctgaggctccagctcaccccaccacccacagaattgacagctttggctcatcccttaatgcctgaggccaatgtgcttcctttcctatttttcatttttcttatctctaaaaagggcctgttaagacc

SEQ ID NO: 125895 - DNA, 288 bp, Homo sapiens
acctccgcctcccaagttcaagcaattctccttgcctcagcctcccaagtaactgggattacaggcacccgccaccacgcccagctaattttttttgtatttttaatagagacggggtttcactatgttggccaggttcgtctcgaactcctgacctcgtggtctgcccacttcagcctcccagactgctgggattactggcatgacccactgcctgtggcccataatgagtatattctatttaagaagatacattagtatattgttttgcagcttggggttatttct

SEQ ID NO: 125896 - DNA, 589 bp, Homo sapiens
ggctcaagcctataatcccaggacttagggaacccgaggcagtaggattgcttaagctcaggagcttgagaccagcctgggcaataaaggagaccttgtctctacaaaacaaaaaactgtcccaaaaaaaccccagaaaatggtgtggtgttgcatgtctggtcccagctactcagaaggctgaagtggtaggatgtcttgagccccagaggtcgaggctgcagtgagctatgattgcgctattgcactccaccctgggtgacagagcaagaccctgtctcagtcaatcaatcaataaatgaaatttttgtgtgccccatggacacaaagatgttctccctgtgttttaggagttttttggttctggtttcacatatagatctttgttccatcttgaatttttgagatggagttttgttctcccccatattgatgtccagttgtttcagcaccatttaccaaaaaattgctgatattggctgggtgcggtggctcacacctgtaatcccagcactttgggaggcccaggtgggcagatcacttgcggtcaggagttggagaccagcctggccaacatggtgaaaccccg

SEQ ID NO: 125897 - DNA, 503 bp, Homo sapiens
gatgatgacaacagatgacatttattaagcgcttactatatgccaggccagccccttttctaagggtttaatacacattatatcattatattccctacttcaaccctataagaagtgttgccattctccccattccacagatgacgaactgctggctcagataccttaggtaacttgcccagagattcctgaatcataagcgaaggctctttgcactcggagcctttgcttgtaactggtgctccccctcacctccctgccaaggcttccacaggagctgcagcacagttggctccagtctgacctggccagagcaaggagaagagatgggtttgatgcttgttgaagtgggagggggtccatgtgcttccgatgtcagtgatgctgatgccaagttccaggaacagggatgctcagccacaccttcatccaggccgagggctaggcctgaaaggtgtgcccctcctaaataaaaaataaataaaatatgtatagagagcatc

SEQ ID NO: 125898 - DNA, 427 bp, Homo sapiens
aaattgtgacttgggtaaactgaatttgttctcattctgcatagacactggatggtttaggaaagcttagtaacgttagcataatattatggctgtatgatttcatagtctggttcagtttcattggcaagaggaggtgtgatattgtagagttttgaactaaaaattgagacttcagtcccaggtttgacattattacttccatgctttgagagttaaagtatgtttgttttctcacctttaaaatgggcttatcattacttgctttacacagctcatggggttattgagaatcagataagaaaatttgcatgaaagatttttatcaatgtaaaggattgttattgcgttgtagacagttataggtatatctgttgttttcactcaaagactcaatttttctttctgaaaacctttttttttaaga

SEQ ID NO: 125899 - DNA, 147 bp, Homo sapiens
gctgccgttgaagaaaaatcagctttctcatattactcacatatatatattattacataacaatgtgttaaattggactacagtgaatcaaagagttattgcagcttctgaaggtgacagacttttaactttcagatattgcttaat

SEQ ID NO: 125900 - DNA, 225 bp, Homo sapiens
taggcgccctctgttcacaaagcatcacagctactattgtctgaagaggccaggaaagctgtctgaccagacctttgctccgatggtccagagcagattggagaaggcccaatcgttgcagggaggtgaggcagaagtggctggtgcggaccccacagccatgcccagccccctcgtgcctgaccttcctccgtccatgaacgctgcacattagaccctttccag

SEQ ID NO: 125901 - DNA, 454 bp, Homo sapiens
atcctactctagtccctttcctcatgcaacagctatgaaatagctggttagtactgacagcaattcttggccacaaacagaaccagttctatagtggaatgaaacttctagcagccttgcttaaactattcattcatcaacacactgtggtttctgccgtagaaggaaaggaacacgaatacacaagaagtgaaaaaaaaagaaaggcgtcttagatgccaatcttttaaaagtttattttaaaaaggatattgggggccagtcacagtggctcatgcctgtaatcctagagctttgggaagccaaggtgggaagatcgcttgagcccaggagtttgagactagcctgggcaacatagtgagacccccatctctaaaaaaaaattttttttttaaatttctaggcatggtggtacatgcctgtaatcccagctacttaggatacagtagggaga

SEQ ID NO: 125902 - DNA, 437 bp, Homo sapiens
gaggaggggccaaggcagaaagctgatcagaaggcagaggtggacgggggcagggacatcttcagatctgggcactcgctgccccacatactgtggatgctaagctgggagacagggacacgggagcccagctgccatgtgggaaccgccaggccccgggtatatgcacatggctcaattccaagccccaaggggacagacatggagatgcgggcactgatgaccctcatgcctgtgctggggccagtgtggaagggagaaagggcatgagcccagcagacctggcagagtgtgggggagggaagaggacactggattcaggaacaaaaggctccaacaggtggagtgaatgggtagcttgagaaggagcaggtgttgcgcacctgttcctacctggcagggctgacctcggggtcacagcccatcccagcacatac

SEQ ID NO: 125903 - DNA, 480 bp, Homo sapiens
ccaaagttataaaaaaatattgtttcttcagagttttattttggaattatggatgagggattgtgggcttataattaattctcaggttgtcatgaggaatgagagtgtggtaaagctcttgaaacacatcatatggtaggtatgtatgcaatctcaatttggaacaagatacaaatgtccaagggagtggatttttagcttgaaggaagaaagttgctacaatggacaacgtacagctctggaaccagctaccttgaaaagttgtgcacaaccaggggttgaaggtgccttagaagagagtcttcctgtggtgggagggtgacagaattcattgtttatgaacgttggctgcagatgatttccctttcatgtatcagaggggaaaggcaaaaaatggtatacctgtatgtatgtgagacgcaggattatcatacatatatttatttataatcaataaatattttactgcataaaaaaaaa

SEQ ID NO: 125904 - DNA, 887 bp, Homo sapiens
atgaaaagcaaaatggaaagaggacagagttaaacttcctatcaataatcacatattaaatgcagacgatataaacacccttattttaagggcagattcttcaagttgaataaatgctcacctccaaggagcactcgctttaattataaagacacaaaagagttaaaagtaagaaggtggaaaggcatataccacattaacactaatccaaagaaaactgggatgacgatattagtatcaaaatagattttagaacaaagaatgttaacagtattaaagaaggttatttcattatggtaaaagggtcagttctatggaaggacattaaaaacactaaacatgtatgtacctaataacagagcctcaaaatacatgaagcaaaaaatagacctgcaaggaaaaataaataaaactacaagtataatcacttctccttctgtaactgatggaagtgtacagaaagtcagccgggatataggaaaccatgaacaaacccatcaaccagcttgacttaactgacagttgtggaaagaatcctctgtgctttgttttcaagtgtacttggaagggttattaagataaaccatattttagtccataaaacaagtctcaataaatttggaactattcaagtcatacagatgtgagctctaaccaaaacggaatcgtattagaaaccagtaagagaaagatctctagaaaatcccccagatattaggaaagtaaatagtattattttaaataacaccgggatcaaagtagaaatcaaatgggaaattagaaaatattggaaccaaatgaaaatgaaagtacaacatatcaaaatgtgtggaatgcctctaaagtgtctgtaagggaacatttctggcacaaaatatctatactag

SEQ ID NO: 125905 - DNA, 366 bp, Homo sapiens
tggtctgttgtgatagtagagacactcttccctccgacgcagcatctctgtgtggctgcccctcctctacctctccaaacctatggggcttgagagggattttataatccaacactgcactcccctagggtgagcctttcttatctagaaggcttctttagaagatgcttctgagaattgccacatctgggccactctgggcaatttgcctgtcttctctttccatctttgcagcccttgtgcctgttcaatcaacagttcccacttggggttggggaaggttctccttcatctggacatttccagagtcatccaccatagggtttcttcctggctttgcaatggtctgcctgccctgaggctctg

SEQ ID NO: 125906 - DNA, 409 bp, Homo sapiens
ttggcacatactattcagtacatttcatcctcctggttacagtggcaggaatcatggatgatcagaaggcccaatacaaacaatgaaactcatggtgacatctgctgagggattctggggaaaaatttccccttacttagagggcagatactgaaaatatgctgtcttctttcttaaagatatgaacaagaaaacacataaatctgctgactgcagtggccaacttgagaaaatgagagccagccttaagacaaagtagaaactataactgctgtccaaaacagtagcctctggctacatgtggttactgggcctttgaaatctggctagtccgaattaagacatgttgtaagagtaaaataccagttttgaagacttaagaacgtaaaatatctcaatttttatacta

SEQ ID NO: 125907 - DNA, 280 bp, Homo sapiens
gggggtcttcgtggagtttgttggtccagtgttcaactcttttctcttttctcctctgagctcctacagttcccttctggccacatcctgcctcctggtccagggcacctcacacagatgcagccctccgaacacacctacccaagagctctggggttcagggaagtccccctgacctcctcaggccctgttccctgcacgctcagctctaccatgcagggtgaacaggagcacacttttgcaccttctctctgctggccaagggggcccagaggggcgg

SEQ ID NO: 125908 - DNA, 424 bp, Homo sapiens
atactgacccccggggtttgattaggagtccctcttctgtgctcttatagtccctgtgcttctctgtatcacaatttggaccaattacttaaattctctatgcctacatttctatctgtaaaataaggagaaaacagtatccacctcatagggttgtgagaattaaatgagttaatacatataaagtacttcaaatagagcatggcacatagtaagtgttcaattattaccatgttatttttgttgtaattgtctaactagtacactgaaatatctaagcagaaattggtatttgcattcgtgtctagcctggcatatagtagatgcttggtaaatatttgagaagagaattaagggatctaaggttggggcaggaaggtacaatctaaattaatggtagaactggagatttagaggattggga

SEQ ID NO: 125909 - DNA, 255 bp, Homo sapiens
aaatgcttgggaccagaactgtttcaaatattgaattttcttcagattttggaatatttgcattatatgtacaaggtgagcatccttaatccaaaaatccaaaatcaatttcctttgagctttgttaaaagaaaaaccttagcctaattaagtttaacagagtttaattcatgaattcttgaatcaggcagcctcccaagccagagtaggctcggagactctggcgcagccacgtggtggaaaaagctttataga

SEQ ID NO: 125910 - DNA, 636 bp, Homo sapiens
agctgaaagtggctggtgttcttcatagggcgatgatggcagtggtcagaggggtctcctggtgccgtcctgctggagctccacacatccacgctgcggttgctgccgaggttcagctgtgggagccactgggcagcagcatgtgagggccaagggtcttactggccacgacgctcaccctgtgtgatgctcatggggcctccactgctcaggtgcaggtgtggccaggatggaggccacggtcctgggcttggctgtggcccagccaccctggctggtgcctttcatcttgcggaccctgagtgctgtctcttgtgtcctctgagtcctaggaagtgaccgcagtgggagcaggaccgtctgagtcctaggaagtgaccgcactgggagcagggccgtctgagtcctaggaagtgaccgcactgggagcaggaccgtctgagtcctaggaagtgaccgcagtgggagcaggaccgtctgagtcctaggaagtgaccgcactgggagcaggaccgtctgagtcctaggaagtgaccgcactgggagcaggaccgtctgagtcctaggaagtgaccgcagtgggagcaggaccgtctgagtcctaggaagtgaccgcactgagcgcaagaccgtctg

SEQ ID NO: 125911 - DNA, 256 bp, Homo sapiens
atgtaacacaatcaaagggtgtgtctgtggctctgccctttctaggtacccagaatcctcctctgggtcttcagctggcagaggagaaaaagagggagcaggatcgtgtgtgaaggctttatagagcagatactctgcccacattctgctggccagaacttgatcttccagtccatctaactggagggaggctgggaaaggccagccatacgccattgttatcagtcctgaccaggtgcttggtgaaccatggtct

SEQ ID NO: 125912 - DNA, 470 bp, Homo sapiens
ttttttgtagaggtgaggttttgccatgttgcccaggctggtctggaactttgaagactcaaaccatcagcctgtgttagcctactaaactgctggtgttacaggagtgagccactgtacccagcctagaatttaaaatcagatagatacccttacaggtttgctaaacttattggggaaagtttctatagatttattgtggaaaaatggaacatctacaaattgttaagattgccttcagaaaatttttgaaatttttaataggatcaaagttgggtaattcaagttttttctttttggatttgggcctaggctttcacgctgaactctgctatcttttcaaattgaccttcagttgagatttctgtatacaaccaactgcatgctaggcacctgcaacccacagctgaaaagctaatgtgtctaaaatgaaatcttccctcccagaagctctgtcctgtgttcctagt

SEQ ID NO: 125913 - DNA, 679 bp, Homo sapiens
gtcacaaatcagagcattaacttagtttggtgataggcaatgggcttcgtgaacaatttggttacttcaacaatttggtaagctattcttacatcaacatatttttaaaaattcttgccttccccaattttagtttgggcataaatgatactgacagagtataacatctctcattccatgatcattttatctgtgtggcaggtgcctcattttcctaacaaggaaattgaaggatgaatctatatcatagtcagtcaccttattaaaaaatttttattcttctaatccactagaccaggaactcggttgtggtgacacaccatacactcacaaatactcctcagttgaatgtttaatgaaatgaaactctgtgaagtgtatcacacagttgtttacggagtggccatcctcccctgcgtcagttcagagatttgcctgctgctgggatttctcattaggcaccactgctaccactatagccctgtgaggtggcaaaaatgaagaagtggtgctgtaccccatttaatattctggcccaagtatagtcccccaaggccctttccttactgggacccataatatatctgaaaccaggcaagtcatgaggttgggtggaacacagacatctgtggctttttaaagccccaagtgagtctgatgtgcaggcagggtcgagaac

SEQ ID NO: 125914 - DNA, 503 bp, Homo sapiens
gccctccatgcctgtggggctatcttggaagccacatgctccctgccatgccctagtgacaagtggccggactggagctgtaatcttatcagtctggacctggacctgggccccaggcatcctcctgccatgtcctagtgacaagtggccggactggagctgtaatcttatcagtccggacctggacctgggccccaggcgtcctcctccagggaggccctggtcctaggacttggggaaaagcattgggttctaaggcagtatccctgacctcctgggcctcagtttccctacatctgcccaccgggctgcagccttcctgggccccctgagctcctgcctgagagtcccctgcagatctggctctgacatcccctcattaaaggggccttcctcagccttacccctgagtggccccagcaggctctggccctcgctcccgctctctggatgttggataagtcgctgctgagtccctgcagggaggcgtctggctagagcag

SEQ ID NO: 125915 - DNA, 629 bp, Homo sapiens
tcggtacccctgctctcagccagttcggagtgcacattgcccagagctgacagtgacttcttgataattcctttgcctcgtccagctcggcctccctctgcgtcccagtcttgctgaccttggtcacgtcctgccagggtccaccagatacagcttcccactgagcttctgctccgtttccatgttctcctgcttgattttgatgaggaagatgctgtgcgtccgagagctgtgttcattggtgttgttgcagccaagtgcgcatgcgctgagatgggtgaacccatgtgtttgggaactgcgaggagcccggtggctggaccaggggatggatgtgagttgcagaaggtggagaaggtgaagaggtgacagggccaggcacatgggaggagcccggtggctggaccaggggatgcacgtgacagggcgagaggcattgagtgagtctcagaagggggaaaggtgacaggaccaggcacatgggacccgggcatgtgagccttgtgggcttctacgcagacagagacaggaggttcctggaagctatgaggcttctgggctgttatcttgaggctggatggaggagatagagaatggagaccagtctggggctgctgaggacctgctga

SEQ ID NO: 125916 - DNA, 279 bp, Homo sapiens
gatgaacaaaacaaaaactccttttcttgaaatctagaagagacatacttaaataatatgatgtgaaaaatgatattattttcatgaactaatttttatagaacaaatggaacaagaagttggggaaagcttttcaaagcaagtgatgtatgaactaggccttgaggaatccttacaattttggcaagttgagattacaaaggtattcaaagttaatgaggtaataaaagcaaaaggcagagtccttcatatgatttgttacaagaaatggcagaaggg

SEQ ID NO: 125917 - DNA, 496 bp, Homo sapiens
ctcatacagcatttactaagtgctatgtactgttcaaaacatattacacatattcacacatttcatcctcccaaaaagcctatgaagtatgtgctgtattatccctattttacagataagaagagtgaggctcagcaagtaactaagccaaggctattcagccagtaactgggagaactgtaatttaaacccaagcagtctgactctcaagtccctgcttgttgtgtgtgtgtgtgtgtgtatgtgtcagtgcagtggcgtgatctctgctcactgcaacctctgcctcccgggttcaagcgattatcctgcctcagcctccagagcaactgggattacaggtgcatgccaccacgcccatctaattttgtgttcactgtgtgagccaggctggtctcgaactgcagacctcaagtgatccgctctcctgagcctcccaaagtgctgtgattatgagcgtgagcccctctttttctgttgttgccttaccttaaga

SEQ ID NO: 125918 - DNA, 145 bp, Homo sapiens
aaagaggtgaagctgccaaaggaaattaaaaaaattttaagtctggctgggtgtggtagctcatgcctatcatcccagcatgctgggaggctgaaatcaagacttcttaaagaatagagtttttttcccctcaaatgatcattaa

SEQ ID NO: 125919 - DNA, 377 bp, Homo sapiens
ctttttcatggccgaataatattctattacatatatttatcacgttttgtttatccacttccctgttgatgaacatttgggttatttaaccaccttttggctgttgtgaatagtgttgctatgaatattcatgtacaagtacctatttgagtacttgctttcaattcctttgagtatagaactaggagtggaattgctgggtcttatcgtaatcaagtttaatttgttgaggaatcatctaacgcaggctgcatcatttttccctcccatcagcaatgtgtgatgctttcagtctctctatatcctcaccaacacttataattttccattaaaaagaaatcatatggctgggcgtggtggctcatgcctgtaatccc

SEQ ID NO: 125920 - DNA, 484 bp, Homo sapiens
tcactgcactatattattttaccaataaaaacctaagaattaatattaaagctgtacatagcacaggactcatctaaatatccttcctaattttcaagcatcaaactgaccccttctagctcactgccaagttgtgatacttttttattttcattacaccccaacatctgataacataatgagaaaaattagaacttatccatggcactctccttactttacccagatacaggtataataagtcttccatgttgattctgaagccagaccgtctgaatttgattcctgatttgctacttattgtgtgactttaggcagattgcacgacctctctgtgtttcaatctctccccatctatgaaatgagattaataatagcacctactcacaaaggcccaaatcaatgtccactcaagagcagcagttgcaagcattacttatctgtcctgatctgagaagtatgacatgagataaacacactggcc

SEQ ID NO: 125921 - DNA, 462 bp, Homo sapiens
ttcccctcctgttaagttccaaaatctttccaaagagcccataagttttaactcaatattaaattagaatatatctatgaatacccaatatttgtcaacaggcagtatatattaaattctccttggtcctactttactgtttacttggaattaataggatgcatctcccaaattgcaacatggagggtaggttggcatgcagagtacgttactaaatctccattgcccagaccccaataaatccctgtaatatggctctagtggactgaggaagaagtatctcctgctccctctcgactaggcagactgaagcagtcagtagtactttgactagaagcaataattccttaattgcctgttgccctgctgccaagattctctctctgttctttgctacagctattaatgccaatcaacttaaggccatactgtgttaatgaaaatctagagtctctggatgga

SEQ ID NO: 125922 - DNA, 211 bp, Homo sapiens
cttggtacccaccggctcactcagacactgggaactgagtattcctggggttcaaggaggtccccatactggggtgaaggggctacctccaagtcttcctgactgtggcctgtgttgggccaggggacttgcctggtgccatcaggagcctcacccatgatgggattcagttgggagggccctagagcaggacacgggttcccatactcag

SEQ ID NO: 125923 - DNA, 491 bp, Homo sapiens
ttttgtatttttagcagagacagggatttgtcatgttggccaggctggtctagaactcctaacctcaagtgatctgcccgagtcagcctctcaaagtgctgggattataggcgtgagccactgcacctggccaatcaggcttttgtgacactgccagaactgtgtttgaggaagattagactgaccttgtatgctaagaattcccaggaaaaaaaaagggagatggtttaggaatctattcagggagatggtttaggaatctattttatggatgacaaaggtctgaattacggtggtggccatagaaatggagtgggtagggccagtgtgggagaagtctcatgggaagaatgggtaacagtctgtgctcatctgggtttgaggagtgaaagaaagaggtgtggaaaatacataaagagggaagtcgggttatacaaaggagaggagaaaaataaaggaggttataccaaaggagaggagaaaaaataaag

SEQ ID NO: 125924 - DNA, 281 bp, Homo sapiens
gctggttcactggaccatgtttgaggttctgctgataactcttcagcagaagtagctcttcatttacttgtttgtttattgatgtattaactcatgtatagcatgcaggacatgcaaagtattctatttaaaaatagcctttgtaacctcccacaaaaaagttcttattaatcaatggtgaatcacataaccaatagtctggaaatatagaaactcagatgttatgaaatctctgggctgccataaaatattatctttcacctacttcccagacctggaga

SEQ ID NO: 125925 - DNA, 957 bp, Homo sapiens
tttgcaccgcggcaggaaggccacaaagtacttaaaaagccgtcaactggaatgggggtagtgttctttccaggcccgctttttccaaagttaaaagcctctttatatgaaaaccatgtaaactctcagcagccccctttgcttcactgccttttctagggagtgcattagagtcatttttacgtctgtagtgctaaagggtcacctagttaggagctttaacatcggattcgctgagagggtcatcggtttttgattcttctagagtaggcctccaccaagaagggaatacgtctaatacttgggatctgtggtttgcaacacaagtggtatccctcagactcctgaaaagggactatgccgtgacttccttccggctgcagtgagatccgaggtgtttacaccaccctagttgccgaatgcagcctttgctcagctagagtgtgtcctctgacggagcctggcctctgtttttgtctctgtgtgttgtgtgtacacactgaacgtggacatcggatagttcttttctgtgcctcctcagagaggcttggcttccaaacctgggagtttgttctctacccattggctagaaaaggccgtccataaattagtatatccaggtgggactagcacgatgccacgcacactgaacattttctgcagaggggcgttagcagtggaagtagagacacattctggtcctcctttagagtcaagccaatgctgttgctcgtgtatttgtgcacaattattcatctccgttgatctgacacactctcttgaaatcactagattatgaaacagatcttcacctcctgattccaatactgcctggtttcaacacaggggttgttttatttttttacttctcctagtaaatagagatgtgtataatttttgcccattttatttcttgagttgtctgcaccacttcttttcttactctgaaataatgtg

SEQ ID NO: 125926 - DNA, 463 bp, Homo sapiens
agctgggattacaggtgcccgccaccatgcccagataattttttgtacttttagtaggaacggggtttcaccatgttggccaggctgctctcaaactcctgacctccagtgatccacctgcctctgccttccgaagtgctgggattacaggcatgagccaccatgccacgcccacatttgccttttttctgtttttgttttctgtgcaccccagtggattggatgttgcctacacacattaaaggccgattttccccacctagtccactccgactcacgtgacaatgttctctgtaaacaccctcgctgtaaacacagacacacccaaagtgatgctttatgaggtttctaggtattccttaatccagtcaagttgatacctaaaattaactatcacatgggctggaatgggtttgttaccctcatcaacctctgcccaggaactggatcccttcatgaaacc

SEQ ID NO: 125927 - DNA, 328 bp, Homo sapiens
tcctgtccaccgaggttgtagagtttgaggggttagttcttaacaagaactgaccgtcgggctaggatgtctttatatggctgggtatctggagtgggtaaaaggaaattggcagctcagcggatttcatgtctagcttgttgaaggactggaagatagttaccaagagggctggtgtctggaatgaggttgggcccatgtaaaaatgtgcggccatataggagatcaaaggggctataccctgtgggttcttgaggggtggctcaaatttggaggagagcaaagggtagaagaattgtccagtcttttttgcgttggagggtgagtt

SEQ ID NO: 125928 - DNA, 842 bp, Homo sapiens
atgcacgtttgttctggaaaagatagaatttgtctctaaaagacttgaaattgtaattaaaatggcaagctaatcaaacataagcttcattaagtgggattctaagacagtctgtgtttttatatttcaagggtttaaccctttgagccttacatctcattcactgtctttctccaagaaaagtattttgggcggacagtcagatcaagcagtaaaattagctctttcaaatcttcttgtcatgtaaaatgaagctagtctgttttaaaatttttagttttggattgtatactaatgaaaatcttaatgatgtttttgatttttatatacttattttaaagaaaatcttatatagtacattttacaaaaattataaaaaatgaattagtactggcgaggactaaatgaaacaataatttttcattttgataactagctttccaggtggacttagccataggaaaatattactaatgtaatttaacaaattgctgcatgtattccatttaaaaatatgtttaaattgtcctaaaacaaaataattttctccctaggagtatgcatttggctacagtgttttgaaacagaaaccttagaataggtcattggtatgggctgaactgtgtatcccccaattcatttgttgaggtcctaactcccatttcttttgaatgtgactgttcggagatgaggcctttaaagaggtgacttaagttcaaaggaggctgttagtctaatccaacatggtgtcctttggacataagagataccagcaatgtgtgcacagaacaaagaccaggagaggacacagtgagaaggcagttatctgcaagcaaagagag

SEQ ID NO: 125929 - DNA, 216 bp, Homo sapiens
agccaggttggaagtgtgtacaggtatctgagggtgtgcacgtgagcaagagggtgtgcaagatgtgggtgactgttgggaccacagagctgaggcctgtggtcagctcaggtcagaactgggaggtctgtttcccttgggaggacctgtctgctctgagggggacccggacaagtgcacatatgcatgtgtgtgtctacacacacacacacacac

SEQ ID NO: 125930 - DNA, 352 bp, Homo sapiens
ctcaacaaagattattttatcagtcaatctgcaccttcaaaagtgctttgggtttgcccctgacaaccacctgccggccagcgagtgagtaaaagagctgggcctaatgcatccctcgagggctttcttctgcatttctagactgtcatgcacaagatcatgcaaacaccaagtgctcaataagggctggtggagttaaacccaggacttctggttttcagccctattctctgtccacagcaggtcctactcctcaccccctccttcatgcgtccggcttcttggtaggtgaggctgagcaacttttttaaaaggctgtttcatagtccaggccaaaggctgagccggggag

SEQ ID NO: 125931 - DNA, 719 bp, Homo sapiens
tgaagggtaaaatttttcaccagagtaaacttgagaaaccaactggaccttgagtattgtacattttgcctcgtggacccaaaggtagcaatttgaaacatgaggagtacgattctactgttttgtcttctaggatcaactcggtcattaccacagctcaaacctgctttgggactccctcccacaaaactggctccggatcagggaacactaccaaaccaacagcagtcaaatcaggtctttccttctttaagtctgataccattaacacagatgctcacactggggccagatctgcatctgttaaatcctgctgcaggaatgacacctggtacccagacccacccattgaccctgggagggttgaatgtacaacagcaactgcacccacatgtgttaccaatttttgtcacacaacttggagcccagggcactatcctaagctcagaggaattgccacaaatcttcacgagcctcatcatccattccttgttcccgggaggcatcctgcccaccagtcaggcaggggctaatccagatgtccaggatggaagccttccagcaggaggagcaggtgtaaatcctgccacccagggaaccccagcaggccgcctcccaactcccagtggcacagatgacgactttgcagtgaccacccctgcaggcatccaaaggagcacacatgccatcgaggaagccaccacagaatcagcaaatgg

SEQ ID NO: 125932 - DNA, 778 bp, Homo sapiens
gtaagcatgcatcttcctcatagcattcattcgtctttatattcaagcaaaagttactgaaggcctatttatttgctgagtttaagatagctcactatggagtccaggcccctgtactccttctgctgaattactgcagtaacctcctaaaaagcaaaagttgtttttttctccttcatccaccattgttctttctcatctatccccactcaacattcagagtgatctttctaacacaaaaatctgattatgtgaaccccaagttaaaaccttccaagggcttcccaatgctcttaatataaaatccaaactgtcccatatgatctgacctctcccaaactctccagcctacttttatgccactttcccctttactctctatactttggccatatttgacttctctcacttcctcacccctgtgttctcacagtacaatgtacatacgtttataacattgatcccactgtactgtattctctggtttgcctttcctcactagaatgtaagctcctcagaaggcagtgagaccatgctttatattacccttgcactcctagtttccggcagtgttgactcaaacatttgttgagtaactgagcaaataaagaaaaatagaaaagacaggagaaggaggaggtaggctaggggaagataattttgtttttaaacattaagttttaggtggcactggtttagtggaatagaaatgcacaagaacaatagagatcaggtctgcatgtattgacttggaagttatgtacatagaaataatgac

SEQ ID NO: 125933 - DNA, 283 bp, Homo sapiens
tgagagcccagagagggtgcctgtgcatgtatacacacgaacacacatgcctgggcaaaggtggggtgagctgaggagaacagaccacattcttagccaggagcagggcggggtccatctctggtcagggctgggcctggctgctgggtggcctggttcttcaaagtcaccccagactcaatgggctctcaagtctccttgtatctttgtccctttcatgaacacacaacagaaattaccaactaagtaagacagtggtggctaggcacaatggcacgtggat

SEQ ID NO: 125934 - DNA, 329 bp, Homo sapiens
agagcagaggcccaggagttcgaggctacagtgggatgtgatcacaccaccactccagcctgggtgacaaaatgacaccttgtctccaaaaaaaaaaatctactgttagcagaattcaatacagcttacctctccaaaaatctactgttagcagaattcaatacagcttaactctcctgtggagacctttgttttagcctcatacatccttggagaaaaaaagaattcaactttacagaaaaatagcaaaataggagaactcttcttaactttcatgctcattaaagtgaaaattaattaagaagacatctgaggtgtttttttttttg

SEQ ID NO: 125935 - DNA, 244 bp, Homo sapiens
atacaatattaataactcttggaagccttaggatattggatagtacaagcaacttggaagagacattcactcttgaaggaaagacttctgagtattcagtgtaaataggctgatttaaataatggtgtgtttcaggtaagaaaatgttttaagagacagtttagtatgttgcttttatatttagttggtattgtttgctcagaagttcagatcattatgaggatttgtgggtaaaattgcatcc

SEQ ID NO: 125936 - DNA, 612 bp, Homo sapiens
tattattattattattttagagacagggtctccttatgttgctcaggctggtctcaaactcatgggctcagatgatcctcccgccttggccccctctgtagtgccgaaattacaggcttgagccactgccttcacccggcctcaaatattttttctgccccacactcctctctttctgggactccaatagcttgaatattagactttttgttgttaccccacaagttcctcagactgttgttgtttttcaatctttttttctctgtgttgctcaggtttcatattttttattgatctatttttaagttcactggctcttcactctgtcatctctattctgctgttgtgcctacccagtgattttttaaaattttatctttcagtttcaaaatttccatttgattagtctttatgtctcctcttttctattccaatactttccattttaatatttgtttcaaggatgattgctcattcaatcatttttataaagctgctttaaagtgcttgtcagattattccaacatctgcatcatcttattcttggcatctactggttgttgttccccatttgaattgagcatttcattattctttgcatgctgagtaatt

SEQ ID NO: 125937 - DNA, 349 bp, Homo sapiens
tccttgaagttataagagtatgccacttctgccactacccatcactgtatttttctcctgttgctgcaagtctctacttagtatgacctttattggatcatgttttgagtctcaaaacgttgaaattatttctgcttttagaatttaactctacttaatacagtcataaatattaacttaaaaagcacaaaggcaggccagatgcggtggttcacacctgtaatcccagcactttgggaggacgaggcaggtggattacttgaggtcaggagttaagagaccagcctggccaacatggtgaaacaccgcctctaccaaaaatacaaaaattagcaggacgtggtggcgc

SEQ ID NO: 125938 - DNA, 294 bp, Homo sapiens
gtcactaggagagaagtagaccatcatcgctgcccgacttttcagttatcttctggttttgtggtggttgtgcttttgtcactttacatgaggtaaaatgggtatgcttttgtcactttacatgaggtagttgatgttagtaatgcgcattaagatagaaatatcttgtatttattgataaattggattttttttttatttttagagacagggtctcactctgtcccccaggctggagcacagtgacgtgatcaaggctcacggcagccttgacctcctgagctcaagcaatcc

SEQ ID NO: 125939 - DNA, 536 bp, Homo sapiens
cacagccaatgtgtatccacccctggagacactggctgtggtcacgtgtttcttagtattgtggaattgtgtaatgttggtccctttcacttttcacctaataaaaataagccagtgtcaggaccacttgctgaggcatgtgtaccaataggcacaggcagcccaagttgtcccttgctcacccctgaccctgaccccaggaagcagcctttgggggctccccactgcccacagcggatgtttagcaatgcaacatctggaatttagtaataataaaaaactattttaaaaagtactttttaaaggctgggtgcggtggctcacgcctgtaatcccagcactttgggaggccgaggcagttggaccacctgagatcaggagttcgagaccagcctgaccaacatgatgaaaccccgtctctactaaaaatacaaaaattagctgggcgtggtggcatgcgcctgtaatcccagttactcaggaggctgaggcaggagtatcacttgaacccaggaggcagaggttgcagtgagatg

SEQ ID NO: 125940 - DNA, 534 bp, Homo sapiens
atttaactgataatgatattggtcacccacatgttccggatcctgttgtgagtgcttcatgggcatcatctcattcaaccctcatagcaacactatcagacagtcactactgctgtctacactttacagatggggaaaatgaagcacagagaggttcaacaacatgccccaagtcacatgggtagcaagggacagagttaggattcaaatacaaaaaggatggttccaagcacagaactcacagctccactggctaaaccgaatgaccactcatctgagccttccctccccatgtcccccaacccctgatggcttgagatgagaaagctcctttctggagtttggagggtgactctgcaaccttgggaaggcttagaaataagaacaggtaagtcaaaccaacagtgctaagtttaggaacaagtttgtgaacatcatgataatgggcaaaggtttctaaaaagatgcttgaggctgggcacagtggctcatgcctgtaatcctagcactttgggaagccaaagcaggaggatt

SEQ ID NO: 125941 - DNA, 743 bp, Homo sapiens
gacctaagaccttgtaggtggtttgaccactggggaggcagctggagacattcatgaaattcagtcacgtatggatgttaggaagatgtgttagcatcacagcttgtaggatgaagccgtagcagtacttagggggaaatttattgccttaaatatttgctgcaagaaaagagaaaggactgaaagttgataaatggccgtgtcagaaagttagaaaagacagaataaaccagtggaagatggaggaaggaataatgaatattaattttatagattggatcagaaagccagcagctggtcctagaatcatcattgaaattgatgttgttaaattgtatcgaaattgttaaaaatcagcactctagccagccttccccctttaagaaaagatctcagaacactaatcctgatggttttatgggcaagttcttccagatctacaaagaacagaaaaccctacctgtacacaaactatgccaaagaataggggaaaaggaatgatttttagcttattctatgagactcaagagaccctaataccaagatcagaaaacagtctgagaatcacctctgatttttctcattttaaaatacacatagaaatctcacataaaaatgttaacaaaccaaatctagtgatgtgttagaaaagaatctccatcaagaaacatttataccatagaaactttctgtgaactggcattattagactgtgcattactgtaattccacatacttcagat

SEQ ID NO: 125942 - DNA, 478 bp, Homo sapiens
tgttaaatccagtgacaattctcagtattctttccttcatttcatcaaagggaatatattcgacattagggttgggaggacctcttggctcaggagctgaagttctgaaatcatccatcactttctccagtttgaaaataaaatagcctttaaattgggaccactgaatctgtttctccagtcttggctatatgacaaagaaactgatccaggacaggacaaacttcctttttcccctcttctcaaaatctttcagcgcctcctggagactctcaacgtccatggcttcctggagtccctcacagcctccgcctccctccgcaggtctcttggggaccggaatgcctccccccaccccccgacgtcctcccactccctcgcacacactcccgcatgcaggccaagttgggtggggggaacgaagggagccaggggaagcatgtgagagagtgagaccaacagagcgagcatctcccca

SEQ ID NO: 125943 - DNA, 429 bp, Homo sapiens
aagttggcaaacagtggggttggacacaaggtcggtggcccaaaaagagtgctaaatttttgctgcacatgctaaaaaatgcagagagtaatggtgaacttaagggtttagatgtagattctctggtcattgagcatatccaagtgaacaaagcaccgaagatatgccactggacctacagggcttatggtcggattaacccatacgtgagctctctctgccacactgagatgatccttactgaaaaggaacagattgttcctaaaccagaagaggaggttgcccagaagaaaaagatatcccagaagaaactgaagaaacaaaaacttatggcacgggagtaaattcagcattaaaataagtgcaattaaaaggaaaacaaaaagaatggaggaaaattaataaaggccattaaacaaggtaaagttg

SEQ ID NO: 125944 - DNA, 400 bp, Homo sapiens
caggcaggatgtgggccaagggctggttgcgaggcatttagggtacagctcccctgggcagagtgggaagcctctggggctgaccagcagtttggaaatgacccaggggcagcaccatggctgtgcccatgtcagaccctggtccggctagccatcttggcacctgggggaggggacagtggtctggaaagggcccatccctgctgtgcacacagtcctgtaaggctccctcccaccattctctccccagctcacaggtgagactccaccacagtcaggttctcagagagattctagtccactggggtctgagcagggcaaagccacatactacctgaactgagaaattctctgctaggacccccaagggggctgttgtgggcctcatgtggaagtgggt

SEQ ID NO: 125945 - DNA, 414 bp, Homo sapiens
catttggtggacctgaaatgaccactccagcactcaaatgctgagcctagacccttaaccaggatgcagacatcttgagaacaaaacaaggtaaaatgaccataggtcagaggaagagctgtccacactctatacattgtcatcgggacagtaagtccttttccttggcctcctgcccccaagtacaggagggtctgcagaatgtcaggaactcgttgatcttagattagaacccactggggctacagtcagagagcaggagaacagcaaattgtggggcctcaggatgaggctctctagatgtgattaaatgattttcctcttctaaaaggacaggagaacttcaagatgagtgcgatttccgtgctgtgtactgtgcgttttatcttcagttatctcgagaaaaaaaaaaaa

SEQ ID NO: 125946 - DNA, 328 bp, Homo sapiens
agaacataaaaatttactcattggaaagctgttatattcaatgtttgtaagaaataagccatagattaggaataacaattgttatggtactctctgttggggaaaaagaatgaagttctgttttcagttataacccatgagttcttaatatgtgcaccaggaggttttatacatgaggaattttgaatgagtttttaaaagtcagtaaagcacctgtaatcccagctactcgggagactgaggcaggagaatcacttgaacccagtaggcggaggttgcagtgagctgagatcgtgccattgcactccagcctgggcaacagggtgag

SEQ ID NO: 125947 - DNA, 801 bp, Homo sapiens
caacatcccagcccccacaagccaccatcctagtttctgtctctatgaattttactactctggatacctcatagaaattgaatcctgtgatatttgtccttttaagactggcttatttcacttagcatagtgtcctcaagattcgtccatgtcagggcatgtgttaaaatgttctccctttttaaggctgaataatattccattgcatgtgtattccacattttctttattttctttatccagtcatctggttgacaggttatttgatgtcaggctgtggagcaaaagctcaataaatggcaattctccccacttgcccttcccactcaggagatgtctgagcagaggggccacccagcaaatacttctgcccagagggaagctatgtcacagtgtcatgggagcatcaagaaggaggcaccccattctacctggcatctggtctggcctctggggctcccttcctgcatccagggctgcccaggcaccctgtggtgcccagccctgagtgtgaagcccctgggctgagtgtacctggcctggtcctgggggccaagcaactcagcaagtggagggactatgagggagggaagcatgtcccaggcaaacgtaccggtgtgaagggatgccagcctcctgctctcatccctgctgccttcccgggaccccgagaaagaaatcggccgggtactcctagagtctacctggggatgggagcccaggagagcctggagatcccctcccccaggtatgtggaggcctgtcttgagcctgtgccttgggctacatgtcggtggtgga

SEQ ID NO: 125948 - DNA, 907 bp, Homo sapiens
gcatagtggtgcatgcctgtaatcccagctactcggaaggccgatgcaggagactcacttgaacctgggaggcggaggttgcaatgagccattacactccagcctgggcaacaagagcgaaactccatctcaaaaaaataaataaaaactaacaactgagcactgggaaattcaaaatctcagtgataaccccaaaacatgcaatcctttcatttattttttaatcctggtctcattgtacatgcaatactttctaatacattatctgtaataacttattctttaagatctaagaaaaggaaacagttctgaaacaaaacattctggaaaagtctgccaaaattttaagctttttggagtaacatgggagatagatctttggagaaaaaagtaatgatgtcaatctaagacaatattccattaacagtactggtagagctatttcacaatttagcatacataatgtcacacgactgtagaaatgtttccaaacatgtatattaacaaaaatatttttaaaaatttcttcccacaagaataagtcttaatgattgttttcttaaacagttactgacatcactcagttataccaagcactgaaatttaaataagactatccaatatgtagattggaagttggtttttaacaaatcaccaagcaaaattattagctagccatgtaatatcactgcttgcttatatcacaaatttttaaaacttttactgattgtttttcttccacaattttgaaaacaaactgaatgtaacagggggtctgaggactcaaggccacgtgacggtggctcctgcttgtaatcccagcatctggaggctgtgcgggtggatcacctgaggtcaggagtttgagaccagcctggctaacacggcaaaaccctgtctctactaa

SEQ ID NO: 125949 - DNA, 218 bp, Homo sapiens
cttgattgacaggcacgtgagtgcttttgcagcatgaactgtcctatgtcttaaagatactctagaacaatgccaacctgaatctgcaacgatttttatatcttgttaaatgcagtgaaaaattacacgtttgcaccttgaaatgtttctataagaacagagcaaactcattgatagctccgaatgagtcagagtggtcgtcgcctgcctctcctaaa

SEQ ID NO: 125950 - DNA, 511 bp, Homo sapiens
gtccagcagcccacaaggaattgagtgttgccaacaaccatgtgtgtttggaaacagatcctatcccactcagttctcagatgagaccatagtctcagccagtaccttggtggcaccttatagaggacccagctaaactgtgcctgggcttttgacctatagaatctgtgagataataaacatgcattagtttaagctgctgctaagctttgctagtattattatgctacagtggataactaatacgagcaatatagttcctgttgccctgtatctccaccgacatttagtgcctgtcttttagattttagccatgttagtgggcatgaaatggaaactctgaggctttaatttgcatttccctaatgacattgaatacctgctaattggacatttggataccttcttttgcgaagtatctgttcaagtctttttcttattttaaaaataggtaggttgggcatggtggtttacacctgtaatcccggcactttgggggccaaggtgggtg

SEQ ID NO: 125951 - DNA, 578 bp, Homo sapiens
gatcaggaaactggccatggcaaagatcagaggcaccatttttatttcactatttcaagtagctggaagttagtaaacaggatgtctagtcaccacggctagaatacaagtggtaccctaaatccaagataacacagcagcacagtaggtgtccaacaggtgggaaaggcagactaaagggaaatccaactggcagattacaaagtccagagacaaggctggcattgcagagtctgctcaccggcagaaaagtatcctctgcactgggcttctgtttaaagactttgatgatgagggtgtgggctaaagatgatgctaaaatacgaacatggaatgggaactaaagcaaaatcaaactaaagcacatgaaaaggagtaaggaggtctttggactagaagattttgcctcattagatactttctgggttggaggtaataacttgggcacaacaccaaagttcaacacgaagactcacaactaggccccaccgaattcttcttcaaacactgaagggtacagaaatgagtcagaaacgagcctgtggatgagacgatcaatagatccagtttagagaatc

SEQ ID NO: 125952 - DNA, 307 bp, Homo sapiens
tactcagaccaaaaatgtgatggcactaacaactgcggggactgttcagatgaactgagcccaggtaggggtctgggcacaggctgggctggggctggtgtccaggcagcagccagagggcaaagggtgagcagggaatctctagggctcccccttgcatgcttccctgcatcctaggaaggagttttctacccctgcttgaatacatcctgtgatggggtactcactaccactccaagtgactttttctggaggctcattcttctgcagtggggaagtcaccttcaaaggcacagatgagaaaact

SEQ ID NO: 125953 - DNA, 161 bp, Homo sapiens
aagactggcagacctttgccctaaccgccttgtccagtcgaggggcagtgctcagtggggacagtcatctttttgttttatgtaggtctcactgaaagaaaagttgtaaaaaggcaacaaggcatttgaggtggggaggcctgcacagcgtgtgtgtgtgt

SEQ ID NO: 125954 - DNA, 850 bp, Homo sapiens
tggggaagtttaactccttatttaaatgagattcttgttcactttaaaaggtagatccaaaaacttacttgtatgcttttgacacaccaacaagtaggtatgccttcattttcatgaggctaacacattttatttacattttttaatctgtgttttactaagaggagagctggctagatttgggtttctaccttgtgactgatacagctagactttattgagatttaaatgtctgctgaatgtcataatattcttagcagtgtttgcgtgggtatatgagttccctagattatttgcactgaaatttggaatttctctagtccaaaaatatggaagaagaatataaaaatatcaaacctggtttatatttgccttacttggttttgagttttagaatgaatttaggaagtttttaattgctctctaattttgtatctgtgacattttacttcgcttgggttatttaactctaaggaagagaccagagatgctttgatctttttatttatttatttatttttattttgagatggcgtctccctctgtctcccaggctggagtgcagtggtgtgatctcggctcactgcaaactccacctcctgagttcacgccactctcctgcctcagcctcccaagtagctgggactacaggtgcccgccaccatacctggctgattttttgtatttttagtagagacggggtttcaccatgttagccaggatggtctcgatctcctgacctcatgatctacccacctcagcctcccaaagtgctgggattacaagcgtgagccaccgtacccggctgaggtgctttattctttctaatgtgtattcacatatactatct

SEQ ID NO: 125955 - DNA, 440 bp, Homo sapiens
tgtcctgtctgccacacctcccgctacaaatgccatgagagcagggccagggccaggcggtcaccagcatctggccctgcagacacctgagaagtgcctgctgaatgaagggctgaatggacagagactcagccacccatggcaagtgggccacaccccaaagccagccaggagagaccgtccctgccctcgtggacagggggccaaggtgtcagctctgtgaacgagtatagcccagggagccgcatgagccccagtgaggggccagatgcggtcctgagggctggggaaggccagcagggacccagccccgaaggcactgggggatgcagagggctcccagcggctggctgaccatgccctcactgcccaggtggctgggctctaaatcccaaggtgcagccagggacagctcagggtggtcaccgagggacctgctt

SEQ ID NO: 125956 - DNA, 509 bp, Homo sapiens
cctgagggcggatggtggtgtgtgtctggggggaccaggctcactgaacaggacacttgtgggttgggcccaaagggatttcaccgacaaataaaccctttcttcccacatttgtgccgaaagagaaagaggcgcagctcacctaatggtcaatcggtcaatcgctgccatgctgtcctgcaggaccagggacaaaacgagccctaggacacgaagaggacgctggcctgtagctccgcagtgacggtgaccccaggctgtcctgcaggaccagggacaaaacgagccctaggacacgaagaggacgctggcctgtagctccgcagtgacggtgaccccaggctgtcctgcaggaccaggaacaaaacgagccctaggacacgaagaggacgctggcctgtagctctgcagtgatggtcaccccagcttgtccacgctgacttctcacctttcccaggacggttggcgcctttcattctctggggcgaaaacagtcaggacattcatcc

SEQ ID NO: 125957 - DNA, 326 bp, Homo sapiens
ccattaaaataatgaaacaatttacaaatgtaatctcttggaacagagaaaggaactcttttctcagattggagctatacatatgactttatccatgtcactctactgtactcaaatcacatagtggttttccataattctgatgtgtgctttcacttattgtgacacagcattattttatttttagtcaaccatctttctatatcaagcatctttatgaaagcataaataggtcactaattgttttcattttcactgaataatttgtttgcattctcatactccattaggcctatataaagcatacaaacatttttttcatcatt

SEQ ID NO: 125958 - DNA, 483 bp, Homo sapiens
tgttagaaatgctaaggtaaccactaattctttttataagaaatatacttttaatgttaacaaaggagatacaatgaaacatattacgctcaaaatcaaagaaggaactcaatggaagaggaaggtaaggccaatgaacaaatacaacaagtagaacatttattaaaacatggtagatattaatataaatatactaataatttaaatattaatcatctagtcagagcaattaggcaagagaaggaaataaaaggcatccaaattggaaaagaggaagtcaagctatctctgtttgctgatgatatgttctcatacctagaaaatgctaaacactcctccaaaagacccctagatttgataaatggatgcagtgggctcgcaggtatctttatctatgttctctagttttcatctcttctagtcttcttctattctagctgagtatgcaatagagggctgaatctccttgccgagagctgcaaa

SEQ ID NO: 125959 - DNA, 554 bp, Homo sapiens
tgaggtgtttgcttgagaagtggaaaagatttgggacagccatggatgaggcagaaagttgttgggaggaacctgatagggagtcagctgaattgagatgatacagctttgccgtggagccagtcagcagggtcatatgactttctccagcaatacttttgaggtcagagaaattggatcagttggctatcccaaggtgggagattggcttgggaggcacaggaaagtcaaaatagcaaaggttttcaagattcatgtgacagcttggaaggaaggattgaccatgggttgattccatggaggtagagaagcaagagagacctgatgattacaatgatggctaagtgtagtatgcccattaggattgaattgaattaggggaaattgtgtgaagtgtttggaaggaagcaatattgtgtgattagctccaaagctggccactggtagaagttgtttcaatggaagaacaaggatggaattgagtgggccagagagccctagattaatgggttaggatgcagaggatggggtagagaagggggaaggtgatttat

SEQ ID NO: 125960 - DNA, 782 bp, Homo sapiens
  misc_feature (113)..(113): n is a, c, g, or t
  misc_feature (159)..(159): n is a, c, g, or t
  misc_feature (169)..(169): n is a, c, g, or t
gaaagccaccgtaccaggccaaagctctgcgcttcatagatgtaccccaatctgtagtatgttcttgatttacccaggcagtgaatcaagcagtaactgaactaccgatgcantcgtgtatagctcaactcataaccactcgacggcgtcagtgcaaantacgcaactntcacatagaatccaatacacatcatctaagcttccgaaggatctgtaaggtgacatatagacacacagaaagatgagaacaaacgaggacaagaactctgatacctcaagcatctagagtgccttccttctttcaaatggccacatagtctatccagcaagggttctaaagtgggctaaaatagctgaaatgacagaaataaaattaagtatatggatacaaataaggaatgttgagctacaaaaataagttgaaacctaacccaagaaagctaagaattataataaaataaggcaggagctaagagacaaaataggcaggataggaaaaaacaaaacctctgagaaacataaaattatgtaaagaaaacaaatacatggctcattggtgtccctgaaagagatgggaataatagaaccaacttgaaaaaatatattttaatataccatccatgagaaagttcccaaactagctagcaaggcaaaaattcaaactcaggaaacgaagacagtaagagtgaaatactcacaagaagattatccccaggacagataatcatcagattcttcaaggttgaaatgaaagaaaaaatgttaaagctagctagagagaa

SEQ ID NO: 125961 - DNA, 266 bp, Homo sapiens
cccagcatcagctgggaacaggtgagaaatgcaggttctgtggcccatcccacacctgaattacaaaccctggagatggggcccagcaatctgtgttttagcgagctcttcaggggattctgatgccgccttgggtgtgagaactactgttctaaggactgttcttgcttctctctgctttctatttcatccttcctccctaatcccttaggatagaagactcaagatgcttttgcctcctggtaatgcttgctatttgctcagca

SEQ ID NO: 125962 - DNA, 622 bp, Homo sapiens
cggaattcactagtgattgtgagctgagatcgcaccactgcactgcagtctgggcaacaaaatgagactctgtctcaaaaaaacaaaaccaaaccactgagatactaccatagcagttggtaaatagctgctgtactgaatattccttgctccccacccccaagtaccctgagcctccctgccctctttcaggactcttctcccaaggaccaccgccaccctccacctcaccgagatccagtgactgaagggttaatgctcagcacagcaggtgcctcaaggactctgctttagttttttggctgaagaccattctggcaggtttgaggtgctatctcattgtggttttaatttgcatttccctaatgattagggatgctgagcaatttttctttacctgttgaccatttgtgtgtctcttttgagaaatgtctgttcagatcctttacctgtaaaattagaatagctccctttccgactgtcagtgctcgtgctccactgctgttaactgtgttgactatcacctgtacattcattcattgatttttaatctatcccagatccagtacttagaaaaaaagttaggctgggtgcgatctcagctcacaatcactagtgattc

SEQ ID NO: 125963 - DNA, 640 bp, Homo sapiens
aaatagcataatggactaaagatggccacaaattatttgccacttttcattgaaataaggggtttctattccccttgaatgtggacaggcctgaagactgactttgaccaatataatggtcagaagtgacgttgtgtacctctcaaggttgggcctaaagatgcttgcagcttcttgtgtcacctatgttggtacactcccttttggaagccagatgtcatgtaagagatccaggtgaccaccattttgtgaggaagcccaattttcccagatggtgaggaagagaacacatgaaggagtacatgggctccagacatgtgagtgaactttttctaccttccagtgaagtgaagagagagagtgaatggtgctaacactacagggcacagctgtccagctgattccttcttatgttcctgacacattggaacattaggaaatagagatgtcttaagccagtaagttttgaggcactttgtattcatagcagcatatatagaaacatgcattttctttattaaatataactttgaaacatgccaaatacggttataacatattcggaagaaaatagtaagtaattccacattacagtaaaacttcttttttcaatgtgagtgtgatccccctggggataaat

SEQ ID NO: 125964 - DNA, 335 bp, Homo sapiens
tgctgaggtgatcaccggagcttaggcgaatcctcctcctcctcaacgtagtaggaagtgacagttgataccactttggctgggtaccacctgcccaagggtaccatgatcctgaccaatttgacggcgctgcacagggaccccacagagtgggccacccctgacacattcaatccggaccatttctaggtgtacaaaatagaaatatagtattttcatatccagttccaccaaagggggaaaaaaaaggatcagttattcaaataagcaaacttacattatcttgtatatcaatatcagccattcccttgttgagttcttcttgcatacttgac

SEQ ID NO: 125965 - DNA, 1978 bp, Homo sapiens
ggaccgtcgcctgctgggaccgccgcctgcttggaccgcagaagagcaggaggacgtctgagccatgctcgcggcgatgggctctctggcggctgccctctgggcagtggtccatcctcggactctcctactgggcactgtcgcctttctgctcgctgctgactttctcaaaagacggcgcccaaagaactacccgccggggccctggcgcctgcccttccttggcaacttcttccttgtggacttcgagcagtcgcacctggaggttcagctgtttgtgaagaaatatgggaacctttttagcttggagcttggtgacatatctgcagttcttattactggcttgcccttaatcaaagaagcccttatccacatggaccaaaactttgggaaccgccccgtgacccctatgcgagaacatatctttaagaaaaatggattgattatgtcaagtggccaggcatggaaggagcaaagaaggttcactctgacagcactaaggaactttggtttaggaaagaagagcttagaggaacgcattcaggaggaggcccaacacctcactgaagcaataaaagaggagaacggacagccttttgaccctcatttcaagatcaacaatgcagtttccaatatcatttgctccatcaccttcggagaacgctttgagtaccaggatagttggtttcagcagctgctgaagttactagatgaagtcacatacttggaggcttcaaagacatgccagctctacaatgtctttccatggataatgaaattcctgcctggaccccaccaaactctcttcagcaactggaaaaaactgaaattgtttgtttctcatatgattgacaaacacagaaaggattggaatcctgcagaaacaagagactttattgatgcttaccttaaagaaatgtcaaagcacacaggcaatcctacttcaagtttccatgaagaaaacctcatctgcagcaccctggacctcttctttgccggaaccgagacaacttccacaactctgcgatgggctctgctttatatggccctctacccagaaatccaagaaaaagtacaagctgagattgacagagtgattggccaggggcagcagccgagcacagccgcccgggagtccatgccctacaccaatgctgtcatccatgaggtgcagagaatgggcaacatcatccccctgaacgttcccagggaagtgacagttgataccactttggctgggtaccacctgcccaagggtaccatgatcctgaccaatttgacggcgctgcacagggaccccacagagtgggccacccctgacacattcaatccggaccattttctggagaatggacagtttaagaaaagggaagcctttatgcctttctcaataggaaagcgggcatgcctcggagaacagttggccaggactgagctgtttattttcttcacttcccttatgcaaaaatttaccttcaggcccccaaacaatgagaagctgagcctgaagtttagaatgggtatcaccatttccccagtcagtcaccgcctctgcgctgttcctcaggtgtaatattgttaagaaagaaaggggcaaggaaagtaagaagacatggcacgtgttctgaaaccactggtgtctgctcagatgtgttgggacaaaatgaaagtgactttcaagaaagatcagaggaatttgactcagagaaaactagatccaaatcccagctctactgtctcgtccgaattagccttgggaaaatcatttatatgctaaataatttacctttttatctaggagatgaaaagaggataatgtttccttccataaagaaagttcttgtaagaatcaaaagaaatggtgagctttaagtggtttgtaaaccataaaacacatcataaaagttctatctataaaaaaacaacaacacacccacccccccaacccccccccccacacccccacaccaaccacccc

SEQ ID NO: 125966 - DNA, 1683 bp, Homo sapiens
ggaccgtcgcctgctgggaccgccgcctgcttggaccgcagaagagcaggaggacgtctgagccatgctcgcggcgatgggctctctggcggctgccctctgggcagtggtccatcctcggactctcctactgggcactgtcgcctttctgctcgctgctgactttctcaaaagacggcgcccaaagaactacccgccggggccctggcgcctgcccttccttggcaacttcttccttgtggacttcgagcagtcgcacctggaggttcagctgtttgtgaagaaatatgggaacctttttagcttggagcttggtgacatatctgcagttcttattactggcttgcccttaatcaaagaagcccttatccacatggaccaaaactttgggaaccgccccgtgacccctatgcgagaacatatctttaagaaaaatggattgattatgtcaagtggccaggcatggaaggagcaaagaaggttcactctgacagcactaaggaactttggtttaggaaagaagagcttagaggaacgcattcaggaggaggcccaacacctcactgaagcaataaaagaggagaacggacagccttttgaccctcatttcaagatcaacaatgcagtttccaatatcatttgctccatcaccttcggagaacgctttgagtaccaggatagttggtttcagcagctgctgaagttactagatgaagtcacatacttggaggcttcaaagacatgccagctctacaatgtctttccatggataatgaaattcctgcctggaccccaccaaactctcttcagcaactggaaaaaactgaaattgtttgtttctcatatgattgacaaacacagaaaggattggaatcctgcagaaacaagagactttattgatgcttaccttaaagaaatgtcaaagcacacaggcaatcctacttcaagtttccatgaagaaaacctcatctgcagcaccctggacctcttctttgccggaaccgagacaacttccacaactctgcgatgggctctgctttatatggccctctacccagaaatccaagaaaaagtacaagctgagattgacagagtgattggccaggggcagcagccgagcacagccgcccgggagtccatgccctacaccaatgctgtcatccatgaggtgcagagaatgggcaacatcatccccctgaacgttcccagggaagtgacagttgataccactttggctgggtaccacctgcccaagggtaccatgatcctgaccaatttgacggcgctgcacagggaccccacagagtgggccacccctgacacattcaatccggaccattttctggagaatggacagtttaagaaaagggaagcctttatgcctttctcaataggaaagcgggcatgcctcggagaacagttggccaggactgagctgtttattttcttcacttcccttatgcaaaaatttaccttcaggcccccaaacaatgagaagctgagcctgaagtttagaatgggtatcaccatttccccagtcagtcaccgcctctgcgctgttcctcaggtgtaatattgttaagaaagaaaggggcaaggaaagtaagaagacatggcacgtgttctgaaaccactggtgtctgctcagatgtgttgggcgataagggatcctctagaacgcct

SEQ ID NO: 125967 - DNA, 1803 bp, Homo sapiens
ggaccgtcgcctgctgggaccgccgcctgcttggaccgcagaagagcaggaggacgtctgagccatgctcgcggcgatgggctctctggcggctgccctctgggcagtggtccatcctcggactctcctactgggcactgtcgcctttctgctcgctgctgactttctcaaaagacggcgcccaaagaactacccgccggggccctggcgcctgcccttccttggcaacttcttccttgtggacttcgagcagtcgcacctggaggttcagctgtttgtgaagaaatatgggaacctttttagcttggagcttggtgacatatctgcagttcttattactggcttgcccttaatcaaagaagcccttatccacatggaccaaaactttgggaaccgccccgtgacccctatgcgagaacatatctttaagaaaaatggattgattatgtcaagtggccaggcatggaaggagcaaagaaggttcactctgacagcactaaggaactttggtttaggaaagaagagcttagaggaacgcattcaggaggaggcccaacacctcactgaagcaataaaagaggagaacggacagccttttgaccctcatttcaagatcaacaatgcagtttccaatatcatttgctccatcaccttcggagaacgctttgagtaccaggatagttggtttcagcagctgctgaagttactagatgaagtcacatacttggaggcttcaaagacatgccagctctacaatgtctttccatggataatgaaattcctgcctggaccccaccaaactctcttcagcaactggaaaaaactgaaattgtttgtttctcatatgattgacaaacacagaaaggattggaatcctgcagaaacaagagactttattgatgcttaccttaaagaaatgtcaaagcacacaggcaatcctacttcaagtttccatgaagaaaacctcatctgcagcaccctggacctcttctttgccggaaccgagacaacttccacaactctgcgatgggctctgctttatatggccctctacccagaaatccaagaaaaagtacaagctgagattgacagagtgattggccaggggcagcagccgagcacagccgcccgggagtccatgccctacaccaatgctgtcatccatgaggtgcagagaatgggcaacatcatccccctgaacgttcccagggaagtgacagttgataccactttggctgggtaccacctgcccaagggtaccatgatcctgaccaatttgacggcgctgcacagggaccccacagagtgggccacccctgacacattcaatccggaccattttctggagaatggacagtttaagaaaagggaagcctttatgcctttctcaataggaaagcgggcatgcctcggagaacagttggccaggactgagctgtttattttcttcacttcccttatgcaaaaatttaccttcaggcccccaaacaatgagaaacatggcacgtgttctgaaaccactggtgtctgctcagatgtgttgggacaaaatgaaagtgactttcaagaaagatcagaggaatttgactcagagaaaactagatccaaatcccagctctactgtctcgtccgaattagccttgggaaaatcatttatatgctaaataatttacctttttatctaggagatgaaaagaggataatgtttccttccataaagaaagttcttgtaagaatcaaaagaaatggtgagctttaagtggtttgtaaaccataaaacacatcataaaagttctatctata

SEQ ID NO: 125968 - DNA, 1867 bp, Homo sapiens
ggaccgtcgcctgctgggaccgccgcctgcttggaccgcagaagagcaggaggacgtctgagccatgctcgcggcgatgggctctctggcggctgccctctgggcagtggtccatcctcggactctcctactgggcactgtcgcctttctgctcgctgctgactttctcaaaagacggcgcccaaagaactacccgccggggccctggcgcctgcccttccttggcaacttcttccttgtggacttcgagcagtcgcacctggaggttcagctgtttgtgaagaaatatgggaacctttttagcttggagcttggtgacatatctgcagttcttattactggcttgcccttaatcaaagaagcccttatccacatggaccaaaactttgggaaccgccccgtgacccctatgcgagaacatatctttaagaaaaatgtctgacagcactaaggaactttggtttaggaaagaagagcttagaggaacgcattcaggaggaggcccaacacctcactgaagcaataaaagaggagaacggacagccttttgaccctcatttcaagatcaacaatgcagtttccaatatcatttgctccatcaccttcggagaacgctttgagtaccaggatagttggtttcagcagctgctgaagttactagatgaagtcacatacttggaggcttcaaagacatgccagctctacaatgtctttccatggataatgaaattcctgcctggaccccaccaaactctcttcagcaactggaaaaaactgaaattgtttgtttctcatatgattgacaaacacagaaaggattggaatcctgcagaaacaagagactttattgatgcttaccttaaagaaatgtcaaagcacacaggcaatcctacttcaagtttccatgaagaaaacctcatctgcagcaccctggacctcttctttgccggaaccgagacaacttccacaactctgcgatgggctctgctttatatggccctctacccagaaatccaagaaaaagtacaagctgagattgacagagtgattggccaggggcagcagccgagcacagccgcccgggagtccatgccctacaccaatgctgtcatccatgaggtgcagagaatgggcaacatcatccccctgaacgttcccagggaagtgacagttgataccactttggctgggtaccacctgcccaagggtaccatgatcctgaccaatttgacggcgctgcacagggaccccacagagtgggccacccctgacacattcaatccggaccattttctggagaatggacagtttaagaaaagggaagcctttatgcctttctcaataggaaagcgggcatgcctcggagaacagttggccaggactgagctgtttattttcttcacttcccttatgcaaaaatttaccttcaggcccccaaacaatgagaagctgagcctgaagtttagaatgggtatcaccatttccccagtcagtcaccgcctctgcgctgttcctcaggtgtaatattgttaagaaagaaaggggcaaggaaagtaagaagacatggcacgtgttctgaaaccactggtgtctgctcagatgtgttgggacaaaatgaaagtgactttcaagaaagatcagaggaatttgactcagagaaaactagatccaaatcccagctctactgtctcgtccgaattagccttgggaaaatcatttatatgctaaataatttacctttttatctaggagatgaaaagaggataatgtttccttccataaagaaagttcttgtaagaatcaaaagaaatggtgagctttaagtggtttgtaaaccataaaacacatcataaaagttctatctata

SEQ ID NO: 125969 - DNA, 554 bp, Homo sapiens
tttcgtaacctttaatataaatataatctcaggaaagcgggcatgcctcggagaacagttggccaggactgagctgtttattttcttcacttcccttatgcaaaaatttaccttcaggcccccaaacaatgagaagctgagcctgaagtttagaatgggtatcaccatttccccagtcagtcaccgcctctgcgctgttcctcaggtgtaatattgttaagaaagaaaggggcaaggaaagtaagaagacatggcacgtgttctgaaaccactggtgtctgctcagatgtgttgggacaaaatgaaagtgactttcaagaaagatcagaggaatttgactcagagaaaactagatccaaatcccagctctactgtctcgtccgaattagccttgggaaaatcatttatatgctaaataatttacctttttatctaggagatgaaaagaggataatgtttccttccataaagaaagttcttgtaagaatcaaaagaaatggtgagctttaagtggtttgtaaaccataaaacacatcataaaagttctatctata

SEQ ID NO: 125970 - DNA, 555 bp, Homo sapiens
tatcactactctcaccccacacatatcactctggaaagcgggcatgcctcggagaacagttggccaggactgagctgtttattttcttcacttcccttatgcaaaaatttaccttcaggcccccaaacaatgagaagctgagcctgaagtttagaatgggtatcaccatttccccagtcagtcaccgcctctgcgctgttcctcaggtgtaatattgttaagaaagaaaggggcaaggaaagtaagaagacatggcacgtgttctgaaaccactggtgtctgctcagatgtgttgggacaaaatgaaagtgactttcaagaaagatcagaggaatttgactcagagaaaactagatccaaatcccagctctactgtctcgtccgaattagccttgggaaaatcatttatatgctaaataatttacctttttatctaggagatgaaaagaggataatgtttccttccataaagaaagttcttgtaagaatcaaaagaaatggtgagctttaagtggtttgtaaaccataaaacacatcataaaagttctatctata

SEQ ID NO: 125971 - DNA, 1916 bp, Homo sapiens
ggaccgtcgcctgctgggaccgccgcctgcttggaccgcagaagagcaggaggacgtctgagccatgctcgcggcgatgggctctctggcggctgccctctgggcagtggtccatcctcggactctcctactgggcactgtcgcctttctgctcgctgctgactttctcaaaagacggcgcccaaagaactacccgccggggccctggcgcctgcccttccttggcaacttcttccttgtggacttcgagcagtcgcacctggaggttcagctgtttgtgaagaaatatgggaacctttttagcttggagcttggtgacatatctgcagttcttattactggcttgcccttaatcaaagaagcccttatccacatggaccaaaactttgggaaccgccccgtgacccctatgcgagaacatatctttaagaaaaatggattgattatgtcaagtggccaggcatggaaggagcaaagaaggttcactctgacagcactaaggaactttggtttaggaaagaagagcttagaggaacgcattcaggaggaggcccaacacctcactgaagcaataaaagaggagaacggacagccttttgaccctcatttcaagatcaacaatgcagtttccaatatcatttgctccatcaccttcggagaacgctttgagtaccaggatagttggtttcagcagctgctgaagttactagatgaagtcacatacttggaggcttcaaagacatgccagctctacaatgtctttccatggataatgaaattcctgcctggaccccaccaaactctcttcagcaactggaaaaaactgaaattgtttgtttctcatatgattgacaaacacagaaaggattggaatcctgcagaaacaagagactttattgatgcttaccttaaagaaatgtcaaagcacacaggcaatcctacttcaagtttccatgaagaaaacctcatctgcagcaccctggacctcttctttgccggaaccgagacaacttccacaactctgcgatgggctctgctttatatggccctctacccagaaatccaagaaaaagtacaagctgagattgacagagtgattggccaggggcagcagccgagcacagccgcccgggagtccatgccctacaccaatgctgtcatccatgaggtgcagagaatgggcaacatcatccccctgaacgttcccagggaagtgacagttgataccactttggctgggtaccacctgcccaagggtaccatgatcctgaccaatttgacggcgctgcacagggaccccacagagtgggccacccctgacacattcaatccggaccattttctggagaatggacagtttaagaaaagggaagcctttatgcctttctcaataggaaagcgggcatgcctcggagaacagttggccaggactgagctgtttattttcttcacttcccttatgcaaaaatttaccttcaggcccccaaacaatgagaagctgagcctgaagtttagaatgggtatcaccatttccccagtcagtcaccgcctctgcgctgttcctcaggtgtaatattgttaagaaagaaaggggcaaggaaagtaagaagacatggcacgtgttctgaaaccactggtgtctgctcagatgtgttgggacaaaatgaaagtgactttcaagaaagatcagaggaatttgactcagagaaaactagatccaaatcccagctctactgtctcgtccgaattagccttgggaaaatcatttatatgctaaataatttacctttttatctaggagatgaaaagaggataatgtttccttccataaagaaagttcttgtaagaatcaaaagaaatggtgagctttaagtggtttgtaaaccataaaacacatcataaaagttctatctata

SEQ ID NO: 125972 - DNA, 1728 bp, Homo sapiens
ggaccgtcgcctgctgggaccgccgcctgcttggaccgcagaagagcaggaggacgtctgagccatgctcgcggcgatgggctctctggcggctgccctctgggcagtggtccatcctcggactctcctactgggcactgtcgcctttctgctcgctgctgactttctcaaaagacggcgcccaaagaactacccgccggggccctggcgcctgcccttccttggcaacttcttccttgtggacttcgagcagtcgcacctggaggttcagctgtttgtgaagaaatatgggaacctttttagcttggagcttggtgacatatctgcagttcttattactggcttgcccttaatcaaagaagcccttatccacatggaccaaaactttgggaaccgccccgtgacccctatgcgagaacatatctttaagaaaaatggattgattatgtcaagtggccaggcatggaaggagcaaagaaggttcactctgacagcactaaggaactttggtttaggaaagaagagcttagaggaacgcattcaggaggaggcccaacacctcactgaagcaataaaagaggagaacggacagccttttgaccctcatttcaagatcaacaatgcagtttccaatatcatttgctccatcaccttcggagaacgctttgagtaccaggatagttggtttcagcagctgctgaagttactagatgaagtcacatacttggaggcttcaaagacatgccagctctacaatgtctttccatggataatgaaattcctgcctggaccccaccaaactctcttcagcaactggaaaaaactgaaattgtttgtttctcatatgattgacaaacacagaaaggattggaatcctgcagaaacaagagactttattgatgcttaccttaaagaaatgtcaaagcacacaggcaatcctacttcaagtttccatgaagaaaacctcatctgcagcaccctggacctcttctttgccggaaccgagacaacttccacaactctgcgatgggctctgctttatatggccctctacccagaaatccaagggtaccatgatcctgaccaatttgacggcgctgcacagggaccccacagagtgggccacccctgacacattcaatccggaccattttctggagaatggacagtttaagaaaagggaagcctttatgcctttctcaataggaaagcgggcatgcctcggagaacagttggccaggactgagctgtttattttcttcacttcccttatgcaaaaatttaccttcaggcccccaaacaatgagaagctgagcctgaagtttagaatgggtatcaccatttccccagtcagtcaccgcctctgcgctgttcctcaggtgtaatattgttaagaaagaaaggggcaaggaaagtaagaagacatggcacgtgttctgaaaccactggtgtctgctcagatgtgttgggacaaaatgaaagtgactttcaagaaagatcagaggaatttgactcagagaaaactagatccaaatcccagctctactgtctcgtccgaattagccttgggaaaatcatttatatgctaaataatttacctttttatctaggagatgaaaagaggataatgtttccttccataaagaaagttcttgtaagaatcaaaagaaatggtgagctttaagtggtttgtaaaccataaaacacatcataaaagttctatctata

SEQ ID NO: 125973 - DNA, 1877 bp, Homo sapiens
ggaccgtcgcctgctgggaccgccgcctgcttggaccgcagaagagcaggaggacgtctgagccatgctcgcggcgatgggctctctggcggctgccctctgggcagtggtccatcctcggactctcctactgggcactgtcgcctttctgctcgctgctgactttctcaaaagacggcgcccaaagaactacccgccggggccctggcgcctgcccttccttggcaacttcttccttgtggacttcgagcagtcgcacctggaggttcagctgtttgtgaagaaatatgggaacctttttagcttggagcttggtgacatatctgcagttcttattactggcttgcccttaatcaaagaagcccttatccacatggaccaaaactttgggaaccgccccgtgacccctatgcgagaacatatctttaagaaaaatggattgattatgtcaagtggccaggcatggaaggagcaaagaaggttcactctgacagcactaaggaactttggtttaggaaagaagagcttagaggaacgcattcaggaggaggcccaacacctcactgaagcaataaaagaggagaacgtttccaatatcatttgctccatcaccttcggagaacgctttgagtaccaggatagttggtttcagcagctgctgaagttactagatgaagtcacatacttggaggcttcaaagacatgccagctctacaatgtctttccatggataatgaaattcctgcctggaccccaccaaactctcttcagcaactggaaaaaactgaaattgtttgtttctcatatgattgacaaacacagaaaggattggaatcctgcagaaacaagagactttattgatgcttaccttaaagaaatgtcaaagcacacaggcaatcctacttcaagtttccatgaagaaaacctcatctgcagcaccctggacctcttctttgccggaaccgagacaacttccacaactctgcgatgggctctgctttatatggccctctacccagaaatccaagaaaaagtacaagctgagattgacagagtgattggccaggggcagcagccgagcacagccgcccgggagtccatgccctacaccaatgctgtcatccatgaggtgcagagaatgggcaacatcatccccctgaacgttcccagggaagtgacagttgataccactttggctgggtaccacctgcccaagggtaccatgatcctgaccaatttgacggcgctgcacagggaccccacagagtgggccacccctgacacattcaatccggaccattttctggagaatggacagtttaagaaaagggaagcctttatgcctttctcaataggaaagcgggcatgcctcggagaacagttggccaggactgagctgtttattttcttcacttcccttatgcaaaaatttaccttcaggcccccaaacaatgagaagctgagcctgaagtttagaatgggtatcaccatttccccagtcagtcaccgcctctgcgctgttcctcaggtgtaatattgttaagaaagaaaggggcaaggaaagtaagaagacatggcacgtgttctgaaaccactggtgtctgctcagatgtgttgggacaaaatgaaagtgactttcaagaaagatcagaggaatttgactcagagaaaactagatccaaatcccagctctactgtctcgtccgaattagccttgggaaaatcatttatatgctaaataatttacctttttatctaggagatgaaaagaggataatgtttccttccataaagaaagttcttgtaagaatcaaaagaaatggtgagctttaagtggtttgtaaaccataaaacacatcataaaagttctatctata

SEQ ID NO: 125974 - DNA, 1993 bp, Homo sapiens
tgtgatatcacaaagctggggacttactggaaaaatgtgagactcacacacctggccaggaggaaaaaactcaggactgcagtggacatttgtccaattggtggccaacaatgagctttgagtaaattttctatattgaaggagcttctcatcttatgcatgccatctctgcaaattagaagctgggactcaattttccagtctctcttgcaactaggatatagacatgtgacctgtgctctggccattagttgcagccttttgagattttcattcacaacataaaatgcgaaaaagcaggcactgactgaatccattcctggagtacgtaagtagcagaaagtgatgatgtttgtgaagaaatatgggaacctttttagcttggagcttggtgacatatctgcagttcttattactggcttgcccttaatcaaagaagcccttatccacatggaccaaaactttgggaaccgccccgtgacccctatgcgagaacatatctttaagaaaaatggattgattatgtcaagtggccaggcatggaaggagcaaagaaggttcactctgacagcactaaggaactttggtttaggaaagaagagcttagaggaacgcattcaggaggaggcccaacacctcactgaagcaataaaagaggagaacggacagccttttgaccctcatttcaagatcaacaatgcagtttccaatatcatttgctccatcaccttcggagaacgctttgagtaccaggatagttggtttcagcagctgctgaagttactagatgaagtcacatacttggaggcttcaaagacatgccagctctacaatgtctttccatggataatgaaattcctgcctggaccccaccaaactctcttcagcaactggaaaaaactgaaattgtttgtttctcatatgattgacaaacacagaaaggattggaatcctgcagaaacaagagactttattgatgcttaccttaaagaaatgtcaaagcacacaggcaatcctacttcaagtttccatgaagaaaacctcatctgcagcaccctggacctcttctttgccggaaccgagacaacttccacaactctgcgatgggctctgctttatatggccctctacccagaaatccaagaaaaagtacaagctgagattgacagagtgattggccaggggcagcagccgagcacagccgcccgggagtccatgccctacaccaatgctgtcatccatgaggtgcagagaatgggcaacatcatccccctgaacgttcccagggaagtgacagttgataccactttggctgggtaccacctgcccaagggtaccatgatcctgaccaatttgacggcgctgcacagggaccccacagagtgggccacccctgacacattcaatccggaccattttctggagaatggacagtttaagaaaagggaagcctttatgcctttctcaataggaaagcgggcatgcctcggagaacagttggccaggactgagctgtttattttcttcacttcccttatgcaaaaatttaccttcaggcccccaaacaatgagaagctgagcctgaagtttagaatgggtatcaccatttccccagtcagtcaccgcctctgcgctgttcctcaggtgtaatattgttaagaaagaaaggggcaaggaaagtaagaagacatggcacgtgttctgaaaccactggtgtctgctcagatgtgttgggacaaaatgaaagtgactttcaagaaagatcagaggaatttgactcagagaaaactagatccaaatcccagctctactgtctcgtccgaattagccttgggaaaatcatttatatgctaaataatttacctttttatctaggagatgaaaagaggataatgtttccttccataaagaaagttcttgtaagaatcaaaagaaatggtgagctttaagtggtttgtaaaccataaaacacatcataaaagttctatctata

SEQ ID NO: 125975 - DNA, 230 bp, Homo sapiens
cacaggctctgagaaaggaacacccaccacgtctgagcaccacaaggaggctgaagtggttggagtggaatgaacaggggaagggggtcccagatgaaatccgagagataatagggcctgatcgtgtaaggatcacggctttccctgagtgggatgggagtcactggatgaccttgaggagaggagcgacatgatctgacttcgtattaaaaggattgctgtggctgctg

SEQ ID NO: 125976 - DNA, 889 bp, Homo sapiens
ccaccccttcagggatgaaacggaggccagatcactctcccatcacaatgaggtgtcactggacttcaggtaaatccgtgagactgtgacctggatttcccatccagtcagcaactagggagcgggaggactgtttccttgtcctcaggtatccacctctcaattggtgctccaaatggtccccatgaggtgtgtcaccagtaccccaaatgcttgacctccattgcactctggaaatagggagtggctgtaggatctctctctagtcagcccctactgctgaggctttctttttcctgctctgtaaccagaaagcggccctattttcttcccaacgggtgcccccagagcttcataagtcacctcttcctacgtggggtctcttccttggcatgaccctggcacatgactggagttcagtgctcctgctaatgtatactcccccagaggtgtttctttttaagctgcaggcactttccagttctatcccagagactcagtgacctcccttagtgcctgtctcctctgtgcatgcgcattcttctctcccaccaagaacacagatgtacttgaccttctgtgaacatgtctcatgctgctctgtcactgggagctcgactttttttctctgctgtgaatgccctttctgccctttctctgaagacctatcagcctcgcaagttcattgttttcatccccagatggcgagtctgtcattcaggcaggaagtacatacaaccacaggctaagcatcgtgcccagagacaaagagatagggcccagtccatgccatcaagcgcacagtgtctagtgacaccacacatttcaacaaataattacagcccagtaggacaggtgccataagacagagctttgcaatgacaccagg

SEQ ID NO: 125977 - DNA, 499 bp, Homo sapiens
ccaccccttcagggatgaaacggaggccagatcactctcccatcacaatgaggtgtcactggacttcaggtaaatccgtgagactgtgacctggatttcccatccagtcagcaactagggagcgggaggactgtttccttgtcctcaggtatccacctctcaattggtgctccaaatggtccccatgaggtgtgtcaccagtaccccaaatgcttgacctccattgcactctggaaatagggagtggctgtaggatctctctctagtcagcccctactgctgaggcaggagagtcacttgaaccagggaggcagaggttgcagtgatccgagatcacctcactgcactccagcctggcaacagagcaagactccatctctaaaaaaaaaaaaaaaggcccagtacaacagcatgcagtttttcccaggaactcaaagcagtgagtttccacttgactatggggtgtgaagggtcaaatagagagataaggctagaaaca

SEQ ID NO: 125978 - DNA, 421 bp, Homo sapiens
agtgaggtaggaagaaaggcaagtaatgaaagcattccagagtgtaggatgtgacaaactgtgtcaaatactgttggtcaggtaaggtgagggctgagaataattaaccagtggacttagcaacatggaggtagtaagggattttaatgagcagctttggtggaatgaaaacctaattggttgtggatttaaaagagactgtaggagaggaagtaaaaatggaaatggaaaagaaagacatttcttttgaattttgttgtgaagggaacagaccaatgggaactctcgaaagagcatgccctttctagtttgctactctatcatattctcttgtcacaccacttctacttcattccttcattgatcatctgccaggtccctgtaggtatttgaattttcatctgtaccataaaggttctct

SEQ ID NO: 125979 - DNA, 297 bp, Homo sapiens
taggggtggtgtggacgggcagacccctggccagtggagtccagcccctcggatgacacagggaaaagagaaaggcaaagagaggcaagatgtgatgctgaagctccagccagataaatcctagagaggggccatgcatcccagccacctccccattctttcccacctgagcccacccctgagctacggctctgaggcacagggtaacatctgtagtgtgtgtgacagccgcactggcaggagggcaggatggtagtgagggcaggatggtgaggcagtcccagagctccctcccag

SEQ ID NO: 125980 - DNA, 534 bp, Homo sapiens
agtagaaatggaagctcaggaaacttcttaggtttttcagtcccctggtatctgtgtgtattggctgtcctggatccatcaagaggcagctccagagctagaaggggtaactttctggactgcagtactgggcaggtgtgctcagctcacaccctgtggggcagctggctctgtgttcaacgcagcttgctctgaaaagcagctttcctcttccgcttgcaggagctgctgtaagatctgtttttcagctcaaactttccttccttctttccgtggacgttcgcatcagaaaagtctaaggtttattgcctggaattggggtctttttataaagatacagcgcataaaaatcggcctctctgagatctctttggcaggtgacaccacagctattgcttttgatgctgggccagatttcattcaggtccttgacctctggtggggggctgcagttggtgatttagtgccgtggaggcaaggtgattggatggccgtggaggtcagggcccctcactccagtcgctgcccgtgggg

SEQ ID NO: 125981 - DNA, 554 bp, Homo sapiens
aacaagtacatcattcaggtcttctgcaggtcatgctgttttccaaattgactgtcattaacagccccagttttccggatattttattcattcaacaaatgcataatgaatatgtgcaaatgaatacctactctgccaagctttcttcccctcaagtgctaaaaatagagcactgctagagatagtccctgctctcatggagtttatgttttcagtgttaattgagaaaataacactgggagggtctgagggagaactagcatatagagtaaccatatcgcatattgcggttgaaatctttagggaagaaaaactttaatcaaagagtttttgaagagccaattctatgaggccagctaagctagccactaggcatgaggacactggggaaacctagtctctgccccatcccagggttgagcacagacagattattagtaaccttttggggagccctggtgttttttatcctcccacaaattttgggggggagaattttttcctgcgcggcttttttttccccccaaaggtgggggggcgttcctctttggtga

SEQ ID NO: 125982 - DNA, 745 bp, Homo sapiens
ataagtaggtggttgtgtgtgtgtgtgtgtgtgtgtgtgtgtgtgtgtgtttaaagctgttatagaattatctcccacttttttatctcaaacacattgggaaaacctaaagatatagcccctgttatcacattgagcccttaacttgccacaggatgcataaacattatttttgggcatgttgtgagggtgtttctggaaaagattagcatttgaatgggtcaactgagtagaccagatggccctccccagtgtgggtggacaccatccagtcattgaggacctgaacagaacaaagggtggaggaaggctgaattaacaccgcctgactgcttgaacaggaacgtccatcttctgcccttgttgctcctggttctcagggcttgggacctggactggagtccacaccatcagctgctagctctcaggcctctgaaccataccactggctttcctgggtctccagcttgcagatagcagactgtgggactcctcagcctccataatcacatgagccaaaaccttataataaatctctgtgtgtgtgtgtgtgtgtgtgtgtgtgtgcgcgcgtgtataatctcctactggttctgttttactggagaaccctaatacacttctttcttgttgttctgtggcatacactgaatattttaaaccgcatttgtcacaggattttgaaaacgtgatcatttgtttcatcctctcttcctctgcagcaagaatcaaaattcactttgcc

SEQ ID NO: 125983 - DNA, 779 bp, Homo sapiens
ataagtaggtggttgtgtgtgtgtgtgtgtgtgtgtgtgtgtgtgtgtgtttaaagctgttatagaattatctcccacttttttatctcaaacacattgggaaaacctaaagatatagcccctgttatcacattgagcccttaacttgccacaggatgcataaacattatttttgggcatgttgtgagggtgtttctggaaaagattagcatttgaatgggtcaactgagtagaccagatggccctccccagtgtgggtggacaccatccagtcattgaggacctgaacagaacaaagggtggaggaaggctgaattaacaccgcctgactgcttgaacaggaacgtccatcttctgcccttgttgctcctggttctcagggcttgggacctggactggagtccacaccatcagctgctagctctcaggcctctgaaccataccactggctttcctgggtctccagcttgcagatagcagactgtgggactcctcagcctccataatcacatgagccaaaaccttataataaatctctgtgtgtgtgtgtgtgtgtgtgtgtgtgtgcgcgcgcgcgtgcgcgcacgcgcacatgtgcatgtgtatgtgtataatctcctactggttctgttttactggagaaccctaatacacttctttcttgttgttctgtggcatacactgaatattttaaaccgcatttgtcacaggattttgaaaacgtgatcatttgtttcatcctctcttcctctgcagcaagaatcaaaattcactttgcc

SEQ ID NO: 125984 - DNA, 656 bp, Homo sapiens
gttctttgaaagcagatgagaaattcaagaacataaaggaaatgttttaaccaattcttttcctaaggagtgaaagacaaaaaggaaaactgggctaggtgtggtggcccacacctgtaatcctagcactttgggaggccaaggtgggcggataacctgaggtcaggagctcaagaccagcctggccaatatggtgaaatcccagctctaccaaaaatacaaaaattggccgggtgtggtggcgggtgcctgtaatcccagctactcaaaaggttgaggcaggagaatcgcttgcacccaggaggcggaggttgcagtgagccaagatcacaccactgtactccagcctgggtgacagagggaaactctatctcaaaaaaaaaaaaaacttgtaattttctaaggctactcatttaggtgattgaccacgggggtgatcacaaaattttccttagcttgatcagggttaattggacattagtgaaatggggtggtgtacaataacctagtttcccactgtttttctatagagtaatgttaccagatttcctctcctggttgataaagttacgggtaatattgtacgacacattatacttaattctgacacacacattcacattattttctacggagaggattgccccttctcccaa

SEQ ID NO: 125985 - DNA, 285 bp, Homo sapiens
aaggacaggggtgtagtgtcccagggcagcctcttatgaattctcctttcgataaggccatacttcactgtcaccgccaatgttgctgatcttacagtccagagacctcactgaacaggtttctattaactacaacaatgctgggcctatccctgtaatctttataaagctcactcaaaatgtggacaataaatgatatgcatgctgtacgaagtttctaaatataaatacatttagggcttctcatttttttctctgaagactactggattaaagaagaggggg

SEQ ID NO: 125986 - DNA, 849 bp, Homo sapiens
cgcagtggctcatgtctgtaattccagcactttgggaggccaagggggatggatcacttgagatcaggagtttgagacaagcctggccaacatggtgaaaccccatctctactaaaaaaatacaaaaattagctgggtgtggtggcaggcgcctgtagtcacagctacttgggaggctgaggcaggagaattgcttgaacctgggaaggggaggttgcagtgagccgaaactgcaccactgcacgccagcctaggcaacagattgagaccctgtctcaaaaacaaaaacaaaactccccctggtccctgccccaaatattagctacatgagaggataaaggtaatttattcctaaccaatgagaattttgagttacagactaattcctagaaaatcccgctacttctctcctctaatgttatattttggagttaaaaacacatatctttattcccctagtctaaatattaagtggttaagagaaacagggagggtaaaacaggatggtcacttcgaatattaacttgattttacaatttttcttaaagggatcatattaactcttgttaaatctcaactcagtgtgatgttctcagagcaggactgacatgtgccaacaggtatttaacaaacaagcagaagaaaaaaagctgataaaaaatatgattaggcaactgacagaagggaaaatggcgaggattaataaagatttgaaaagatgctcaatctcactagtccatgaaaatgcacactaaagtaaaagcaatattaattctgtcataggtgggaactttaaaaaacaacatttttgttttcatagagtaaaagtcactttcataatgggaatgg

SEQ ID NO: 125987 - DNA, 178 bp, Homo sapiens
gatgcacggagctgctgcgttggaaagcacaggcctcctgaggaggcggcgggatgaatttgggctgatgctactcctggtgattgccagacaggactgagggcacctgagagcacagaaggggctctgcagggcagtgggcacaggctcgttgttggtccttgggagagagtggtag

SEQ ID NO: 125988 - DNA, 726 bp, Homo sapiens
tatattaagaaatattttaatctttatcgtgtcatggtatggtcaaaagttacaaactttgacacctgtgtttaatgcccccttggccagctacaagttacgaaaaaaatttttaaccactcttggtcagtttcttcatctgtaagtggaaataatatctatatttagggatgttataaaggtttttaaaactatgtatacacacacatatatataactgttatacacattatacatagatttttatatagttatgtgtatgtgcatatacatatacatacacacacacacatatgtgtgtatcactcagtatttacctattttagcacactatatagcactacacattcacagcatcttagtgaaaaataaatatacctccaatggagctgaaaagttctagggagtaactggggatagtaaatgattactttccttacctggaaccaaccactaggagtaatgaactaaatattaaaaaatttctaaatgcaatttttaaaaataatttaaaatatgttcaaaaagattagaaaatgaaactattatgaagaagtattattgttgggagacagtcctctatgggtctctcccattgatacacatcttgttgggtttgccaggaatgcgaatgcaggaccagcctagtcttctcgttttgtcgcccaggctgtagtgcagtggtgcgatcttggctcactgcaacctccgcctttgggtttcaaa

SEQ ID NO: 125989 - DNA, 376 bp, Homo sapiens
tttgctatttactgaggtcccgtaggtgatgagactatgctagacgtgatggaaaggatggtagggccccctgcctccaggagttaacgatgcagtgaggacacatattaagcatgtttacccaaataattatcaattactattgtaaagggaaagagaagccctgatttccaagtgttttccttgccttgcctcctcaattcagtgtccttcacctgtaccctgagaaggttgtgatctcggctgagttcgtttctatgaggcagtcttttggagtgaggctttgggaagaaaatcaaaccccaaatcggccctgcagccacctgaggggcacgcagaaggaccggctaaaaagcgagtgagcaaagacccaccc

SEQ ID NO: 125990 - DNA, 260 bp, Homo sapiens
  misc_feature (12)..(12): n is a, c, g, or t
  misc_feature (33)..(33): n is a, c, g, or t
agcggtactgcngcagaaactcttcatcatctnggtcctcattcattatggcttcactctcagggatgataagcccttctcctgcttctcttttcccagaccccaaagtcttccctcagcctgctctggcgtcccccaccccaagttccctcctcaaactcctcactaccagcctttatcccctgaagtttgaaaatcccctggctagcagcaacacctcagtccaaacaggggcccttaggggtgcctgttccaccctc

SEQ ID NO: 125991 - DNA, 203 bp, Homo sapiens
ttaatttttgagcccataaaaacaaaaacgataacaaaactataaataaatatctaaaatatattgaatgcctacatgctaaacagtttactaggtacttcaacattatctgattttatttaagctccttttttttttttttaaaccgagacttgctctgtcacccaggctgaagtgtaatggcacgatcttggctcactgca

SEQ ID NO: 125992 - DNA, 380 bp, Homo sapiens
tctgctgtaactccctgtcaaagaatgctttgctttctgctggtacagtgaggacatctttcacacaggagtttctatggcctgttttcaggaagaaaggagtagatcagaatgcctttcttgcatctgctgtttctcaagtgcctttagctcaaaataatctttatgtcaaaaaggcatattatggcatattatggggtgccactcttcattgccaaataatatttcatcacatgactataccacattttatgtatccattcgtcattttatggacatttaggttgtttccacatataggctattgtgaataatgctgctgtgaacatttgtgtacacatatttgtgtggtgccttcagttctcttggatagataccta

SEQ ID NO: 125993 - DNA, 177 bp, Homo sapiens
cacctgttagacctccacctgatgtcctatagcattactactgcctccatctcttgtgtttctacagcatgaaagttgttcttttccttttcaagagcctgcaggaatttctatgaggagtgtgtgtaaatggatggtatttaggtaaccacacttctgcttgtaagctattggtaa

SEQ ID NO: 125994 - DNA, 696 bp, Homo sapiens
ggggatgcactgggtaactgccctggagcctcttccttaaagtatgccaaaacagacttccagaacctcatttttaacaggcattaggtaacagtgtaataaaacatactatatcaataaaatttaatgcccaaataaaaaaattatttgtatacatttttatatttatttcactatataataaaggggctattatattgttgccatatgtcttttctaagtaagttgcaactccttacttatctgggtctgacatcaggacagctgaagcacatggcagtcaataccactgcggaaacagcacaagaaaggattgaggaaagcaaagacctaaacttaattagctgtaatattgtgcagctaaatgacacctatattgtgctggtcccttagattttttggatctggaccgcaggggttagattcatcactgagatcatatctggcctctgtgcttcaatccctgtttcagtcgtgaccaatgtattggttcttttctcacagtgaaataagaactagggatttctattacaaccagaatgtagtaaaggcatggaatctcttgtaggtactattttctattttactttatgggcaaatacagaaatattacttacagacattacatgttatttattaacatgctaataagccttcacacatttaaaagtaaacattaaacttctaacaaattaa

SEQ ID NO: 125995 - DNA, 660 bp, Homo sapiens
tgagaagagtggcgtgctgtgtgagtgtgtatctgtgggtttttccacacatcttatatgtaaattgcaaataaaggaactaaaattttaaaagatgagtcagggatgagataatggtacgtgggcatgatgttaggaagaaaaaaattagcatcctaaagttaagataatgccaccatttcagtaaaaataaaaaaaattcttttaaagaatagtatctctggtttatttcctcatttctaccttttacttctctctaaataatttcagagaacatattacaaaagacatatgatataggattaacaaaacaggattagaaaaagtatataaaaagtatttacaaaggagaaagctgggacactccatgggagtcttaacatggtcaccatgatagcgaatgtaacccagttctgggtttctgagcaaaggtatagagaagacaggttgtgttacaggcctctagtactcactggggatgaagcataaccatttcccaagggaatcttttttccagacctagctctgaagtacattactcacatgtttttttttaaaaaatgatattccataatgtgatggatgtatttctcaaaaagagttttgattaaatgtagaagaaaatccctgaaggctttttcctatataaacctgcagtgc

SEQ ID NO: 125996 - DNA, 345 bp, Homo sapiens
tcccttaaacgcagggtctcactgtcacccaggctggaatgcagttgtgctgacatggttcactgcagcctcaacctcctgggtttaagcggtccttctgtgtagctgggaccacaggcatgtgtcagcatgcctgactaattgttgtgggtatttaaaaaaatttatgaagtttgtattttgttttagatgttgcctttatattaaaatccttatgtaatagacttagtgcccccccaattttttggttattttctgttggtttcttactttgaatactattgaaattacctagtaacttctttttcttcccaagcatttgatttaaagtaatatctttttctt

SEQ ID NO: 125997 - DNA, 440 bp, Homo sapiens
ttgcaaaaggcttgggaagtgggagagaaaattagtgttaagtggatatagggttttagttttgcaagataaaaaagttcttgagatctgctgcacaacattgggaatacacttaatattactgaagtgtacacttaaaaatggttgaaatggtaagttttatatatattttttactgcaataaaagaaagagtctgggcatggcagttcacatctgtaatcccacttgaggccaggagtttgagaacaacctaggcaatatagcaaaacttcatctattttaaaaattaagaaagaattagctgggcatggttgcatgtgcttgtcctaggcacttggggggcttaggtgggagggttgcttgaggccaggatatcaaggttggagtgagccctgatgggggccaggcagagcaagaccctgtaaaagaaacagaaaga

SEQ ID NO: 125998 - DNA, 398 bp, Homo sapiens
caaagtaaagggggaaaaaatcactatccaagttggagttcagcaaaagaatcacaaagcagaggaagaaaaatactaatttgctatgaaaagtaattccattgggtaagtgaaaagatgcttgtgtatgtatgaatgatgaatgagaaacaagaagaaattgacatagaaagttacttatgacaattaactaaaaatccatattttgccaataaccaacaggcaaagaaatgagcctctctaagcctcagcttctttctcctaaataccataccctgactcttctatggaattcaggatgccacacaagtatctagcaaacataaatttgaagttcagaagaagcaaggaaaaccaacattcaatgttcaattcaaaatagccagtaaggggtaagg

SEQ ID NO: 125999 - DNA, 597 bp, Homo sapiens
gctgaagggaagtgggaggtgagacaggaaagaggcggtggcatgcggcgtccgggagctgggtcccatgtgggcagctgggcccgtgctcactgtgggagctggtgtgttccttcaccagcccacactccacaggtttaggatggtcaattccgggcacccctggcctgctccaggacgtgctcctgccaccagagaaagcccctaggcagcgtcccaggtgctggtggtgtcagaatcgagtttgagtctgaggagtgacctggggctggctgggctaggcagcatcacggggttctgcagcccaactgcacatcaggctggtgacagtcacgcagcctattacctcatgtgtcatcagaggatcgctagaacacagcacttcaagtgtgcagatttagtgagccatagtctaaagacaaatagagccactgaatcctaaatttcaatcaatcatctccattactcgtcttattggtattaatcctttgaaattatgtggggtgggagttaaagctaataactaattatgttaatgctaaaactaagatttttctggcaagggaaaatcctcccaagtcccagcactttgggagg

SEQ ID NO: 126000 - DNA, 312 bp, Homo sapiens
agaccagtaactggctgtgatgtctgctatcttccagccatattctcactaggtgctaggctggcaaggcagagtggttaaggccaagagttctggaagtggcagagcaggggaatttgtttaatatcaacaatactctgtccctgaaaattctcccaggcctcagagggaacacatgcctacccttttgcacttctgctttttttttttttttaattaacttcttccggtttcaccttgaacttggctgtgatcaaaaattgttgcctgtgacgagtcttcatgaaacctgcaattagaatcctggccctg

SEQ ID NO: 126001 - DNA, 624 bp, Homo sapiens
caccacactcagctaatttttgtatttttagtagacatgggattttgtcacgttggataggttggtcttgaactcttgagctcaaacaatctgcccacctcgacctcccaaagttctgggattaaggcatgagccactgtgcccagccctccctactgaatttaaagtaatttctttccttcctttcttctctcttttccttcctttgttcctttctctctctctctctctccctctccccgctctccacccctttctttcttctctttttcttctttttttgagatggagtttcacccttgttacccagggtgtagtgcaatggcacgatctcggctcaccacaacctccgcctccaggattcaagcaattctcctgcctcagcctcccgaatagctgggattacaggcatgcgccaccacacccagctaattttgtatttttagtagagatggggtttctccatgttggtcaggctggtctcgaactcctgacctcaggtgatccgcctgcctcggcctcccaaagtgctgggattacaggcgtgagccaccgtgcccggcccttctctttttctagaaaggttttaccactcctttcccgctcttctgaggacagtaagaa

SEQ ID NO: 126002 - DNA, 324 bp, Homo sapiens
tggccttgaactcagggccccctggggactgcaggggatgctggccatgctgagcaatgcctgtgggtgtcagtttcctcatctgcagaatgagggtaggcctggtgcttatttcatagggtcgcagaggggattcagtgacagggtggtgtagaggctggagcgtgccccatgtgtgcacgacagccttccaactaggggaggcgggcctgggctctcaccagagagcctgtgttctccatggctacatgactttgccccagacgtccttcccgtggtctggaccctgggaagtcgccaagagccagacaggagaaaggctcc

SEQ ID NO: 126003 - DNA, 712 bp, Homo sapiens
ttgcttgggaggatgtggggcaatcagtgggatctggggcaggagtgacaaccgaacccagcagggggatcccaggccaaaggtgtggctgcataaaggccaagtggccactggaggcagaggatgcatggggagaagagccacgggagagggcaggctgggaggcaggtacccctaaagcagcagtcggtcagtggtgagagccagcagggggcgaggcagggggctggccagtctacctgttacctgagctctgcctttctctgtaacgggagcttcccagcaggcagcatgtcctgtggaccctcaacccaaacaggcctttccctccgtgctctggtgttcgtgggctggagtccctggcaggaggactgggcagagagaccccagagtccaagaaaggagaggtgactttgtgagcaaactgggtgctgccgtgggtggggacccctggccctttttggacctcactcctggcctgggatggggcacagagttccagggctgggagctggttttctgctctttgctggttttgcccttgagccgtgggattcttatcacgtggtgtttgagggctggaccattgacatgaggcggaatgagccagagaggactcgaagcctcagtgctcctggccctctgtgaggctgcagccgtgtgccctggagtatctgcagccttgggcctctgggtgggcaggggagttgct

SEQ ID NO: 126004 - DNA, 454 bp, Homo sapiens
ccaaaaggtggttatatgccccaggagatacattagcattttagataaagtaagaacctagagaaggcaggctccctctacagcaagtccttcctgctggggcctggtcttattcatcatggtgtctctagtgccaagctcagcacctggcacgttggagtctgcggcatatgcttgttggctgttgaattaatgactatgagttggaggacgacagtttaacaaaaaggagaaaagatttgaaagtgaagttttctcaggcagcctaaggagtgttggatcagcttagatgcagaagggaaagagattatctgcagaagtctgggaaatcatggtgggctagacaagaggaacctagatcgggggaatttaacaaggacctgtctcaaaactggatttttaactcccatatcttccaagtaactttgtttttgtttcttaggtttacaaagtt

SEQ ID NO: 126005 - DNA, 409 bp, Homo sapiens
ggaattcgagaccagtatggtcaacatggtgaaaccccgtctctactaaaaatacacaaacttagcctggcgtggtggcgcatgcctgtaatcccagctactcaggaggctgaggcaagagaatcgcctgaacccggtaggcggaggttgcagtgagccgagatcaagccattgcactccagcctgggtgacagaaccggactccgtctcaaaacaaaaacaaggctcagagaaatatattccatctcttgatggaaagagctgcaaaatggctgattgtaaggagcgtggatgcagggaggagtaaagaattgagcacattgttttttaaattgtttcaccacaggcacttacatacaatatcgcacgctgtagctagattgggctaaatctagagctggaggtagtg

SEQ ID NO: 126006 - DNA, 98 bp, Homo sapiens
tagtatttcccagggtctcttgtttaccctcttatctttttggtttgcacacagttcctcatggcatttatgtcaactgtcgtgtctaaccatatttt

SEQ ID NO: 126007 - DNA, 497 bp, Homo sapiens
taacctgtcagtgactctgtctagggatatgtatgatgtatgtttgtctattggccactgacccccgaatgtaagcctgtgtggctgtctggctgtgccatcatcagtgatagggtatgtggctgtcattggataagataaatctgtgttcaagattctgactttttgtagctttggccaggaatgggtctgactgtggcatgtcatatgcctgtctgtggagttcatggactacctctgcctgtgtgtctgccttccctgatggcttggtgttgtctagctgaggggttgtacccgactctggtctgtgcctgtctgcaggactgactgcctctagtttgactatagggtttgatctggctctttggttgtatggcccctcccctactccctggctgctgattaggtctaatgccgaatgagtctccaaaaggtcaagtgacttgaccagtgtcacccagctaagcagccaggcatgaatcccaggcctaacttca

SEQ ID NO: 126008 - DNA, 152 bp, Homo sapiens
agtagccctgcctggggtgcttgctctcctctccagctccagtcaccacctccctttccttcaggcagatggcaccacctccatgaagccttctctgaccaccccacccagagacgactttcctttccgttacagctcttgcctttgatagt

SEQ ID NO: 126009 - DNA, 296 bp, Homo sapiens
ttttcttaagcatcattcatgaaaagagaaaagtctgcttcgactgatagtattaaacttgcagtcaataaactcttattacagagttatactgtaaaacacacacaagcaaacaaaatcgtgtcctggaagttgaataggtcttaacattttagaaggaatatggaacataaaatgtgacacactgtttttcattctctcatgatttgggtttccaatttcaacactgatcagctgttctaatgcccatgttgccaaataccttaatgtttataactaatggtgttaactcttcc

SEQ ID NO: 126010 - DNA, 307 bp, Homo sapiens
agggcgaggttggggccccgtttccttcccctgctcgagcagaaggagttggggtgcagggttcgcccactgtttcctggtggggcgagagaagaggcggctggagagtaggtttggacacggacggtgggtttcagccggcaggaaagcgagtcttggagggaatgggggtggagaggggaagagaacgctctggacagatggctactccgtcgcagccctggctggggagccgctgaggacccttccttagccggggggtctcagccagggcttcccttgccaggctgtacgtacgaccccttct

SEQ ID NO: 126011 - DNA, 378 bp, Homo sapiens
cgagtgtgaccatcgcttcggccctatgcctgtgcctagtgtggtaagactttcagcgtcagctccaacctgatccagcaccagcgcgctcacaccgctaaaagccttaccgctgaggggactgcggcaagagtctcagccttggctccaccctgttgcagcacctgcgctccacatgggtgagaaggcctctaagtgccttgtttgtagtaagagttttgtgcacagttggaatctgctgcggcaccagcacagtcacaaagtccggaaacctgatgcttggtggtgagtgtggccagaccttcggccacagctcccacctgcccatccactaggcggcccacagcagtacccctgcgtctgcctgcagtgtggcag

SEQ ID NO: 126012 - DNA, 540 bp, Homo sapiens
tctgccggtgtcccatggctcagataaggactgagatatctatgtccctactgcctctctaggtttgggtaaaaatatagatttgaaacttagatcctcatcaagagaggatgatcacattgtcaacctcatgcctggtatgtaaaaccacacgttatccaattctcaaggaaatgcgacaccacaaacacttgttacaggattcaaacataaactgactttaatccaacaacaactaaatcgctcacctgagatacctgatacctgaaagactgtaatgcacatggtccctgttcactccctcgcaatgttctggctctttcactgtatcaagttacatcagcaaaacgcagaaagaatacaggtcctgcaatctccgtttctcaaagacatgccacacaaaatggttaaaaaaaatctaggccaggtacagtggctcatgtctgtaatcccagcactttgggaggccaaggtgggcagatcacgaggtcaggagttcaagaccagcctgaccaacatggtgaaaccccatctctacta

SEQ ID NO: 126013 - DNA, 336 bp, Homo sapiens
actgcattgtcttggggaaaggttttagatatagggaggggtgatgagttgggaacaataatgtagtctgccacaaacatattaaagtgtaactggatatggttgctgcagaattttgaacctttgttttaattgtgatttttactcttttccccctatctagtgcccttttgtaatacagtaattctcatgatttttgtctgaattgaaatcttctgagattagattgtctacgaaaatacagtcgatcctccttgttttcagcttttgtatttgtgaactcacctactattttttgtaacccccaaatcagtactcacagcactttcatagtca

SEQ ID NO: 126014 - DNA, 141 bp, Homo sapiens
gacacacatacacaaacatataatctaaactgtgttgtgatctttcttgatttaaaatgtttctaattaccaagaaacttcatctacctggcctactaagaaaataattcaagccagttagttcatttctccttttgtgta

SEQ ID NO: 126015 - DNA, 741 bp, Homo sapiens
tcagctatgtctcgatcgttagttttagtgtactgttcattttctatctcacctcatgagaatttacattccatgtgggcacagttgtctttgttttgttcactcctacatcaagggcctagaacactgctagacatagagcaggtgttcaattgtttgctgagggaactcgcatgcatccagtatggagatctctcggcttcttgggcatcccatctctagtgacacattcctccactccatctctatctacatccacatcccaggctgcacccaaaaatacaccaacacatgaaaggtgtcagttcgcagattacacgttcagaaaagctcactctgggaccattacatgtcttctttgtgtccaattacctgcaggatatctgttctttgacttcagcaggggcccaagcaaattgatctctttcctggctccctaacaatcagttccttcctatcttcatttctttctccatctagctttgatgctacggtcttaactacccttcattaaattcacagagtgcccttttgtcctttgatcacatacccagcaaatgctccaaattaaatgagttgagtttaaggagataccatgtaggcagataattatatgaatctgtacttcagaaaaagtgctggtctctagatacagttttggaaattagtacaatatagatggcaataaacccaagggagtgaatgaattcactagaggtatacgctctccagaagtaacga

SEQ ID NO: 126016 - DNA, 404 bp, Homo sapiens
ataatctttccctttttattttttattattattttacatcagaaaagagctggaagtcttcctgcaatgaaggagaatcctcttctacttcttatatgcatcagaggtcacctggtggtcccaccaaactgattgagatcatctcagactgcaactgggaggaagatcggaacaagattttgagcatcttatcccagcacatcaatagcaacatgccacaatcacttaaggtgggcagcttcatcattgagttggcttctcagcgaaagagccggggtgagaagaaccctcctgtttattcttctcgtgtgaaaatctctatgccatcatgtcaagaccaagatgatatggctgagaaatctggatcagagactcctgatggtccattgtcccctgggaaaatg

SEQ ID NO: 126017 - DNA, 817 bp, Homo sapiens
aaaggtgctcacccctgtaatcccagctacttggtaggctgaggcaggaggataactagagcacaagaagtggaggctgcagtgagccgcagctgtgccactgcactccagcctgggcaacaaagtgagacacatccaccctcaacaaaaagtcgttacaagagacagcattatatatggataaaagagtcaattcatcaataaaaatgtaaaaattataaacatgcacccaataagaaagcccaaaaatgtaaacgttggcagaatggaagggacagacaacaaacagttctatctatagtaagagttggagacttaaacacaccacttaataatggatagaccatctagggttgggagcggtggctcatgcctgtaatcccagcactttgggactacagacatgagcgaacaatgccacgccaagaaatgatgtaacacatacactagaatagtcatgacacggccgctgtaacaggttgactaaacaacgtagaaatacccagcataggtatggagagggatagagagcacgagagactaccctagcaagacacagggaaaggtggaacgctggagagaggaagcccgggaagcctgtggcgaacagcatggacaccggcccgaggcagctggaagcacactgaaaggggaaggacaaacatgtcgaacccctcaaaccttgggagacgacgagcgagccaagaagaaggggcactaagaataagtcgggaacaacacaagaagacacaaagacaaccacaatatcacagatggcatcaaaaactcatcacacaaatggcgacactaaacagca

SEQ ID NO: 126018 - DNA, 218 bp, Homo sapiens
gttggctttccagtcctcaatcaagttatagttgcacttaaaaatacgtagttttctttatcgttaatatgaataacaccatatgcaaattgggaaacaggcttagatcttctcctaggcattatctgtacccagttttcctgtaagtattcaattgggctcctcaatcaacagagaagagcttcaaatgactttctttgttgtcaggctccattctc

SEQ ID NO: 126019 - DNA, 813 bp, Homo sapiens
gggaagagtgggaggggggtaagggataaaagactactacaaatatggtgcagtgtatactgcttggatgatgggtgcaccaaaatctcacaaatcaccactaaagaacttattcatgtaaccagataccacctgtaccccaataacttatgaggaaaaaaatagattatgtacaatactgtgccattttatatgagagacctgagaattcatggactttggtatctcagagcaggggataagttttcctggaaccaatcccctgaggatgctgaaagatgactatatgaaataaactcagaagctataaaagcaaaaagttgagaaaatgaacattacttacaaatcaaatattactgcaaaggccttaaacaatatgaagctggaggaaatacaacttatagacaaagggttaatttttctcacagataaagagctcctataattttataagaaaataaaacccaactcattaaaaaaatgggtaaaggatatgaacagaacaattgcagataaaagaaatacaattggttcttgaaacacatgaaaagattctaaatctaatcattataatagaaatgcaaattaaaaatgtaatgagatgttattttttttgacaaggataaaacatttttatgacactgtttgatgagagtatggaaataaagttaaactcattgatgatctcctgcatttcaggtgggagaataaattggtacaacccctatggagagcaatttggctatttcaataaaatgttaaaaggcacatgccttggactcaacaattccacttttaggaatttatcctata

SEQ ID NO: 126020 - DNA, 239 bp, Homo sapiens
ccacattgacagcaccagctgaaggtcaccccagccatctctgtcccccatctggccccattttctctattccactcctgtgacaggcctgctgtatgtttctcccactagcatggaagtgccctgagaacagggaccttgtctgactcagtcaccagggcatcctcaatgcctggaaaagcctggcacagatgaggtacccaataggtgtgtgagctaaggctgagggggcagcaacg

SEQ ID NO: 126021 - DNA, 237 bp, Homo sapiens
gggactgagtctgtgccgcctaggctggcagggactcggccagatgcactagcggcaaggctgggctgacaccgcctgggactcgctcgccgtacctccaaggggcccaggtcatgagggggcggctggggagacgcccgcccggtgcccgccctgggcccggcgggtgccccctgcccgccgcctgacgcaatccgaggcgcccttgctgcatgccggcgctggagaaacctcccc

SEQ ID NO: 126022 - DNA, 155 bp, Homo sapiens
ggttgatactgtgtgttcatgataaattctgtttaggccaggtacaaacatcaactggaagtcagaattgtaaaggttgaggattggtagcatttaatcattcattctgtatactgaataagtgaacaaaatgcttttcaaaaaacaattaattt

SEQ ID NO: 126023 - DNA, 119 bp, Homo sapiens
gtctacttttaccttctattaatatagtcactctttcttttcatcaatacttccatggtatgattttttcttctttttagttcagccaatctatattcttgtatttacagtatatctct

SEQ ID NO: 126024 - DNA, 419 bp, Homo sapiens
gcgcacagcgtaggcttaacaataggcacctctgtccattgacaagacaccagggctccaaggggaatggctgcaactatgcagtaaaacatgtctgcacccagaggaaacctgaaccacaatacgcaaaaataaaaatcatcatcatggccgggcacggtggcacgtacctgtagtcccagttactagggaggctgaggtggggggattgcttgagcccaggaagtcaaggctgcagtgagctatgatcacaccattgcactccagcctgggcaacagggtaagaccctgacacagaaaagaaattaaaaaacctatagctcagagatgtagggggacttgcccaaggtcataccaatagtggtcagatagctcccagccctaggtatcatttcctctttatactgtgttgacacaga

SEQ ID NO: 126025 - DNA, 463 bp, Homo sapiens
ttctgagaagcaacctcaaagtcttcacaatgtagaggaaataaacctcatgaaaatagtctagccgagtcactgaataaataaataagcaaacagcaaaaactggagaggggagagaggaatcagtcgtcagtacccagaagtgatacaatatattacctaaaatatccagttctcaacaaaatatcatgagacttgcaaagaaacaaagtgtggctcattcacagggaaaaaaagcaacaaaaatttcctgtgagaaggcccagatgttggattgaacagaccaagacctcaaaacaaccattataaatatgcttaaagaactggaagacactatgcttaaagaagtaaaggaagctatgatgacaatgtctcatcaaatcaagaacataaataaagaaatagaagttacaaaaagaaccaaatggaaattctggagttgaaaggtacagtaagtgaaaag

SEQ ID NO: 126026 - DNA, 363 bp, Homo sapiens
aaaatatcggaccgggtcctgcccatgtactgagcacctttagggcaccaggcaaaaaatgcactgagataaataagcagaggtcttgacctcaaggaacttgcagtctaatcggggaaaacaccaatacataacagatgagtaaatgtaataatagttttggtgttacagcatgtgcctagtcccagtatgacacaaaaacagatcatttccccagaggccccaggagatgcctttgatcatccctataaggagagccctcccttaagtcatccaacccaacctcatcatcctaccacctaaacctgacccttccttacaagagccctctgctgttatggggccccataatcctagcaatca

SEQ ID NO: 126027 - DNA, 274 bp, Homo sapiens
gcctttatctcaatcataaatgttagatgagctgatctgaggcaggctatattcaggatttccagaataaacttttgattccttatataagtggtatcagtggaatgtgagatatttctaaggtaaactttaagaaggaaattctggccagagccagtgtctcatgcctgtaatcccagcactttgtggggctgaggctggagggttgcttaaggctacagtaagctgtgatcatgccactccagcctgggtgacagaactagaccctgtctca

SEQ ID NO: 126028 - DNA, 306 bp, Homo sapiens
catctcacgtgatgggtcacagtcaaaacacagtcaaaattttgtttcatgcacaaaattaacaacagtgcataagaccaggtgcagtggctcatgcctgtaatcccagcactttgggaggccaaggtcagcggatcacctgaggtcagagtttgaaaccagcctggccaacatggcaaaaccccatctctactaaaaatacaaaattagctgagacaggagaatcacttgaacctgggaagcggaagttacagtgagctgagatcgcaccactgcactccagcctgagcaacaatagctaaactc

SEQ ID NO: 126029 - DNA, 260 bp, Homo sapiens
tttcctattcctcatgtatggtacaaagttaccttaaaatcaaacatctgtttttccacccacactgcccatgcagaccacacttgggctggtttaatgtgtagcagggccagtctgttatcttgggctgcccagcaaggttcagctgttgggggtaatgtttaaactccagctacacagtacaagtcttctaggatgcagagctagctgaattttcttttcttttctgtttttttttttttgtttttttttttttttga

SEQ ID NO: 126030 - DNA, 287 bp, Homo sapiens
ttatataaccttctttaatcttcagagtttgaatttatctttcacttcttaggacttcaatgacattttatggatatctactgcagttgttctataaagtggtcttgtgatgcttatataaacctttctaccactcaaatgaaaaacattgagggagaatttttgtcataccttttccacaaatgttgcctaaaaaaggctttgcatttagtatacattcaacaaatatttacagaattgtaccaagataaaatatttagtatgttagactagctaagtgatcttaa

SEQ ID NO: 126031 - DNA, 396 bp, Homo sapiens
gcccaggaagaaatctatattattacagagtacttatctcagaagggttgttataaatattaaatgagagttattttatggaatacatctgaactagtgcctggcacataaaaagtgttatataagtatcagctattgtaattacagagtgacaaataaaaggtcggagtgctatggttatggaatagaatgatgagaaaggaaacttccaggagcttaggtgtactttaagtgcaggtatcaaatattgatgcttcattatggcaagggggctaacaagttgccagtgtgtcacaagtcaacatgcaggcaaagatggaaacattttccagatctaaaatgtagttaaatatgttgtactttggaatcgtatatgaactttattcccctttcaga

SEQ ID NO: 126032 - DNA, 708 bp, Homo sapiens
atctggttatgaacgtcccttctgttaaaactctttaatttctttccacttccctttgtataaacacccatacagttcacgatttaaattaggggaatgattcataatgtgcctaactctccaatctaatttcttccaaactttgtcatctagccaacctaatttcttttggttcatcagtgttctcttcacctctcagcatttgaatatgtagttccttttgtctggaatactcttctcccctccctcccctatttggcttgactaactctaattattctttcagggtccaggttacatgatccattttctgagaagctttctctgatgtctcaggtctggaaacccaccccctccagcacctccagggatttcctccatcactgttttctgaaatgtgtgcttttctccgggaggcagaccacatgggattttctcaactttaaagctccagcaactaccactggccccggcacacatcaccctcatagttgtgctgaatttaattaaatgttagggttgtttttcctttctctctctttatttatttatttatttatttatttatttatttctctttctttgtcttttcttttttttttttagacagggatctcattctgttgcccaggctggaatgcaatggtgtgatcctggcttattgcaatctcctccaaagaccaaatctcccaggctcaaatgatcctc

SEQ ID NO: 126033 - DNA, 476 bp, Homo sapiens
ctatcaggatccacactgggttcgaaatcctcacccaagctaaaggtagcatactctgcaacgtactcttctaggcaggttgcctgggccctctcttttctccacagaagagccccaccacctgcatccctgaggcatgaaaacactttcacgtgctcctccacttcctccccagaaggctggggacagaatactatgaggaaccatcactcagtgggaagcccccacacactgctactgctcactgggccctggacttgctcctgctttcctcacacagaggacaagccatgattctggatcatcctatggggtaaacccacctatggagtacctttcccacaatgcgtgtgttggatctactgggatgatcactggcctggctgtagcaaaggagcaacataaaaaggattttgtctctgtgttcaacgagcttatatgcaaacacatatggaatcaagaacaaagaacaagaa

SEQ ID NO: 126034 - DNA, 510 bp, Homo sapiens
ttacacacacacacacacacacacaaacacacacacaatgactaatgtaaataccttcctgctttataagtcccacacaaagcaattgtgttcatatgcgtgtttttcatggcactccttgaatcagcttggagtcactacaaattattatgggtaataaagggcatgtgccagtaggagggattctcagacaagggagtcccctccctccagggcttcagacttcataagggagcaaatagggaatttatgtggcacaaatatttaatttgtacgatcatccttaggtgatgctttcatattagtaaggatgtatttgtgagtccaattgtagtcattagcttctgaccgtaccttctcccctgcatattgcctgcactacattgccattgttgacttctgggacaattttccaggatttcattactaacaaaccttgccttttctggttgcagtttttagatactttatttaggttacatttaatcttgtttaccatatttagggtga

SEQ ID NO: 126035 - DNA, 367 bp, Homo sapiens
ggtatagtgccagggtcaggtgggtgtgtttgttcagcttcctaatagactcctccaaaccatcctggtaaaaatggggcactgactcacactgcattgttgcagatgggtggggtgaaagttcaagtccttcttcatcccacagtcatcttcctggtcaaagtgggacgctgactcacaccaccttgttgcctctgagtgtgactatgtgaccagctccctgactggctccactgccttcggggttgtggggtgggagggaaggtaggaaaggtggaaggctgactcacaccaccttgttgctatgagtaggagtggagggtcagcttggctctgcatattgttgatatcaggaaaggggagaagc

SEQ ID NO: 126036 - DNA, 283 bp, Homo sapiens
agagtggtgagggctgggaggatcagtgatcccaaaaagagaaccactagccttgggaggggggatgagtttgaaatgaaacatcttcatggcagttggagaaagatgactagaaatacagttacagtgggtgccatgagcctgggcaagtagtccaaagagtgaggctagagagaaaagagtaagatctggtcttgggaacagaggctgagagacagtccaggggaaagagatcaaataggggagatcagagaggacagggtgggtctgtccaagccacggc

SEQ ID NO: 126037 - DNA, 364 bp, Homo sapiens
tttttctttttgtttatagatgaagatcaaaaaaacagcttttttcccaaggagacaacctggctggggtttggggagtagtgtgttcttaaaattttttttttctatttttttcagtcctttgggatttctgtttatgttgctttttaaatgaaaatgtaattaggccttcttgttgacatttccattaaaaacaagcataacttaaaaaaattaaatcagctttatagaaaagaagataaaaatttattattccttttagagaccctggtgttttctctcctctgttttgttcacttagtgcctcagactggaaggtatttcctctgttggttagtttttaaatctgaaattcttcttttat

SEQ ID NO: 126038 - DNA, 232 bp, Homo sapiens
gtgacagagagaagcagtgaactctgaatcacaaaattgaggactctcagttgaaagcaccccttgaggttgtcatgacagccttctcttccctggaacataatccctgcttgaatcctctcttcagcaatatgtgtatagatgtgagagaatttttgcagtctgttggctagctttccatgcatcatataaaaacagtcctcttatagacttgacttgccagttcacacac

SEQ ID NO: 126039 - DNA, 312 bp, Homo sapiens
ttccggctctctgcataccaagtgcctatagcaatgaccccattatggtgatgacccaaaatactcccctcctcccaaatttccaaatgtccccaccccagctcagccactgtgggcacaaaggagagacagtatctactttaacaccccaaataaagatgccccaacattttatatcttcttcttctttttttttttttttttttgagacagtcttgctctgtcacccaggctggagggcagtggcacgatctctgctcactcactgcaacctctgcctcctgggttcaagcgattctcatgcctcagcct

SEQ ID NO: 126040 - DNA, 331 bp, Homo sapiens
ccacctcagcctcccgtggctgggactacaggcatgagccatcatacccagctaattttttaagtttttgtacagatgggggtcttgttatgttacccaggctggtcttgaactcctggcctcaagctatcctcccacctcagcttcccagagtgctgggattacagatgtgatccacctcaacaagcctgtttttcatttttagaaaaatgtttttcacagattcttgaattctgagtgcattcctcctaggggaagaacaagccttttaaagctgcatgtttgatccccaacagggaagtgtttgtattcaaagggtctgaaagctccc

SEQ ID NO: 126041 - DNA, 219 bp, Homo sapiens
tggctgctacagtcctctattaagcaatgtgccacagcaggggtgcctgacccctgggccatggacatgtactggtctgtggcctgttaggaactgggccacagagcaggaggtgaatggtgggtaacaattgaagcttcgtctgtatttctggctgctccccattgcttgcattgctgcctgagctctgcctcctgtcagatcagcagcatcattaga

SEQ ID NO: 126042 - DNA, 497 bp, Homo sapiens
ttctggaggatccccttcgagggttctgcttctcttttaaatatgagttccaactttaaatcatttatatgctcctatgtctgaccacaggtgttagaagtagccacaaagcctctgaatgttctgctgcttagaaatttcttccaccagggccgggtgtggtggctcatgcctgtaatcctagcactttgggaggccgaagcaggcagatcacagttcaagaccagcctggccaacatggtgaaactacagtgttatacaaatggagtcatacaatatgtgaccttttggaatagcttttttcacttggcataatgcccttcagatctgtcagagttattgcttgtatcacaactttgttcctttttaattcccgagtagcattttatatagatataccacagtttaaccattcatttattgagggatattttagttgccagcttttgactattacaaataaagctgctgtgagcaattgggtacaggttttttta

SEQ ID NO: 126043 - DNA, 245 bp, Homo sapiens
gcgaagagtggggcaggggcagggatgtggggatggagacgtctcctggacaggcacccactgcagccgggtcctgggtcagcctggacgaccgaggctgggatgtggagtccccagcaaggaagggactagggccctaagggatgtgtggggtccgcaggaggtcacacgggaatgtgtgtgagaggacaaacctcccccactgtaacacttcacacatgtacctgcccagacgctcacacaca

SEQ ID NO: 126044 - DNA, 478 bp, Homo sapiens
cagacgagcaaactgaggctcaaaggtggtgttatgtgttggaggccaccctgcaaggttgggtccacctaactcatgagctggtgccttttaaccaacacgtcattgtcgggggaggctctatgaagaccatggcagccagtcacttgatagaaagaaaggatggtcaaagagaggggaggccaccagtgttgaaactgcagtcatcagcattgcagtatccagaaaggggtacaccacgcctgtaatctcaacactttgggaagctgagatgggaggatggcttgaggttaggagtttgagactagctgggtagcaggacaagaccccattgctatgaaaaattaaaattaggctgggcatggtggcctgctcctataatcccagcactttgggaggccgaagcaaaaggactgcttgagtccaggagttgagtccagggcaatatagtgagacctcatctctccaaaaaaataaa

SEQ ID NO: 126045 - DNA, 290 bp, Homo sapiens
cgagtactcatgtcattacactcttctgattttaatgttaaaatgctttttctctaagtgtctttctaacgccacttaaaccatcctaattggaatctagggcttagtctattaattttttaagtatcagaaataaagaaaacttttttaaaaatcagctttctcatataatactactagcagaatagttttagaaaagctttagcagagaatcaaaagaccagggttttattatcatctcagcaattactaagtagctacataacactgagcaagctatgaaatctgag

SEQ ID NO: 126046 - DNA, 297 bp, Homo sapiens
  misc_feature (265)..(265): n is a, c, g, or t
ttgtgtttgaaagagaaagaaactttgtacattttcctttcggtcttggtttactttacctcagcgtttttcctgctctgtgcacttggtgtcataatacttagggtcactagggcagcaatggaggcaaaatagatttgatagacacataaatgtaaatctgattgctcttgaccctctagcttactcactgctgagtgacgtattgagctagggaaggatagtttccatacattaatgaagaatgtatatttccagccagacnatggtggctcatgcctgtaatctcagcacttt

SEQ ID NO: 126047 - DNA, 664 bp, Homo sapiens
tacttacagctgacatatcaagtagtagatgtatattcaatagaacaaaggtaaacattaaaaaaagccactggtcaggtgcagtggctcatgcttgtaatctcagcactttgggaggtcgacatggatcacttgatctcaagaatttaagaccagtttgggcaacgtggtgaaaccttgtctcaacaaaaataaaaaaaaaactagccaggtatggtgacatgtgcctgtagtcctagctacttggaaagctgaggtgggaggattgcctgagcctggtacgtggaggttgcagggggcagccgtgagcagaaatcgtgccactgcactccagcctgggcaatagagcaagactctgtctcaaaatgcatagataacatacataaaataacaaagaagcagcactaacaggacgcttcctttaaatacatatgtgtcattaattggagatcagtgtttgtttacagttttttcttttgaggtgaaaattatataaatgaaatgcacaaatcttaagtgtgaatttgctgagttttaacaaatagacacacttgtgtaaaccaaacctctatcaagatatataatgttattgttgcccagaaagttccatcggtacacagtataccattgaggaaacacacacttttggagctggaggaagacg

SEQ ID NO: 126048 - DNA, 314 bp, Homo sapiens
cttggattaatgttttcttttaactgcaaagtaaatgtaggcattttggtagaaaatcagtgtcaccgtcctagccatgatctttctaaaaggatccttcagctcctcagatctttctttttacttccaattctccaaccttgctatgaagtgtggataaaggattaaaattcagcagatcacttcaggttaaagaaaggaagaggctttgccaaataccctttataagtgcgaggcataaattgaggctccattctgaggacttttacaaacaaatagagccaggtacccaaattctacaaattatattgata

SEQ ID NO: 126049 - DNA, 665 bp, Homo sapiens
ctgccctttagtatcctggttggctgatgcagggaagagggagagcctcctccctccctgattctgccccataggagggtggaatagaatgtgattccaggaccctgttgactagtgagcatggtcccatgcacagagggggctttccttctttctggaattttcttcttagccctgaggcaggagaagtgaactgtaacggggctgacctctgcagaggaggggaagggacactgctttctgctgtcttctctacccctcaggcaaacggggctggaggagtctaaggtcttgctcagactttgagcctaagccacattctctaacctggtttaccagagagttctgcattccaccccagtgatgcaggtaacagtggcttttgaatctcccacctgcgatggctcctaatgttttgctttcagaaaccaaaatcacatctggtattgcctaaacccctcgtgactcctaacacagatcgtgagtgaaaacctgccttctctgagcagcattctttgtctgtaaaatgggaatagtgaccatgtaggcctcaccggggtggtggggaggactggctgagatactgtgtgaaaagttccagggcctgataccgagagatgcttggtaagtgttagatagtattagtacttttccctttggagcaa

SEQ ID NO: 126050 - DNA, 790 bp, Homo sapiens
acagtgttcaaagaagttcttgtttctaaactgattagaacttctagctaatgctcaggtgagatcatagcttaaatacattgaaaaaactaaagtaccacaatagctgtatttttcccaatccccttaacgatcataaaagaggcaagttaagtatttctggcactgaagaaatatcttttttctttgattcatttttgaataaatataaaatgaataactattaaggtagaaaatattctcagaacattctagaggaggtaaaggttagtaggagggcgttggccatctctacattttgtgaggtgagagaaaactaatgtttactttctgctgtgaactgaactgcagctatagaatgtttcaaatgcttaaatatataatacatttttttccatggaagtgagggaatatttcagtttccttaagtatgacacaaatactcatatactgtcttttagagtcagtatagttggagctgttttcatttagtgctttgataatgatttacttatttttccaaatttcgtttgaattttctttcatatgattgcattgatctatgcagcatttaccagaaaagagtattcctgggatagcagaatgcataacactgagtgttaattcttgtgaaataaataagctagactgccttctctttaattagacatattttaaagtatttattatagttgtcaactagtaactcaatgaaaaagttgatgcccaagggagaaatgagaattagcttaattgctgcctttaatgtgtttttgaggaacttaaaatt

SEQ ID NO: 126051 - DNA, 173 bp, Homo sapiens
gtggtggtaatcctctatgattatactaaaaactgctaaattgtatactgtaaatggtgaactgtgtggtttgtgagttatatctcaatatagctgttatacaaaaaatttaaaaataaggccggtacggtggctcacgcctataatcccagcactttgggaggccgaggtag

SEQ ID NO: 126052 - DNA, 230 bp, Homo sapiens
ctgggcatcattagataaaataagtacaatcaagagacaggagggaactcaaagccatgccttgagggatggccaaaggaaggacctgggactcctgagtccggagaaatgacgactgggagtggggaggatgtggtagcttccttcaaatttccgaagagctattggtggtagagggattgaatcacattagaatctcttaggaggacagaacaaccgatgcaagcgag

SEQ ID NO: 126053 - DNA, 699 bp, Homo sapiens
ggttactcccattgcgattacttcccctaggtgcactgagattggttacttcgactaaaggggcggagacaaggaaaagtcagccccccccgaccccgcctccttgatgaaggaaggttgtgattggtccggagaggctgccgtcggatcctggctctttgcggtctgggagggtgggccttacctagacgccggaggggactgatctctgtttccgcagggctctggagctggtgcaggtttaagtccgtctcagacagtcccctcaacccacagcctaagccccttgcccttgggcctccgtgacacagaacttgcttccttttcctaggtcgtccttcacctcccttcaggtgttgcttcttttgtgaaacctttttagaaccgctctagtgaacctctctttaactggcgaggaaacctctggggcctgataatcaggctgtaatgtgggacgacaggattagaaggactaggcaccttggtggtcttgttccctcttccatgagtcttgggtctctcagctgaagagagcaaaagtgaattttggccgctaagattaatcaactgatctgggtgttgagcagacgcgcattgtttagtcctagaagcccattggcccttccccaaagttgccaaccactgggtgagggaatcttgtgacttggagagagaaagggagagaccacattaaaaaaa

SEQ ID NO: 126054 - DNA, 126 bp, Homo sapiens
tgcccttgaagggctccgtagggctccagtataacctcaacctaccacacatggccatcactcggaaattaggtcttgaattggaaggagcactagaaaagtatgtgtttaaaatacactggaatg

SEQ ID NO: 126055 - DNA, 471 bp, Homo sapiens
agtccaccagattcagtaggttggaaacacaggcatggaggggcattccatggaagggcgttctgtgcctgatcaaagcctggaggtggagaatgtgaggcttggaggagggagctggtggttgggttggtggagctgcaaagggcacagggagagaggactctccaagagctcagtggccaagggcctgggaggtagactctgagcctccttcggggggatgaccagctggcagcagtgatgggatctggagctgagtgggaggtgtggactgtggaagagattttggagctgcagctgtacagatggtagctgaagccagcccatagagagcgaaggaggagggcatcagggcattgctcctcatggaagccaggatctggaagagggggaggagaattgggaatgttgggtcatagaagtcaagggaggagagttttgtggctccatctgcacctggacagagaaaga

SEQ ID NO: 126056 - DNA, 481 bp, Homo sapiens
  misc_feature (399)..(399): n is a, c, g, or t
  misc_feature (437)..(437): n is a, c, g, or t
  misc_feature (456)..(456): n is a, c, g, or t
  misc_feature (461)..(462): n is a, c, g, or t
  misc_feature (464)..(464): n is a, c, g, or t
agggaaggagcaactgcagaaagccagcgccagaggtctggcagagagggaggcctgagaggaggcagttgggctgtccacgtggagagagagtgggaggaaccaatgttacggccccacactcttaccttcttccagggcaccacagaaagcccaaagatgaaggagcccacagatatggtcagcctcccaaagggcagatgtgaattgagaaaggtcaactgtaagtctggaggggcaaacagaaagtgctcagcacaggctcctcttgctcctctgtctccatactttttccaggtaaaaactctgtgtcctcatcacaggaaaggcagctcgcccctgagttagcagctcgcccctgagttagcagctcgcccctgagttagcagctcgcccctnagttagcagctcgcccctgagttagcagctcgcccctnagttagcagctcgcccctnagttnngnaccgagctctaaatcgt

SEQ ID NO: 126057 - DNA, 501 bp, Homo sapiens
cagcaccctgtccccagagttggagacagactgccttgccaatacaaaaacagaaaatattcccaaactcaggcctattttgccaatggaaggaaagtccccagatggttccaacagacagagagcaatggattgaatttaggaacaaggcagtaatttcatacagccctgcagagctgggagattctgggaccagttttagtgggggaggggaggtaaaaatacacttgaggacacattaaatagggccccaaaactaagagcctagcgcttgggacagaacgtgtgtaatatgaagttcaaatgaacatgtgtgccgaaggctaatgagaagcccctagggtgattatatgagctttacctgcaagaggtgacaatcgagtttggcacatgctgagtctattgggaaataataatatcaagagatctataccacatccatgtatgtacagctcccggcgccggcgaggcaggagagtgacttactcagggaaactgact

SEQ ID NO: 126058 - DNA, 320 bp, Homo sapiens
cacactgtggcaaggtctgtgatggaggaagtccaggtgactttgggagctagaggtcaggatgggcttcctggaggaagtggttaggaatgaaaataacatctattcagcattattattatgatgtgtcaggcactgttctctcctcaacaccccgctccagaaggttttcttctcacacacccattctacaggtgagtctgggatcaaagaggcccagtagggtgtcagaggtcacgtagccaagacatggcagagctgagatgaaaccccgcagtgggacactgccccacttgccccccgacagcgctctccagcct

SEQ ID NO: 126059 - DNA, 567 bp, Homo sapiens
tcacaactcattgtggctttgacctcccaggcctaagcaatcctcccacttcagcctcccaagtagctgggaccacaggctcacgccaccacacctgactactttttaagttatttgtagagacagggtcttgctttattgcccaggctggtctggaacttgtggcctcaaacaaccctcctgccttggcagttttgttttttatttttagaaagagatctatagcagctaacaatgtactcttagacataaagttagtaatgtgactagtttttagatagattctgaatgggaatcagaggaatggttttcttaggggcttctggaaattatagttgtttagataccaagtaagtgtgatatggtttggctctgtgtccccacccatatctcctcgtcttgaattgtactcccataattcccacgtgttgtgggagggactcggtgggagataatttgaattaagggggcggtttcccccctactgctctcatggtagtgaataagtctcatgagatctgatggttttatcaggggtttccgtttttggatccttctcattttctc

SEQ ID NO: 126060 - DNA, 999 bp, Homo sapiens
ccttcatcccagcctctctttgccttcacttagactgaccctgacacccattaggctcagcaaattacctgggctgtactgctgcaaggcttcacagacagcccccattacttcagtcaagcccaaatttcatcctcatctgttagtcatactcctattcactgttctcaactactcacacatgccctgctcttgtttacactgccggtttacactctttctccaagacatcacaggtgatatctcctagtgctatccccaaactgccactctaaactcttgaagtaaataaataatctttgccggcaggactatgctgaatctccttaggcactctctaattagatggcctaggtcctcccaattcttagtccttttatacctgtttttcgccttctcatattccatttagtttttcaattcatacaaaaccgtatccaggccatcaccaatcattctatatgacaaatgtttcttcttacatccccacaatatcaccccttaccacaagacctcccttcagcttaatctctcccactctaggttcccacgccgcccctaatcccacttgaagcagctctgagaaacatcacccattctctctccataacacccccaaaaatttttgccgcctcaacacttcaacactattttgttttatttttcttattaatataagaaggcaggaatgtcaggcctctgagcccaagccaagccatcgcatcccctgtgacttgcacgtatacgcccagatggcctgaagtaactgaagaatcacaaaagaagtgaaaaggccctgcccgccttaactgatgacattccactattgtgatttgttcctgccccaccttaactgagtgattaaccctgcgaatttccttctcctggctcagaagctcccccatgagcacttgtgaccccccacccctgcccaccagagaacaaccccctttgactaattttccattaccttcccaaatcctataaaacggccccacc

SEQ ID NO: 126061 - DNA, 972 bp, Homo sapiens
aggatcccgtacgctactattggtacgctaccatggcaatactgggctgtactgctgcaaggcttcacagacagcccccattacttcagtcaagcccaaatttcatcctcatctgttagtcatactcctattcactgttctcaactactcacacatgccctgctcttgtttacactgccggtttacactctttctccaagacatcacaggtgatatctcctagtgctatccccaaactgccactctaaactcttgaagtaaataaataatctttgccggcaggactatgctgaatctccttaggcactctctaattagatggcctaggtcctcccaattcttagtccttttatacctgtttttcgccttctcatattccatttagtttttcaattcatacaaaaccgtatccaggccatcaccaatcattctatatgacaaatgtttcttcttacatccccacaatatcaccccttaccacaagacctcccttcagcttaatctctcccactctaggttcccacgccgcccctaatcccacttgaagcagctctgagaaacatcacccattctctctccataacacccccaaaaatttttgccgcctcaacacttcaacactattttgttttatttttcttattaatataagaaggcaggaatgtcaggcctctgagcccaagccaagccatcgcatcccctgtgacttgcacgtatacgcccagatggcctgaagtaactgaagaatcacaaaagaagtgaaaaggccctgcccgccttaactgatgacattccactattgtgatttgttcctgccccaccttaactgagtgattaaccctgcgaatttccttctcctggctcagaagctcccccatgagcacttgtgaccccccacccctgcccaccagagaacaaccccctttgactaattttccattaccttcccaaatcctataaaacggccccacc

SEQ ID NO: 126062 - DNA, 568 bp, Homo sapiens
ggctgactctcttttggactcagcccgcctgcacccaggtgaaataaacagccatgtgctcacacaaagcctgttggtggtctcttcacacggacgtgcatgaaatttggtgccgtgactcggatcaggggacctcccttgggagatcaatcccccatcctcctgctctttgctccgtgagaaagatccacctacgacctcaggtcctgagaccgaccagcccaagaaacatctcaccaatttcaaatccggcaggaatgtcaggcctctgagcccaagccaagccatcgcatcccctgtgacttgcacgtatacgcccagatggcctgaagtaactgaagaatcacaaaagaagtgaaaaggccctgcccgccttaactgatgacattccactattgtgatttgttcctgccccaccttaactgagtgattaaccctgcgaatttccttctcctggctcagaagctcccccatgagcacttgtgaccccccacccctgcccaccagagaacaaccccctttgactaattttccattaccttcccaaatcctataaaacggccccacc

SEQ ID NO: 126063 - DNA, 407 bp, Homo sapiens
agaatgcctctaatattcatatcttagcactaaagaagcatatattattctgcagattgaattaaaatgttagttaccaagatatgaacttagacattttcagtaagcatttataggctattctagtagaaaactgtacacaatttcccatgaggctggtgaaggtttcttagcttaagcgactttttagctggttcttggattttattaaataatatttgaatgaacagttttgactaacagcctgaaaatattaatctttcctctcagtctgagcaagcgaaagtagataaattcatattgtatgtctgattctctttgggtttgaaaagaaataaagactctacttctaaattagcatagaaaaaaggagaatttctcttgatttatttctcagtttgggtttg

SEQ ID NO: 126064 - DNA, 532 bp, Homo sapiens
taattacagggggattgatcaaataagtacacatatggaagataatggtattttcaccatcagaggacaatacaaatatgggagagatgaaaattaggacccctacagtgatggaatgaaattggagatttaagtgtgcacttatatttttcaatacatacatacacacacacatatatatataaatgtgtgtgtctgtgtgtgtataacatacacttgttactttctgattttgatggtatattatggctatatagcagaatatccttgaggaagagagatatactaaagtatttagggggacaaaagagaagcatccatctcaaatatcctaggaaaaaagttatgtactgtacttgtaacttttgtttagaattgtttcaaaatttaaaattaacacattattttcagcacagtaatcatgtgcagtaaataatgacgtacacttctaattatataaaatactttgtacctataattttcagtattttaggtagatgacctttttgagattctaaacatgcaatctgtc

SEQ ID NO: 126065 - DNA, 255 bp, Homo sapiens
tacttattttgctacttataatagcaaaaatattgaagacattctaaagattcatcaatagcatggctgtttaagtaacttatgtctcaggacagaatattggcaaccattaaatttcagctgcatggccaggtgaggtggctcacacctgtaatcccagcacttcaggaggtggaggcaggaggattgcttgagcctaggagtcagagaccaacctgggcaatacagtgagactcatctcaaaaaaagaagaag

SEQ ID NO: 126066 - DNA, 402 bp, Homo sapiens
aggctgtccagacctggcactcacagtttcctatccaccttagtctctcccacatcaactagtaaccaggagaactacatttaatccacacttcctatgtgccaggcaccatgtgagctgttatatgtacacattcttacttaatctgcacaagagtcctattagagtttacaaccaccaccaaaaacctgcacaagttatttggcaacaaactgcaaagtaaaactcaaattttctatgcttcaagctggaactctgttctcctacccatcatagtcttcttaattctacatatttaacatctcttttgtttggctccttatgctgctatctaagttcaggatctcattatatcactggaacatcaaaaagggccagttctggccaggtgcggtggctcac

SEQ ID NO: 126067 - DNA, 156 bp, Homo sapiens
aactgctattagtctaggacagggtttctcagcctcacactccgacatttgagctggataatgttgtaggggctgtcctgtgcattaaaggatgtttagccagcatccccagtttctacccactagattccagtagcactccccacctccagttgt

SEQ ID NO: 126068 - DNA, 764 bp, Homo sapiens
ggcacgtgccaccctgcctgccttgacccttttaaaaatgagttgctgtgcttctagaacatttgaagggagaaaacatttttcgtgtaatgcaacatcaaagctattaactattatgaagttattttcccacagtgatgactgatttctagagttgatatgaaacaggatgtccatatcctcatctgcatgaaaggaaatggttcttaacagaaatgttctcaggctaaaatttgcctccatctcctcttctctagtgtaacatcttcctttcgtgttttcacttatttagtcattcagcaacacttctgaggtgtgtaccattgtgctaacaatgataaaaatttaccacttagtgtagtattctggagtatgtagcattgcccctgggccagacactagttcatttagtgctcacagcagcctggagatgggtgctatttttatccacattatatagaagaggaaactgaggcacagcatgattacgtgaattgaccaaggtcccacaattcgtaagtggtggaattggatttgcacccaggcagtccagctccagagtctgtgctcttctcctgcctctcaccagtaaggagggtgaagggatatcttcagcaattatcatgaagatagcaagggcttggcaggatgctgtgggagcctcctgataatttataaggtaggtattattatcattcataatttactgaaatttagaggtagaagtagggatctatatagaatagtaaccaaaaaatctcatc

SEQ ID NO: 126069 - DNA, 326 bp, Homo sapiens
catttattttccttgttcactctctagtgagatgagcatgaagcggtgcaaaacttagattgaacaagagagcaaagggaagcaaccatggtaaatctgcttgcttgtgggcttaattatattctgggaagaaacactttagggcgatcggtgtgatatatatatattttttgagacagagtctcgctctgttgcccaggctggagtgcagtggcgcgatctcggctcactacaagctccgcctcccaggttcaagcaattctccagagtagcttgggactacaggtgcccaccaccacgcccagctaattttttatatttttttt

SEQ ID NO: 126070 - DNA, 230 bp, Homo sapiens
tgatctgggcagtggagtgtgtccagaggggactggctgggtctagagcccgttggaaagcggaatggacagaccttggggacaggttggatgctgagaactcataaatgacttggaggtatctagcttgggtaactgggtgcgtgacggctctaaaagctgaggtagggaagagaggaggaggtctggggtgaggaggagacagatcaagcattcagatgactcgataa

SEQ ID NO: 126071 - DNA, 441 bp, Homo sapiens
ttcaccatgttggccaggcttgttcgaacttgacctcaagtgatctgacagcttcggctcccaaagtgctgggattacaggtgtaagccactgtgcctggccagcatacattaattcttaatgaattagtaataacagtaccatgtcctcaactcacctgcagggctgcttacacagcctcatttgtttgcaagtgtgggtaagctctaaactactctccaacgtacaagtgctgttataatctgtaaaagctggttttggaattagaaggtgacctgatccccttccctttgcagcagaagtcagggtgcacagtgacctgttagtcctcagttgcactggctatggtgccaactgtgaaagtaaggcggaggtcgccctcagaccagcgcagcttgctctgcctgacctgagaccctacttctgtttgtttcctatctg

SEQ ID NO: 126072 - DNA, 780 bp, Homo sapiens
tacttacttcctaaaaaacgatagcacgaagcatattaaggtagatatgttctatcgttaattgtagttttgacaggtggcatctcagtaatcaaaaggaagaaaatgaaccaaaagaaccaaagagggaaccattcatacttcaagatctctaataagaagtagcaatatttaatatggaatcaaaagcttgggaatcaaataatgaagatcttttatcaagtagtggtgtcacatctaatggaggtatgtgctgtttataaaacaaaatggggaaaaaatagaattaaccatgatattcattcaagctgctgtttctagtatgttttatttttaaccatgtgggttacagaccatgatcatgaatgtctaccatattgtttataattctactttttgaagaagagattcctttgtcttttaaggaattttttgttttaaaaatgtttctacattgaagtacttcagcctcaacatgccccatgcctccctaatgccttctcttcctcctgtgtcttcctagcctgccttccttggtctgccctaagtcagaattttgtatcatttcattctttttcctcacctgctgctacatccagtcaggtactgaggccctgctgattttacctttgaaatgtctcttgaatccattttttccctctccatttccattactggtgttctggttcaggcccccatcacctctgatccaaattatttcaatcaaaggtgattcctatgtcaggaaaacagacacagatggaataaatagttggaatt

SEQ ID NO: 126073 - DNA, 905 bp, Homo sapiens
tacttacttcctaaaaaacgatagcacgaagcatattaaggtagatatgttctatcgttaattgtagttttgacaggtggcatctcagtaatcaaaaggaagaaaatgaaccaaaagaaccaaagagggaaccattcatacttcaagatctctaataagaagtagcaatatttaatatggaatcaaaagcttgggaatcaaataatgaagatcttttatcaagtagtggtgtcacatctaatggaggttcttcaagttcattttttgtgtcatctattcgtggtacaataattgaaaacacatcttcagctgggactttgacacaggttccttttttccctaaatatgaagtggaacttgattctcctagaaaaatcatcccatctcctggaaaggaacactttgaacgtgttttggaagaatattcacatcaagtcaaagatttacagagaagactaaatgaaagcaatgaattgcatgagaaacaaaagttttatttgaggcagtcagtcattgatttgcaaacaaaacttcaggagatgcaaatggagagagatgctatggctgacatcagacgaagggagagtcagtcccaggaggatttaagaaatcagcttcaaaatacagttcatgaacttgaagctgccaaatgccttaaagaggacatgctgaaagacagcaacacacagatagagcaactacgaaaaatgatgcttagtcatgagggagtgcttcaagaaatccggtcaatcctagttgactttgaagaagcctcaggcaaaaaaatatgtgaacatgacagcatgtctactctgcacttccgcagcttgggctcagctattagtaaaatactaagagaattagacacagagatttcttatcttaaagggaggatatttccagta

SEQ ID NO: 126074 - DNA, 548 bp, Homo sapiens
gatccacttgaaaatccctatttttagcagaccttgtaggatgccaatatttggggccagagtctcgttactaaaatgaatgctatggagctaaggctgcggtgcccagctgggctagacatttgcaaaaagagagcagactggcagacagtgccaattctcaacagaatcttttgattagaatgccaagttgctataagggtatcagtaacatcctcaccctttagcaggcaaaggaggctgggtatgtgagaaaacaaactctgatccacctgatcctccactgctttttgattctgagaaaaaaaaaaattgttcagtaactccagctgcctgaacagaaattactttctgaggagctagaagccctgactggaaaagagctctgggggattatggcatgggaggagagctgtcaggcatcaggcttatgtgggaaggacccacgctgactacaacagtacaagtaactgcctgagtggctccataacatggaaacagcaatcgtatgttccaaagacagagttactgttttaaggacagaggaa

SEQ ID NO: 126075 - DNA, 241 bp, Homo sapiens
gaccaggtgggggtggctgaggatttgccaagaggtacttgcagcatggaccaggttggggttgctgaggacctgctgagaggggcctgcagcgtggaccaaggtgcagccacaggttaggcagctgtagccaacgtccaggtggaccatggaggtagaaccagtgggagctgccgagtggccggtgaggcactgggaggaccaggtcaccgcgaggaggaggaggggctcccagaaagat

SEQ ID NO: 126076 - DNA, 291 bp, Homo sapiens
  misc_feature (82)..(82): n is a, c, g, or t
accgccccttccccctagccaacatcactcttggctgatgtctccttcatttacctggtcctgcagacagtatggtccaggntcaagggtcatgagggggatgggacggtttgtgggcaagttgatacgttaagatttcagtgtgatgagatgaaatacttataggttatttagttgaaaatgttgaataggcatcttcatattttggccttagtgtcaatcagtgctaatccagaccaaaattttgaagacgtattttaaacttactttcgaaactgtgggcagggatga

SEQ ID NO: 126077 - DNA, 124 bp, Homo sapiens
gaaaggaatgtgtgtgcatgctaactggattggagaattctcagcacaatgtaatttgtgaaggaagaaaaaaggaggggcgggaattgatggaaaagagcaaattgttaataactggtgatgg

SEQ ID NO: 126078 - DNA, 707 bp, Homo sapiens
aggacacttattacctgctagtcacaacctatctatatgaacatatacattggcgtgggaagtttgtctgtgattgtgaaacaagattgtcttgctaaagacattctgaatatgtgaaggcaggagggagagataattgtaaggctttgagtgcctctaaaatcctactggatagttgttggcttcaaaaaaaggcagatagcttctgaggtcatagtattccatcagtggcattgctacagcctgctaactgactttcattgcccacacgctaacattttgttctgctgtatctgatggggaagggttgagccacgcaggcatggagtgctagatgtcttctgcatgccagaagagttcattacttagtattttaacccttcatttacctgattttatttatttatttatttttgagacggaatctccctctgccacccaggctggagtgcaatggtgcaatctcggctcactgcaacctctgcctcccgggttcaagtgataattctgcctcagcctcccgagtagctggttttacaggcatgcgccatgacgcccggctaatttttgtatttttagtagagatggggtttcaccatgttggcaaggctggtctcgaagtcctgccctcaagtgatccacccgccttggcctcccgaagtgctgggattgcaggcatgagccactgcacctggcctttcatccac

SEQ ID NO: 126079 - DNA, 345 bp, Homo sapiens
tgcaaggcaagaccgtcaagaatttgcagaactattttaaaacactacaactttaatcacaatttctagtaatatgctttatatacttttttttacagtctccagtatctctttaggtagaacacttttgaattcaaagccatgggtcccattgttaatttgaacaaaatatagtaagtatactattattttccatgtctttctaggctttttaaactctgcagtgtatttactgtactctcgtagaaggagtgccatcaactgcaattggtacaaattgtgcttatttttctgctcttttcacgttcccaaaatatgttcccattcaaccaggcaggtcttccg

SEQ ID NO: 126080 - DNA, 329 bp, Homo sapiens
cagcgcaccgccaagctctctagctctcctgtctgcagcctccaggagcccacacagggctggggctctgtgcccccaactcacacccgtcggctcccccacagagaaggatactgaggccaggagaggctagagagcttggcgggtgcgctgggcccagatacgcggctcctgcctgcctcatggcctgctcctctgtcggggcctgtcaccgggaaaccccttttttagcagcgatgacgacactggaaccacgctagtctccgtccctcccgctcacatgcgcccacgctccccctcgaggcaggttgagccccggcctggaccgc

SEQ ID NO: 126081 - DNA, 96 bp, Homo sapiens
gagaatcgcttgaacccgggaggcagaggttgcagtgagtggagattgagccgctgtgctccagcctagacaacagagtgagactcccgtcttaag

SEQ ID NO: 126082 - DNA, 480 bp, Homo sapiens
tggccaggttggtgtcaaactcctggcctcaaagtgatccgcccaccttggcctcccaaagtggagcccccgtgccccttgtttgtgacctgtcaatataaatatgcctcagtaatggggggaggggtggggggtgaaaaaggaaatatgtttaatattaagactttggccttttagtgtaaactgatattcaaaaatttcttcatagaacatttgcttctttgcttgatcatttttctaattctgtacatctaaaatgcccagaatttgagttgctgttatagtctactaacatagaactttggagtaataagatgggaatttgtctctcttttgccaagacaagcattcgtaatctaacacagtattgttgccacgagtacgagtatgtgatagactgttgagaataaagaaagcaggcacagttggtcagtcctaagataaaggagatgtttttcttatatgtttgtgcattaaaga

SEQ ID NO: 126083 - DNA, 329 bp, Homo sapiens
tctgttaatgtgaattacattatttagtttttgcatgttgaaccaaccttgcattccaaagataaacccttctcggtcatgattttatcctgttttatattattaaatttgatttgctaaaattttaagatttttacatctacatttatgaatgatattggtctaaaatttcttttcttgtgtttgtccttgtcaggtctttggtatcagtactatgctggcttcattaaataaactggaaagtattccttcctcccttgttttctgaaagagtttgtgcagatttagtattatttctttccaaatgtttggtagggtttcctttgtgc

SEQ ID NO: 126084 - DNA, 736 bp, Homo sapiens
atcttaaataaggggatttattatctcacaaaagaaatttggcggtaaggcgatcctaaggtcggttaattcagcatatcagcagtgttatcagggacccagatatgtttccatttttctttcatcttcagcatggtcttcataggctaactcccctcaaggttggaagatggcttctgcagtcccagacattatgtgcagttacgaaaacatccagcagaatataaaggactatttttccctcatgcttgtcttcataagagataagaaattttccttgaaggcctttcagcaaacttaccctcatgtctcagtagccagaacacatgcccatccctgtgccaatgactggcaagggagaaaggatcaccaaaaatgactcagaccacagaggattaattctgattacttgaaggggtagtgggctctgccagcagagcagaagcaggtggctgttgggtacatcatcagaagtgaacaagggccgggaccaatggctcatgtctataatcccagcactttgggaggctggggtaggaggaaccagccttggtaacatagcaagaccccatatgtacacacacaaaaaaaagccaggcatggtggcatacctgtagtcccagctgctcgggaggctgatgcaggaggattgcttgaccccaagaggtcgagactgtggtgagctatgagcaaaccactgcactcctgcctgggtgacagagtagggctctaactc

SEQ ID NO: 126085 - DNA, 746 bp, Homo sapiens
gttttctccctagtttttctgcctacccctcactctctgcctcccagctcttcactgtcattttcttactatctgacttagaacatggctcatttatagcttttcttacttcattttgcaattaattgcacataatatgatctactaggatgagctccttgtacttacttgctttgcacactcgcccttgtaagaatgagctttttgagtaaagggataactcttacatatttttttttcttcaacttttattaagttctggggtacatgtgcaggatgtgcaggtttgttacataggtaaatgtgtcccatggtggtttgctgcacagatcaacccatcacccaggtattaagcccatcattcattagctattcttcctgatgctcttcctcctctgaggcacagtgtgtgttgttcttcactatgcgttcatgtgtgttctcatcgtttagctcccacttatgagtgagaacatgcagtgtttggttttttgctcctgtgttactttgctgtggataacagcttctaactccatttatgtccctgcaaaggacatgatcttgtttctttttatagctgcatagtattccatggtgtatatgtaccacattttctttatccagtctattattgatgggcatttaggttgattccatgtctttgctattgtgaatagtgctgcagtgaacatacacgtgcatgcatctttgtaatagaatgatttttattcctttgggtatatacc

SEQ ID NO: 126086 - DNA, 445 bp, Homo sapiens
ccacttagctcctcaccatctttttctgctatattgtttcctctgtgccagcctactttccaacttcatctttttgtgcatgctgctaactttggtttgataaaccttctactcttttaccttgaagcattatgactcatctttctagacctagatttgatggcagctcttctgaagcgtttcctgaccctcaagcaaggttagctgctctacctccagtgtttctattacattttattcatttgttagaacatttacttcatacaactgttcactaactgttcgtgagcctgtctttgtgattaaactataaacttttcaaggatagtgactgtagctagtttatcttcttgtaccactagttcttagctcacagcgcttggaacttggtagttttcagtatgtggttgctaaatgatgttgacaaaaccatgagacaatattg

SEQ ID NO: 126087 - DNA, 804 bp, Homo sapiens
tgtcacacgcatggtgctgggctcctggcagcctgcagaactctggttcccctgcagtgatgggggctcactcctgccacgggactgctcagtcaggacgttggtaacaggcccatacctccgtcctagtggctcctgaggcaggtggcctggtagcagctgcagtacctgtgagccccaccagttctgtgacgctttgtggtccagacagtgtgtatcatttcagtttttgtttttgttcttgttttttgagacagagtctaactctgtcgcccaggcgtggaatgcagtggtgcaatctcggctcactacaacctccgcctcctgggttcaagcaattctccggtctcagcctcctgagtagctgggattacaggtgtgcaccatgatgcctggctaattttttttgtatttttttttagtagagatgggttttcaccatgttggccaggctggtctcaaactcctgacctcaggtgatccacccacctcggcctccatcactggaaaacttgagacacagaaaagtgtctccaccatggtatggctgaaggagggcaggccaccaggcagacagaccaagatccgaatgtcagcatctacctttatgtgctttatggcatgaccttgaatctctctgagccagttcctcccctgccaaaaagaatagcaactgggcagtgtctggtcaggtcagcctacagtacgtggtgcctgttcaatctcttgggcgacagtcaggccccaagctcgcagctcagtgtgtgggggctgaatcttcacctgagtcctcttcattctacc

SEQ ID NO: 126088 - DNA, 366 bp, Homo sapiens
ttctcatttcctccttacaattctttgaacaagataaaagtaaaattttgttttggtgaggaagcaatggagctacgaggacggtaagtaatttacccaaggaagcaaagtgaaaagtgtaaaggcaacagcatgccttaggacataaggattccctatactttgctcctacatacattagtgtgacctgtcctgatatctctgtggttacccaagtagaattacattttgcaagaaggtaattctacttaccttcacgactgcgagcatctcagccagtttctcgctgcgagtttgtgaattcgccagtctttggtgactttgcagagtgtgtttccattcacctgaactctatgggctgacaaa

SEQ ID NO: 126089 - DNA, 785 bp, Homo sapiens
gtagtttgccaaagttatatactgcagagcaaatggcaaggctaagatttgagctgagacaaacagatagcatttgcattgtactgcattccgtaaagactacaagttgtgttctgtcgatcaatctatctgaaatatatatatttttgattcaaagccaacattgaaagtagacagacattgtcatcctcttgcctggaccagactgtctatcactgtaaaacacactactccagaattctgtagccaaagccgcaaccattttgttatatctcacaatgtttcttgggtcaggaattcagacagggctaggccgggcaattcttctgttctgcctagcatcagttagtcacttgttggtattcaactgcagccaggctgcattgaagggtccaagatggcaatacttgtatatctggtaacctggcggggatagctggaagtctggggttcaactgcacactccatgttttctgaggttatctctacatggttctactacagagtacttggacttctcatgtggaagatcagggctacaagagaacatgatggaagctatgagttctcttataggctgagccccagatgggcatggcatcacttccactgtactccatttgtcaaagtattatagaccagtccagattcaaggccagtggaaatcaaacccacttctcactgaagggagcgttaaaaatatatagccatctttaatctactacagtcatatacgctgttttcatagaatgaaatgaaaaggctgcttttaaagacagggcttg

SEQ ID NO: 126090 - DNA, 533 bp, Homo sapiens
agtagtgtgtctcatctcttaccaggacagatgatagcatccgaagactcggccttgaaggtcctcgatagatcgcattacgtgcctgcgcgattgcgactggatagcacggcttagaaagtgatgcacatgaaataagatgcgcccatatctccgtgtgcgacatccagcagtactgaggtctcccctccctgccttgactctgatatagctactcctgttcaacacccctcccgtgaagccagcttggaatctgctcaaaaccacaagaaaggaaggcctgattggctgactccttagggagaacctccaagagctcatgccacaagccgcaagcccggagtcagccctaaatgagcctctcctggagccctgccctccaaaaccctggaaaagcggggtcctctcgtggttctaagctccttcaccatcctgctcactgccccccagaacatggctcatctactcctccttcaccatcctgctcactgccccccagaacatggctcatctactcctccttcaccatcctg

SEQ ID NO: 126091 - DNA, 138 bp, Homo sapiens
ctctactatgaagtgggtcacatatcctgcagtttgttacttatgaccgtttcttttcaaccccacagctatattactttcacctgagtctcatatcttactaaagcaaatacagaagtccctgggtctagtctcata

SEQ ID NO: 126092 - DNA, 415 bp, Homo sapiens
ggaattgctgagtcataggtggtcgcatgtttgtttaggagcagctgccagaccttctttgcaaatggttgagccatttacacttccaccaacactgtgtgagagttctgttgctgtacatccttgccaacatttggtatagtcattctctttaattttagccattctggtaggtgtgtagtcatctgtcatttggagttttaatttgcctttgtctggtgactggtgatgagcacagagctcttttcagcgtgcactgtgtttgtgtgtgtgtgtgtgtgtgtgtgttatgggattggagtaggcagtctgtgtgtgtgtgtgtgtgtgtgttacgggattgggggagtacgcagtctgtgtgtgtgtatgtgtgttatgggattgggggagtaggcagtctgtgtgtgtgtta

SEQ ID NO: 126093 - DNA, 392 bp, Homo sapiens
cagagtataaaacttatgctctgacccaccatatgctgaggaggtgatgccaggagagtggaccaggagacgagggcagcagggtcaggagaggagggaggagagccagcggaagggacatctcttgctgtaacaggagcaggaggggaatggatgtagataacgatgttcagtgggttaagggggattacctttaattctctcaatacacagtgaagggcctgggttgagtaggggactcaggagaacagtggcggtttggaagtatcccagggcatggggctgcctaggggctttatggaagtcaaagctttagaggagtcagagagggaggtgccagccacacgaggctctgttggactgaggctgaagcctgtgggtatgttccagca

SEQ ID NO: 126094 - DNA, 504 bp, Homo sapiens
cgcagtgccccaagcccaggtgagagacatgccctctgggccgtgattccctcatcagtaaagcaaggaagataatgtctggttaaccaccctcctggagtcatggcaaggctgatacagattcagtggcattaactcatttgttcattcagcacattttactggcaacttatgctgtgctgggctctggatatagtagtgagcaaagaggaagcactcacaagggtaacactgcaaatgctaggagtcatgcatgagaagtccagggagcctgattccatttgagcaaggggtggtggtctgggaaggttcccccaaggaaaagacattggagccaagaccaaagggtgggtaggagtaatcagaagagcatgtctctcatctctggacttctgtagagagacttctgtaaccactgtaccctctggaagtgggtacagaagtccagagatgagagagatgtttaacaacagagagaaatccacccgaaggactttttacatc

SEQ ID NO: 126095 - DNA, 371 bp, Homo sapiens
ttcccaaccacttcccacttgcaggcccctccacttgtccttgctggttatgaggcactgacgagttttagggcagggaccatgttttacccatccttgcatttccagaggctggtacccagggcaagtgtcaagaaacggttcttgatgcaggcttgctgatggtggtattccacagatgggaaaaaaggagcccagaatgctggcctcctaatccagattgcttctcagtattattttgctgaaactacccagctgctgtgagcaaaataacaatgataataacagtagcaaatagagaagataggtcagttataactgagctggtagcacacaagacgtaattctctgttactagtttcaaaacagtc

SEQ ID NO: 126096 - DNA, 969 bp, Homo sapiens
gacagaaaattctttcaaaggtcaaccaacatttttaagaaacaaaatgggaggggataatggaatctagaattgtcatatatatttgtttacttgtgcaatgctaatatagtaactcggctgtcctttgaatatcactgtgttgagtagattcctctaggacctttgatttcatgagttgggcccaaaccgtggtggaataataacaaaaagaagttaaatgccacaaattttaatagtgagcttacttgaaggatttaagtaggtttaggaggtgaagaaggccgatggagaaatttacagattaattttggaagctctactctagctatcgaacaatcaaaggaatgcacctatcagctacaaagaacagctagacagctgttttttttcttttataaatgtttctgtgttgtgtcaaaatgatttctggtgatttaaactaacagataatcacagctgctgtctaaattcatagtgttgaaaattacaaaatgaaaaaaaaaaaaaaacacttcattacctgtgaagactgtgtctgtgtttttaactatttcttgtacaaatatatgaaaacttttatgaggagactggtgccaagtagctgaataatggggaaagggatattctgttcgtaaaaatcttagcagtgttaccaactctacgatatatatataaaaaaataattaaaacgttacaaagcgacagctatggtacatttgttttgtgtgaagctaaccggacctaacttcctgagtgcctggcttattttgaaacattttttttcattgaccattgataatgctgcaaatcagaaatgtacatacttcatttacaacagggttctttttatacttttgtagattctcatacatgtcacatacatggttgtctttatgtaacttaattttttcatccgcaggtgccattttcataataaacttctcttggatttgttactatctggca

SEQ ID NO: 126097 - DNA, 725 bp, Homo sapiens
cattttcacttttagatttacaaatactatttccttttaatcaccttttaaatatatctgtctttagcatttggatcaagtacatttcaacacacagatatcataaaagatgaaagagtactgcgttgccctgtttttagcacaatgggatacaagtttttgttacattatacttcatgaaaaatcactcctgttaaatgtctaatgggatgagaatactatatttcctttttgtccttaaaaatgtattattcaggccaagtcaagagaattgtttgaggctaggagttcaagaccagcctgtgcaatatagcaagaccttgtctctgggaaaaataaataataaaaaaatagctaggtgtggtgctgcacacctgtagtcctagctactcgggaggctgaggtgggaggatcacttgagcccagagttcaaggctacagagagctatgatctaaccagcgcccagcctgggtgacaagaaaaaaagtattattcacgcatcagttcctgattttgagaaaattcatctgggatactgtcacctgaagacttatagtcaatatgattatgtgcttatatgatcaatttcatcatcttcgttaaagtctagagtgctgctcttggtttctttgcattcttctaattcatctaataattgcaaaacatcttttagccagtttttccccccactgtggtagtatattagttttctattgctattgta

SEQ ID NO: 126098 - DNA, 3195 bp, Homo sapiens
  misc_feature (2990)..(2990): n is a, c, g, or t
  misc_feature (3082)..(3082): n is a, c, g, or t
  misc_feature (3174)..(3174): n is a, c, g, or t
cgcaggaatggtctccgggtagaggcaggtaaggatgtcccgggccggtggagaaggaagagctgggcgtgtggcttcgcttggaatccgaatcagagcttggaccagagccttccctgagaatgctgaagcaacaccttctttggattgagtttcttccagagggaacgaagaagaggattaaataatacattcaattctaaaataagacatggcccattactattatttgtcattttaggagttggtgatgttcagagatgtggctatagatgtctctcaggaggaatgggaatgcctgaacccagcgcagaggaatttgtacaaggaggtgatgttggagaattatagcaacttggtgtcacttggactttctgtttctaagccagccgtaatctcctcattggagcaagggaaggagccctggatggttgtgagggaagagacaggaagatggtgcccaggtacatggaaaacttggggatttcacaataatttcttggacaataatgaggctacagacataaatgcagacttggcatccagagatgagccccagaagttatctccaaaaagggatatttatgaaacagaattatcccagtgggttaacatggaagaatttaaaagccatagtcctgagagatcaattttcagcgctatctgggaaggcaactgtcattttgagcaacatcagggacaagaggagggttattttagacaacttatgattaaccatgaaaacatgcccatttttagccaacatactttactcactcaagaattttatgatagagagaaaatctctgaatgtaaaaagtgtagaaaaatcttcagttaccatttattttttagtcaccacaaaagaactcattctaaagaactttctgaatgtaaagaatgcacagaaatggttaatacaccatgcctttttaaacaacagacaattcaaaatggtgacaaatgcaatgagtgtaaagaatgttggaaggcctttgttcattgctcacaacttaaacatctaagaattcataatggtgaaaaacgctatgaatgtaacgaatgtgggaaggcctttaattatggctcagaacttactctacatcaaagaattcacactggtgagaaaccttatgaatgtaaagaatgtgggaaggcctttagacagcgatcacagcttactcaacatcagagacttcatactggtgaaaaaccctatgaatgtaagcaatgtgggaaggcttttattcgtggctttcaacttactgaacacctgcgactccatactggagagaaaccttatgaatgtaaagaatgtggaaagacttttaggcatcgctcacatcttactatacatcagagaattcatactggtgagaaaccctatgaatgtcgggaatgtgggaaggcctttagctatcactcaagcttctcacaccatcagaaaattcattctggcaagaaaccttatgaatgtcatgaatgtgggaaggctttttgtgatggcttacaactaaccctacatcagaggattcatactggtgagaaaccctatgagtgtaaggaatgtgggaagacttttagacagtgttcacacctcaaaagacatcagagaattcatactggtgagaaacctcatgaatgcatgatatgtggtaaggcctttagacttcattcacaccttattcaacatcaaagaattcatactggtgagaaaccctatgaatgtaaggaatgtgggaaggcctttagctatcattcaagcttctcacaccatcagagaattcattctggaaagaaaccttatcaatgcgggaaggcgtttaatcatagattacaacttaacttacatcagactcttcatactggcgagaagccagtcaggtttcctctcctccctccccatcctagtctagcatcatgaaatttgttgatggaaatatacattgtctttgttttatttaaggaaaaagttggtaagccaccagtttcattagtatttatttatttaaataatccttgaaaatcaaatgtttttaagtgagaaagtggataactaaagtgtaaattttggtctcattttaatgctgtttctgagttattgtattaaccattattgagaataaatttttttattgagaataaattttctaaaattacatgtttcactgaaaccagtgaaatatttcactgaaacagtgaaataaaatgaaaacaatttcctcccttccctcaaatctctgagataaccagtatgtgtatttcttcttcctttatgctcaaacaacctgtacacagaaagcattttttgcatgtgtttggaggagcttttacccccatacagacatttgacagcgtcttgtccttttcataataatcatgaatacttttccaggtcagtacgtaaagatgtaacccattctttgtaaggttcagaatatttctagaatggaatgtatgtccgtattttgggccattacctactacagacattgaagttgtttctaatgttcacctagaactctaattttaccttcttttgtttctattgtgcagattcccaacagtgggattaaagagtatctggcgtatatattttgacattacatttattttttaaaatcttctaaattttttgtttaataaaagcacacattataaaaattcaaaaattaccaaaaatgtgaaaattaattctcccctaacatccagttctgtagccactcactttccacagatgcaacaactgctatcagtttccttttattctaacgggaatatttcatgtaaatttcataaattctttggacaaaagtaggttattcataatatgtgatttattacacattctcattattagtccacatttggcctacttcattttttttttttttgagacacacccaggctggagtccagtggtgcaatcttggctcactgcaacctccgccacccaggttaaaaattctcctgcctcagcctcctgagtngctgggactacaggcatgcgcagccactatgcccggccaataagctatatttattcttatttgatgtggatgaaaattatcaaaattggccnggcttggtgctcatgcctgtaatcccagcactttgggaggccgaggcgggcggatcacgaggtcaggagatcgagaccatcctggctaacanggtgaaaccccgtctctacta

SEQ ID NO: 126099 - DNA, 2687 bp, Homo sapiens
  misc_feature (2482)..(2482): n is a, c, g, or t
  misc_feature (2574)..(2574): n is a, c, g, or t
  misc_feature (2666)..(2666): n is a, c, g, or t
agcggagaatctctcctgtccagtgacttggcatccagagatgagccccagaagttatctccaaaaagggatatttatgaaacagaattatcccagtgggttaacatggaagaatttaaaagccatagtcctgagagatcaattttcagcgctatctgggaaggcaactgtcattttgagcaacatcagggacaagaggagggttattttagacaacttatgattaaccatgaaaacatgcccatttttagccaacatactttactcactcaagaattttatgatagagagaaaatctctgaatgtaaaaagtgtagaaaaatcttcagttaccatttattttttagtcaccacaaaagaactcattctaaagaactttctgaatgtaaagaatgcacagaaatggttaatacaccatgcctttttaaacaacagacaattcaaaatggtgacaaatgcaatgagtgtaaagaatgttggaaggcctttgttcattgctcacaacttaaacatctaagaattcataatggtgaaaaacgctatgaatgtaacgaatgtgggaaggcctttaattatggctcagaacttactctacatcaaagaattcacactggtgagaaaccttatgaatgtaaagaatgtgggaaggcctttagacagcgatcacagcttactcaacatcagagacttcatactggtgaaaaaccctatgaatgtaagcaatgtgggaaggcttttattcgtggctttcaacttactgaacacctgcgactccatactggagagaaaccttatgaatgtaaagaatgtggaaagacttttaggcatcgctcacatcttactatacatcagagaattcatactggtgagaaaccctatgaatgtcgggaatgtgggaaggcctttagctatcactcaagcttctcacaccatcagaaaattcattctggcaagaaaccttatgaatgtcatgaatgtgggaaggctttttgtgatggcttacaactaaccctacatcagaggattcatactggtgagaaaccctatgagtgtaaggaatgtgggaagacttttagacagtgttcacacctcaaaagacatcagagaattcatactggtgagaaacctcatgaatgcatgatatgtggtaaggcctttagacttcattcacaccttattcaacatcaaagaattcatactggtgagaaaccctatgaatgtaaggaatgtgggaaggcctttagctatcattcaagcttctcacaccatcagagaattcattctggaaagaaaccttatcaatgcgggaaggcgtttaatcatagattacaacttaacttacatcagactcttcatactggcgagaagccagtcaggtttcctctcctccctccccatcctagtctagcatcatgaaatttgttgatggaaatatacattgtctttgttttatttaaggaaaaagttggtaagccaccagtttcattagtatttatttatttaaataatccttgaaaatcaaatgtttttaagtgagaaagtggataactaaagtgtaaattttggtctcattttaatgctgtttctgagttattgtattaaccattattgagaataaatttttttattgagaataaattttctaaaattacatgtttcactgaaaccagtgaaatatttcactgaaacagtgaaataaaatgaaaacaatttcctcccttccctcaaatctctgagataaccagtatgtgtatttcttcttcctttatgctcaaacaacctgtacacagaaagcattttttgcatgtgtttggaggagcttttacccccatacagacatttgacagcgtcttgtccttttcataataatcatgaatacttttccaggtcagtacgtaaagatgtaacccattctttgtaaggttcagaatatttctagaatggaatgtatgtccgtattttgggccattacctactacagacattgaagttgtttctaatgttcacctagaactctaattttaccttcttttgtttctattgtgcagattcccaacagtgggattaaagagtatctggcgtatatattttgacattacatttattttttaaaatcttctaaattttttgtttaataaaagcacacattataaaaattcaaaaattaccaaaaatgtgaaaattaattctcccctaacatccagttctgtagccactcactttccacagatgcaacaactgctatcagtttccttttattctaacgggaatatttcatgtaaatttcataaattctttggacaaaagtaggttattcataatatgtgatttattacacattctcattattagtccacatttggcctacttcattttttttttttttgagacacacccaggctggagtccagtggtgcaatcttggctcactgcaacctccgccacccaggttaaaaattctcctgcctcagcctcctgagtngctgggactacaggcatgcgcagccactatgcccggccaataagctatatttattcttatttgatgtggatgaaaattatcaaaattggccnggcttggtgctcatgcctgtaatcccagcactttgggaggccgaggcgggcggatcacgaggtcaggagatcgagaccatcctggctaacanggtgaaaccccgtctctacta

SEQ ID NO: 126100 - DNA, 3174 bp, Homo sapiens
  misc_feature (2969)..(2969): n is a, c, g, or t
  misc_feature (3061)..(3061): n is a, c, g, or t
  misc_feature (3153)..(3153): n is a, c, g, or t
cgcaggaatggtctccgggtagaggcaggtaaggatgtcccgggccggtggagaaggaagagctgggcgtgtggcttcgcttggaatccgaatcagagcttggaccagagccttccctgagaatgctgaagcaacaccttctttggattgagtttcttccagagggaacgaagaagaggattaaataatacattcaattctaaaataagacatggcccatgagttggtgatgttcagagatgtggctatagatgtctctcaggaggaatgggaatgcctgaacccagcgcagaggaatttgtacaaggaggtgatgttggagaattatagcaacttggtgtcacttggactttctgtttctaagccagccgtaatctcctcattggagcaagggaaggagccctggatggttgtgagggaagagacaggaagatggtgcccaggtacatggaaaacttggggatttcacaataatttcttggacaataatgaggctacagacataaatgcagacttggcatccagagatgagccccagaagttatctccaaaaagggatatttatgaaacagaattatcccagtgggttaacatggaagaatttaaaagccatagtcctgagagatcaattttcagcgctatctgggaaggcaactgtcattttgagcaacatcagggacaagaggagggttattttagacaacttatgattaaccatgaaaacatgcccatttttagccaacatactttactcactcaagaattttatgatagagagaaaatctctgaatgtaaaaagtgtagaaaaatcttcagttaccatttattttttagtcaccacaaaagaactcattctaaagaactttctgaatgtaaagaatgcacagaaatggttaatacaccatgcctttttaaacaacagacaattcaaaatggtgacaaatgcaatgagtgtaaagaatgttggaaggcctttgttcattgctcacaacttaaacatctaagaattcataatggtgaaaaacgctatgaatgtaacgaatgtgggaaggcctttaattatggctcagaacttactctacatcaaagaattcacactggtgagaaaccttatgaatgtaaagaatgtgggaaggcctttagacagcgatcacagcttactcaacatcagagacttcatactggtgaaaaaccctatgaatgtaagcaatgtgggaaggcttttattcgtggctttcaacttactgaacacctgcgactccatactggagagaaaccttatgaatgtaaagaatgtggaaagacttttaggcatcgctcacatcttactatacatcagagaattcatactggtgagaaaccctatgaatgtcgggaatgtgggaaggcctttagctatcactcaagcttctcacaccatcagaaaattcattctggcaagaaaccttatgaatgtcatgaatgtgggaaggctttttgtgatggcttacaactaaccctacatcagaggattcatactggtgagaaaccctatgagtgtaaggaatgtgggaagacttttagacagtgttcacacctcaaaagacatcagagaattcatactggtgagaaacctcatgaatgcatgatatgtggtaaggcctttagacttcattcacaccttattcaacatcaaagaattcatactggtgagaaaccctatgaatgtaaggaatgtgggaaggcctttagctatcattcaagcttctcacaccatcagagaattcattctggaaagaaaccttatcaatgcgggaaggcgtttaatcatagattacaacttaacttacatcagactcttcatactggcgagaagccagtcaggtttcctctcctccctccccatcctagtctagcatcatgaaatttgttgatggaaatatacattgtctttgttttatttaaggaaaaagttggtaagccaccagtttcattagtatttatttatttaaataatccttgaaaatcaaatgtttttaagtgagaaagtggataactaaagtgtaaattttggtctcattttaatgctgtttctgagttattgtattaaccattattgagaataaatttttttattgagaataaattttctaaaattacatgtttcactgaaaccagtgaaatatttcactgaaacagtgaaataaaatgaaaacaatttcctcccttccctcaaatctctgagataaccagtatgtgtatttcttcttcctttatgctcaaacaacctgtacacagaaagcattttttgcatgtgtttggaggagcttttacccccatacagacatttgacagcgtcttgtccttttcataataatcatgaatacttttccaggtcagtacgtaaagatgtaacccattctttgtaaggttcagaatatttctagaatggaatgtatgtccgtattttgggccattacctactacagacattgaagttgtttctaatgttcacctagaactctaattttaccttcttttgtttctattgtgcagattcccaacagtgggattaaagagtatctggcgtatatattttgacattacatttattttttaaaatcttctaaattttttgtttaataaaagcacacattataaaaattcaaaaattaccaaaaatgtgaaaattaattctcccctaacatccagttctgtagccactcactttccacagatgcaacaactgctatcagtttccttttattctaacgggaatatttcatgtaaatttcataaattctttggacaaaagtaggttattcataatatgtgatttattacacattctcattattagtccacatttggcctacttcattttttttttttttgagacacacccaggctggagtccagtggtgcaatcttggctcactgcaacctccgccacccaggttaaaaattctcctgcctcagcctcctgagtngctgggactacaggcatgcgcagccactatgcccggccaataagctatatttattcttatttgatgtggatgaaaattatcaaaattggccnggcttggtgctcatgcctgtaatcccagcactttgggaggccgaggcgggcggatcacgaggtcaggagatcgagaccatcctggctaacanggtgaaaccccgtctctacta

SEQ ID NO: 126101 - DNA, 284 bp, Homo sapiens
agacatttgacagcgtcttgtccttttcataataatcatgaatacttttccaggtcagtacgtaaagatgtaacccattctttgtaaggttcagaatatttctagaatggaatgtatgtccgtattttgggccattacctactacagacattgaagttgtttctaatgttcacctagaactctaattttaccttcttttgtttctattgtgcagattcccaacagtgggattaaagagtatctggcgtatatattttgacattacatttattttttaaaatctt

SEQ ID NO: 126102 - DNA, 3001 bp, Homo sapiens
  misc_feature (2796)..(2796): n is a, c, g, or t
  misc_feature (2888)..(2888): n is a, c, g, or t
  misc_feature (2980)..(2980): n is a, c, g, or t
ctctcagaatctctcctgtccagtggtaagagaataagtaaaaaaggcaaatgtctcggaattagtatgaaaatagctttgaccttatagacttcctgatagggtctcaggtaccctctgtggtccttggaccacccattgagtactgctgctatatagtaatgaaaattaagaaactactactatttgtaatattacaaatgaacctcacatgtggtactggacagaagatgctggagaaaaaagtacctcctatatcattccatttattggaaattcagaaatagacaaaaaccactgcatagtgtaagaaggcaggatatcgcctacctttggtggacttggcatccagagatgagccccagaagttatctccaaaaagggatatttatgaaacagaattatcccagtgggttaacatggaagaatttaaaagccatagtcctgagagatcaattttcagcgctatctgggaaggcaactgtcattttgagcaacatcagggacaagaggagggttattttagacaacttatgattaaccatgaaaacatgcccatttttagccaacatactttactcactcaagaattttatgatagagagaaaatctctgaatgtaaaaagtgtagaaaaatcttcagttaccatttattttttagtcaccacaaaagaactcattctaaagaactttctgaatgtaaagaatgcacagaaatggttaatacaccatgcctttttaaacaacagacaattcaaaatggtgacaaatgcaatgagtgtaaagaatgttggaaggcctttgttcattgctcacaacttaaacatctaagaattcataatggtgaaaaacgctatgaatgtaacgaatgtgggaaggcctttaattatggctcagaacttactctacatcaaagaattcacactggtgagaaaccttatgaatgtaaagaatgtgggaaggcctttagacagcgatcacagcttactcaacatcagagacttcatactggtgaaaaaccctatgaatgtaagcaatgtgggaaggcttttattcgtggctttcaacttactgaacacctgcgactccatactggagagaaaccttatgaatgtaaagaatgtggaaagacttttaggcatcgctcacatcttactatacatcagagaattcatactggtgagaaaccctatgaatgtcgggaatgtgggaaggcctttagctatcactcaagcttctcacaccatcagaaaattcattctggcaagaaaccttatgaatgtcatgaatgtgggaaggctttttgtgatggcttacaactaaccctacatcagaggattcatactggtgagaaaccctatgagtgtaaggaatgtgggaagacttttagacagtgttcacacctcaaaagacatcagagaattcatactggtgagaaacctcatgaatgcatgatatgtggtaaggcctttagacttcattcacaccttattcaacatcaaagaattcatactggtgagaaaccctatgaatgtaaggaatgtgggaaggcctttagctatcattcaagcttctcacaccatcagagaattcattctggaaagaaaccttatcaatgcgggaaggcgtttaatcatagattacaacttaacttacatcagactcttcatactggcgagaagccagtcaggtttcctctcctccctccccatcctagtctagcatcatgaaatttgttgatggaaatatacattgtctttgttttatttaaggaaaaagttggtaagccaccagtttcattagtatttatttatttaaataatccttgaaaatcaaatgtttttaagtgagaaagtggataactaaagtgtaaattttggtctcattttaatgctgtttctgagttattgtattaaccattattgagaataaatttttttattgagaataaattttctaaaattacatgtttcactgaaaccagtgaaatatttcactgaaacagtgaaataaaatgaaaacaatttcctcccttccctcaaatctctgagataaccagtatgtgtatttcttcttcctttatgctcaaacaacctgtacacagaaagcattttttgcatgtgtttggaggagcttttacccccatacagacatttgacagcgtcttgtccttttcataataatcatgaatacttttccaggtcagtacgtaaagatgtaacccattctttgtaaggttcagaatatttctagaatggaatgtatgtccgtattttgggccattacctactacagacattgaagttgtttctaatgttcacctagaactctaattttaccttcttttgtttctattgtgcagattcccaacagtgggattaaagagtatctggcgtatatattttgacattacatttattttttaaaatcttctaaattttttgtttaataaaagcacacattataaaaattcaaaaattaccaaaaatgtgaaaattaattctcccctaacatccagttctgtagccactcactttccacagatgcaacaactgctatcagtttccttttattctaacgggaatatttcatgtaaatttcataaattctttggacaaaagtaggttattcataatatgtgatttattacacattctcattattagtccacatttggcctacttcattttttttttttttgagacacacccaggctggagtccagtggtgcaatcttggctcactgcaacctccgccacccaggttaaaaattctcctgcctcagcctcctgagtngctgggactacaggcatgcgcagccactatgcccggccaataagctatatttattcttatttgatgtggatgaaaattatcaaaattggccnggcttggtgctcatgcctgtaatcccagcactttgggaggccgaggcgggcggatcacgaggtcaggagatcgagaccatcctggctaacanggtgaaaccccgtctctacta

SEQ ID NO: 126103 - DNA, 416 bp, Homo sapiens
tatttctcttatagtacaaaaccaggagttaaaatatatttcttatctttcagacttggcatccagagatgagccccagaagttatctccaaaaagggatatttatgaaacagaattatcccagtgggttaacatggaagaatttaaaagccatagtcctgagagatcaattttcagcgctatctgggaaggcaactgtcattttgagcaacatcagggacaagaggagggttattttagacaacttatgattaaccatgaaaacatgcccatttttagccaacatactttactcactcaagaattttatgatagagagaaaatctctgaatgtaaaaagtgtagaaaaatcttcagttaccatttattttttagtcaccacaaaagaactcattctaaagaactttctgaatgta

SEQ ID NO: 126104 - DNA, 333 bp, Homo sapiens
ctttttagtatactataattcgtatgtcatcaatatcagttaaataaacagatataaatagcctaactgctctctcagagctgcagttattacctaatgctatcccagaatgagttagaatatgcaggtcctctgcttttgtagagtcctgtgatatagccccagaccaggagttagaagatctggctctgccttaactaacaatgggcaggttgcttcagctctctagtcttcagtttcctcccctgtaaaattagagagggctggacataattatctgcaaggtcactttcactttctatgatcattcaagacaagcattaagatgcaagg

SEQ ID NO: 126105 - DNA, 635 bp, Homo sapiens
gaacttgaaaaaaatatgtagtcttttatggcaagtatcaagacattcaggttaatgatatactgagtacttttatagagaatctcatactctccaatcctagaggatctgaaaacaaaacatggcaatatacaacatatttggaggtaaggaggctgcggtggtggtggaatacaatgattaatgcttcggggactttcagtgatgaggtcattgactgctaaggttaatggcaaatgcagtttctgagattctactgctgaggcttcgaatacactaaactatacataaaaagttataatggctctgtcatactatctacaatttatagattcacattttaatacataatcttagacaaatgagataaaatatttccataatacaaagtgtactgagtgttggcgcaattgcaaattctgcaccactgttcagaaaaggtacaaactgtaactcttcagagaaacagacagaaacttttgggcaggttcctgttctaccaagtagtgcaaagtagaaccacagtgctcaatgtagtatttcttctctacttgtgatttgatagaaaacttgaagggaattatgactttagaaaaaaagtgagtgttgaatatagaagcagtaggttatcattg

SEQ ID NO: 126106 - DNA, 656 bp, Homo sapiens
gaaactccagttctggaagtacattttaagccattgcttctatcatgtccactaacattcagtcagccaaagcacataccttgtccatggctaacattgatagtatagataaatatacctgatctctagcaggaggaactgcattgtcttggggaaaggttttagatatagggaggggtgatgagttgggaacaataatgtagtctgccacaaacatattaaagtgtaactggatatggttgctgcagaattttgaacctttgttttaattgtgatttttactctttttcccctatctagtgcccttttgtaatacagtaattctcatgatttttgtctgaattgaaatcttctgagattagattgtctacgaaaatacagtctatcctccttgttttcagcttttgtatttgtgaactcacctactattttttgtaacccccaaatcagtactcacagcctttcatagtcatgtgtttgcgcagagtgtcaaaagaatttgagtttgaacaggatgatattctgccttctttttcagctctcatacaatagtcaggtatcctttttgtggtctatttaatgccatgcttttcctgtttttgtattgtttgttggttgttttgccatttaaattaacccccaagcatagtgctgaa

SEQ ID NO: 126107 - DNA, 449 bp, Homo sapiens
tcagtgttctctctaccataatctcttccatattgtagtagtattattgcctacttgccaggaacatattcctaataccgtgaagaaaaagtattttgtatcactttgttctaccaaggcgtattttatgtggttcactaatgacagcctcatattttgagacttttctcccagtgagtatgccttttctcccctaaatagactttttaaagagcagttttaggttcacagcaaaagtgatcagaaagtatagagttgccatatatcccctggcctccaacctcccccactatcaacatcctgtgccagagtgacgtatttgttatagttgatgaaactgcattgacacataatcatccaaactacatagtttacattagggttcactcttggtgttgtatattctttggtttttgacaaatgtatgtatccaccattatagtagtaat

SEQ ID NO: 126108 - DNA, 170 bp, Homo sapiens
cgacgcctagaggatcccctttagattatagctagagaataatccagagtaatccagagctgcgcattcatacacgaagctagacgtagctagagaataatccagagtaatccagagctgcgcgttcatacacgacgctagacgtagctagagaataatccagagtaatc

SEQ ID NO: 126109 - DNA, 254 bp, Homo sapiens
tgagtagctgagggattacaggcagtaattaattaattaattagcagggggactccaggaccctggaccccactgttttaccagttgccaaatatttggtgtatcttccttgcttgaaagcagtagttctcatgtctgctttccttatggaagagcagtgggggattaacttcaggatgaatatattagtcaccttgcttggaaagttggaggtgttcattttaacataaagtgggatgaatatatagcttgcc

SEQ ID NO: 126110 - DNA, 382 bp, Homo sapiens
ggatgactccaggtttttggtttaagtgtatgaatgatgtttccttgtgttaataaaaggggaaacaggaaagagaacaggttagggttaaaggagagtatgacgaattatggtaagtatgcaaaattgatgcaacattgaggtgacaatgttagaaaggtaattagaagtaagttgggagagtaggtaagtttaggcaagagcgatgtgtaacctaacggggagaaaggctgaggtctaaaaacacagtcttaaacatcagcatttacaaattgggcaaaaggatagcctgcaaaagaaaaatactgagaaggtgagtggtcagagattggagagaaccaggaggagactgatgccatccaatgaagccaagcagagggag

SEQ ID NO: 126111 - DNA, 730 bp, Homo sapiens
gaggctgttgcctgggtgggggtcccactttactaggtgtggcaggtcaccagttccacaggaagcagtggtggctggagaacagccctgaggcgtgagtggagccggcacatctaggagttttcattcagctgatgtttggtgaaagtgggatctgtaggctgggcgcggtggctcacacctgtaatcccagcattttgggaggccaaggcaggcagatcacctgaggtcgggagttcgagaccagcctgaccaacatggagaaaccccatctctactaaaaatacaaaattagccaggtgtggtggtgcatgtccgtaatcccagctactcaggaggctgaggcaagagaattgcttgaacttaggaagtggaggttgcagtgagccgagatcgtgccattgcactccagcctgggcaacaagagcgaaactctgtctaaaaaaaaagaaatgaaagtgggatctgcagatgggaggagaacaacggtgaaaatgaggtgtcctcgggccatgtgatgcctgggggctaatcctaccttcaaggtatcacaggagattctcctcactgcttctgaagtgtgattgaaaggggctgaggtgtggatggatgtcagccctgctttccttcatggccacccagaagcttttggatgctttgggtaggacaaacctccaaggagcttttgggtcacaaagggcccaccttcttgggcactggcgggatctgt

SEQ ID NO: 126112 - DNA, 342 bp, Homo sapiens
tcaaaatagattttagatctaaatgtaagaactaaaaccgtaaaactcttggaagaaaataggaatagatgtttccaattttcagttaggcagtgtttcttatatatgataccaaaaacataagcaacaaaagaaaaaaactgataagtttgacttcataaacatctaaaacttgtgtgcttcaaaggacactattaagagaatgaaaagacaacccacagaatagacatctgaatagacatttcttcacagagtaaatacaaatggctaagaacacaaaaacacatcttgctcaacatcatcagtcagtaagaaaatgaaaaccagaaccacaataagata

SEQ ID NO: 126113 - DNA, 428 bp, Homo sapiens
ggcacgcaaagatgtagaaaaacctggcccataatgaggagagaaattgatcaatcataaccaacccaggtctaacctagatgttagaatgagcagataggctgggcacagtggttcacgtctgtaatcccagcagtttgggaggccaaggtgggcgtatcacgagatcaggagatcgagaccagcctggccaacgtgttgaaaccccgtctctgccaaaaatacaaaaattagctgagcatggtggcgtacccctgtaatcccagctactcaggagactgaggcaagagaattgcttgaatcctggaggcagaggttgcagtgagccgagatcgcaccactacactccaggctgggctactaagcgagactatgtctcaaaaaaaaaaaaaaaaaagaacagataatgacattagagcagttattat

SEQ ID NO: 126114 - DNA, 633 bp, Homo sapiens
ctatcaattaaacagctggatctagctgtgcctgaagcttagactatttctggaccttttagatacatgagcctgtacattcctttttaggtttgcagctgaaatagttgtgactgttatacagatctagtggttggaactgagaacacaagatataagaagatattttctgcttttgtggacttgacaacctaaaagtgagacagacagacatgagtaaatgaataaatgacaaatgcaagaattgatatagaatagattgacagcacagaggcaggagtgggtaactattgaggagggtttaaggaactggaaaaagtcctcaaaaaatataaattctgatttggggttggaagataaatttgcatttactttgtttttctgtaaacaacaaaactgatttttccacagtagcctgtgggagttattttcactattttatagtagttggatgtgttgttacactctaccattggtatgactataccatggcacttttctactagttatgcagaggctgtaggaagtaggtatagcaggttatataatttgggaagtggcattaagtttttttagaaccttattttattcagtgtattttcgaatgagtttccagtatggtattttgcttta

SEQ ID NO: 126115 - DNA, 463 bp, Homo sapiens
cacatcccatgatccctaaggagcattagcccagaggaaacacctgatcaatccctgccaatttacgctaaaagccaccatttaaaaaaaaaaacaaaaaccctcatcaggatgacctcctataccacaaaaccttgccctcagcagaactctctataggtctcaaaggtgacagtatgaagcactgctggaaattcccactctcctagcgtcctatttattgatcacatagctgccttccgggggtagaaccactgggaaatgtgtatgaacagcactcatcaaccatcacgtttttatttggcattagctccatgcccagtgaagtgccaggtacagactgagattcatttaaaaaatagaaagcatggtcctgtaaataatttgcaattaaccagggagatacacttatactggagaattgaagaacagctacaattacgcactgtaagtaggaaagttc

SEQ ID NO: 126116 - DNA, 518 bp, Homo sapiens
tgcttgacacagataaaaggctcattgcatggaatctgactgttgttaggagaatttgagtagatagagagggagcggtgatgcagactgtctggatcaagggcagcctgcacagaggcactcgaggctcctctccaccagcagtgcatccgtccagtgtctcatctgtgtcctagaccaaaccgctggccctcaagtaaatcacctaaacccatatatagcccttccccatgtctttctctcctgcctgaaaggcctcttttctgcattccaaatccttcctctctttaaggcttaggtcaagataaccttcctgcctgaagcttttcttgctagtttctcctgtgtgtattttctcctgcattttaagttatgctctatatcatactccttagacctctgctacattttttattgttagtttttctatgcagtgagttagtcagtatctttcaggcagggacatctttcttttggctgctgctgtgctgttgaacacctcagtacttaatgcttgg

SEQ ID NO: 126117 - DNA, 214 bp, Homo sapiens
tgtggctcctgagctccccaagtatcacagttatcagggtcctaaggacagtgattgcctgcgtcgagctctggcggagggtgtgcttacttgctcccttattttagcctcacctgggcaacaggctcatctcactcccatttaaaattttcctaagtgtggagtctggggctgggagagcaagccccttggccacaattgcgtggctgggggt

SEQ ID NO: 126118 - DNA, 338 bp, Homo sapiens
attggatgccaggaggggacataagcttggtcaaagtgggtctcttcaggtgagggcagttctcaggaagggccccctggcagcagggacagcctggcctctagggcaaggagagcctgggtctcaaagcgggaggggttgggggttatggggaggcccctggaatgcactgcagacccaaccttggtctggtcgctaggccgggccttttgttcgctgcatcctgacacctagcacagtgtcccacacagtgtaggagctcagccaatatttgttgaatgaatgactgaatggagtaacaacaagcttctttaattgattaaaattcataaaactca

SEQ ID NO: 126119 - DNA, 252 bp, Homo sapiens
tggctgagggcataacggcattattgtaagttgctgcggctgaaagcgggtgcatctttctaatcgcacatttcgaggcagagtcctttgtgaggaatgcagtccccatcccataacattgttcctatgggaaaaccagactcagcttcctggaactcagtgtgggggaaagtaggctggcctctctggggtctttttatttctcctgaaggctacgactggagggtagcggggttaaagcagaaagggaaa

SEQ ID NO: 126120 - DNA, 504 bp, Homo sapiens
  misc_feature (29)..(30): n is a, c, g, or t
gtcgtgcggcgggctggggggcgggcggnntggatcacgaagtctcaggagatgagaccataccggctaacaaaaccccatttctactaaaaatacaaaaaattagccaggcgcagtgggaggcgcctgcaatcccaactactggggaggctgacacaggaattgcttgagcctgggaggaggagattgcagtgagccaagatcgcgccactgcgctccagcctgggcgacagaatgagactcagtctcaaaaaaataataacaacaacaacaattacaacattttattttaaaaacagtatttttttaaaaagctgtagtcattgtatatgtatacatgcccacgttttatgtgtatttgcaaatagatatatactttttttttaaagtgtcattatggtcatacaacctaactcctcttttaaactccaaacatatttccatgtaaaaatatttatctaggtcaggcacagtggctcaccactgtaatcccagcacttcagg

SEQ ID NO: 126121 - DNA, 206 bp, Homo sapiens
tgctgtctgtcttgaacactctttccctgacatatcctcacccttcatttctcagctcaaatgttgcatccttacactgcctttccctgaccaccctatccaaagtggtcttccctagttacactctagcatctcactctgtcttttttcccccttactaccaattatcacaatctgaaactacgttgtatgtacatatgtgtgca

SEQ ID NO: 126122 - DNA, 211 bp, Homo sapiens
aaaaaatgaagaatgtcaaaaatgttaacaagaaagtaaattagaagacagtaagtgtatttgtattttctcctcttaattttgttaagagatgactgaacactctgaaaataatgctgtacaggtgggttagtaactaatgtagacaaaatatatatgacaataatagcacaaaggaaggacaagaaaatgaagctgggctagagcagtg

SEQ ID NO: 126123 - DNA, 263 bp, Homo sapiens
aaaccctaatatcttctttttttcaaacaccatatttagtagctgtgtgtcctattgactgaagatctaaaaacttctgtctggaagttttgtatgtgatggtttagattaattatgtttttttactcctaaattttctttgctttcactgaaaatgaatttggtttttcctttttagcaccatcactcctgtagtgggtaagaagagaaaacgtaatacctcatctgataattcagatgtggaagtcatgcctgcacagtca

SEQ ID NO: 126124 - DNA, 223 bp, Homo sapiens
ttgattttgttccattatgtgggtgggaggtcacctctagaacagacatagagagaggggtctccccacccctccaccccctggtgaagagaattcccctggtcataccccgtttgtgatccaggcaaccacatcaagcgctggtgggctgctttttcaacccccagccctgaaacgttcccccgatcattggtcctaacgttgtttcctcttttctcttcta

SEQ ID NO: 126125 - DNA, 309 bp, Homo sapiens
tttatttttaagaattccatatttcagccaatgctgtttatagtagtgcagttaggatggggaatttatgagagaacttactttatgtggtgggtgggatgtaccgttggcatcccaaggatggataacttgagtgatccctgcggtattgtttctactagttacttaaccagtttttttctgagctcttatggtgttgaacacttaaaagacgagatccttgctcttgaggagttctagagatccttactctgggactagacataatgagctcttctaataatagtataacagttgcacatggtacca

SEQ ID NO: 126126 - DNA, 618 bp, Homo sapiens
gggtattacacaagggtatgaataccaagaggcagggattatgctgatcatttggaaggctgctacagtacagataaaccatatgaatccgggcatggtggctcatgccagtaatcccagcacttggggagactcaggtgatccacccgccccagcctcccaaagtgctgggattacatgtgtgagccaccgcgcccagcctcttaactcttttttaaatctgaagtcattaaagctaatatctaaggaatatatttccagcctcttcttttaatgtgcctttgtaaacttagatcaggtctggagcagtcattttgcacattttgccattcctaaaatgaggatgtcagaacttacctcacaagcttgtgaaaatatgaaaaatgcgtatatgtgaagtccataacacatggtatttttccattcatgagacacgtgtatggagaagatggtcagtatttccagtacataaggggtttactaatctatgttggctgggcttgtgttgccatctcccattttgtaatgaatgtcccttatgactttaagctagtagatatggaaaaactgtgaaaaggggcccttttggtctgaattcttcctctaatcattcgcttt

SEQ ID NO: 126127 - DNA, 724 bp, Homo sapiens
gcatcagggatttatttatagcagtcttatattttgcagccagctgtaggacggtcattcgttccatcatggttatgatagccaagacctctactataaaggaatttggaaggtatcagctttggaataatagtgcactatcttgtaagtggggcaataaagaaattggagaagaaaggattgagggagattagaatgacatacattctacctctagatgaaatgtgggcttttattccaagccagatacagcgttctcaagtccagaaatgtgtgtcctgctctaaatctataaagtttatctcgaaatacaatagataataggcatttattttaatcttttcctgaacatcccaagaatagctctatgatgtttctctttcggaaataaacaggatgtctgtgaatttgtctttcagtggagacgctgctaactccctccctgtgtcgtctagcagttgatctcactctgtaattcatacatctttagctcacttgaattttctgtttcctcttccctttttatgtcacagtgagagcctatacatttagttggaataaagtatttgtcagagtggcacacgtgggagtgctttctccatctgccactgacatttaatcactaggctgtggggttgaggagggtggtgttggggcctgaaaaaaacagcagccgaaatccacgttgggacagcatcctcctctgggaaacaccggtagtgtt

SEQ ID NO: 126128 - DNA, 129 bp, Homo sapiens
tacagaaaaagagacagaagggatcagcatgtgcctcacacctgcactggtcactcattcaaggtgcaaggtaggcaggagcaaaggagagagtgacacatgaaaagtatccgggccatatggcagtag

SEQ ID NO: 126129 - DNA, 371 bp, Homo sapiens
ccctggtaacactcacggagttgtgacttgttgctcttggaacactttaattctcatctcgcctcttggctgttaataatacattttctgcatagtctttgttttattttctgtatgaatgttggaatcagcccatctgactctaacaaaaaattagtcctgctttttattttttggtctaactgggcttattgaaactatagattaacttgggaattgccgtctttacactgtagctgatgtgcagatgtccttgcgaactctcctgctcagcaggaaggcactgcatttggtttatccagacctcactgtaggtccttcgttcccatctgtttcccaggtggctgttggctgcactgcatgctatcctg

SEQ ID NO: 126130 - DNA, 432 bp, Homo sapiens
ctctttgttcatttctaccacagaaagtagtcttttctaggttgtatttactggaccaatgtggacaaatgatcatatggctgacccaaaataggcccaaagcacaggctgccttttacagcactatcaagctgatcaactgtgaaggcacccttagcagagacatttgctattgacattttaatttttttatctcatgtaactgctgaagtacagttactagaaactagtgtgatttaaggagagtttcttgctctacaaaagttatttggacaaaagtacataacattgggtacgtggggctgccacaatccaaagatgctattttgttccagaagcatgacttatcactttggtggggtgctatcccggaatagctctgaagctttaaaaactcgctctgaatgcctatttaaaaaaacatcttttatt

SEQ ID NO: 126131 - DNA, 445 bp, Homo sapiens
agaggaagaagtgggggtggtcacacccatgcctgcctcgctgtgggggttgtattgtgtgaggaccagcagtggccttaccctgctctcagggatgggactctcagatggagccaagcctccagagagcctggagactgggggacaggtgggccacataccctgttttcgtcagcacccccctctcaccactaccgccgccacccaccagagagcgtggcctctgtgctgtgtgtgggtttgtgttcttggtttagctttgctttcagtttcaagagtgaactgtcaccctgggaactggtgaggagagccccgactggaggaggggcaggcggaaccttccccatcctctggggctggctcaggccccttttccaggaaatcttctgtgtctgccgcagcccaaacacacctcctctcgccccacgtgccctcagcgctcacg

SEQ ID NO: 126132 - DNA, 302 bp, Homo sapiens
gggattcagcataaggagcctctcagacactgcccagacctgtgcttacccgaggaaggcccctctggcacgcagcccaggggccagggagatggcaagggagatgccccgggcaggagatgggtccgcggctcctagctcccattactgtcacccccactgacagccccgggggagctgggacaagtcccaagtacagaaaattaagtccttgcctgggcttataagtgggtcccaacacaacactgggcagcctctgggaacaagaaagcagggccctgctgagcccaggagggagctcc

SEQ ID NO: 126133 - DNA, 221 bp, Homo sapiens
actgggatagcatgccaaggaggaaggggccaggggtcagacagagtggggatggtcccagtggtggcagagagggcagaagggggcccagcagcccttctaggaagcaagtgtcattgccccacgacttatcctgcattggcctgctagccaaggccagaagggcaccaggacctcatacatggtgtcattggcacagaccatcaccaggaagctgcccc

SEQ ID NO: 126134 - DNA, 264 bp, Homo sapiens
tcattaccagacagaggacagaaatgatgctgtttccagttcttcagttgttgggcttctaattcttacatcactgacctgccgtttcctctgctatgcctcccatgatggagttaaaggggtgaggggagaagcaaaactgacatcttttgagacttccggcactatgtcagacatatatacatatataatatgtatgcatattatatacatatataatgtgtatgcatattgtatacatatataatgtgtgtgttatatgta

SEQ ID NO: 126135 - DNA, 498 bp, Homo sapiens
aggaaaagtagggaagagaagagaagggagggaaatgaaagagaggaaaaggaagggaagaaaggaagtaagaaaagaaaggaaagaggaaggaaggaaggaaggaaaaaaggagagaaagagggagagagaaagaggaagagaaagacaatggagaggtttctaatgggcatggtgccactgtaacagatggtcatgggtgtagacagccaggagaggcctatgagcatcaagggacataagggctaaaggcaaggctgatctggaaccacctaaacatctacctttcctgtatgaattgagagaatatttactaatggattgactggagtctttttttttgttctttaatctaaacaacggctctcttgagattccatacctgagctgagcaggaataaactcttgtacttactaccactgcagagttttatatttggacaattggatagtacttacatgtcccattagctaacaggttacatttatagtcaaata

SEQ ID NO: 126136 - DNA, 441 bp, Homo sapiens
cccgacagtccgatttccaccatccttcacttggaattgctcccatctttgaaggaggctggagggagttaccttcatgctgggctgaggttctggggtggcttgttatgaatgtcttcactcgtcactcccatattacggccaatggccaggtggctcagctccccatgactctcctctgcaccgcagccaggtgtgcctgccaggacaggctgggcggacgggaccttcgcgtctgtgcacactgagggctgtgcttctcgttagccatgaaaggaagctagttcctgtcaggcacattcggagcttcaggtacatgggccacattgacccttgtgttgcctggtacagtgttccagagcctcccagttggaagggcatggactccagcaggggagcagtgaccagcaggtccctggagccttgtgtcctttagtcaga

SEQ ID NO: 126137 - DNA, 161 bp, Homo sapiens
caggaggatcacctgagggaggagtttgaggctgcagtgagcaatgattattccactgcaccatagcctgggtgacagaatgagaccctgtctcttaagtggaaataagtaagtgcgaggagaacacgtgatctttctagttttcagtccctcttgcagtt

SEQ ID NO: 126138 - DNA, 355 bp, Homo sapiens
aagtgttttcttgtgggggcagataaaggaaaagggaggggaacaaatcgtcagatctgggctgtgctcctgcgcctgctgggtggggtttcctgagatgtgcattctgagctatttttttccactctgggcatccgtctctggcagggaggagggcaggctgcctggaccagtcagctgctcctttccatccctccctccagtacacatactctcctcttgctgtaaccccagtagctcaggcctcctctgcagattccggagccttaacccttcaaatacccccaggagagccccagccggggcctcagtaggcagacagcaggattaccacactgagagggctccaggggag

SEQ ID NO: 126139 - DNA, 568 bp, Homo sapiens
ctccttgctcaatgccctgctgagccctctggctctcccttgctccctggacctctatgtgtctctgtacctccttgcctccctttgttcttgcatatctttctgagtcctctggctccccctgatttatcctcagaactccatcttgtttcaggttcctggttcctatgtccagacccctgggcatagcactgcctggggatgagatgttctcattgctgagaaccagctgagaagtgttgggtactttagacctttagaggctggcttcactagcctctggaggtttctcctctgagtagccaatggagatacccctcccttgacccgtggcatcaattggtaaaagccatctaataatacctagggctgttctgagttcagtcaggcagtaaatagtcatgctgcacagttgagaatatccccaagaggagtgagcaaccacatcacatccaacctgagatatatgtataattaggacagtggtaagaatataaaatcgtgaaaatatttttttcacacaaaatttttttggctcctgacccttggacaaatttgaccagttatg

SEQ ID NO: 126140 - DNA, 417 bp, Homo sapiens
agtctctgtcagatggcactgataattaatcctttggaaagatcccaagggctttcaggctctctggctagatgttaacaacaggaacagtgagtagtatatagcaacatgatacttgacagttttaaagcaacactggttttatttaagatcatcgggttaaaccagctaatactcctttggcttaaaacctacttgtagtttttactgtttggtattctcttctcagaattgttctttatatatgtagcagaggctgcacgtgatggctcacctctgtaatcccagcactttgggagggtgatgcaggaggattgcttgagcacaggagtttgagaccagcctaagcaacatagtgagaccctacctttccaaaaaattaaaatattgtctgggggtggtggcacatgcctgtaa

SEQ ID NO: 126141 - DNA, 676 bp, Homo sapiens
gtatagtgaatgtaaaagattaggctgaatgaatactggcttcagcacatacagggtatttttcttaaaagagaggaaaaaagccatatgtgttatgtgtgaaaacatatgtatgtgtaaatagccacctcttaaagtgaacttttaaaaaataattaagccttctggttgtatgtaaccccagttttgtaatattttctagaagtggtcgttgagtttgaatttcttagtccctaggaacaatgttataaaaggatgtttccacaagtaattagaattaaaagtgtatttctgcccatttttaagatatctattagttgccttttttgcattataatataaaatcactgaattatatctgactggaaagtgtttccaatatattctttttagtcaatttattttctttgatatatgttaatattttatattttataagtgagagagaggactataatgatttcattcagcatttttgagatcactcttacaagtataaattctggaattcaatatggattaggagaacaatgtttacctatcttttcatagatcagtgagggaccactaagccaaaaggcagggattatttcactggcttgataaggttataagagtgaggaaatggggagcaatattaaaacagggaaactttgacctaattacaagtttccct

SEQ ID NO: 126142 - DNA, 498 bp, Homo sapiens
ttcaacaggcacgagggcaggtaatctgctgaaattgattaaattcaccataggttagaatcaggaataaataattaaagtcagtttaattgatcagcacacacctgaagcttgaggagaaataaagtagtttcctttcgtggtgacactagtggcagtctttttcagcacacgcactgtttaagcctcttccatgttatatacacatacttgaagactgtagaggaggttatgaaaaccagatagtcaagcagccatttctttctgaacaccttcctttggtaggtggtaagggtggaaaggatgcctggagccttggaaggcagagatggaggataaataacagggcttcccgtaggctgtggatgctcacagcacacccctttaggcatctcactcttttgcctcgatcgtagacaagctagaagatggtgagagggtccgggccctgggcctcaggagcccagctgtgagggcatccgctcttgtgggtgattc

SEQ ID NO: 126143 - DNA, 271 bp, Homo sapiens
tttcaaccaaatttgtccagcaggccaaaactagataaagctctaaacgtttcccagtgtgggaggcatgcggggtgagagagccatgttctggctgtcacatccttgctaggctgctgtgcaacacttttgtagcagcacagccaggtgttgagtctctgtggtttttgttttttgagatggagtcccgctctgtcacccaggctgcattgcaactgcctgacctccgctcactgtaacctccgtctcccaggttcaagcaattcttctg

SEQ ID NO: 126144 - DNA, 353 bp, Homo sapiens
cgtctcgatctcctgacctcgtgatctgccctccttagcttcccaaagtgctgggattacaggtatgagccaccaggctcagccaccatgtttcttcttaatgtattcttccatttttcatttccttgaacataggaatatatttgtaatatcctttttaaagttattgtcttctgattatattttctgtgttatttctgggtctttttctgtttattttctccttgttaccggtcatttctgcatctttgcgtgccttgtactgtttgattggatgccagacagaatgaattttatgttattgggtgctgggatttttgtatttctttaaaaaatatttttgagctttattg

SEQ ID NO: 126145 - DNA, 134 bp, Homo sapiens
ggaaattcggtaccagagaggatctaaatatagttttggaaagaagagtcccagcatcttgatcagtgtctggaacacactaggcattaaatacttataaatgcattttatactttccctgcatagtattacat

SEQ ID NO: 126146 - DNA, 373 bp, Homo sapiens
tcaaatatttctctccctcgcttggatgtaagcctagctagctgagctgggggtgagaaggacagaacgagttggtgtgggcagcctggtctgagttctttttggattgcgtgttgtaaatcttcatcctctgggctcaaatgaccaatattatatttttcagaaatcaataatcatgaaattcatcactgttcatttataggtgaataattacacactgaagaggctaattgctattctataatattttgaaaaactagaaaatggaaaattgctaagaaaatttatccattccctttgcaaaaaaagttgggttttgtcaagaatgtgaaaagtctgaaatttttctctactttcaggctaacaatttatt

SEQ ID NO: 126147 - DNA, 510 bp, Homo sapiens
tacttctccagggtagtggttctcaaactttggcatgcagttggagggcttgttaaaatcttgctgggctccatccccagtttctgatttagtaggtttggggtgggggccctagattttgcatttcttacagtttcccagataatggggatgctgcttatctgggaacaccgctttgagacctgccactcccaaaaaacctttcttgcaactacacactaattataggtgttgctgctcgagaagcttcccattcagacctgaacagagatgattcagtgtttgagccagcccccagataaccagctgcctaccacttagctaattgctgggatcaaggggttgaacagacattttctgtttcagatgcgaacaagggggtgaaaaaattaaaaagatacagggaagcaattgcaatgccactgtgcaagcttcaccagtggacgttccaattaacaatcagagagtacctgctgagcacattttagattaagattaaaaggaaaaatg

SEQ ID NO: 126148 - DNA, 355 bp, Homo sapiens
aattaatattgtaacttagtaacttaaaattttaaaaatatagacatatatttttgactaggcaatatattcacacggtgttaaaaatctactatgtagaaatgaatggatagtgaaaactctcttctgctctgtctccctgtcttcctgctttccttccttggaggtagccagttgtatgcattctgatgcatcctgttaggtaactttttaatgagtaacttggctctctaagcattttgatatcaggaggagtcccctgtatagtcaatatgaacctttcagtcatggaaaaagagacatgtccttttgtaagtaagttgactgtatatacctagctctcatatatgatttg

SEQ ID NO: 126149 - DNA, 318 bp, Homo sapiens
atggaagcttctaggtcttctctattactgaggccatcttctgttacttgtcctcctgaaatcccccacccctagtatattgcaagacccatgggagcaatatggtaagggccatactggttttgctcaccactgttgggtataattctacacggagcctcaggaggacatcgaagttgacccacccgggatgccgaggacactgctgagagaaaattgtgcatattatttctcgttttcattgctgaatttccctagtaatctatttatcaaactttgactcttccttctcctataattggtgattcttttgcacaa

SEQ ID NO: 126150 - DNA, 172 bp, Homo sapiens
ggaatagctggggattcatggagcatcagacagggacagagttggcatttggaagaggaagggtatatggattggcaagaacatatacagcaactgtgggttgtgaagggcagagctgaaactttggtgtagtggaccctgtagagtatctggggacatggggagtagctga

SEQ ID NO: 126151 - DNA, 454 bp, Homo sapiens
actgttacaaaagaatagcacattttgcaaaacacatctgtacttgcaactgaaaacatgtttccaagaaccggctcagaagaactagctgagacacaaaatgagcctgaaactttcttaattatggcatgatgtgctagaggcagaaaaaaaccccatacaacataaataatgagtatggcaaatgtttcattttcaaatgatacagtcttcttattgctaattccttgcataaggatgtttcctgaactctgctaccaaggtaaggagacagtggtatagagaagatatgaggatcgcacctaatttcccttttttggcattctaatgctcccattcacatgtggcagggcatccgttccactggatttagcctagtttggatcaaagcttcctctacttcatttaacagatttgctcagatggaaggtctcagaggagaaacaatgttagt

SEQ ID NO: 126152 - DNA, 409 bp, Homo sapiens
actcacaaaaccctctaaggtaggtactatcattattgctattttgaggttagtaaagttaggattggagaagtcactcacctaaggttaacgctagcatgtggtagagctaaaagctgaacctggctgggtgcggtggctcacacctgtaatcccagtactttgggaggcggaggcaggcggatcacctgaggtcaggagtttgagaccagcctgttcaacgtggcaaaaccccgtgtctactaaaaatacaaaaaaattaaccaggtgtggtggcgggcacctgtaatcccagctactagggaggctgaggcaggaaaatcacttgaacctgggaggcagaggttgtagtgagacaagatcgcgccactgcgctccagcctgggtgacaagagtgaaactccatctc

SEQ ID NO: 126153 - DNA, 436 bp, Homo sapiens
cagtacggactgtgggactcgagagggactctcatttaaagtaaaatcaggctgggtgtggtggctcacatctgcaatcccagcatttgggattacaggcatgagtcaccaagcccagccttctttctttttttttgagacagagcctcaccctgtcacccaggttggagtgcagtggcacgatcttggctcactgcaacctttgcctcctggtcgtaagcaattctcccaccttggcctccccagtagtcgggaccacagacacgtactacagctcagccagaatatttttttaaaaaaataaagcaacattaaagaacatgaacaatctgctagaaattaaaaatgagaggccaaaaacaacagattatctcctagagaactgattaaaaaaaaaaaagaaaaagaagctccattaagagagtcccacatccaa

SEQ ID NO: 126154 - DNA, 502 bp, Homo sapiens
ttaaggctctctgtgttctggtaccgtccagcttaccaactttgattcctactgttacccaatggcttaaatgagtggggtaattaattcttatgaaaaagaagcaggcctgaaaatgccaaaatattttatatgtacttggtattctacctcgcaaaaacaaattatttgtgccaccattcaggtttttttctagaaaagcctgagacacacagccattaccacctctggctaagaaacactagcctgtgctaaaatatactgcattaaaaataggcccggtgtggtggttcacgcctctaatcctagcactttgggaggccaggaagggtggatcacctgaggttaggagttcgagaccagtctagacaatacggtgaaaccctgcctctactaaaaatacaaaaattagttgggcgtggtggcaggtgcctgtaatcctagctactcgggttaggctgaggcaggagaatcacttgaacttgggaggcagaggttgcag

SEQ ID NO: 126155 - DNA, 720 bp, Homo sapiens
tatcttgaacattaatgcctttaagagaaatgcccttaaaaatacctttagcaagcatttccttagcaaacacgctcctagcaacagagagtaagttttgtaagggcatgtgaatacgaaggcagagactggagtgatgccaagaaatgtgaaagatttccaggagccatcagaagcaaggaaaaacgcatggaaaagattccgagtgctcagaaggaagcaaccctaccaccacctgatttggacttctaagctccagaactgtaagagaaatttcttttattttaagccacctcgtttgtggtactttgatatggcagccctaggaaactaatacaattctcttaacaaaaaggcaacaatttccttagcaataataaacttagaaataatgccttctcaacaatgactttgccaacagtggccatagcagccacaccctcagcaaaagcaacttagtgcagatttcttagcaaagcacgccaaaacacactaacaaacatactaagaaaacacaaaacacactaatactaacaaagaaagtgcctttctaaaaactgcctatcaacaatcttatcaacacatttcatagcaaaaatttccttagcacctttgcccctagcaatgttgcctttagcaacagttttcgtggcagcagtgaccatccaaccttgatttagcaaatgcatccttagcaaaaactttcttgcaacaccaccc

SEQ ID NO: 126156 - DNA, 317 bp, Homo sapiens
cagggatctgtagcaaaggaattgagatttttgctcaaactataaacacggaagtaaaaattaaagaaacagaggaagcaatactctccaatatatggtaaacagagctgaatcacctactttaaaatctacatctggtatgaagaatgtaggccatgcacggtggctcacacctgtaattccagcaccttgggaggcagaggtgggtagatgacttgaggtcaggagttcaagaccagcctggccaacatggtgaaaccctgtctccactaaaaataggaatagggtgtagtggcgggcacctgtagtcccagcta

SEQ ID NO: 126157 - DNA, 651 bp, Homo sapiens
catcctataaatgcaaaatatattttgtattaaaaaatctagtttagttcatgaaattaacaaattaaataattatttcaatactattagataaactttaaacatatgtggtctcctagctctccaaagacctcatactaaaataatagttcttcttaatagaaggagcaaggaattattgttcccaaatgtttttacacacctccccgctatgagagaagtgtacttcctggttggctgacatccagcctgggccatgtgacttgctctgccaggagtagcaggaaagcagaaatgatgtctattaagtcttgaaagaggctttaagagctaatacactcttctcccacatcccctcctcaagggtctcactcctaaataaatgttactttttcaacttccatcccagaataaaaaagcatgtggagcagaaatggaacagagtagaggccagctcagtttccatgttataaaaccaaatagacatctttgttgcagtaagcccccatgatctggatgttgtttgctatcacaatataacttactctgtgatgattgctattttaaaaagagtacctaccaaaaatttgtagcgcaaaccatacttactaataaaaaattaaccttactccctttaaaataaaaaacaac

SEQ ID NO: 126158 - DNA, 482 bp, Homo sapiens
ggccctactctgacgagttcctgcgcctagggcttaaaaaaaaaaactgtttattttgaaataaccatagatgtacagaaagttccaaacaaaaggtacaagatcctgtgtgcccctcccctagccttttccagagataatatcttgcacacctgcagtacaccatcaatgctaggaaagccacagcccactgggcctatggggacttcaccagttacacatgcctgtgtgtccacatggttccctctcacctagctgtgtgtggccagcatgatgatacagcacaggaccgtctcctcaccaggctctccgggcaccctctgtagccccctcacctcttcccaccagcccttatccctggcaactgcctatctcttctccatccccatcatattttcatctctcaagtgccacacaaatggaatcatccagtgtgccactttttaagaccggctttctgcactcagccccatgccctctgc

SEQ ID NO: 126159 - DNA, 354 bp, Homo sapiens
tgctcaacatcattattagggaaatgcaaattaaaaccacaatgagataccatttcacaccaactagagtgtctgtaacaaataagacagacaataccaaatgttgttgagaatgtggagaaacagaaaccctcatacatttccagtgggaatgtaaaataggggctttgacagtcagcaactgggcagttctcagaaagttaaacataaaactactatacatgtaacctagcaattccactgttggttacctaccccaaaagaaatgaaaacatatgcccacacaaagaatcggagtgaatgttcagagcagcgttattcacaatagccaaaaactagaagcaacctaaatgt

SEQ ID NO: 126160 - DNA, 402 bp, Homo sapiens
tagtgctggggactcgagggccttggccttggcatggctcttccacccagggcagctggcagccaggctcccaggaggcagaggagatgaggggggaggtgagtccgagcaaaggaaaggaggtcggctgtgcagtcacggttctagaacattccttggatcagcagcatccatatcacctgcagactggctggaaaagcagtctcagaaccaacattataaccagccctgcagtgattcataagtactttaaaaagtggtcaatcatttcagcaaagcagagccacacagtccgggggaccacaggtggcctctgtgtgcttgtctcggttttcctgcccctctccagacatgttgattagacactgccaatgcccagcctcagacctcagtctaatttgg

SEQ ID NO: 126161 - DNA, 513 bp, Homo sapiens
tcagtggtcagcccttgttatcttgaacagaatttaaaatagagataaatgagttaacatgatcagattttgcattctttaacaagccagttgtaaatattaagagtcccgcaatcaggacttagggaccgtaggaaaaatttattatgtaaagtatctttttttttcatattctagccagatttcttttttaaattctgaatattttaggacaattgctgctgcttgtaattatagtttggaaaagatggagtcatagggtctcatatagagctgaagggaaccttggaaatcattttagttaagtgtctggtaatagagtgggggaattgacagccaagtcctctgttaagattgtttactgtatttatatttttccactaaaaacaaacttctgagtagtgcacatatgcatcattgtctaaagttttagttagtattctctgtatgaatagtggctctcaatatttttctattttcatatttcacaaatgtaaaatatatggctttcag

SEQ ID NO: 126162 - DNA, 181 bp, Homo sapiens
gcagtgggagcaggactgtctgagtcctaggaagtgaccgcagtgggagcaggactgtctgagtcctaggaagtgaccacagggggagcaggactatctgagtcctaggaagtgaccgcagtgggagcaggactgtctgagtcctaggaagtgaccgcagtgggagcaggactgtctgagt

SEQ ID NO: 126163 - DNA, 532 bp, Homo sapiens
ataactctctgtggtggaccctagcattatacacatctttcaggcaagaaacttagggtggctaaggaacttgctcgagggtaaagagtctaatagcagagccgtgagttagacgcagccacctgcctccaaagtgctgtctgacctcgtttttcaggacaggaaccctcagactcacctgatagctagttgtgttgaattatgtagcaaacacgtatgcagcgcctaaggtgcctcatgcaaggtatcaggtgctgggtaaccaagagccatgccctgcaaatctaacattctccaagaaacaagatcatagcttattctcttagccagaggccaagaccagctctctatcaaaatggccacaaacatatccatgcaaacatttctagaaagacaacctaggatcatgatgtccaacttcctgatcctacagggtacatagcgagcagacaggagcccgtgaacagctgactcctcacgtgtgtgctgggccctgggctgggagtcaacaaaccacatctgtcactcacct

SEQ ID NO: 126164 - DNA, 425 bp, Homo sapiens
tctcatatttgggtgataatgatatgtggtgaattcaatattcatgatattgtatattgtttttcaacccaatttaagatctgtgtcatttcacaggaagtttaactcagtatgtttacagccacaattgcttccccccacttgcatcacttccctagttttatgccttaagttggtgcacatcagaattgattgaggaagctgctggtggtggtatatgtgtgtagtatgtggtgggggtgtggggtaggaggtgtgtgtgctgtttaaaaacacacttgcttaagcctcacttgaaattctggcttagaaagtctgggatgatcctggggctgggtcttaatttttaaaagactcaaaaggtggctacatctagtaaaggatgaaaatcactgctttaaatatttccaaaacaaactctaaat

SEQ ID NO: 126165 - DNA, 653 bp, Homo sapiens
tggttcactgccccctaacagggaaagctatccatgggtcactgccggatggagcacttcagactgaggtgatgagaagagatttgcaaagggatgtggggtttgggcctttgggtggtgggggaagtggggagatgggaattggactggcagaaaggaatcaggaaggagctccgggtgggcaagtttgaataagagaataagttgagggaggaacttgcaaggggagtgaggagaggtctgggaatgaggcagagtgcaggggccttgaacgctgggaagctgcagtggggctttctgtggcatgcaggggcagtcccagggccagcactgtggagggggtaggcagtgctggggaggcagctgcaggcagagtgcaggaggcctgcagtgctggggtggatggggtgtctgggtggctgcagggaggcttccagagtttcctgcagtcgctagcgcccaggcgtgcagacctgatggaggtggctgtggtaggagggaggagcctgaggggctgagaggtaaggaagtatgagagacacgtgccgctgtcactcgctgcaggctagcacagagtcggtaaagcaggtgcttgtgaataatcggatgataattgatgatgagatggtgaaaaccctagcaatgtccagaac

SEQ ID NO: 126166 - DNA, 880 bp, Homo sapiens
aggctggtcttgaactcctggtttcaagcaatactcccgcctcggtgtggggattgcaggcttgagccactgtgcctggcctggaaccaacctttatgtctatcaatactcccatcagttaactgtctcaggtatcataatatcccttcttatcgggggacctgccccgataatcacgtaggttcttttctattttcctaagcgtcagctggcttgagaaataaaaggacagagtacaaaagagagaaattttaaagctgggcgtccgggggagacatcacacattggtaggatccgtgatgccccacaagccacaaaaaccagcaagtttttattagggattttcaaaaggggagggagtgtgcgaatagttgtgggtgacagacgtcaagtacttaacagggtaatagaatatcacaaagcaagtggaggcagggcgagatcacaggaccacaggacagaggcgaaattaaaattgctaataaagtttcgggcaccattgtcattgataacatcttatcaggagacagggttttgagatcaactagtctgaccaaagtttattaggcgggaatttcctcttcctaataagcctgggagcgctatgggagactggagtttatttcacctctgcaatctcgaccataagagacaggtatgccccgggggggccagttcagagacctacccctaggtgcgcattctctttctcagggactttccatgctgagaaaaggaattcagtaatatttctcccatttgcttttgaaagaagagaaatatggctctgttctgcccggctcaccggcggtcagagtttaaggttatctctcttattccctgaacaattgctgttatcctgttcttttttcagggtgcc

SEQ ID NO: 126167 - DNA, 373 bp, Homo sapiens
caaaaatcagagcacagggccatgtcagatgaaactggcacagttgagggagggcctcaaacgggttacaaacaagatggaacggaggcacctgggtgtgggtgtcctgggaagctgaggcagaggttctctgatccctcagcttagcatcggctctggagaccccatgagggaattcctgtgcactacccaatcccagcaggtgccaacagaccttgggaagcagtggtagcggaagggaaacaagaaaaagaactttgatcttaagcactaaactctcacagatcgactgatttcctttcatacttctcaggacctgggttgcattactctttttaattcctgcacacacatcccagggcagttctggccc

SEQ ID NO: 126168 - DNA, 660 bp, Homo sapiens
ctaggtctatataataattttcagtgtgcattcaccatatgaaatggccccaaaatgtatgaactgaagcaacaatagggctgaagcaacaaaatgagcaataatgggagatttcaacaactaattaatgataaagaattagtgaaagcattttaatgtaattaatactgattcaataaacatttagaataatgtattaaacaattaaagaatatttttcttaagcattgtatattagcaaaactggaccctgtattttaagcatgaggcaagtcacaaaacatcaaataattggtattaaatggataatcagaagcaagtagaggtcagtaataaaggttaattttttttaaatattacatttacatgtttagatcttcacagaggagaaaaagaaatacttaaagcctagttacaagtaatatatatttttaaattgggtattgtagctgaaacagcactttgagggaaatggctttaaatgcttaagggaaaagactaaatgtgcaacttagaaaaacaatagcgaaagcaatgtagaagcaaggaaatacaggaaagggaataaatcaatgaattagaaactgataaagaattatatgttaaagttgttatcatgacaaacagtaaaacgcataattgaacaagatgaaacgggac

SEQ ID NO: 126169 - DNA, 1535 bp, Homo sapiens
gcacagactacacaccaggtgctataattggtactttacatatgttaataaccctgcttcttttttgcagcaccatcttggagtagctggtgtgcttattttacggatgagaaactgaggcttaaaaattgaataaatggctcaagggcacccagcttgtgtatggctaaaacccttgttttttctgtgagttccagttattgcttttaattgttcgatgttattactcagtagaagttgaagttttttgcaatttgttggcatctgcagtatctaacttttataaaagacaggattgctttcctgactgggttcgcccatgtagttttttgtgtaaaggtatgattatgaagcagacctgagtactacttttagttgtgtgattcttgaatcatgctggaacagggagtacccttcatcttgtttttcagactagagacatttaaagtaatgtttctagcctgatttttcaatattagaaaaatataccagaggataaaacacatcagaataaaatgtggctctcccccgacctttagtttctgcctttcctgtggttttgcactttttgctttcatttaaagtgcaaatggcattctccagggtgctttatatgatttagaaagtcaggtagtactgcagggattatgaaaaaaagcagcagaccagtgccctagctcccttcttgacagatttctgctcccctgaggcaactacttgttggaggccaaaagaatgagggtcatgatcaactcagtataccactggaggttatatgagtaagcagcaaactgtttttcataaatgcagaatgttggcaaactgacagactgcgtatgccacccagaaggaatgctgaaggcagtcatgcccaaagcacagtgtttcttgtgattaggtacatctgaagcctgttagtaacaatatgaacctgtgatcaattaagcagctgaccaatccttacctccttctccctgctcttgttacccaataaatatgaagggctgtggaagctcaggggctgcctttgctcactagaagcagggagctcttttcttcttcccctggcccttcctttaaaacagttccttttgtttttttgttatttccatgtttgtcccttccttcagtctcgtaatgacggtctcaagtagtaacagtagtaactgttgtagtgaaggtctcaagtagtaactgtggcaatgtgccacaagtggcgcccgaacagggactatcagtgacaaacagagacctgaagagacctgaagggacctgaggaggcctacagggacacatagagataagtagggataaatagagatagagacagatagggaaagatagggacttgcaccaacttggaggaactaacagggaccgtagagacagacagggacagacagggatagataaagactagcaaatactagcagagactagcaaagactagcagagaccagcagaagctagcagaaacttgcagggacagacagggacagatagagacagggtcctataggaactcgtcagaggtg

SEQ ID NO: 126170 - DNA, 121 bp, Homo sapiens
aacctgaaacccaggcccctgactccacccgcgagaggagacactctccaggccagccaccacccgatggtgacaatcatagaccagtgacctggggctgcaggaggccccagccctacct

SEQ ID NO: 126171 - DNA, 251 bp, Homo sapiens
ctactataatgtcttgcctcttgggggctatttgcttagccccctcataagactgggggtttcccaagctcagggctcctcagctgtgacataaacataaaccaccaccatgaaacttacttaagagggaaaggggaggctgggtacagtggctcatgcctgtaaccccagcactttgggaggattaggcaggtggatcacttgaggtcagaatttcaagaccagcctggccaacatggcaaaaccccatc

SEQ ID NO: 126172 - DNA, 698 bp, Homo sapiens
gctgagattacaggcgtgagccactgggtctggccgtttcgtcagaacaatgaggattagcagggatccaactagaggtagataccagcctcagagtgcatttattttctttacccctggaataagccacagggtggtggggtgttataatgggactagggattccccctaggcagtggtctccaaagtggggagcacacagccctagggaaacacaagatgatcactgggagacagaaagtaatttttagcacatcccttcacattttttaatttatttagagatggcacgtcttgttatgttgcccaggctggtctcaaactcctggcctcaagtgatcctcctactttggcctctcaaagtactgggattataggtgtgagccactgtgcctggccccatattgatttttaatattctttctcatttctacctttgaatgattatatttaacataccaatacagtagtagacataaataattgctaaacaaatgactataacctggagatggatgctcaaaaacttatcaatgggttggacttcccttccgccaactgcatttttaaaaacaaatctattaatccacaccagatactaattcttagtgggcttcctctagttaaacccaataaagtagtactattctccaaggagcctcattccccacctgtatatgtagggattctcctatgag

SEQ ID NO: 126173 - DNA, 421 bp, Homo sapiens
aaggtcaactcaaattatgcttcctgagttttccctgatatttgttgttttgtttttgtaagtttgctccttttccggtttttcatcaaaatttttaaattcaggcaaataatttactaccccacaatataactttgagtaagtcttaacagttacgaatcagaatctttcacagaactgtgacttttaagtaattttattcttataaagtatcctcttaaccataaaactaattttcttaaagtatattaataattacaattttcccaacaggaaattttcctcaaatctatttctctttaagctttatgattttgcgttttcctggtacttattgacaatactgtagtcatttatatatttaaattgctcaaagcaagaaaccagttgatttgacaaaattaactcagtgctggaatga

SEQ ID NO: 126174 - DNA, 194 bp, Homo sapiens
tcggtaacatttgtaactatgtttaactttataggttaataggttcaaggaacacagaccaagagatgtaacccataagtagttgaactgaaacccttctactgttccattgcatcgtctttgacaaaggcaagccagaaataacagtctgtggccccgcctctctgttcagggtcagctggggagccagtggg

SEQ ID NO: 126175 - DNA, 182 bp, Homo sapiens
ggcctttcaggtgggcaaataacatggacaaagatatggcacgaaagcaaatgtggtctctatggggtcagaacttggttagctatagtttggtttgtttgtttgtttgttttgagatggagtcttgctctgttgcccaggctggagtgcagtagcacaatcttggctcactgcaacctctg

SEQ ID NO: 126176 - DNA, 828 bp, Homo sapiens
gatgatatattttacttctgtttgcactaagtcttcaaaatccagcatgtgttttacaattcagtgcatctcatttaggatactagattttctttcttttttttttttgatacaggagcttgctctgtcacctaggatggagtgcagtggtgtaaacaggatgctaagttttctttttttagtagagacagggtgtcaccatgttggccaggctggtctcaaactcctggcctcaagcaatctgccttcctcaacctgtaatcccagcactttgggaggcccaggcaggcagatcacctgaggtcaggaggtggagaacagcctggccaactatagtggaaacccctatctctacataaaaatacaaacaaaaacacaaaacattcaccgggcgaaggggcgggggggacgccggtaggccccgacgaacacccggggaggcgagacgcgagcgagacaaacggcgtggaaccccggggagcgcgagaccttagcaacgggacagaaaccccgaagcaggggccgccccatggtgacactcacaagagccgcgggggggcggcaaacactgtgggtggacccactccgtggggtgcgccaagaagacacgaccaaagccaagtgtccacacaaaccctttgccaaacaaacaatcggggcgagggcgtaatacaaacccgcctgagtacaccaagcaagagcagagcactgaagtgcacagcagagaattaccgaaccaagaaacgactctctacccgcaggtgacaacatagaaagacgcaagggcacgggcacgcagaaaagcccccagaggggggcgggaggaac

SEQ ID NO: 126177 - DNA, 786 bp, Homo sapiens
aattacccaggatattttgtatcctgagtatacgttatatagagattggtggtggtggtgatttttgttgcatttgggagttgctatgaaagttgagggactaattttttttttctttttgcttaggcaaactcctgaaaactacttctcttcctattttcatgcagagaaacttaatttctccttgccttttctccccctgtggagttaaaaatagtatggatgcatttattttgtgtcaatttccattaggatgcctgcagatactaacagattcttcaaagtccaaaaagcaacctcagattttcacattggggtaagtggaaaatagaaggcccttgattcctattaactaacctgattgggtatcaccattgttttcattgctaataattgttttccaatgagaatatgaatatttttattttaatggaagttttatacctacagtaaattcataggcattagttcattcactactaaaatgtatacttctctgaactcagacacacaggccatttaacaggatacatgtgacataataaattaaagtgacatgaaaatgaaagtttcatctatttagaactgcagagaagatttcaggttgtcagattatatgttattactaagtcttggttattgaggttagtgcagtaaattgattgagtgcttcatttaaaatactaattgagcacctgtctgtaaacagcagttaggcaatatgggtgaatactaaaaaggtaactttggtaatattgggaatactaaaaatatatacagagagaa

SEQ ID NO: 126178 - DNA, 332 bp, Homo sapiens
agcagaataatgggtgtgggtacttttcaagattcttggctttgtgaggagacaatggaaatcagagtggaggctcatagtgaagcttagggttggaggcatttgcttgtttttgctttgttttgaagatgggtgagatcaccaatgactcattcttttccaaatcgtggttgtgcattttctttctcttaactgacctcttaactgattagacactgttgaaattctttggtctttggcgatataactttttcctggtcctggtccttatgcttgtgacaaagaaagggctgtttccttaaatagttgaatttcccaggctctgtcccagc

SEQ ID NO: 126179 - DNA, 562 bp, Homo sapiens
aatgtctcagagttttagtgtctacctatgaaaaacaggtgcgttattttttgatgctaagattctatgcgcactctctagtgatccttataaaatagttgattttaaaaagccccagaacttgttctgatgatgcaaaggagggatgatgaacacgggctgagagtaagagaccataaacagccactgtcattcagctacaagggaaataatgaggcaacttagccaggcatctagcgaagtgaagccccagtaagcattactatatttggggaactcatatttaaagtaattaatagctcttcaactcttagtggccaactgacttgagaacgggcaaaaaaaaggccattaaaaaggaaagccaaagcttcatatccttggataagtctattactttttaaggctcaatgtccttctcctgaaataaggacacaacactgacccgaatctttgcccagggtgattgtgaggatcagatacaaagtatgtgaaaaccacagtgcactaaattatttttaaactcatttttaatctaagcttttctactatcaaaactaca

SEQ ID NO: 126180 - DNA, 317 bp, Homo sapiens
ctgccctgcccattttcctaggactaagcaacttcctcacaacctggcaaatgaaagtttaagcccttaagccctgatgcagcaagggctccctctgcttggatatccccatgtcacaccagctgttaactattctgaatatcaccccttgcttctaagagtaattctgtggaccattgattcctgtcttcccaagatgtgtttagtggatgatgtatgaatggccagagttatttactttatcccaaacacagattgtgctcaaattgaaattctaaataatattaaatttaaatatcacaactacatgtatagca

SEQ ID NO: 126181 - DNA, 259 bp, Homo sapiens
taaatcaacttagtctctgtttcttcatattgcatctctccatttttgccattcccaaagtgaatactccttttatgtatcctctcttaagtgtgcgtttgattgtttgcaaaatattcaaaatcgtaacaacttcttctttcttagatattcctaagtatcactcaaatcagtccgcttctctccatttcctttgccaccatgccctgctaattttaaattttttggtagagacagggtcaagccacttagccaagga

SEQ ID NO: 126182 - DNA, 363 bp, Homo sapiens
atctagaggatccgaattctgcacccacagcagaggcaggatacaggaagaggacatatcccaatgcacagaacagcgctgaacctgagacgcacttggtgaatatttatgggggatgcgggagggtggggggcaaagagcaacactgtgaaacaaagagggggtgttacctacttgccatactgccactgctggcccactgcttactactctggtcaataacatggagaaggctgagcacggtggctcacatctgtaatcccagcactttgggaggctgaagtgggagaatcacctgatcccaggagttcaaagagcaacctggacaacatagaaagaccccatctctaaaatttttttttg

SEQ ID NO: 126183 - DNA, 1161 bp, Homo sapiens
gttgaaataattaaagtttttctggtagattcttaaccataaaaacgaagcgaactgcttattctgccccatccacaggtagcagcctcttcatgcttgcccctgcctggaatgcccatgcccggaatgtcacatgtttggctaggagtgcatttaggtcagagcttacaggtcacttcctgcccttgatctgcttttctaaaaaactgtttcccatttttctttttctttcccatttttcatttttctttctttcatgcatgctgctttatttttgctgcacgtatcattagccaacattgtactgtcttctatctggaacataaattccatcagatagggactatgttgtttattgctccatctccagggcctgaatatagtaggaactcaataaatacttgttgagtaaaagtatttgctatatccctgtcccttcagtttaaatgatacataaaaataatgcagaaattgagcttacatagaaagaatgaaacaatattttgttttacaagcataaacaaaggattttaattacattcatttcaaaaaaaaaaaaaaaaaaaaagagagcaggttccaaacccaaaattttatataaatccgcggagtgtataaaatctgtctagaggaactatgagtatttacaagagaaatttttttttaatttgagagacacgagagagaaagagaaactctctctcatattgtggtattggggaggaaactgcgaaaaaggtttctcccacttataaattgtgtcgccggaaggctaaagggggccgaggtgagaaaattcccgggggcgggaccagttgggaagcttcggcctttgttaatctccccactccttgtgtgtcggggccggagggtgggggggggggactcctttggaagcaccaggagttttcgaggaaaccaagcgcgtggggcaacattatagttgggagacccccaatttttttacgaggaaaatttataaacaaactactcgctggcgcgtgggggggggttgaccccgtgttggtcctaatgttccccaaggaagtatgagggcaagaaaggcaattgtagcgcagggagttacaagcggtcagggaaccgggaattggacgatggtcccacgggcgtgcaaaaggaaccctggccaaaaaaataaat

SEQ ID NO: 126184 - DNA, 444 bp, Homo sapiens
caggggacacaattcaacccaggacatgggggcccacctgcagatgcccctgttggtcctgcccgtcctccccaggcccctcaggactctgtatcaacagatctggcccctgctgtgcacagccctccctccctgagtcctccctcagaaaggagaccccccctctgcctccactccccctgcagctgttttctggggcctcctcaccactcactctgcccaccgctgccccgggcccttccctccagccctgcgcctgtgccctgaactgcctcttgtcataggcaccagcttccctcccaggcccaccctcctccctgagggctggcagcctctcctgtggcctggacccgcccaacacagtggctctgcagccccgagcccagatgtccagcaggggccaaagcccttcctcctccctggcaaaggatcccttgcttgttc

SEQ ID NO: 126185 - DNA, 387 bp, Homo sapiens
agacacctgtaatcccagcaactcgagaagctgaggcaggagaatcacttgaacctggaagacagatgttgtagtaagccgagatcacgccactgcactccagcctggggaacagagtgagattctgtctctaaataaataaataaataaacaaacaaacaaactgtatttctatctactaacagtgaacactgaaaaaaggtaactaaggtaggaaatatatctcaaacttcagacactagtgtacttctttcaaatgattttttggcatattaaaggcatcatttacatcatcttatttgttcatttatttaaaggtagcacataaaagctaaataactgtgctttatcataaccactactctctgtgacaccacagatttttta

SEQ ID NO: 126186 - DNA, 615 bp, Homo sapiens
ccagggctggagtggctggagcccaggtagacctgtggcacctggcaggtgccaagggcagttttagtcagcagttggctacaggctcttgccaataggcaatgagaggcctgtctagactggggtttgagggcagccttcactccttactcctagaaggagtaagttctggagagaaggacaagggagagccacagtcttggcagaactgggctgctgggcaaggggtcaagtccatgccttaagccccacaaggagtttcaacctatggggttcaaggcagaagaacaaaataaaacttccgccattaaaattggagaaggaacttgggggtagaactaacagtagagctggcttccttcggcccgtaaatcttcactaattatccctatgacccacttgccagttggagtcctggcctctactcagacccttgacatcactgtcctccggtctgactggtggccacagtggccacccactctgcctgcgcctgccttggtccacactaccaggagtttccttcctgaagaggatccaaggatcccatcacacatctcagcagcctttgcctggacccctccagataggattcagacctgcccctgacctccc

SEQ ID NO: 126187 - DNA, 890 bp, Homo sapiens
gtggcaacctggttggtgacagcacaaatgacccatcaatggaagcagctggcttcactgctcaggtgattaccctgaaccatctcatggccaatatgaagcgccgggtatgcccctgtactgggcattgccacacggtatccagattgcatgctcagtttgctgcagctgaaggggaaaaagattgatccgccggtatctggtaagaaagcgtggagagtatgggccatagaagtttctgtgaatgtcttggtgatgcgtgctcgattgttgatatggttcgctggcaaggcccgatgtgtgttgtgagaacttcttgtagaaatttcccccgttgtggttgtgtcggacagccccgcaggggacgtagtaattagtgagcacatgcactagggtttggccggctcgaggtggtcaatcaacaacgccaggtggacaaagaagggctgctggagcttggctaagggtcctgccataggtctgccatgaataggctcagagaggtagtctgacctattactccctaataccctgtcacccaattcttaagtcacgtggtggaaagaaccggtctcaataactgattgtttccaagttggccctacaaggtctcggcgcgtacaagactggttacttgataaccatggcatcgtaccagaccttcagacggacacgagcgactgtcggtggaccacttggttactaatattgcgtgtggccgcttcacaggtatagtggtgaaaatcgtgcttgctcaggacaccattgggcacaattgcacggacttcggaccatagaccgtactgcaacgcgacctgtcacgaccacactgtgcggtcgacgaaaattatacatcgtgggcccgcccggttactgaacgccaagcgcaa

SEQ ID NO: 126188 - DNA, 172 bp, Homo sapiens
ctgtatccctatgaccatttgctcctacaaatcacaggttattaattgattataactagtaacacacataacagtctacttctaaaggacttttaccaaacattactattaataacttttgctgaaggatgttcattaattcacacagtaactactcataggtcagctctcc

SEQ ID NO: 126189 - DNA, 569 bp, Homo sapiens
tgtgttttcaatttctcagggaagacttttttctttcttttctttttttatttacagctgagacagaaacaaacttcttcatttttcctctgtaggaaaacatattctccccccaccccgtcccccaagatcttcttttactggtagtccagtcctttgaggcatctcgtaattaaggcgtgccacttctaattttatgcaatttttagtactaaggcttcaaaatatttgcatgcttgggcaacataatctgaactcttagtcttaactgactttgatagtcccattttcccactcaagagctattgcagaatcagacttagcattattgctatggcttaatttccccctttattcctatcttctggtattttctttttttttcttaagaggtaaattttaaataagtttgttatattttatctagcactaatttgttttgtatttattcaacaatgtttccagctttcaacttatttttattatttctttttattttgataggtatttgctcaccctaacctacaggtgaggaaatgtgactatcccagtaccatgtgctatgaagt

SEQ ID NO: 126190 - DNA, 683 bp, Homo sapiens
cacggaccgtggctcacacctgtaatcccagccctctgggaagctgaggcagcctactgcggattgcttgcactcaggagttcgagaccagcctgggtaacatggcgaaactcccatctctacaaaaactgcaaaacctaactgggtgtggtggcccacacctgtaatcttagctacctgggaggctgaggtggaaggatctcttgaacctgggagatcgaggctgcagtaagccatgattgcaccactgtactccagcctgggtgacagagcaagatccagtcccctcacccccacaaaaagacccagccaaagatgggaggtctttcttgtgaaaagattttgctgtttgcttcactagttttcctaagaatatagatggatgttaataggacttaaatctcatgatgggtgttggggggactgggagggaagatcttccagactgatgggccatggatcatttgtttggccctcatggtgtttcatacgtgttttgaatcagctgccaacactttaaaataaagcaggcacagacacacacacacacatacataccacctccatttccagtgtgtaaaggcttggaagctctaggaatgctgagacaacattagcacatggctgcagtaggctggagctagggagcacctgtcccttctagacaggcatgtgctccccac

SEQ ID NO: 126191 - DNA, 273 bp, Homo sapiens
tcacttcagttattcctgtctttattttactgtttgattgctagccttggttcccagagcaactgtctaattttttttccttttttttgcacattgcatcttctaacatgtctgccggacctttagccctggttccatgaagatggggatgaggatggtgacactgagaagtctccctggcacacaacagcatgcttagatgagcccaagctcaggtcagtttattattttctttcagacatatagagaaaggagacagattggccattacct

SEQ ID NO: 126192 - DNA, 677 bp, Homo sapiens
ggggtgactatggaaacaaataattagaatggcaattctaatcagctgcttccagcaggtctttaaaataattacattcccatattttgactgccagagaaaagccacatgctgtggattactaatgaagtttaatacttttgaaataagtctattatttgcttcttccctttcttacttccttttttcctttctctttctttctttgggacaaaaagaggctgtagaaaaaaaaacaaatccaaagcagggaaatgagaaaaatctcttctactgcgcatgagattatacctcaaattagagtgtagttaaaatataaaatcccaaatgacatattctaattaatgagtagctgttactatttttaactgttctgtgtcaatgttatttaataaatatgccttttaaagtcccatggctgcaatccctagttttagttgcttagatagaagcgtatcctctctaattgtaatgtttcatggggctttgacaggaactttttcttgacagaaattatgtgggtgatatttcatatttgtctgccataataattatttttggcaattgtaatatgaacatttcattctgacagattagctttgaataaagctttttgttttcttttcttttctctccccaacaatctgaaagagttattgaccaatgttttctggaat

SEQ ID NO: 126193 - DNA, 373 bp, Homo sapiens
caccaggaactaatgaaattgattccctgcatggggtagggggaaaaaggtaagggtacaggcacaggagtgaggcctagctgaacatgcctcagtgtaattctgacttctgaatcatgtaaatgtttatattacccaaaataaaattcaaactaaaagtaacaaaaccttattacacttaatgcaaataaaaacaaatgagttcgggccaggcatggtggcttcttggctcactgcaacctccgactcctgagttcaagccttctcctgcctcagcttcccgagtagctgggattacaggtacctgccatcacgcccggctaatttttgtatttttagcagagacggggtttcaccatgctggccaggttgg

SEQ ID NO: 126194 - DNA, 561 bp, Homo sapiens
ctaggcaggtcgtgctgaggggtccacatgctaccctaaggaaatgagaagcgacatcatccaattttaaaatgaaggcgagcaagacagggaggggagaagtaacgattccctgaacaagggtagcgatgaaggacgtggaagaaggggacagatctgggataagattttggaggtgggaactgccgggttttcttaaggattggactgggtgtagacatgacggaaatgctgaaggataaatctcaggtttctcaagtgaagccagtgtgggatggcaccactcactagcatagagagggtctagggaggaacaggtgagtggagagaggctacgcctgagccacctgtgagacccccggtagcagctgagctcaggggcctgaagcccacaggaagtgggctgctcactgatcacacacatttgagccccctccaaggacacaggtggtttttcagtcccaagactggatggagaacccctagggagaagggcagctagaactgagcctggagaaactcacattcagaaattgtgttgaggaaggagaagccagtaaa

SEQ ID NO: 126195 - DNA, 389 bp, Homo sapiens
tggcctcgaactcctgacctcaagtgatcctcccacctcgacctctcaaagtgttgggattacaggcatgagccactgcgcatggtctctttcttctttattcgtgaggtgttttctccctttacacttgctggcccatggaaggtgcttagtaagaatggtggctgacttctaatgcttccagagagcctgacaggctgacatgggtgtcttccactgtctgtggggaggcttagaaagaggagtggcttttattaatattatgagtgtggatcagatcctgctggagccaatggcaaagcctggagccggcccagattctgcgagagtgctaggctgcacggtcacagatcaaatgtgcttttcaagaatggcccctctcctgggat

SEQ ID NO: 126196 - DNA, 354 bp, Homo sapiens
cccaacaaaatgcagggagaagaacgcagcatcaattctgtgataatcctgccaaagatccatattctaaatctaatcatgaagaaatagcagacaaacccacattcaggaacactatacaaaatagctggcctgtaatcttcaaaagcatcacagacatatacgcaagtcaaggaaagacatgtgaactgtttcagactgaaagagactaaacaatccaaattccacaaacaagaacaacaaaacaatgtattatctggccccttcctatctccctggcctaatttcttagtacatgttcctttaataactctactctagagttctggtaaagttcctttccaacaacagggt

SEQ ID NO: 126197 - DNA, 276 bp, Homo sapiens
aaagtgggtaaattattttgaatttttaagcatttggcatagttggccaggaagtctcacccccaggaatgtggtttatagaaattcctggagctcacaaaaatgtaggtgcagggaaacctcagggagtcccccaaaatggggctgcagaagaatgttgatgatggtgtttaaggtcacaaaactgtgagtctgtgatcccattttgatagaaaaaaatgcagtgagtcacatgtctacaatatgtgacataggctgagaaaggcaagagaaact

SEQ ID NO: 126198 - DNA, 343 bp, Homo sapiens
gtaaatgtatttatagccaaaagctttcaccagttaggaaatgcagcagatgccaataagtacattcattattttgattatggcaatgtcagactttcagaaaacttcctccatctctatctgtagcacaacctcacatagggagggaccatgtgctggtcaggaaataaacagctttctggcaggagttaaatgaaaatactgtttattactcttataagatgttataattgacggttttattgtaatacaatagcgattatgacatgttgtcccaaaccctaattttgttgttttgtagcaagttacgtttttatcaaggaacacagtggtttaaaaaaaa

SEQ ID NO: 126199 - DNA, 454 bp, Homo sapiens
cacaagcgcagctccagggtctgttgagttttgcctctaccattccaagtagtccctgctccagaccaagtcccaccatctggcagtcaggtcagtccaaccacagtcatatcagggcgcttcccggttctttcattgagtgccccttgaggaggctggaggagaggccaatgacatttgcacttgagactccagagtctagatttataaccactatgttacggctgccagtgtggctgcaaggacacttctttcattcattcatttacaatagatgtagcatctgctgtgtgccagatgccattctaggttctagggaaacaaagcaaagcccctgttttccaaggcatccacattctaggaaagactgctaccagcctggcgtggtggctcatgcctgtaatcccagtactttgggaggccgaggtgggcggatcacttgatgtcaggagtt

SEQ ID NO: 126200 - DNA, 407 bp, Homo sapiens
cgctggtcccctattaggctttggagcagaagctcggggtgtggtcatcaggaactgtggagtttgcagcctgcgtgagacacgtttcgtacacacatctctgccaaattgagaactttgctgctcgtcagctctaagccaagtaaccttttacccaaaacttccaggggtgctttcactttggcctcccagagtgctgggatcacagacatgagcccccactcccagcccagagcattttacaccagatgtcaggacattgctggtaggaacagcagttggagcagaagctcggggtgtggtcatcagggaactgtggagtttgcagcctgcgtgagacacgtttcgtacacacatttctgccaaattgagaactttgctgctcgtcagctctaagccaagtaacc

SEQ ID NO: 126201 - DNA, 316 bp, Homo sapiens
tcccaacagataataaatcactaacctattaattcatttctcaccaactaaacatgcaccccattaagcaaataattattctagaaagaacatttgtgaatatacaatatagaaattaatattattcattattttgaaacatcctttaaggagcttttatacttttttttttttttgagacgaagtcttgctcttgtcaccaggattgtaggcacaaggcagcatttatactttcttaggttatgtttcagaaaacatgcttcccggccgggcgcggtggctcaagcctgtaatcccagcactttgggaggccgag

SEQ ID NO: 126202 - DNA, 667 bp, Homo sapiens
gtgtctagagagggggtgtttctcatagatggcaccttcttgctacaccctcacatggcggcaaagaaagggcactcccttcaactttttgtaaaatggcattaatcccacttatgaaagcagagccctcattacttaatcacttctgtggggataccaactttcagaccatagtgggtgttttccaagatgagagggacttgaccatgtttaaatgtaatgagtaggtgctagtaaggaaaagtgaaaataataggagagagaataattgactgggaaaaatccctaataaggtcttaatttgattatgttttttaaacatgtctgctctttgccaaaggttgttttaagaaacaaactacagaaacgtaaagccatatataattttaactgtagaatagcttttgtactttaaacagtttcaattataaggaagggggcatattactataacttcattcagacagtaaactgttcactgatttctactcagcataaatgaatctcgtacaaaaagtaaaagaatgcttatgcaactatcatgtttaattatacacactactgtataattaaaaatctggtttttttggaaagctttatagtgatttttccctgatgaaactgtttagtgtttgaactgatatatgttgtcttactgaaattacca

SEQ ID NO: 126203 - DNA, 576 bp, Homo sapiens
aatcctcctgcttcagcctcctgagtagctgggactataggcacatgccaccacacccagcagacagagcactttttatgtgccatatcttgtatcaacagatggatcgtaatcacctgatcatttcttctcccgaatcttatcttggttaaaagtgctgcccaagtccagttcgtggcccagtacggtgcatcccactggtaaatttgaactctctcttgtgacagagaaaattctgtttcctcctctttgtactgttattgcctggttctggttctctatttctctattttctgtctctctaacctgcagtcctaatctgctaccatccacactctcctttgttgcaagcaaagcctattgcctgctgtcctgtccctgccctgcatcaaaactctcaatgtctccccagtgtctgcagactttttaatctagagttcaaagtcttcagatgctggttcctgcttatgtaacttcttgcattgctaagaagttagtcttctaacaccttactaagctttagccacatcaggctgcactgtttcctacacacatgatgaaactttgcacctccat

SEQ ID NO: 126204 - DNA, 453 bp, Homo sapiens
tggagacgctgccaggcttgctgcagcggcccgaccccggggcgcttagcgagcgcagctggagcagctgcgaaaattcaagattcagactcggattgctaacgaaaagtacctaaggacccacaaagaagtagagtggctcataagtggtttcttcagagaaatatttttgaaaagaccagacaacatcctagaatttgctgcagactacttcacggatccaagacttcccaacaagattcacatgcagctaattaaagacaagaaagcggcttaattagcaaaatcatgatgctcagctgttgggagagaccagacggaatccagcctcgggggtcatctggaggcatgagagccctactgccatcagtgtgggtttccaagctgccttgggctctgtctactgtcgcaaaagcttttaaagatattcattaaacacggaccttcctgctc

SEQ ID NO: 126205 - DNA, 548 bp, Homo sapiens
tttgggccccaagatgggcctggagcagaaaacccagagaatccctgagccctctgatggctctctgtgcgtcagcaggcggaggagcaaacggtgcgaactacttcacggatccaagacttcccaacaagattcacatgcagctaattaaagacaagaaagcggcttaattagcaaaatcatgatgctcagctgttgggagagaccagacggaatccagcctcgggggtcatctggaggcatgagagccctactgccatcagtgtgggtttccaagctgccttgggctctgtctactgtcgcaaaagcttttaaagatattcattaaacacggaccttcctgctctctctgctttatttcactcaagaggaggaagccatccttcaggggagggctgctgtgccccactttgacgtgtgaggcagccggcctgtttctgctttcagggcggccaggggcctcttgctgggtcagtgggctgtcgtgcccaccccctgggaagaacacagctgatcacgggggcacagaaacaagcaagtccatgctt

SEQ ID NO: 126206 - DNA, 406 bp, Homo sapiens
tggagacgctgccaggcttgctgcagcggcccgaccccggggcgcttagcgagcgcagctggagcagctgcgaaaattcaagattcagactcggattgctaacgaaaagtacctaaggacccacaaagaagtagagtggctcataagtggtttcttcagactacttcacggatccaagacttcccaacaagattcacatgcagctaattaaagacaagaaagcggcttaattagcaaaatcatgatgctcagctgttgggagagaccagacggaatccagcctcgggggtcatctggaggcatgagagccctactgccatcagtgtgggtttccaagctgccttgggctctgtctactgtcgcaaaagcttttaaagatattcattaaacacggaccttcctgctc

SEQ ID NO: 126207 - DNA, 608 bp, Homo sapiens
tggagacgctgccaggcttgctgcagcggcccgaccccggggcgcttagcgagcgcagctggagcagctgcgaaaattcaagattcagactcggattgctaacgaaaagtacctaaggacccacaaagaagtagagtggctcataagtggtttcttcagactacttcacggatccaagacttcccaacaagattcacatgcagctaattaaagacaagaaagcggcttaattagcaaaatcatgatgctcagctgttgggagagaccagacggaatccagcctcgggggtcatctggaggcatgagagccctactgccatcagtgtgggtttccaagctgccttgggctctgtctactgtcgcaaaagcttttaaagatattcattaaacacggaccttcctgctctctctgctttatttcactcaagaggaggaagccatccttcaggggagggctgctgtgccccactttgacgtgtgaggcagccggcctgtttctgctttcagggcggccaggggcctcttgctgggtcagtgggctgtcgtgcccaccccctgggaagaacacagctgatcacgggggcacagaaacaagcaagtccatgctt

SEQ ID NO: 126208 - DNA, 797 bp, Homo sapiens
aactggaccaggggctgtggcagcacaccttgagttaccaacacttctttttaatagaatgtgtgttttctgccacaggcctccctactccctaacgtctctctcctcagccacctgtcatatgtgtggcctgcatgcattttggttgacagcccttgccttaggtgtttggagtgctaggaggatagactctgaaaactgtaggcgccatcctttttctcttatatatagggaaattggggcacagaggattaatgatttatccaaaactcactgagattcatgcttctggctctagggccctgctggtggggtatagggatgagggtgaagtcagagggaagggggatctaaggtcagctacttggtgctttctagaagagcagttaggccgaagcatcgaccaggattgtggttttggctatgcttactaaagacataatagggaggctgtgcgtggtgactcacgcctgtaatcccagcactttgggaggctgcggggcgaatcactcgaggtcaggggtttgagaccagcctggccaacatggtgaaaccccgtctctaccaaaaatacaaaaattagctgggcgtggtggctggcgcctgtaatcccagctactcgggaggctgaggcaggagaatggtgtgaacctgggaggcggaggttgcagtgagccgagatcatgccactgcactccagcctgggtgacagagtgagactccatctcaaaaaaaacacaaacacagcaacacaaaaaccttttttggcccctaggcccccaaaaagctttctaaac

SEQ ID NO: 126209 - DNA, 693 bp, Homo sapiens
gggtgggagcctcggggccctggctgttccttcccaggaagctaacctcaccttggccggatttcttttcccctgtcctcctctaacatcttacctcctgtctcctgaattctccttttccttctctgattttttctcccctctgcctcacttctctccttctctcttctgatgtcttcttccatttacgattccttgttctcatttgatctctctccttctccaatatttccttctttcttgtatgacctcgcctgtctgcttatggtcattattatcatttcttctctcctttctgctgtcgtccctgccctgtatggtatcctctattttccacccttctgcctgagttctccccaccttgtttctctgacttctctcctctgatttttactcccaccagatctcttctccggccagaggtgacctgcacctgctgatttttgtcctcgactccagcctaaccctcctgcaccctccccggccccagccccagtgcatgtgtaatagcctccccatttttaaccacttcatctccaacagcctcctgcagaccctggtgcatcctcttctcctcttccaagaaatgaaatttgggggtggtgtgttgtggggcaggagggaggaggcagacagcgcaggaggccacttggactcagccatttggacccttcttgggggtatgatggggat

SEQ ID NO: 126210 - DNA, 741 bp, Homo sapiens
ggttgcagtgagccgagatcatgccactgcactccagcctgggtgacaaagtgagactctgtctcaggaaaaaaaaagaaaagtgcacacccccacacctggctaattcttgtatgtttttgtagagatggagtctcattctgttgcccaggctggtctgaaactcctggactccagaaatccgcctgccttggccacgcagagtgctgggattataggcatgagctgccacacccacctgtgtgtgcttttaaaatattgggcctctgatgaggtttgttgaaccaagggtttctcaggtgagggaaaggcttaagaatcttgaatttaatccaattgcatttgcttttgaggaacttgaggtcccttgaagttgagtaacccaccctgggttgccggtggcatttgctcctgcctggctggtgcaggccgtctctgtgtcagtgtcactgttttcttcccacttgctgacaccatggtgccctcctggtgctctcttctctccttagggttactgtgttgaggctgagtatggtttgtgttgcgggcaggggaaagaccaggccttctcctttctgttgtcaagtaatagttccttttaactttcactcattgccctccagctatccaagaaccctttaaacagcaaaaagagctgaaaagggacagaatttgttgcttccttctgatgtgggttcacatctggctgcatgtcagaattgcctgatactcccttcagcc

SEQ ID NO: 126211 - DNA, 185 bp, Homo sapiens
ttctgagtagcatggagcagctggagagctgtgtgccatgcccaagagttggttgaatctgttgaggttgtgggttttggttcgttttatcatgcgttctcaaacaggggcgtttctaatgctttctcccaacattctccatcaagatgtgttccctgaaaactcagatctgccacctttagcac

SEQ ID NO: 126212 - DNA, 595 bp, Homo sapiens
tgctgggattacaggtatgagccaccgtgcccggctggacaccttcactctgcctttgcagtgaagtccttcatttctttaactcttctgtgtgtactctaatgtgtacacatttttaggtctgagcaacctgggatggtaggcattaacttcttttgggttctggggaaaaaggggcgggttttgtttttgttttttgagatggagtttcgctctgtcgccaggctggagtgcagtggcgcgatctcggcacactgcaacctccgcctcctgggttcaagcgattcccctgccttagcctcctgagtagctgggactacaggcgcgtgccaccactcccggctaatattttgtattttttagtaaagacagggtttcaccatgttggtcaggctgctcccgaactcccgacctcaggtgatctgcctgcctcagcctcccaaaattctgggattacaggtgtgagccaccgcacctggcctccatgtttcaatttttaaacaaacaattagttaaaaaaataggaaactaagagaatgaactatttcctgttttattcagtgggttataatctgttactatcattgtttatttt

SEQ ID NO: 126213 - DNA, 3895 bp, Homo sapiens
  misc_feature (117)..(117): n is a, c, g, or t
  misc_feature (134)..(134): n is a, c, g, or t
  misc_feature (623)..(623): n is a, c, g, or t
  misc_feature (899)..(900): n is a, c, g, or t
  misc_feature (995)..(995): n is a, c, g, or t
  misc_feature (2016)..(2016): n is a, c, g, or t
  misc_feature (2325)..(2325): n is a, c, g, or t
tcagcagccttggagaagcatcagctgagaggagctatcacatgggagccgggactgctcagcaaagatggatttatgaggaaactgaaattcagaagattcacagagttagtaatncccagaactgggactanaaactaaattttgtgctccttctactccccagcagctcttgccattctgaggagacaagaaatcaggaaatttacataaggaaccctaaaactgaggcactatcccagagatcagcagggtcgctggactaggatgggggatgggcctgtgacaggaggtaccctgggtgccctctttcggccccatggagtcctcacccatcccccagtcatcagggaactcttccactttggggagggtccctcaaaccccaggtccctctactgccagtggggtcccggaggtggggctacgggatgttgcttcggaatctgtggccctcttcttcatgctcctgctggacttgactgctgtggctggcaatgccgctgtgatggccgtgatcgccaagacgcctgccctccgaaaatttgtcttcgtcttccacctctgcctggtggacctgctggctgccctgaccctcatgcccctggccatgctctccagcnctgccctctttgaccacgccctctttggggaggtggcctgccgcctctacttgtttctgagcgtgtgctttgtcagcctggccatcctctcggtgtcagccatcaatgtggagcgctactattacgtagtccaccccatgcgctacgaggtgcgcatgacgctggggctggtggcctctgtgctggtgggtgtgtgggtgaaggccttggccatggcttctgtgccagtgttgggaagggtctcctgggaggaaggagctcccagtgtccccccannctgttcactccagtggagccacagtgcctactgccagctttttgtggtggtctttgctgtcctttactttctgttgcccctgctcctcatacttntggtctactgcagcatgttccgagtggcccgcgtggctgccatgccagcacgggccgctgcccacgtggatggagacaccccggcaacgctccgaatctctcagcagccgctccacgatggtcaccagctcgggggccccccagaccaccccacaccggacgtttgggggagggaaagcagcagtggttctcctggctgtggggggacagttcctgctctgttggttgccctacttctctttccacctctatgttgccctgagtgctcagcccatttcaactgggcaggtggagagtgtggtcacctggattggctacttttgcttcacttccaaccctttcttctatggatgtctcaaccggcagatccggggggagctcagcaagcagtttgtctgcttcttcaagccagctccagaggaggagctgaggctgcctagccgggagggctccattgaggagaacttcctgcagttccttcaggggactggctgtccttctgagtcctgggtttcccgacccctacccagccccaagcaggagccacctgctgttgactttcgaatcccaggccagatagctgaggagacctctgagttcctggagcagcaactcaccagcgacatcatcatgtcagacagctacctccgtcctgccgcctcaccccggctggagtcatgatgggccgctggacactcggagggatatggggctggggccagttatgattgcaaggaccaccttgtgggatcaccttttcccagctggctagggctgaggctggggtctctgcacacagcttttgcttagtgtttcctgggtcaggaacagagccaacaggatgaacgtgtgcaaaagccttggacttggctgtgatctttgactgctaggggagggaacctgggtatggtgagacggtgacgagagaaaagggtcacaaaggactggcctccctgatctctctcctcatggcagcgacccacctccagtcccctggacaatcgggtacaagagacttaangttgggcatgggaagggtggggtttccatgatccattaaatgccttcctactcccattcatcgctctcaaaattagcttcagtgacaaagacttaaatctctctcctatctgcagcactgggttggagagagggcacgggagttggtcttggctgttcattgattgagactgtaggaactgtgttggttggtattggtggtggtattttcaacaaacagggaataactgcaaactggacaggacacccatctgggaccacctgtccatcctacttccctcaattgaatcaggtaacactaacggatcanggcagggccagagggtggtgtggtctctatttgaacaaattcctggctcactgagcatcaaaaggggaaatgggctggtgggagtgggatagtctcccatttaagcagctaataaataatttttatgataaaaggttatactgataacaacattgactcctttagttcaattcagtgcataatagttgaacacccactagtccctgggacccacacagggcgtgtggtcattgcttttaaggagttcatagtctaagttgatgagataccttatattttcacaaagcactttgatttgataaagcactacagaatgtgcttgagaaatatattggagaatatgtccatggctctaacttctgagagttcagcccgtggcagcaagatgcataccttgaagcttcctgcagattgtggaaagcataggggttgtaaatgaaactctctaatgaagaaaaaaaattaaatgaaactgggcaaacagctttccccctttgttctaggaaaatttctaggttgtcttcctaccactagattattataccagtctagtgcctattacattgtggaagttccctaaaaacatagtatatatagggaggagagtcctttgtgattgaaaaacatgttcacctctcctccctattaaaataaatgcatacagaggaatcaatcattcctagacagggaaaaaactcttctttcaaacaccactgatcagctattagatccaaggaattgccagcaggtggcagtgtgagcccaatggaaggaggaaaggcgagtgtacgtggtgggaggaggaaggggagggcattaaacattgcctggcagccattttgttaatttattttgccttttcctttgactttgccctccagcccttccttcacatacatcaaagaagaaagttttaagagcaagggtatctttaattcaggctgaaatttcctgacactgtgatctcactggtgtttattacagagtttgacatacatgggttcatttgccatttatttttccctgtaggagtggatcatgaaggaaataaaaatttctcttttattatgctgagaactttcccaacaatttctgctatgaccaccttccaggagttttctagtcaccagatgccttggtaaagttcaatacgtaatctttggctctgaaagctgttcctggacaaaatctgagctaactcactgaagaatcaacagattgaggcaaccatccggtcagttactttttcctgcatcctgctggtgttggggtaactcccaatcctagatgaaaaccttagactttctgttgtcaggtgtccccaggcaatatcctacgggggcatgatagaaaagggtaactctggggtcagatagatgtacttactcactgtgtgaagttgggaaagctgcttaatttctctgagcctacttcctcacctgtaaaaatggggatcattattacctacctcacagggttgttgtgaggattaagagatgggatgtgggagcacctagccgtatctggcaaataggtactcaataaatactggttttacttccatttcctc

SEQ ID NO: 126214 - DNA, 2541 bp, Homo sapiens
  misc_feature (117)..(117): n is a, c, g, or t
  misc_feature (134)..(134): n is a, c, g, or t
  misc_feature (623)..(623): n is a, c, g, or t
  misc_feature (899)..(900): n is a, c, g, or t
  misc_feature (995)..(995): n is a, c, g, or t
tcagcagccttggagaagcatcagctgagaggagctatcacatgggagccgggactgctcagcaaagatggatttatgaggaaactgaaattcagaagattcacagagttagtaatncccagaactgggactanaaactaaattttgtgctccttctactccccagcagctcttgccattctgaggagacaagaaatcaggaaatttacataaggaaccctaaaactgaggcactatcccagagatcagcagggtcgctggactaggatgggggatgggcctgtgacaggaggtaccctgggtgccctctttcggccccatggagtcctcacccatcccccagtcatcagggaactcttccactttggggagggtccctcaaaccccaggtccctctactgccagtggggtcccggaggtggggctacgggatgttgcttcggaatctgtggccctcttcttcatgctcctgctggacttgactgctgtggctggcaatgccgctgtgatggccgtgatcgccaagacgcctgccctccgaaaatttgtcttcgtcttccacctctgcctggtggacctgctggctgccctgaccctcatgcccctggccatgctctccagcnctgccctctttgaccacgccctctttggggaggtggcctgccgcctctacttgtttctgagcgtgtgctttgtcagcctggccatcctctcggtgtcagccatcaatgtggagcgctactattacgtagtccaccccatgcgctacgaggtgcgcatgacgctggggctggtggcctctgtgctggtgggtgtgtgggtgaaggccttggccatggcttctgtgccagtgttgggaagggtctcctgggaggaaggagctcccagtgtccccccannctgttcactccagtggagccacagtgcctactgccagctttttgtggtggtctttgctgtcctttactttctgttgcccctgctcctcatacttntggtctactgcagcatgttccgagtggcccgcgtggctgccatgccagcacgggccgctgcccacgtggatggagacaccccggcaacgctccgaatctctcagcagccgctccacgatggtcaccagctcgggggccccccagaccaccccacaccggacgtttgggggagggaaagcagcagtggttctcctggctgtggggggacagttcctgctctgttggttgccctacttctctttccacctctatgttgccctgagtgctcagcccatttcaactgggcaggtggagagtgtggtcacctggattggctacttttgcttcacttccaaccctttcttctatggatgtctcaaccggcagatccggggggagctcagcaagcagtttgtctgcttcttcaagccagctccagaggaggagctgaggctgcctagccgggagggctccattgaggagaacttcctgcagttccttcaggggactggctgtccttctgagtcctgggtttcccgacccctacccagccccaagcaggagccacctgctgttgactttcgaatcccaggccagatagctgaggagacctctgagttcctggagcagcaactcaccagcgacatcatcatgtcagacagctacctccgtcctgccgcctcaccccggctggagtcatgatgggccgctggacactcggagggatatggggctggggccagttatgattgcaaggaccaccttgtgggatcaccttttcccagctggctagggctgaggctggggtctctgcacacagcttttgcttagtgtttcctgggtcaggaacagagccaacaggatgaacgtgtgcaaaagccttggacttggctgtgatctttgactgctaggggagggaacctgggtatggtgagacggtgacgagagaaaagggtcacaaaggactggcctccctgatctctctcctcatggcagcgacccacctccagtcccctggacaatcgggagtggatcatgaaggaaataaaaatttctcttttattatgctgagaactttcccaacaatttctgctatgaccaccttccaggagttttctagtcaccagatgccttggtaaagttcaatacgtaatctttggctctgaaagctgttcctggacaaaatctgagctaactcactgaagaatcaacagattgaggcaaccatccggtcagttactttttcctgcatcctgctggtgttggggtaactcccaatcctagatgaaaaccttagactttctgttgtcaggtgtccccaggcaatatcctacgggggcatgatagaaaagggtaactctggggtcagatagatgtacttactcactgtgtgaagttgggaaagctgcttaatttctctgagcctacttcctcacctgtaaaaatggggatcattattacctacctcacagggttgttgtgaggattaagagatgggatgtgggagcacctagccgtatctggcaaataggtactcaataaatactggttttacttccatttcctc

SEQ ID NO: 126215 - DNA, 422 bp, Homo sapiens
  misc_feature (36)..(36): n is a, c, g, or t
  misc_feature (79)..(79): n is a, c, g, or t
  misc_feature (86)..(86): n is a, c, g, or t
  misc_feature (104)..(104): n is a, c, g, or t
tccacccaccccaggacggtgctcccagagggaccnatgtaacaggagtagctagggtgagagcatgagggtggttggngcggcanagaggagggagaggcagnaggtgctcagggcaggagtgtctggagtgaggagggagaggcaggaggtgctcagggcaggagtgtctcgagtgggtctggacaggaacaggaagggcattccaggcagaggggcccaaagaagcaaaggtcctgaggccaccgtgagggaagaggcccatgtggctggaggacatgaaggagagttgcaggaaacggagtaggcaggcatcgatgaggctggtagggcgagggtaagaattttcggtactctaagttcaatgggaagccattattgggctttaaagcaaggggtgggtggagagcgggggtaccgag

SEQ ID NO: 126216 - DNA, 746 bp, Homo sapiens
ggtaacattagagctcttcctgtagaccaagcactatgctaagtgctttttcatagcatcaccttcagtcctcacatcagataggtactcatttcagaggagagaaaactgacgcttggaaaagctgaataatttgcgtgcaatcacaaagctggtgaatgcaaagcctttatctcagagggtggtgtttcagaacatggcttctgggtcagattgctaggtgggcattccagatctggggcctggcgggctgtaaaatgttcaacagagtactttctcgaagcctcagtttcccacatctgtaaagttggagtaataaattataatatttacctataaaattgtggtgatgattagagaatgtaacatggtaactaccggacacatagtaactactaactatgggtcaactgtaggttggaaccaccatgaattttctattgtagtggaccaaaaaattatcaaatattggcaatttcatatggttcaatctagtattactaaaagacatccattctttgtaaatatcaatgctttccttattcatctcataatttgtgaaaggacaggttatttaattgcttttaacttttccttgttttagtttccctaaagagtgacatagaggctgggtacggcggctcacgcctataatcccagcactttgggaggctgaggcgggcagatcacctgaggtcaggagttcaaaaccagtctggccaacacggtgaaaccccatctctact

SEQ ID NO: 126217 - DNA, 330 bp, Homo sapiens
cgacgctgtgcggcaggcggtctgatacctgatgagctcggtgtggcggggtcggcagcatttcctccggggttttgagctctggccacttctccttttgttccacccaatctcacccacttctgggcttcgaggccagagtgtcttaacaagggggcacgtcagagtcaatgaagggggtgcctgtaccccaccctagagactgtggtcccacagatctgagctgggggaggcacaggcctgccttgacaagctcagactgccacactttcctgagaaggccatttaaaaacagtcatcagctttgttatgttttgagacagcatctcg

SEQ ID NO: 126218 - DNA, 372 bp, Homo sapiens
aacgtgccctgtgcacttcaggtccctccactgcctcttttaggagcgggaaggccttccctcctccttcctcccacttttgctcctaaagaaagtgagcgagaaattgctgtgttggatttaactaaagccatggtgaacatttgtggctattcattctttccttttttcaagatttagatgttaaggaaggcagcctaccagagagatttaaaaaaacaccacagaaaaccaaggaaagaaaaggaagttgcacggtgagggcaatgtatttcccaacgatcctggctgatcagggccccactttctgccccggcttggtgtcagctatggagtccacggttattaaacttacctgagtgtcatccgtgg

SEQ ID NO: 126219 - DNA, 158 bp, Homo sapiens
ggtcgtgagatgagtttagagagataatctctggagatagtgcagaactttgtaggccatcttaagggatttggatttcaagtgaaatgggaaaccattaaaagatttaaacaggggagtggtatgatctgatttacatttttaaaaggtcaatctgg

SEQ ID NO: 126220 - DNA, 293 bp, Homo sapiens
ataaaggcaccagagagaggccagcatttctcccctcagaaagatgcattacctctcacgcatgctaactagggggtgtggtgtaggtgacaaaacggagggctgaaggtgggaagagaacttatcctgaggccccttctcagtttcagagtggggccgctgtgtgtcatgccactgacaggtgtcactgccacacatcagccttttaaatgtgaagggactcttagcacagcaccagaacatgggaccccagccccggttacgtagtccccactgacgacttcagttaccag

SEQ ID NO: 126221 - DNA, 159 bp, Homo sapiens
gataggtcggtcctctccctactgtatcctagggacgaaggggtagtggaggaagaggtgggaagccatcaaggctgaatatatttcagagacccagcaggcaggctcgctagtgaattagaggtggaggatttaaaaagtaggatacagtagggaagg

SEQ ID NO: 126222 - DNA, 570 bp, Homo sapiens
gagggggacaatagtatctgggtgtacttactctgttctcttagtatagcttgctcgacttcaaggccataaacccagagtgtggacttccctttctctttacctctgggaccgaaacctgcaaggaagaaggattgctttttgttctggacctccacagagagccatcagagtctgacaaaaaggacaaaggctttggagccaagtagaccaggaagtctcatcactgtctaattctgtgacttcagtcaagccatgaaaccccttgggaccctactcctttgcataattagataatatataatgcatggagttgtgaagggcaaataaatgagatagtatgcttgaccataaatgttagttgctttcttcctggttcttttgtaatttactgcccaactttgctctggggacctaaaggtctgacctatggtgagaatctgacctgttctacccttttgggaaaagaggattaggagtgtagagaatagctgggagtggccgggcacggtggctcatccctgtaatcccagcactttgggaggctgaggcagggagatcacaaggtcg

SEQ ID NO: 126223 - DNA, 232 bp, Homo sapiens
atgactttctaaaaagatgaagataaaatccaagtatttttgaattcaaaacacactagcttcaaaagtttcagttaagagactggggatggattttacccattccgcctggagtgaggaaaagaacattccaatatttgcaattcactccaagtttctgaagcaaactcgctttgcattgtgggctcagagatgccagcatgaaaaatttctattcttcccccaaagaaca

SEQ ID NO: 126224 - DNA, 193 bp, Homo sapiens
agagggcggaggagagatgatggagagattgttgagggccctgtggcaggggcgggaggggacgtgggcttttcccgggagggaggcaggaaccatggggggctgcaggcaaagccgggactgccccgactccgtgctcacccacgccctctggtgactgcagggagaacagaccgtggacggtgccaggtgg

SEQ ID NO: 126225 - DNA, 460 bp, Homo sapiens
aactctggactgcctctcttggccctcaaatagtcccactctgacacgacttgtccatggagagggcaaaaggagctaaaaagtttgtttgctctcctccttgaactcagggtcctctggacttccttgctcacagttgaggaggcagggaaaggacttccagggtgggggttgaatttcttgtgatcagcttatctcccgacctgcctgtttgtttcaaggaactaagcaacctcaatttagccatccctgaaacatgggtggctgagggataaaggtggacttgggaaaggagccatgattgggtctctatcaccttaagttttacagattcagagactttaaagaggtaaactctatctctgccatgctcaaaaccataccacttaggcttctagtgcctgtgtagcacctgcatcaagaaaggaaagcttccaagaggtatttaggcagtgttcct

SEQ ID NO: 126226 - DNA, 518 bp, Homo sapiens
agagcctctggaaggaactggccttgctggcaccttgcttttggacttctggcctccaaactacatttgcactgttttaagccacccaggaaacgaatccattcgcaaccccttgttttataaatcctcggctcttgtggtttctgaataatcaactttctgcttaagacttgtattgcagatttgccttgaaaaagaaagttttgagggtggggaagttggggaggtagaggatatgaataagcttagagtcagaaagccaaacctcagagattcacgtcagtcccaaagcctccagagaaagaaaataagccaggcctggggctggggatcttgagcctggcactcggcataatcaaatgctcccctgctggcatggttccagagacagctggaattcaaatatgctgatgaataaataaggagggagccaggttttctctggagatttccatctgattttgcattgtgggttggggcaaagaagagggtggcccaggaggaggtggtctgcattg

SEQ ID NO: 126227 - DNA, 167 bp, Homo sapiens
ccaccccagtagtccctctgccccccacagcggtctccgttgtggttcctgcttccccatggctccgccctccaggcccatgtcaacaggctgattttttataagggttcatgtgccaggtataatcttggctcatctgaaggaatgacatctttccttagaaggct

SEQ ID NO: 126228 - DNA, 666 bp, Homo sapiens
aaaggatagttcttcatagctttctctggtgctttaaacaacatgctttcaaaccttgtggcttttgatgtttgcttactctttgcttaatttagcctggttttctagtcctcactggagctgcccctgctggcatggcctggtttggaggggaatggggtgggggcagtggcactgggtatgttgggcatctgggaatggcagaggaagctagaattctctcttccctgtcctctgagtggctcccctggtctctcggaacattaccagtgctgtcaacggcggcatagcactttacagttaaactgcacagccagcttgcctcacgggatcttctcacacacacccacccccaaccatcgcccctcacagcacaggaaccatctcagtgtcctcgtctccccggtacacatacacacgtgcacacacatacaagtggtgcacacttgcaagaaccagcatgcctcaaagagctccctgatgggggttgggggcagctgctgtccatgaagcccagggacatctgttgctcctgcagggccccccttcccccaacaacagggctcagcttaccagatgaaaggccgaatttttccaggcccctctcgaagcccgagccttggaaagtgcccaggaggcgggatggtttggggaggcgggatggtt

SEQ ID NO: 126229 - DNA, 502 bp, Homo sapiens
ttctagaggatcgcctgggcgtgggaagagggcttgggtggtgaaaagggctgggctggggaagagggctgggctggggaagagggctgggttggggaagaaggagacacagagcagaatccccaccagaaaagtaggaagcctaccagagttcacctgcttcttgcaagattatatgaatggatgagtgaatgaatacacaaatgctccagaattctctagagctctgaggtagatggagacacaacactcctttgttcattagagggacatgaattgaagaccaacctagtaggaactgaggattccaaatggacatgacacaattcctgtcatggagcagagcttggtgaagtcagtggggtcagctggtgaatgagcaaagtgctctgtgaatcctgggtggccgtttgcatccagtggagagcatcattcagtggagacagggtgggtttgggaagcaatgtgaccatgtcctcacttcccctcttcccccagccta

SEQ ID NO: 126230 - DNA, 910 bp, Homo sapiens
  misc_feature (910)..(910): n is a, c, g, or t
tgtggggacgtgaccagcagatttcgataccacaggatgcccgtgctccccctaggacaaccttctctcgaaattattcacatctcctttctggaacgttctgctggggaatttctcctccatgccattctgatcctttcctcccgggccctcaataacagctgttcacttagggacttagggccaggacctgcccgaaaatgcctgtgagttcacacaactttgagtccgcacttctgtgctttaaagcattttaaaaacacaactttttttttaatttgagacagggtctcatgctgtcacccaggctggagtacagtgacgcaaacatggctcactgcagcctctacctcccaggatcaagcgatcctcctgtctcaccctcccaaagtgctaagattacaggcaatgagccactgtgcctggcctaaaaatacaatcttttgaaataaaataaaagataataagaaagaataaaataaaaatgaaaacacaatcatcataggtatgtaagatatgatcggccgggcgcggtggctcacacctggaataccagcactttgggaggccgaggcgggcgaatcacgacgtcaggagatcgagaccctcctggctaacacggtgaaaccccgtctctactaaaaatacaaaaatagtgggtgtggggggactgtagttcaggtattggaggcgagagagatgggcgaacgggtgggtgttgagcggattggatggttggtcacggtaggaagtggttcactcagcttgagggggcagggtggcagcccggtttttatttgtggaaggcggttttaggaatgtaaggacagattaaataggaggagggagggagtaatatacaaaatcgggggcgcagtaacatatgcgcttggttagtgtgtactttcgn

SEQ ID NO: 126231 - DNA, 607 bp, Homo sapiens
tacagtggctcacgcctgtaatcccagcactttggggagcagaggtgcacatatcacttgagctcaggagttggagaccagcctgaccaacatggtgaaaccccatctctactaaaaatacaaaaattagccaggcacagtagtacacgcctgtaataccagctactcgggaggctgaggcatgagaatcacttgaacccgggaggtgggagttatagtgagctgagatcatgccactgtactccagcctggatgacagagctagactccatctcaaaaaaaaaaagaaaaagaaagaaatgctgaattcttgtaaatctctaaatgacctttactcccatgcctgagccgttactattcgtctgcccaaaagcctcagttatctctctctgcataaccctacttactccccagccccaaggtcatgtggcatttattcatccttcagttttgagctcaggcaatactgagtgtccaaacaatttcttcaactcctcagccaatagattcttccctctgtgcccccagagcttattgcacatttctttattatagtcctcacgattgtctctattaatattttgagggtatggggatcagcatttta

SEQ ID NO: 126232 - DNA, 879 bp, Homo sapiens
cctcccctctaggtaacccggaaccctgactccggtgaggaggccacgctcacctgtcttgggtcccctaagtcccaggccttgtctgcatgtcagcccagggctggggctgcacccctgcctaggtctcccaggcccagcctctgactgcattccaggcttctcgcccttctaactctcctgcggcctccctgcctcgcgcccaggtctgtttgggtctaggtaaccagggttgggtggcggcctcgggaagccgatgtgctgtgggaagtgtggatgccgcgtagcggtgcctccatgggaagccgtgcctccagctcagggacagatgtcctcagtggggcccactgtccagctggacatctctagagcctccgggacaaatttagactgaaacccattgaacctttggaaacattcatcaaataaactgaattgggagcataggaacagaaataaatgaaggtcattccctgcagagaagaaccaaaaccacagagaatgaagaactaggttttagaataggagcatctaaaaatagtttgtacaggtgcagagaggctgcctttttgctcatgatgacaagaaacatcagaacctcaaaacagggcttagaggagccacctttccccacaaaaaaaggtgtggattgtacctctctttcctttaaagaaccccaggattggttaatggttctgtgggatatgggggcctaagtcctggcccagaatttattgaagtgtttgggggaacctgtaatcaatacgattttattcttaggaacattttcagcaggacacggtggctcagacttgtaatcccagcactttaggaggcggaggtgggtggattgcttgagcccagcagttcaagactagc

SEQ ID NO: 126233 - DNA, 208 bp, Homo sapiens
ttatgtacatcataacattgagtgggtttgcgttatcgtactgttaacatgtgatagtagagaggtcagaacatttaagtaccctaggtaattagtttgtgtaatcccagctactcaggaggctgaggcaggagaactgcttgaacctgggagcggaggttgcagtgagtcgagatcgcgccactggacaagagcgagactccatctc

SEQ ID NO: 126234 - DNA, 473 bp, Homo sapiens
ttagcctcccctgatttcatgtggaatttggaaaacatttcctcagaaacaaatctagcttgaaaaactgcaaagatcactagacttggatactgaaggatgaatgggtttagatttgagatctacaaagatatgagttgtgtgatttgggatgaattattcatggattccttccttaagttgccatttgctgaatacctttttcagctcagctcaggtgtaacctcctttaggaagcctaccttgattctactggctcctccttggcccttagctgctccctccctgtgctcccattataccttgttcatatctctgctaactctcttttcacatggaattaaaaattctataatatttctcaatattcccccactaaactgcaagctcattgagaaaatagcattgatttcctgttctctggggacagtgctcatattttccttgaggaatcacctctccccctctcttgg

SEQ ID NO: 126235 - DNA, 361 bp, Homo sapiens
accagttaacttggttgggaaaatggggacatattgacggaagaaatccttttaaaaccagtcaagcctccagtaagtttcaagaaataggaagaaaaatgtagtgttcattacatgaatatgaaaatcatctatgattatgcctttctgatgtctgttcagaatctcaaggaggggagaagaaagaaaaaaagaagcccccccaccccgccaggtacagccttgccaactatcagaattgcacaggaggccaggcgtgtaatcccagtactttgggaggccgaggtgggtggattgcttgagcttgggtgttcaagaccagcttgggcaacatagcaaaaccctgtctctactatatata

SEQ ID NO: 126236 - DNA, 299 bp, Homo sapiens
tccagaaatctgatctaaatacatgcatttatatgcatgtattacatatggtacttaaaaagccttgttctcataaacaaacagacaacttattttatggaatcttggggtgagccaacccttcacagggcagaggtcacctacaaggggagaggcttatagggttattggggaccagaatgaggaagtggtgactttaggtgtgtgtatcagaactgttttgatgcagcaactggctggcagagaattgtattaccaggaaataataactcactccaggttttcataaaggccagggg

SEQ ID NO: 126237 - DNA, 381 bp, Homo sapiens
aaaagctgggcaggtgatgtggggggcggccagggtggctgccctgaagtcagcaaaagggaggcctgaggtgggcagcacagggccaggtcacgtgtgcctggagggcctgcaacaccgatattttattttaagtccgtgaaaagtcctggaatggcccgaaaagcttcaagcaaggaagtgacaagtttattttatttcctttatgagccacaaattatcctctaccttacacaaaaaattatgctgcatctgaaaaacaaatctaggtctatcccaataatgtcttatttctgtggtagttttgcattaggatatagtgataaccaaaaataatccattgaggaccaggcatggtggctcacacctgtaatcccagca

SEQ ID NO: 126238 - DNA, 206 bp, Homo sapiens
tggaggggagggacagtgaaagcatccctgaagatgatacattaaagctgaggcctaatggatgagaagttgccagcagggtgaactcttggggaagatgtgttctaagggaggatattcatctgcaagggccatgagaccagatgggctttggtgattatagaaaccaaatgaacgtcagcacagcggctcatgcctgtaatccc

SEQ ID NO: 126239 - DNA, 512 bp, Homo sapiens
ctatgtgccacgtagaatctttcagcctgccgcaggtattgctgggagagagcttatcctttagagatgaactttattgttttcaatactatatgtgattagacttactttaaaactaaaataagactaccactgaccctcagaaattgaaagggtaagggcatcttaagaacaactttatactaatccattagacagacgaaactgataaactccttgaaagacacaaattattggctaggcgtgatggtgcatgcgtataatcccaacactctggaaggcctaagtgggcggatcacatgaggtcacgagttcaagactagcctggacaacatggcaaaaccccatctctactaaaaatacaaaaattagccaggcatggtggtgtacgcctgtaatcccagctactcgggaggctgagacacgagaatcacttgagcctgggaggcagagattgcagtgagctgagttggtgccattgcatcctagcctgcgtgacagagcgagactct

SEQ ID NO: 126240 - DNA, 640 bp, Homo sapiens
ggtctatggacatatttgaggatctggtaaaaagctttagcttgtcttctatacatagatgtatacatgtacattatacatgtataattttgcatactgtttcaggggttttatagttttccttaagtttactcatggacttccaattaaaaaactcttgaacaaatccaaatttgttgaagttttatctagaaaagaaatgctcctacttgcaaactcaatttagaaatttcaaagatcaaacaacagaaagtgttgacacaaaggaacatgaactcttcctaccattgagggtaacattaacaattgtttaattagtaaatatcactttagaattaccaacaaagggacttaaaactggctcttagtatgttgatttgtctgtaggggagctgccgtattagaataagttcaggactgacaaagttagtaaacctggccctatcactattaacagctagttgtattatctcagacaactcacctagtcttcagtttcctcctctgtaaagcagggaagttgcactagtctaggaatctctagttccttttaaagctaaaaaaaggatagaaccaataataaaactgagtaaaagcaattgacttggctctccagtgagtaatatggtttttatggtga

SEQ ID NO: 126241 - DNA, 153 bp, Homo sapiens
gaagcaggaaaaattgtgtcctcggatttcaagaagaaaacactgggtagagcagggagtcactccacaccgtggcatcgagcagggagagtcaccccacaccgtggcatcgagcagggagagtcaccccacaccgtggcatcgagcagggag

SEQ ID NO: 126242 - DNA, 266 bp, Homo sapiens
tctgagcaagctgggagtgagggtagagaggggctggattcagaaagaagcatccttgggcactgggatggagaggagagagcggctgagccatgggaagggccagcttgaccacagcggaacgaaccagacatggccacgcagagaggcccagtgtctgttccagagaacacatgtgcccttagatacaagctcacaggcagagagattcacagacatacacagagacattcggatcattcccagcatgctcagacaaacacatg

SEQ ID NO: 126243 - DNA, 292 bp, Homo sapiens
ccactgaagaaaattgtgcccaccctttgctgtgacctatataaaatatctctttctttgggatatcatcccctgattttctgcagaatagctctgcagctaaatatataccaggcaagcatgtattgtgttttgatttattatctttaaacacatgatatctcttcactttttggaaagttagatttctctgtagattatgaaatgctttgcagtcaggccaagatgctactaggtggggatgatcactaattcaaaaaagctggaagaatcctatttgctagtccaaact

SEQ ID NO: 126244 - DNA, 414 bp, Homo sapiens
tcacctaccttcctggggtatgtgtgcaaatgagcaaaagagaaacatgtctcccagcgcacctcagccttctagctctaagcaaactgccatcaagctttgagtcctctggataaacttacaagtgttagagtgggctgggtgaggtggcacatgcatgtaatcctagtactttgggaggccaaggcgggtagatcacctgaggtcaggagttcactaccagcctgattaacatggtgaaaccccatctctgctaaatacaaaaatattagctgggcgtggtggcgcgtgcctgtaatccgagctacttggggggctgacacagaagaatcgcttgtaactgggaggcggaggttgcagtgagccgagatcatgccattgcacattgcactccagcctgggtacacaagagcg

SEQ ID NO: 126245 - DNA, 490 bp, Homo sapiens
  misc_feature (21)..(21): n is a, c, g, or t
cgagctagaggatcccccacnggcaggttgtactgctgaaaatgcctaatctgtagtctaagatctaaaaacagaataagaatctaatgaaatcaggtcctataaagagcacgcaggactaaagtaggtttccaggaatggctgggctcatctgagaggttcaagaacgtaatggctgaggacatctctggaatcgaactgagtctactcagtctgagtcggtgttctgtcctaccagtttctaacgcaggacttagcattttgacctcaatttttgcatctgtacaatgggttgtgggaactaaaggagatacatttaaaatattaatagtagtcatacaagatgaattttagctgcaaaatcaaaatcaaaatgacagtcgtcattattattcccacctaaatagaaaacctacaactggagtcctccacctcttgaaggcaaagggatttgtgttgggctaagcggtactcagtttcccagggtcca

SEQ ID NO: 126246 - DNA, 860 bp, Homo sapiens
atatcgtcgaccgcgccgtcggcatacaccacacccagctaatttttgtatttttagtagagacggtttcaccatgttggccaggatggtctcgagctcctgacctcaggtgatcctcccgccttggcctcccaaagtgccgggattacaggtgtcagccactgcacgtggccaacttaaagtttttgatagataatacattaacgttaaaaattcaaaagataagtataggctctacagtacaaacccttctgcctcctagttcctctccctggaggcaaggtgatcagtttaacaatatttttttattttgagacagggtctcactgttgcccaggctggagtgtagtggcgcgttcacaacttactgtagcctcaacctcctggctcaagcaatcctcccacctcagcctgtcgagtagctggaaccacaggtgcacaccaccatgccaggctaatttttgtattttttgtagagacagggtttcaccatgttgttcaggctggtctcaaagtcctgggctcaagcaatcttcctgtctctgcttcccaaagtgctgggattacagatgtgggccacggtgcccggcctacatatgtattttttccttttcttccccaagtggtaggatatgatacacattgttgattttttgtttagttatgtatctcagagcttattctttatcagctcatgaggaacttcattttttattttttttggaagatgtagtttggctcttatagcccaggtgggagttacagtaaaccacaatcttgggctcgcagcaacttctgcctcccagggttcaaggcagactctcctggcctgcctccgagtagctaggattacaggtgcc

SEQ ID NO: 126247 - DNA, 283 bp, Homo sapiens
tcacattgactaagagagtatcagcttctgttctgattgagcctaaatttatctgctttctctgtcttcagatctcctaaaacttacctacctcctgtgctaatttccttatatgtatgacaattatgtgtttcagagactcctgctatgttactgtcagcagaaaattcttctcatttgcttatgcatgagtacaaagtttcttttaagtgaaacctctatccatagtgtcctagggaagccttggtccttttcaacatcttctaaaaacacaatggccttt

SEQ ID NO: 126248 - DNA, 358 bp, Homo sapiens
cacctctgcctccacttcctccattcacctgcaaagcagaagcttccatggaaccaggggtctcctaaaacgcccaactccaaggaagctgctgcctcctgtgaaaacagcctctccctgttcatctcccttcctactgggaccctgatgctcacagccaggaggatgaggccatctcaagagcctccagaaatctctggccctgtgtcttcttgcctccttcagccccattcctggccacactgtcaagaggactctcagagatctcaccggggcaggtgcggcagcgtacatctataatctcagagcctggggagtcttaagcaggaggactgcttgagcccaggagttggaggct

SEQ ID NO: 126249 - DNA, 149 bp, Homo sapiens
tggtgcctagaggatccctctctaattatcagctcatgggcaatcaaattaggaacgggatagctccgagtgcgagtcgaacaggtatcaaagaccccttttctcagccggggtcaaagctctcagaagttccttaacactccccctgc

SEQ ID NO: 126250 - DNA, 546 bp, Homo sapiens
cgggggaaaccaaggtctatttcccttcatctacctctcccacgccaggaagcagagcaaaatcacacatgtaaccctgcaactagacccccgggctgtgtcttacccatttttcatcctctgtgcctagcacggtgcctggcacagaggaggcactcaaggggcactggactgaacccagtggcttcagaacagctcccaggagaagctggagtgactccattcaaagggcactggaaagatgcctggagtccttttctacccaggcacaagccttttctttattgcccaactctgatgcctgaggtaaagcaatagcatgactgaatgtctttcacattagagtgtaatttatccacatcagccgcagcctttgatctcaccaagctgagagaggagagaagtgatgaggcgtacaatgtgtacgaggtgagtgaggtgtatgtgggctgcagcagctgaagggagggaagggccaggaggctgcgggtgtagatagaacgttcccgttgggacttggaggcccttggccagcacatacaaccc

SEQ ID NO: 126251 - DNA, 328 bp, Homo sapiens
aacattgtgccactgcgctccagtgtgggtgacagagtgacacttcatctcaaaaaaaaaaaaaaaagatttttaaagatgcactttgcctcagaagatttaagctatttttctcagagttttggatatctttgactcttattttccatcttgtcaaacattcctatgatctaataaaactacctgttctgtttctttgttaactttatcattctgatacatgctgtttatctagatctttcctactttcctttcccgaaaatctactctttctgttttccatcagctttaattttcttttcttttctgaagtcttgctctgtcaccc

SEQ ID NO: 126252 - DNA, 168 bp, Homo sapiens
aatagggtattggagtaagtaattcatgacacattctccatgaatcacggtagataagaatgaagacatatttgcttatagaaaaatgtgtctaaaagagaaaaaaagtatgccacaaaatagtagctaattaaatatattaatacaaaaacattctggaaagatata

SEQ ID NO: 126253 - DNA, 725 bp, Homo sapiens
ggagaagaaatttcctctttgtaaaggaaaaaatttatttaattttaaatgacttgtccaaggtcacttggctggaaagtgtctgggaagagactctgcttttctggtgttctgagttggccttaaattattgcaatacttcacatacaaaaataaaaaagaaagataaatttgattatataagaatgtaagtctcctgcacagccataaatattaattaaacaatataagataaataacaaataggggagtaatttaccccactagaaaacagggttaattttcttaatatataacaatttccttgaatagcaataaaatgtataaacaaccaaatacaaaataggcaaagaaggaaacatgcaattagtcaatgaccatgaaaagatgcttaaacttatatagttaaagaaatgccactgacttatcatttttcactaactggcataattaaaaatcttgatgtaatgttggtaagaatatggggaaaaactgttggtgggagtataatttgagacagcttttccggaagggaattggcagtatttattgtaacctattagtaatgtctgcaatatctggtagggtgtgaacattgagttccattagcagaaataaagtattcctggagttacaggataaagcacttatcaaaccacacagagtccaaatcatgcaaatcagaaggcttcctctctaatcaccttattaatcccctctcttag

SEQ ID NO: 126254 - DNA, 687 bp, Homo sapiens
gtctgagtggcatagagtcttcagtgtgctgcaagaaaaacacagtcaactagaaagccattgctagcaaaatcatctttcttccaagaattgataatttttttaaaaaagatattttaaatttggaaacaacaacagcaacaaaaactgccaacccccagaattctgtattcagtgaaagtgttcttgaagagtaaagttgaaaggatgacatctgttaataaaacactaagagaatttgttgccagcacatctgtaccacagaaatgttaagagaagttcttcaggctgataggagggaaaaccagatggaaactcagatcttcaggacagaatgaagagcatcggaaatgggaaataatttgggagaacatttcagaagtaataaggatataagaaaatttgagcggcacaatccataagcttatgaatttgttgttcccagcaattggagaatacacattctttgcagtcacatgcagaatacttggaaaaaattgatgatgtcctagacagaaaagctagtctcaacaaattgcaaaaaattggtatcacatataacacaatttctgatcacagtacacttatgtaaaaaatcagttaaaaggataagtagaaaaccttcatacacctaaaattttaagaacacttctaaattcttgagtcacagaaaaaattataatgaaa

SEQ ID NO: 126255 - DNA, 485 bp, Homo sapiens
gacctttttgtgcggtgaatgagtgacagggtctagtgtctgcattctgcctattccctctaaatgtaatattcagagaagggcagactgccagaaaggcactttgtgtcttctatttgcatgccatagacgctaccatttgtatgcgcatgactattaggtcaaagaatgtttgtgtgaccctttgatttataatctgggtctcagtttttaaaaaatgtgattatatgatatttttatttttttcttccttaaaaatagaactagaaaagtgagagggttggtttaagtttcattagaacatggagttttttaaaaaattaatctcaagtgtgttcaagctttcaatttccttaaatctcataaaaattcagatgtatgtccaattattcctcattacagccaggaagttaatttgctgtcatatattctcagcattagggagattcttgaatgttttcctgtattttttctcactatacttg

SEQ ID NO: 126256 - DNA, 339 bp, Homo sapiens
agaagatgtgctggggagaagaagtttagaattcattttccatcaaattagagggatttggtaactatttcagactttgcatcgaaaacccagggtgtaggccttaggattaggaccacatcacagaactcaaatctagggtctaggactgagggcaacactaagatagacctaccctcgtaaagcctaaaatgaaggcttagcagaatcagggtgatcgctagtaaccaaactctgctaaaacaaaagtttttgtgggaaaaaactgaatccagagtgtctatagtatattattcagaatgtcctgtatataaccacatcagtaggcacgacaggaag

SEQ ID NO: 126257 - DNA, 786 bp, Homo sapiens
ctgctgtattattttgtggtgtgaggggagcaaaaagaaaactggtggggcaggatctgttttctaccttctactttaaatgcttgaattatctgagaagctagggcccagtaattgcttttagcagtttatatggctgttttgctcttgttgcccaggctggagtgcagtggctggatcttggctcactgcaacctcggcctcccaggttcaagcgattctcctggatcagcctcccaagtagctgggactgcaaatgtgccgacatgcctggctaatttttgtttgtacttttagtagagacagggttttactgtgttggccaggccggtatcaaatccctgacctcaagtgatccgcctgccttggcctcccaaagtgctgggattacagttgagagccactttgcccggctgccatttttaattagaataatttgatgtgaacttattagatatattaacaaaaattctcatactccgtagatattttttgctggagtctcatgagggccttaacagcctagcaaacaaagaatggaaactataagtatggcagttgttttgggagatataaatatgatttaagtcatccactctggtttcagatgcatgtgttagcaattgtatataattcaaaacaaaatggaataagaacttctgatgaggttcagagcttgctatctttattgtaattataaacacgaaagttcagaacataaaattccttgacagctttacagatacttgtactctagagagagtattttatatttttctaagaaaa

SEQ ID NO: 126258 - DNA, 479 bp, Homo sapiens
gaacaagtgaggttgaaacttgatctaatgtaccaggaaaccatcccatctgagtgatctagtggcttttcataggctagagctgaacagtttctgatgactgctcaaaagcaagtcaatcagcgagtaatagagttcagaatctttattctctgttttgtatctggactgtgaacaacccttaataaagagtacattcctttctgccagaactgcccaatggaagacaacaagtctatctaggcttcttataaaagccaacagaaacctcccaagggagactcaaacctcagatcattgcattaggagctgaaaattagagtgccattgactgttgttgccatggtaatcactgctgacctggcaggttcttcctcatgatagccttctcaacaggttcacttctgctaaggtgtgaggtgtgtgtctctgtttgtttgcttgtggcaaagttgtcatgttttactctaaatacaaag

SEQ ID NO: 126259 - DNA, 412 bp, Homo sapiens
ggcacagatcagtagaaagactgttttccaaagttcactggcccatcagcccagggatattgatagagtggcttgttggccccttccctgatactgtcagagggcagagcagcctgcagagagctaagccaaaacagatgggatgaacccaggatggggtaagcactatgagtccttctctcatcagcatcaggtacaaaagtaattgttacctagataatcctggagggaaattgaatgcgtatcacatccatggggcttggatccactggctctggtaaaaggctgggctccccattgcttcccaagtctacttcatggtcaactcatttggaaatatatgtttatttacgtggctgtgggtgcatcacaactagcttataggcttttttaggacaggagttgtgtctcc

SEQ ID NO: 126260 - DNA, 421 bp, Homo sapiens
gagaggacagcctgctgagagacggcgggggtgtgcaccagggcatactgagcctggccattgtggtacaaggcctgggcactaccagcctcgtgcctgctgggggtccgggaatatttggggagcactgtgttgagggtgagcctgggtgcccctccagtcacacctgaggaggtgaagaatgtcaggactgggctgtcactcgagtggagtatccatgtcctagagctgccaggtgccacacactgagggcttataggcctgagagttctggaattggggtgtgggcagggctggttcgctctggaagcttcgagggagaatctgccccatgcttccccttcccgcctccatgtgttaccagtcatcctcggcattcctgactcatggcagcctcactccagtctttgcctctgtcgct

SEQ ID NO: 126261 - DNA, 641 bp, Homo sapiens
gaaacggggcgcggccggaaaggcggccgccccctcgcccgtcacgcatccataatccttctaatagctatcctcttcaacaatatactctccggacaatgaaccataaccaatgctaccaatcaatactcatcattaataatcataatggctatagcaataaaactaggaatagccccctttcacttctgagtcccagaggttacccaaggcacccctctgacatccggcctgcttcttctcacatgacaaaaactagcccccatctcaatcatataccaaatctctccctcactagacgtaagccttctcctcactctctcaatcttatccatcatagcagggccagttgagggtgggattaaaccaaacccaggtacgccaaaatcttaagcttacttcttacaataaccacactataggagtgaataatagcaagttctacccgtacaacccttaacataaccattcttactctaactatctatattatcctaactactaccgcattcctactactcaacttaaactccagcaccacaagcctactactatctcgcacctgaaaacaagctaacatgactaacacccttaattccatccaccctcctctccctaggaggcctgcccccggctaaccg

SEQ ID NO: 126262 - DNA, 675 bp, Homo sapiens
ggagcccattaggatgctcagtctcgcatttcctggggatgctttctggaaccatatgctcaaattatcatctgtatgccaaatagttttgaaagaaactgaacttttgtaccttttttggttgttatattagcctgtaagttcacataattgctaaagttaagaatgcatgttgtgtatgataggtgatgggtttccaagtttggagaatgatttagggcaataattttaccctgaacttactgctacatttaaaatatttgggttgaatttttcctttatcttccatttttggaaataaataaaaattataataatcataatataagtaaaaattcagtattaagtgtagggacagtataaaaaattactactgtattgtgaaacttccttattttttccagctctttgtgtcaggaaggatgttcttgagttggattgtgcaaaagttcattctgtctaaaagttgaatttatctgtttttctgcctcatttttgctttttaattaaaacttttgctaaattagaggtgagaaaatttattctaaaatgtttgctgtggtcaccagaactcttttaataaggtatatctgacatagctcctttgctagaggagaaaaacaaaatacagtttctgttgctttcagcaggccatcattggaagttttataaatg

SEQ ID NO: 126263 - DNA, 278 bp, Homo sapiens
aacacaaaaatagataatctgtagtatatatacacaacgaaattctactcaacaatataagggaacaaactaacgacccatgcaacacaaatgaatctcaaaaatattatgctgagtgaaagaagccttacacacaaagcacatcctatatgattccatttatgtgaggttctaaaactggcaaacataacctgtgattaagaaaaaaaaagccgggcgcagtggctcacgcctgtaatcccagcactttgggagtccagggcaggtggatcacaagg

SEQ ID NO: 126264 - DNA, 420 bp, Homo sapiens
ggtcccctggctctgaattaggcaacaacgagcagttccccctggagatgccaatctacacattccagttgccagacctgagcgtgtacagcgaggatttcaggagcttcatcgagcgggacttgatcgagcaggcaacaatggtggctttggagcaggcaggtcgcctgaactggtggtccactgtgtgcacgagctgtaaacggcttcttcctctggccacaacaggggatgggaactgccttttacatgctgcttcactgggtaagctccacagcacagacagagggtggccaggctccaggcctgcgtaaggaaagacatatgctattgaaggaaacactattgaaggaaaagcatacactaaatagagtcacccatgtcactgtcatgagaaagtccctaagagacagagccaac

SEQ ID NO: 126265 - DNA, 779 bp, Homo sapiens
ttaatcttgtcccattgacccacaagggaacctggaactgtagtcctatggtgatccttgagaggggtaagaccagagatatttgccaaacagtattaatgactagcatactttaccagatatcaagaattataaaactaataattaagataatgtggtatctacacagtatggcaaataaatcaatggaacaaaatttgtagttcagaaatagtcatataggaaacttgctacttgccctgtgaatctaaggagaaaatggatttttcaataaatggtgtttagacaattagttctccctatagggaaaagaaaaaaggaaattagtttcctatttcataccgtaccaaaagtaagaatttcagatattaaggactaaaatgtgactcacacctctaacctcagcactctgggaggccaaggtgggaggatcgcttgagcctaagagtttgagactagcctaggcaacaaaatgagatcctgtctctacaacaagtcaaaaattagccaggcatggtgatgcgcacctgtcggcccagctacttgggaggctggagtgcagtggcactatctcagctaactgcaacctctgcctcccaggttcaagtgattctcctgcctctgtctccccagtaggtggtggctaatttttgtatatatttttagtagagatgtgatttcacgatgttggccaagctggtctcgaactcctaacctcaagctatctgccctccttggcctcccaaactctgctgggattccaggcatgagtcaccatg

SEQ ID NO: 126266 - DNA, 257 bp, Homo sapiens
gtaattgaatgccaacaaattggataacctggatgaaatgaacaaattcctagaaacacaaaacctgccatgatagaatcatgaataaatagaaaatctgaatagacctataaccagtaatgaaaatgagtcgataaaagcatttgacaaaattcaacattctttcatgctaaaaaacactgaaactaggaatagaaggaaattctcaacataataaatgctacatgtgaaaacccccagctaccatcatagtcaat

SEQ ID NO: 126267 - DNA, 378 bp, Homo sapiens
ctcaatctcccaggccaagcaatccccccgcctcagcctccagagtaactgggaccacaggtgcatgccaccaaacctggctaatttttcagttttttgtaaagacagggtctcactatggtgtccaggctgttttcgaactcctaggctcaaatgatcctcccaccttggtctcccaaagtgctgggattacaggtgtgagccaccactcctggtctagatttcctgattagtcaaaaatcttataaattttggagtctctggagagactggtaaaaaaccaggccactgtccaatttcctacatctatttccaaagctgcctccgctgtttaggctttgaaacaaaataggagattggtgcccaatggcccaccag

SEQ ID NO: 126268 - DNA, 449 bp, Homo sapiens
ttggaatgaagcaaaatcataaaataaaaaacttagatgttaaattctctcaagaatcttatttgtaaaatggaaataatttctaccacagctatactgctatccaggttgctgaaagaccaaatgaggcactaaaataatgatacttttaaaaagttaagaagtagtagtagtagcagcagcagcagcagcagcagcagcagcaatagtagtagtagcagcggcaaatacctattgagcatttattacattctaagcactgttcttagtatttcacacgtagttacccaggaagtactcacacctatcctgtcatgtagatattattatcatctgttttatagatgaggaaacagaggcacaaactggttaaataattgattaataagtgatagaaccaggtctcagaccagacaatctgtctccagaacttaacctcttaactacca

SEQ ID NO: 126269 - DNA, 723 bp, Homo sapiens
gtaatttattgtacattattttgcctaataaaactgttttgaaaacagagagataccttgcccaaggtcacacacatttttctgcaaatcttgactgcagtccatgtctgtggattcctggtatgtccttctgcttcctgtgttgcttaccaggtgggtaatgaggctcagggttttaacagtaatgatacccatttacaataacatttatttatgtattgctctgtgctgaaaggagaactttgattttacactttgaaggtgttctctatcacttttctaaggctctatctcttaaatttagtgaaaatcaagtagccaacattgattggatagtatttgaggaactgcaggttaatagcacttttatatgaacaaattgagagaatttaaatgatttgaccgaggtcatcaagaacagcagctttggcacaggaattagaaactggattgcccttgcattttgtttttcagcataaaagctacatttctgttctctccattctttatgggcaaattgtaactctttttccccccaaagtacctaaaataatctgtttctcacagtccttcgtgcgtgtcttctttttctcgcttgtgaataaggtgtactaaatgcctcccagcacacacaggactcagtgttatgttctttttttcctctcaattcaccgtgtaagagaggcaccacctattaaaaacaatatccacagacctgaagtc

SEQ ID NO: 126270 - DNA, 355 bp, Homo sapiens
gacataaaaatctagattcctggcttctcttgaaaaaaaacaaaaacaaaaacccagagatctggcaatactggaatcgcatcacgcatgacaagatcagctcgagcagaggaactcagcagccgtgccagcgtcagcttgctacactcctctcccacctgtccatttcagttctgttacctgcctgacccccgagctttcatcccctgtcccataatgtgatgccttcttccaagtgtactaatgggtatatatggttgtttctaggcagcttggctttaggctagttagcttttggagttctgtcagcttcgagctttcctctctctctctcttcttcttttttttttttttg

SEQ ID NO: 126271 - DNA, 858 bp, Homo sapiens
ccccttctgttccagcactcctgtcttggctccaactgtaccagaatggacacttatgcaaatgattgttgtcctcctactcagggctggttatacacgtttcccatatggtgtcccatatggatccatttttctagatagaaggtagctccaaacatagtgtggatctctcccatccagtcaacagcaccttcaccggcagcccatggcaaacacatgtgcaggttaactggatgagagccactttggaggctgctgttaaaacatggggactcgttgaaactttagatgataaaaccagagatcacagggagacagtttgggcctatcgtgaggaccatctctctaccaattttcttcccaaaaatgaaatggggagggctgggtggggtggcttacgcttgtaatcccagcactccaggaggccgaggcaggcagatcatttgaggtcaggagtttgagaccagcctgggcaacatggtgaaaccccatctccacccaaaaatacaaaaattagttgggcatggtggagcatgcctgtaatcccagctactcgggaggctgaggcaggagaatcgcttgcggaggttgcagtgagccaagattgtgccactgcattccagcctaggtaacagagcgagtctccatctcaaaaaaaaaaaaggaaggaggaaggctccaacagagaggctccagaaacacttttaaaagtggcttttggccaggcacggtggctcatgcctgtaatcccagcactttgggaggccgaggtgggaggcctcacaaggtcaggagatcgagaccatcctggctaacatggtgaaaccccgtctctactaaaaacacacacaaaaaatt

SEQ ID NO: 126272 - DNA, 449 bp, Homo sapiens
ggaatggagttgtttagtgggtatagagtttctgtttggattatgaaaaggttctggaactagatagtggcaatggttacacaacactatgaaggtactccatgccactaaattgtacacttaaaaatggttgaggctgggcgtggtggctcatgcttgcaatcccagcactttaggaggtcaaggcaggagtatcccttgaggctagttcaagaccagcttaggcaacaaagggagaccctgtctctattaaaaaaacaattatttagctcaagcagcagttctttacatttgtgcagtctctgaagaaggccaagatgtaatcctttggtcctattctggcctggagggccacacctttcttccactcagcagtcccagagacttaagagctgctgtatcactgctgctgaggcttctttcgaaggtcctcactgaagctgctcagc

SEQ ID NO: 126273 - DNA, 670 bp, Homo sapiens
agggcatttatggtccacagcacagagaagggaaacctgggcggagcccagtggactctctaagttgaagaaataaggttgggagtcgggggagggcgaagcagctaaagttctcagggcaaagtactagagttcacaggtcagagagtagggaggaggaggaggagaaggaggaagacgaggaggaagaggaggaggaggaagaggaatacgagaaggaggaggagaaggaagaggaggaggaggaggaggaaagagatctggagtttagtaaaggacccttcttgtcttcagttgagtcatgatcagcccatgcatgtcaggaaaaggaaaccatcagagatcaaggaaaaaccacttgagaggattagaagaacaatgagggagcttccacagggctgagaatagttcctgttcccaccagccagagtggaaaaccttacaataatccttggacactgggtagagttctagaaggagtactcagcagtcctgccaaagaaagtttaaaagcaagactcaaaaggaccaaactgttttccctaacttaactggatcccagaagagagttcaaaaatattcataggaatataaaaatacccagcatccaataaggtaaaattcacatcgtctgccattcaacaaataatgaccaggaatgaaaaaaagt

SEQ ID NO: 126274 - DNA, 760 bp, Homo sapiens
gctcagtgagtcagtgtgttttcaagtctcttcacatgtgttttctgtcagttctgtcacactgaggctccactgagttgaaacaagcatcctctgccatgtgctcctgactgggaacttgggtctttcagggggaacaggatggtgtttcctttggagtttagggtggggcggcagtgtgtccccttctgtccgcagccactgcgcaggccgcctcgatgctgctccaggttgcataagcacatcctactttgctttgctgctaagcaacttctctcccacgaaggatgccatgaggggagaggttttcaagtgcaactcagaggtgcagaggcggctgagggaaggagtgcagagggagcgggggcggtggtgggggtgctaccaggggctgccaaggacccagggcttgcataatcctcccggcacctctcctgaaagagagcagggtttagacgcctgccagcagcgaggggctgggctcacagccttgagtctggggttcttaagtgggggaaatgctggcagctttgagagggtcctgtctgttcaggctgtgtgcactcccctctcatggagccctctctctaccctggcacacttgattaggggctgtggccgggcaggttatttctcacacttgcctgctgctgttgaacttgtccccacctacccagtaggcagtaagatggtcctgaagcccctccccaggaagccttcccaggtggaattagaggagggggtcagcttcaacatcccc

SEQ ID NO: 126275 - DNA, 559 bp, Homo sapiens
caagtatagaagatttaattcaatctataagtttgaatctataagcctagctattagcattgtagttcagaaatttatcccattataataatctatttcaggatactatgaagctatgcggtctcttgtgctaattttacattattgttgaaaagttgtaactgatggatcacacatttttaatccatggtgccatctggaaggaatttcagtaattttaattatgtgtgtgcataatgcaaaagcataggacactactttttttctaatgttctattaaagacaaaatgctaatctgccttatgtaatgggttcttttatatagcacaataacattatcggtgttttaatgattataaaggcagtactaagtctcatgctcagccatggaaggccgtaggtggacatcttattaatttcctagactaaaggcaggatcactttaagataatcaggataaggagattcagaaatcattacccacctgaccaccccttttacttaatatatgaggaaactgtagctcaaagagataaagtcttttttttaagactgtgaa

SEQ ID NO: 126276 - DNA, 461 bp, Homo sapiens
atcaccatcaccatcaccatcaccatctccatctccatcaccatcaccatctccatcaccatcaccatcaccatctccatcaccatcaccatcaccatctccatctccatcaccatctcccgaactttttcgtcatccctaacaaaacctctgtgcccattaaacatgaactccccattcctccctgttccccagtccctggaaactagcattccactttctgcctttaagaacttgcctattctaggtccacacagcatttttaaacttcctgaagttgctaacatttaacagatctcatgaccgcacataaaatatagattttaggcttttattgaagaattctgacatcaccaggcccaaattcctccaggtggctggaggtgaaatgtgactgtccccttagatgagacacctgctctccaggttgctggtctctgcccagctagtaaattgcacac

SEQ ID NO: 126277 - DNA, 583 bp, Homo sapiens
cagatcagaaatagtatccccaaatggaaaggccccataatagatgaatttttataaagggcctaagtatttgaatattactgtaagacatcattattatagcagagtgacacgatgttccaaagtattcccatagtcatccagaaaagttcagcatgtttatgctgtacagtaacaaaaagaagtgagtgctgtaacttagaaaaattcgttttaaaaaagtcagtgttaaaaaaaaagtgagtcctttctccctattaccttccttcctttgtgtaacaaagattaattttacttctgctgtgtgccagaacagtactgaatgctgtggatacaaagatgaataaaacatgttctttgtcctcaaagagcttgctatgtaattgttcaaatagacataagaaaataattagaatatgatgtagtattttgatggtagtgttcaaaatatttctggagagcatagaagaagagataataatgaaatcttcctgacatggtatgcgggggacctatcaggactagcttcaggttcatggtgaattttccagttaatacttcattttccagtggtgtcaaataa

SEQ ID NO: 126278 - DNA, 398 bp, Homo sapiens
tggatagatggatggatgggtgggtggatggatggatggatggatggatggatggacggacggacggacggacggacggacggacggacagatggatggacaggaagatgggcgactggatggatagatggatggatgaatgcatgttagctagggaaactaaaacaatggtaactgaaaatactcagatgaaaccacagaggccaggcatggtggctcatgactgtaatcccagcacttcagaaggctgaggtgggtggataacctgaggtaaggagttcgaggccagtctgggcaacatggggagaccctttccctactaaaaatacaaaaaaaaattagctgagagtggtggcgtgcagcatttgtagccctagctacgcgggaagctggggtca

SEQ ID NO: 126279 - DNA, 415 bp, Homo sapiens
agataacaataaaaacaccgaaagccaaggtgaccatgtcaatctagaaccatgggttgcacgggacagagaagactgagagagaggatgcatctgagagggctgggacgtgtgcagaagcacaagtttggatgggaagtctccagcaggcatcctactcccccaagacagcatcttttgccagttgctgtttatggattttctccacactccaaatcacatacttatacctccgttcctcagttaccatctttagacaacagctattcactccccaatacctaagatgagcatttagctcactactcccaatgtctgaactttcatgactatttttgactcctgcatgagcatttcctcttctgacagcagtcgctgattcccagctctgtaagatgaggacatcagtgcccct

SEQ ID NO: 126280 - DNA, 586 bp, Homo sapiens
gatatatatatataaaaaataaataagataaagagtagatttcctagatataaattaattagcattataatagcctattgaagaaaattatacattttccttctttgaaggattctgaggtttggatttactttattctcactggaatgggatgaagtgcaaagcctctgtaggcagagttcttgtcccaaccttaaatgtgtgtttggctctttcaacgtggagctattcaaatgcctacagtggtgaagccccaaggttagaaggggaaagaggaagatatggtactgcagctaagaggcagtacctgagatctatttcttctctgaggagctcagctcaggatgcagaaacacccatcaagaaaccacatggacagagagaaagttgacgctaaaggaatcgagaagagtaatatgtgaacttcaggctgcttaggggttcttccaaaatatattttgttatatccctaatagtaatctttttctaaaagataatgcctgttgaatatagaacactgctttaagaatgcagaattatcaatctgaaaataaatgattattcttcaggactacagacaaagata

SEQ ID NO: 126281 - DNA, 444 bp, Homo sapiens
cctgtttatacgttcttctcataagtcacagcccatactaagcattcaaaaaatgtttgctacattaaactctaaaaatacactatctgcttcagataggaaaaatttactttcagtgcagaatttgtcatttcaagaagcaggaactggccagtctcctgcttcttgaaaacagtatttttctccttttatttggattttatttcacttctttcagcaatgttttatagttttcagtgtataggtcttgcacatcccttgtcaaatgtatcccttaattttatgctattataaatggtgttttaaaatttccttttttcattgtttgttgccagtatatagaaatacaactgatttttctatatagactttgtatcctgagcctctcctcccttgctttgaaaattgaatttaaaagagcaggaacctgaaaatttcaagagc

SEQ ID NO: 126282 - DNA, 410 bp, Homo sapiens
gtgtgcttggagctcccttatgcctgtcccctcagggaagagagtccctgggctggaacaggttatggggtgtgagtgggcagcaaagcctggaaatctaattccactcacatgggggtgggaaggcactgctgaaacttcagagagcctcaggggatctgattctgctatctgccccaaacaagcctgcagattcggagttgtggttgagacggatctgtgggtgcagtccctggcccagaaccaacgcacgagaaggctagtttcatgaagatggacccagcaggctcccacatacattgtcctccagacctgcactagaccagcagtgtgcttgctacggagaaaggccactaggtagcctttccccatgactccggtcccctctgctccgaggtcccatctctact

SEQ ID NO: 126283 - DNA, 299 bp, Homo sapiens
tgaaaaaatgtatcttccaaatccaacacatatatacttctaaatatttctcttacagaaaatcttatatataaggcacacatgtgcaaaactattctctgcattttgtaataatgatagaactggaaacagtataaatgtttactagtagggaaatggagaagatttgagaggatttatgtaatggaatactagaatactatataccagtattttattgtgtgaatctatactatggataaatctcaaaaatacagtattgagtaaaatagcaggttagggatttgtaagatgtgaag

SEQ ID NO: 126284 - DNA, 500 bp, Homo sapiens
cttttgcccttcactctctccttccccttttggtcactcagcaacctttatttagaatgaaatgctaaggaattatccatccaaacctcatctaaggttgctcaggtcatcctcctagaactacttgttaccctgactcttagctaaacaccacagtccttcctactgcacgaagtctcagggtcttgccctggcattctgtcctcctcagtttgatcctgaccccctgggctgaatgcctgaatcgcctttgtccatactgccttcctggaatgccctccctttcacttatcagaatcgtagcagacattctgcagattcacacacctagaccccaactgcagacctcagacccagagcccatctgcccctgcaggcaggtgcctcacccagttagcaagcactgccctatatcaaggtcagccttcccaccaaccaagcccagttcaaatcctagtgactaaatgagactcccacacacaccccataatgatagcacc

SEQ ID NO: 126285 - DNA, 213 bp, Homo sapiens
ttggatcaagagaggctatttgtgttgaaagggggtgattctgcagcaccccccttatgctaatgaaatcaatgagatggaaaagttattgatgcagaaaagcaaggacaactgcagaaccaaagtccgtaatacatgagaggggacacaatggaagacacaagcagaggagctggctttatccgcagtctttatcccattttaccaggacag

SEQ ID NO: 126286 - DNA, 396 bp, Homo sapiens
cagaaatacatacatgcatgcttgccttacccctagagtgtcaggattgaggtagcctgtaaattaactttatttcttagaaatatgcagcaatcatatactctacccagagcccacctatagttacctgcgttggacaagaagagaaggatgaacactaggtcattctctcctgcttatcatggagtgctcgtgtctttcattaacacagagaaaaagaaattcatgataggctttccttcatttcatttcaaacaagtataggatttttactatgcttgcaagaaattatatacagtccatttggagaagcagcctgtgttatcaataggtaagttttctagttatccaggtgtccctgctggtagccttttaaatttcacttcgggagcaaat

SEQ ID NO: 126287 - DNA, 298 bp, Homo sapiens
aatggattccaacacccgctctgtatgcggaacaaaagtgctgccagccaccccttcctccaaacgagcccctgggaaagaccagtcatcatttgtgtctccaaatctagacacagcacgaaacatctaggtgtctcccctctgcccacagcctggtaccctgagaaggactgagcctagactcagtcagagctgcggcaggtggcctcccagactccgcaccaggaaacaaatactggacacagcttcgcaagtgggaagccacggcgaagagaaggccaggctaggagggaactcc

SEQ ID NO: 126288 - DNA, 105 bp, Homo sapiens
ttatctcagttcaaagtaacataatcactttcagtttaaaactcagtgtttgagggccaggctcattcagttccagattcttccttttctttctgcagtgatggg

SEQ ID NO: 126289 - DNA, 133 bp, Homo sapiens
aatataaacacaataatcctcaacaaaatactagcaaaccaaattcagacacgtataaaaagaactccacaccatgactgagatctattctagaaataaaaagctggataaatatatgaaaaacaagaaagat

SEQ ID NO: 126290 - DNA, 303 bp, Homo sapiens
cccgacttggcctcccaaagtgctgggattacaggcataagccaccatgcctggctgggattggctttttaaactcagtagaattctgaatgtattaatcgtttattcctttttatttcttagtattctgtggtatgaatttatcacaatttgtttagctattcattaattagaggacatcagaattatttctaatttttggctactatgaataatgctgctataaacattagtgtacaggtttttgtgtgaacacaggtcttcctttcactgggataaatgcccaggagtgcatttcctggg

SEQ ID NO: 126291 - DNA, 133 bp, Homo sapiens
attctcttacagaggacgtgtagtaatatgctgagaaagttgcgacagaggaaagtggatggagagttttggaaaagtgaaaagggctcagaattaattgagcagaatgggaatcgtttccagcaattctcag

SEQ ID NO: 126292 - DNA, 449 bp, Homo sapiens
gttttcttcccttggcttctgagccaagagtctatcctagttcttatcctacctttctggtctttttagtcttgaacctctcaacataggaggctccaggactcagactttggacatctctttatggtctcttttcactctgtggtgagctcaccagtctgatagttttaaataccatctatacattaaatactcccaaacttacacctccaggctagtcatctcccccatctccagatttgtacatccatctgctactcaacatctgcaattgattatgtactaggtatttcaaatttcacatgtttaaaactgatgagctccaaatattcccccaaaaaccagtgccctcctgaactccagatatccctctcaaaaccggttccctctgggaggctgaggtaggtggatcatgaggtcaagagatcgagtccatcctggccaacatg

SEQ ID NO: 126293 - DNA, 259 bp, Homo sapiens
aatttcgaggaatcattggtataggccccagagctaaggagattgcaatttgaaaatactgtttcatgcacttattagactaaatcagcaaacagagagcagcgtgccaggtcctcctggaagttgccagaagtctcatggctgtagcctccctggctgctgcttcagggggtcccctagacccctcaacccagaagaggaaggcaaggatccatctctcctcgttttaagagttcctcttttccccgctttatgtctc

SEQ ID NO: 126294 - DNA, 270 bp, Homo sapiens
ctcacttcccccattcctggagagggggtggggtgggtatttgaaaatgctttcaattaacatccattccacacactctcacccctgcccctccctcagggaaaagatttcttaaatatgctttgggtgaattagaaaactgtgtgtgtatgcctctatgtatgtgtgtgaaacgtggaaatcgatttattatcttcaaaatcagaactcacttggctacagaaggcttggtctcagtgtaggtggcaccagcagccccactcctaaccc

SEQ ID NO: 126295 - DNA, 709 bp, Homo sapiens
ggtctccacaacctcttatgtaacccagacagttctttctattcatagtaactcttgcaaccaattgccaatcagaaaatttttttctacatgatctacatgtaactggaccccccacccttggagttgtcctgcctttctggaccgaaccagtgtatatcttaaatgtatttgattgatgtctcatgtctccctaaaatatataaaaccaagctgtgccctgatcacttgggcacgtatcatcaggacctcctgaggctgtgtgatgggtgcgtccttaacttggcaattttgagacggagtctcgctctgttgcccagactggagtgcaatggcatgatctcggctcactgcaacctctgcctcctgggttcaagcgattctcctgcctcagcctcctgagtagctgggactacaggcatgcaccaccacacctgaccaatttttgtatttttagtagagacggggttttgccatgttggccaggttggtctccaactcctgacctcaagtgatctgcccaccttggcctcccaaagtcctgggattacaggtgtaagttgccatgcctggcctgcaaaataaactttctaaaatgacagagtcctagccagagcaatcagacaagagaaagaaataaagggcatccaaattggtaaagaggaagtcaaactatcactgtttgctgatgatcgtatgcctagaaaac

SEQ ID NO: 126296 - DNA, 335 bp, Homo sapiens
tattataacattggaattttaagaaaaatttgttctacatattaaatttaaattttaactgttaaagtatgttatgaaaaccttaaattattaaacgaaaatgactctaggttcacaagtttgggtaatcctgactatactatgttttaattgagtaaccttggggaaatgattaacccctccaagttcctgtttctttctctttaaacagggaatgatagtgtatgtaatacattatatcgttgcgatgagcaaatgaggtaattcttgtcatgcatgagccaagatcgtaccactgcactccagcatgggtgacagagtgtgactccctctcc

SEQ ID NO: 126297 - DNA, 732 bp, Homo sapiens
agtctaagaaagacagaaaagaggaaaggaagctgcactgtttggatttgatatgaggatgtagacagccaggccctgctaaaagctctcttaatttcgaccttctgaagaccacctcccactcttaaagcctaagccttcatgagcacaatgagacggtcctgctgccctgccacccactctgcctggtctcagggcatcctggcctgcacaccttgtgcctcttgaaaaatcccatgccatttccacttaatcacccaacccaagacccttgtattgcctcacagtgttccctgacagacacagagtgatatattctcttctgtcctggttcctgctgagaagcgaggagcatttatcctcatttggaagaatcaggactgttctaactgcatagtacctactgttgtgttttctgggcaagacaccatgccgctgtggcctcctatccacctccttcctccctggggactctcaggttgcaagtatatctggttccacaatatcaatcacatcagaacacccttgctatctagagtcacgtgatgcaccagcttcagtccaatctagaaatgacagggggaaaatcacatcaaaaggcaaagcctacaaaagtattctgtcttttcaagcccaaaagccatccaaaaccaagttcgaataagtgtagcaatggcttattgatttatctttaaaaattgcgtttcttctcctcccttgtcttcatccctg

SEQ ID NO: 126298 - DNA, 391 bp, Homo sapiens
ttggagatgttaatgtaccaccctcagtttaagacagatcaagtgaacagagaataggaagatagaagacttaaacagcgtgatcgtagtaaggtagatcatatgtatgttttctgaactctataccttgatgatagagactatacctcctgcccaggggcccctggaacattcacaaaaattgatcaggtattaggtcacaaacaaacatgtaagtagttccataaagtagaagtattacattatctgatcacactgcaagaaaactagaaattaccaacaaaattaaaatatcaaaggcccttttactggaaatttaagaacctattaaactacagtcatgtgccgtgtaatgacatcgcaatcagtgatacaccgcatatatgacagt

SEQ ID NO: 126299 - DNA, 607 bp, Homo sapiens
ggattaatatgagcgtgttatttgtacttagtggggacccaggcctaaactaagggaaaatgaaaacaattctgacagccatttccttgctttctttctccacccaagaggtaccagtggttaacagtatggtggcaacaagtgggtcagaggtcagcccctcagtaagctctggtttccatggagatgaggcctattcatccagcacacagagcctcttcacagccacttacacacaattgagctattactgggagcccaggagagccctgtctggagcacagtgcgctagacagggcagggtttaatggagctgattaaatggtagttggggaattatccagagcaggatttgagaacacccttcagaaacaagttaaatccccaaacctcggcccatccccagcaaccctctcctgcagagcctctgcaatccaagccaccctttcaccttcaatgatgccaacatctgcacactcaagctgacctcacctttcttcccatgtgtccatgagacgacaaagccctattctgagtttcctggacctcaccacctttagcgtcttcatcttttgcttagcatcatggtgattttgtgatttagaaa

SEQ ID NO: 126300 - DNA, 557 bp, Homo sapiens
gaacggcaagtatacctttatgactctagtggagcagtgggatataatgagacataccagtggacaggtaaggacgaagtggaagagttagaccaatgccagtggccttgggaattgacatgctgagtggttcttccattgaggaggttcatctagtgacagagtatatgatttatgtgttgaggtcctggaataaagcagtaggagtggcttaggaaagaccatatgaaccctggagctacttcagtggaaggaatgatagattgagtgtatgattcactactcaggagctgtcagggggacaccaagagttttctattttctagtctaaacaagtgtcacaatatggtcttatgaggcctatcagaacagtatgtttctttaacaacttattttcagtgggcctgcctaagcagtatgtaacattgaacttgacccattttcatccattggcacatcttcctgagtttcactctttttcaccctattagacatatgtcatctcttctgaatactcctcattctctgagatccttttgcttcctgaacctcattaa

SEQ ID NO: 126301 - DNA, 728 bp, Homo sapiens
gtagggaagcctctgactgtgtttctcctctgttctcatcacggcagtcatcctcacggaagaaggcttctgtgacaaaggtgtggggggttttccccatacagcaagcagtggacaccgactgggtgtcctctgattcagttccgataccatctacttggagatagtgctggatcccaaaggttgggggttcagtcccccagacggactccccccacaacagcagtcgaaagtatgggcctctagaacttatgaccaactggcttccagttgggattcccataacttcctctttgggttcaattattaataatttgctggagtggttcacagaactcagaaaaacacatttaccagtttattataaaggatgttgcaaaggatacagatgaagagacgggttgggtgaggtatggggaaagggtcatggagtgtccacaccctccctggggaccaccctccaggagcctccacaagtgtagctgtgcagaagctctctgaacccagtactcctgggtttttatggaggcttcatgacatcgccattccttcccccaggatatacagtgggactgtgtctggggagggtcttaagacccacagtcagaaaggtagacgcttgtaatcctagcactttaggaggctgaggcaggagacttgcttgaggcctggagttcagtatcagcatgggcaacatggcaagacctcatctctataaaaaaagaaaa

SEQ ID NO: 126302 - DNA, 474 bp, Homo sapiens
ctaccacacaattctaggcattcactggcattccatatgttatctggttgacagaaatctgacatctaggcttccaaaaacagcttactggggtcaaactgacatcaacagcttctcccaaacaacttccttcgtggacaatttttcaggacttttagcctcaatttaaatctcaattctctaaaaattcccataagactattagatgatcaattcttagacataataccaaacagggccaggtacagtagctcaggcctgtaatcccagcactttgtgaggctgagacaagcggatcacataaggtcaggagttcaagaccagcctggccaatatggtgaaacctcgtctctactaaaaatagaagaattagctgggcgtggtggcaggcacctgtaatcccagctattcaggaggctgaggcaggagaatcacttgaacccaggaggtggaggttgcagcgagctgagatca

SEQ ID NO: 126303 - DNA, 679 bp, Homo sapiens
aggcacaagaataacttgaacgcgggaggcgaaggttgcagtgagctgagatcacaccactgcacaccagcctgggtgacagagaaatactctgtctcaaaaaaaaaaaaagttagaaaaggaatagtatgtctggacaattaccttcagcaagcattgtggcccagaatgtgtgcacaagagagccttaggcaaatttctggctgtttgtttctctttaggctcttacccaaatgatctctacctccttctttcctgtaaatttcctggatttccacttataaataaaagtatgtatttttacaacatggaaagctatgcagccacaaaaaagaagaagatcatgtcccttgcaggaacatggatggagctggaggccattatccttaggaaactaatgcaggaacagaaaagcaaataccacaggttcttacttacttataagtggaagctaaatgatgagaacacacggacacatagaggggaacaacgcacaatggggcctattggagggtagagggagaggatcagaagaaataactaatgggtactgggcttaatacctgagtaatgaaataatctgtacaacaaacccccatgacacaactttacctatgtaacaaacctgaacatgtatgctgaatttaaaataaaaattaaaaaaaattaaacaaataag

SEQ ID NO: 126304 - DNA, 328 bp, Homo sapiens
gaggcaaatacacatgcgtctcctcacaccatgaaagtaagtggagaagctgagcctccctcatttcacagctcctgggtctctgtttttccccaactccacaaagcagaggtgggggtggaggttgaaaatgctcagctcccagacccccgggattagcaggtgattgtcaagcatctgaaaagacacagagtgctcttgtcattattagatcgtaatagattcatactcaccccctccatctgaaggcgtctatttcaggtttaacgtaacaatagagtattgttcctactccagactcgggtaccaccccgaggcgatggcagca

SEQ ID NO: 126305 - DNA, 263 bp, Homo sapiens
ccaacaatgtatgacatcatttatgaaaactggacaaccaaatgagttaccaaacttttgagtttttaccaatgtgacaggtagaaaactgttttactgtagttttaatttgcatttcttttttattttaggtaaggttgcacataccttcacatgtttaagagccatctatacaattggccctccatgtttgtgggttctgcatccatggattcaaccaaccacagatcaaaaatattcagaaaaaaaatagatggttgtgt

SEQ ID NO: 126306 - DNA, 337 bp, Homo sapiens
gggagtaggcagtgtgggtcgggaatgaacggtggaggagtaggcagtgtggaagagcatgcatcccctgttgcagatagtatgtttctgtgaactagaagcagcccagccccggaaccttacacttgaacttccctgggagactttgttagaatgaggcgctctcctgccccctgctggaaacctggtgtaatacagcctctcatccatcaaatctccctgtgactggacccccttggggcggtgcgtgcatcgcagggtcaaggtggttgaatagcgcatggtgtggcaagacaggatggcccaagctgtgtcctctctctcattctcattcttc

SEQ ID NO: 126307 - DNA, 408 bp, Homo sapiens
cttgaagagggagacaagaagtaaataacccactaaagaagccgggtctggtcacaggagaggtgtttctgtgaacacttttatgaaaaggtgcgatgtacttgggggcagtcagggctctgcacaattagtgaaggccattgcattttcagcacttgacatggggtgggtgataaggaaactgacaagtctagtccctgccacgtggccagcctcgcagggctgagaaggcgatgggagagggctgacttgtggtctgatttgcccaggccagcgaggtccatgctgtgacctgggtgaaattactaatggcgctcccgtgcacccctagcacatcccgacatggaagatgagttctgtggacagccagctgtgaggagatggcatggttaaagctccctcgccatt

SEQ ID NO: 126308 - DNA, 299 bp, Homo sapiens
gtgccttttgtcaaatagtagataaaaagcacccacccacatacaaacctcagaaatgtagcatctttccaaggatgtgtaactgccagagatctggagtttaggtgttcagtgtcttggtgcagttggctccttccacacacagctgacatgaccttggacctcctgagctactgagggacaggtagctgggtcatgcccccgtttccttcctcacgactaaacactctgcttgccttcctgattctgcctttgtgagcagggctccctgaactctcacagtttgtcttcccagccaa

SEQ ID NO: 126309 - DNA, 626 bp, Homo sapiens
agcttttcctattacaccatgctgtctttttagtgctcaagataaagtggttctgtacgctataggtatgaatgaacaattatggtattcaagatttacactgcatttgaatcacagatatagccaatactgtaagaacttataaaactgttaattttactaatagtgaagccactaaagggttatcattcagaggaaagaatagatttatgctttctagaaggagtattccagttgccatgtggaaggtggattgggagaattatccagagtggtgtcacataaaccaagatacatgtggaaggggccacactaacaaatgctactgggagataaagtagcaaagacttaaaaccatctactgattggatttagtgacaaagaagtcactgggagccctggcagttgtggtggagtgaaaataacaggcatgcagtctgcagaaggttggagagaatataggtaactctttaagcaggtttcattatagagaccagaggcaggcaaatgtagaaaacaaggaaggttttctttgaagatgggagtgatctaggagaggaagacatatgcagtgggagaggccaaagataaaatacagggagtatctgaataaaatgcccagagtc

SEQ ID NO: 126310 - DNA, 359 bp, Homo sapiens
ggtcatttagggttattaattggcctaatttcaatgttgttatgtctcagataatagggaggcccaaggagaggaagagacaggaatacaggaagagcaggtggtggagcaatgagaaaacacacagcgtttatcgatgaagttcactgtcttatatgagtgcagttcatagtgccccgaaacaattacagtagtaacatcagacattactgatcactgtaacagatacagtaataacaaaaaagtttgaaatcctgcaagaattgccaaaatgtgacacagagacagtgaacatacgctgttggaaaaatggtgcagatagacttgccttagggttgataaaaagcttcaatttgttt

SEQ ID NO: 126311 - DNA, 729 bp, Homo sapiens
catgttcatcatcacctcctcgtaggccagctctacatcttcttgggtgaccactagtttaatattattccatttcttaggaatatccagccactgatgcacagccactgccccctgtgtccccaggggttttgtcaacaccagcacatcccctggtactgcattgtctggcatgataaattcactgggctgacagacagtggtagtgactcttcccaggacaatccaggggtttagtactgtttggccgcccattacagacgtttctgcctcctcagctgcgtctttaaaaccttggataatcagaggcatcactttatccatttccctgttggtcattttattactgactccaaggagcatcagcatattgtcacattctgtgacccccattgcgtagaggtcactgaggacattggcacatgctatcctgcctgtcacgtaagagtcgtctacaattgggtaaatgtaatctgtagtttgaaccaaggaaagcccaccgtgtctcaaaggaatgacaagtatccattccaatgccaagccttggcataaaggctcccagaaactgctcatcttcttggaagtggttctgtaaagattccagcaatttttgcaggacatcttggggcactttgtagcctgtgcccttcagttcagtgaatctggttagccggaagcttttgtccaattcgtaactttccgggttaaaggactcccatgtagatatgg

SEQ ID NO: 126312 - DNA, 266 bp, Homo sapiens
ctgttgctaccccagcaatctcccaatggcagtacctcaagaacttccgggggcagtggtctcaaccttggctttaaactggaatcacctagagaccctgaaaaaccacttagggtctcatccccggaaatcctcattcaactggcctggcacatggacctgcactgtgggccaactttaacttctgccaaggcatgcacgagaacagacgagtcccacgctcggacttccagacacaagtctgcccgaccacctcccccagccct

SEQ ID NO: 126313 - DNA, 544 bp, Homo sapiens
atgtggccagggggaattaaggttgctaatcaagcgacctcaaaataaagagggtatcttgaattatccaggtgagcacattgtactcacaagagtccttatatagggaagaggcagaagtcagatcagaaagagaacatcctaagacttggaccaccattgctggctttgaagatggaaggggccatgagccaaagaatgcaggcagcccttagaggctggcaaaggcaagaagtggattttcccctgggcctctggcaagaacacaggccctgatactttggttttaccagcggggcccattttggacttctgttcttcagaactgtaagataacaaatttgtgttgttttaagccacaaatgttgtagtaatttgttacagcagcaataagaaattaatacaagaagctatgtcaatgggttaaggatttttcttttttctttttttttttaaacagtccagaggtctttcattttttagacacctattatgccatgaattcatagggaacaggttccagcagctcaggctccttcccatt

SEQ ID NO: 126314 - DNA, 318 bp, Homo sapiens
ggattacaggtgtgagccatcgcacccagcctcccattgcttctttacgtgagccagcttgtccagtgactgggagcagctccccgactgagggccatctccaaaacccatagtttcttgtaagaattgtcatgaagcttgtggagatgcagtgtaggaggctgaacaatggttcctgaatatatcaggccctaatccctggaaactgcaaatgttaccttatatggaaaaagggtcttggtggttgtgattaaattttttttttttttttttttttttttttttttttttttttttttttttttttttattttttaa

SEQ ID NO: 126315 - DNA, 283 bp, Homo sapiens
cccccatctaacatgtcttactttgggtcagctgacacttttggcatggcttgataaactcccagctaaacagtttgtttactcctgatctgtaaaggtcatttctttttcaatttaacattgaggaaacaaactttgggattaaatttgacattcaggccaggcgcagtggctcacacctctaatcccagcactttgggaggctgaggcaggtggatcacctgaggtcaggagtttgagaccagcctggccaacatggtgaaaccttgtctctattaaaaat

SEQ ID NO: 126316 - DNA, 521 bp, Homo sapiens
cagtacggatgtgcgggccatcggatgtgcgggccagtacggatgtgcgggccagtacggatgcttgttccaaagagcaaataaccaaggtccaaggtgtctgattactgtctaaagcaggaggcagccaacacacccatattgttaagaaacacccctcttgatgagcctgaaatgatgtggctacctcagagtatcgatagcagtcctcttcaggtggtagaacctaaagaatttttagtttttcctttttaaatgttctaaaataaacatgtagcgcttctgcagacagaaaattacaacttgtttctatattctcaggatgttaaaagaattcaaagaattctctctttgaatcagttttcaaggtcaagttgcttaccacccctaaaagaaatttaaatgatgtttagaaatagacctgccttttcatgtcctcctccttcccctctgttgagtaaacaatgctttgtttaagctaacagttgctgagcccacattctgtacctgttggcagctgg

SEQ ID NO: 126317 - DNA, 424 bp, Homo sapiens
ggtcatttattttacggaaggtttttcaatttggacttgtctgatttgatctgattagctttttgattgtagtcaggttatgtttagtcagaatgttacaaaagtgatgttttcctctcagattatcacatctggagatacataatgcccacttgcccctcattagtgattttaacttcggtcaagatatagtctggttcttctactctatagttactatttttccttgtaacaagcagtctgcttagaggtaccttagtgttttatggtttttttttttttccttagtgaaaactaagtgtagtaataatataccttatatttgtatagtgctttctatatatatgtgtataatgtataagtatatataattgtatatgtataattgttgagagtttaaggcttgtgtagaagaggtttttga

SEQ ID NO: 126318 - DNA, 324 bp, Homo sapiens
ctagcccctgggagcacgccaccagggtttcctggaggatcatagctggcgccccaggccctgtttatcctgttcccaccctcacaattgcgcgggggtagctgagaggaagccctgatcgtgctttccttatagtgcattatatcagtgggttgtgggtacagctctctcttcccaggaccttccatcttcacaagaggcctctagagggagtgggtttggctttccacatgcccctagaagcacagggctcctcaggaagcccagtctccctccctaagcaggaagtaaaaatcctcttgtggttaaataccaagtgccagg

SEQ ID NO: 126319 - DNA, 490 bp, Homo sapiens
agaaaagatagttgtcaggatgtttttctcttatcattgcaccagcaagtatcagtgagccccagaggacagtgttcaagacaagtcatgtggagaatggacagaggctttggtggcagggatccatgcacccgcaggcagcggcatctgcaatgcaggggtgagcggacgcgaggaactgaggctgtgacagaaacacaggacgtggccagggtgccagagggaaggggcgacgcattccaattggccagggtgccagagggaaagggcgattcattcgagtttacagagaagaaaaagtcataagaagattagggataagccagaggaaataaaagtttccatttcatataagattaggcgaatctccaaactttcaaagagaggcgaagaactttaacttcagagtgagttccgagagcctcactctgaaggtctggtgctggggctgatgcttgttaacgcagacatctgaggcacatggccaggg

SEQ ID NO: 126320 - DNA, 419 bp, Homo sapiens
gattttccttgcattttaaaagataagtttttatttttattcccaaatccccaggaaattttaagtgctgtcagttttgtgaaaaggtaactagagagtgagtagggaatgcgcgagtgatatcacatatcaataaagattatttaatagagattattaatatgacagatgattctcattaaagatggcagattaggccagtgttccccaacatgacctcagatatcagaagagctgacaagtgtagacgtgacttttataacttttgctcttgggaggcgtgcgcgcgcacattgtcttaatgagctttataatttattagtgttgagtacatatttttatttataatatattaatagagattctgataaatatcagttaatagtagaggggacgctgagagcgggaaggctcccgtg

SEQ ID NO: 126321 - DNA, 514 bp, Homo sapiens
  misc_feature (11)..(11): n is a, c, g, or t
  misc_feature (41)..(41): n is a, c, g, or t
cctatactagngtatctaaaaactagaagctactttgcagngcggcttctacccctgttacacacctgaaatgaagccaaaaactcttttagctttacattagagtgaaattcaaactggtctgggtgactataaatggttactgtttgtcttggctcctacctgtatcagatttagactgaggaatcttagggaagaaattacacgggataaaatggatatttctaaattacaaggcctacaattccagtggctccaaatatcagctttctgtttcatctcagcctgccagaaagaaaatggtggggccagacaataaaagatagacaacgtttactttccagagccaaatgcttcttgttttgattatactggagaaggaggttgcagatcctgatcagttaagtcttgttagcaaattaaatggttgtagactacaatggtgtaagacatgagttttagcccctggcttcaagtcgaaatgacaaaagtatacattctttcaacccatttt

SEQ ID NO: 126322 - DNA, 412 bp, Homo sapiens
tagatttgatggctttgccaatggcctaaccatccttagaaatctttttagtcctatatttcttgcaattataaatcagtctgtctaagaaacttgacaggccctcttatttacatcagacatgccaacctcttagaaatcagaactgtagtctctaatttagctcttgatgtgttgtgcatatcaatagctttatacatgtgaaattagaaatagttttattttctttataggcttgaagaaaattaacaaacaaatttgacttatgaaaactgaatagaaataaattttatggagtaaaccagactctgcctcaggaatgcattttcagagtagatgttcggaaacagatttataaaaattaaaatactatatgtttggttcatttttagggctacctatagcttgatac

SEQ ID NO: 126323 - DNA, 219 bp, Homo sapiens
ccatgatgtttgggacaacttgcctctgcaaccaattaggcagctgcagctcatcacgagagagttacagccacctggcccctgcaagagaggggactggagtggagaaaggaggctgcgccatgtcatagagcagccgttggtcacagacaccttgtgttagggacctggcactgccattcacaggctgcgtgaccttgagcaagtcgcttaacccct

SEQ ID NO: 126324 - DNA, 812 bp, Homo sapiens
ttctgactccgtttaatcaccttagatggagctgggaatgtttacagtgttcatggatagctgtgccacttagacttgacatgaagttagactgaaggctgtgcttatgggtgatttccatggaaagacggcatcactgttaggagcacagctggctcttagggcacacaattcacagggctgcgattttcacaaccacttccaggagcatagcttcataacatcagaaacatctgccggcccctgtacacagtacgcaaagtaatacattactgcttcattctgagacgaaacactttgaccttgtgcttctccatcatagtttaagaagctgccctagtttatgttgatttattcttaaacagttcttagcaaggcaagtaaacgtataatttttcttaattttcaaagacaacggaaactttcccaaatagcctttgccacctcatatcgctgtcaactgctagtttttgttaatttcacatcaatcatcggctataaatatttgtgccatatcagcaggggatttattagtgagcacgctttagcaatgcatctgcccaaacaccaagcatgagggacagtttgtttacgcatctcactccctccacctgctggtggctgctggaaatgagtcccccaaaaatccagccttcactttgtaggaagtggcactgacaaatccacctagtactgctttacttagctgtaagtaacagcataattgaaagtgctatacgtgtttatcagaacaaaaacacaggagcaggcacattaaggcagcagcaggcccaggagtgagagtaagctga

SEQ ID NO: 126325 - DNA, 791 bp, Homo sapiens
ggtctggatgggtcatggtggtgtcggtgagtctgcaccaatgcaaaggtctgaaatacatctcaaagatcaatcataggtttgacaatagtgacattatttataggagaaattggggaagttactaatcctgtgatccctggctatgtgattctcaagcagtaagcaattatagaaaggcaagctatggaataatggctggtttttgtttaactgtgcctacatcttagcagaattcaggcccctcccataatcctaaccttgtagactttgatgagacttacaaaggcagtttcagtccctgagcaaggaaggagttagtttcaggaaggaattgttatcatctttaacaaagtcagttagtttgtgctattggaagcaagatgggagtatttatgtcagatttctctcactttcataatttttgcaaaggtggttttgataaccaaaagctaattaaaatgaagggataaaaggagaaaagctttctttctttccatggcttagtagtattatcaaataaattatctggtggatgtgatctgatggatgtgatctgatgagtttgatcaataatagagtctgatcaagagattcttgtttggttttacttgcctgaaaaagtactttcaccttttatataactgtgtgtatattccataaatagtggttaaacaagtcatttaaataataacatattatagctaaaaccagatgagtgccattgtaaaacaaattagcaaatattacatttccatctgaaatcaaggagtttctcaggccaataattg

SEQ ID NO: 126326 - DNA, 973 bp, Homo sapiens
gctggctatgatcatttgctaaaccacaggacagttctggccaccatttccgagattagcaaagctatgctcatacttattgccctttcttttaggttcttgtatgtttcctcaacctctcccactttctctcactctgatatagccagttcctctttttcttgtaatccggtatttagataagtccagtcaatactttgcttcagatgggcaaacatcctttctttaattttttttttttttttgagacggaatctcactctgtcgcgcaggctggagcgcagtggcgccatctcagctcactgcaacctccgcctccagggttcaagccattctcctgcctcagcctcccaagtagctgggattacaggcacctgccaccactcccggctaatattttgtatttttagtagagacagggttttaccatattagccaggctggtctcaaaccctgacctcaagtgatccacccaccttggcctcccaaagtgcagagattacaggcatgagccacctgcttttaacttgttcagctacaaaggcatgtctgtgaatgcacaaccataatgactcatcatgggcccagagctataacaatgataaggtaccaagcatcttacaccatgtgcgtgttgatgagaatcaacatccttgcctgttcttgtgattttgtggcagagtatagcttcttgggggcaagtatgtattctacaccactaggagcaagcttctttatcatacacttctgggcttctctggggaagccaaactctaaaggccttttctgaggagtgtcgcaaatgctgcctgcagtacgaggcacattgccagttcctgactgcattagcaggttccagctgccaggacgcctctgagtgtgtaccttgtgacagaaaggtacttctcagctgtagtaaaggatgctctcaagggtactctgcaaagcttctgactgcgaggcacttctcagt

SEQ ID NO: 126327 - DNA, 412 bp, Homo sapiens
gctgcccctggggtgtgcaggatggagcctagcaaggcatgagggaaggctgagcgacccgggaggtgtctgttgcaggaaagagatgatggcatcttggtccaaggttatcttattgcagatgttcagtagtgattgggttcaaggtatatttggggactctaggcaaaaggccttcttaatggattacatcggaggcaagaaggagggagagaattaggactgttaatgtagagtcatattctgagatacagaagactttgggagtgggggtgcggacacattggaagttgggagcaatagttttgagtaaggtaaatttgatttcagatgtgttgggtacacaaaggggccaggctagagattacagactttagagttgtctgccttcacctagtatttgaagccatgg

SEQ ID NO: 126328 - DNA, 2272 bp, Homo sapiens
tagccgccttcctcattttcgttctttaaaaaaaattttttttggttgtgtttgacttttcatggaagggtgaagactgcaaggtttctaactcaatactcttgatttcttttaggatagctggctatttggaatttaaaggatatttgactttttctaacctcccatgaggctgtaagttccactgctccaaacccacccaccaaggactctgaacctgtccaccccgggcgcatcaagatcttccagctgggtacccccgatttgggccgactttgcacctccaaacaaccttagcatgatgtcttatcttaagcaaccgccttacgcagtcaatgggctgagtctgaccacttcgggtatggacttgctgcacccctccgtgggctacccggggccctgggcttcttgtcccgcagccaccccccggaaacagcgccgggagaggacgacgttcactcgggcgcagctagatgtgctggaagcactgtttgccaagacccggtacccagacatcttcatgcgagaggaggtggcactgaaaatcaacttgcccgagtcgagggtgcaggtatggtttaagaatcgaagagctaagtgccgccaacaacagcaacaacagcagaatggaggtcaaaacaaagtgagacctgccaaaaagaagacatctccagctcgggaagtgagttcagagagtggaacaagtggccaattcactcccccctctagcacctcagtcccgaccattgccagcagcagtgctcctgtgtctatctggagcccagcttccatctccccactgtcagatcccttgtccacctcctcttcctgcatgcagaggtcctatcccatgacctatactcaggcttcaggttatagtcaaggatatgctggctcaacttcctactttgggggcatggactgtggatcatatttgacccctatgcatcaccagcttcccggaccaggggccacactcagtcccatgggtaccaatgcagtcaccagccatctcaatcagtccccagcttctctttccacccagggatatggagcttcaagcttgggttttaactcaaccactgattgcttggattataaggaccaaactgcctcctggaagcttaacttcaatgctgactgcttggattataaagatcagacatcctcgtggaaattccaggttttgtgaagacctgtagaacctctttttgtgggtgatttttaaatatactgggctggacattccagttttagccaggcattggttaaaagagttagatgggatgatgctcagactcatctgatcaaagttccgagaggcatagaaggaaaaacgaagggccttagaggggcctacaaaccagcaacatgaaatggacaaaccaatctgcttaagatcctgtcatagttttagatcattggttatcctgatttgcaaagtgatcaaaagcattctagccatgtgcaaccaaacaccaaaaaaataaaatcaaacaaaactaagttgtgaaggaagggagggaaggtcatagccttcttaagcagaggtgttccattgttttagccaatccttggttgaatcttaggaatgaacagtgtctcaagctcattcacgtttcatgaccaactggtagttggcactgaaaaaacttttcagggctgtgtgaattgtgtgactgattgtcctagatgcactactttatttaaaaaataatgttcataaggagtcaatatgtagtttaagagacaatcagtgtgtgtcttataaatggtacatctgtggtttttaatctgtgctagacttcaaaactgtgatctcctgttattgtatgcaaccttgaactccacctctgcaggggttcttctgtgattaaataggttataattataagcaaaattcagagcaactgagtactgatctaaaaagattacctttggctggaggtgagctgcactgaaactttacgacaaaatgtctctggacaaagagagtcagagaagagaagcaaaaggacactaattcatctgtaatttactgttggtaagcctagcagtaaagagacattggtcaattgctctgaccctgatgaattattaaactgagatcattgtcgtttatgcttgcagatgttaaatggaaaagttatatatgcataaaccttttcttcctggatttggcagatatgtataattatattaaaatggttctagcacaaaaaaaaaaattatattaataaataataaatataatatataaaaataaaaaaaa

SEQ ID NO: 126329 - DNA, 2150 bp, Homo sapiens
gttagtgctggaacgtggaagagctgctgcctccgaagcagtaaaccagcccctctgtttgtttgtttgctttgcccttagttccactgctccaaacccacccaccaaggactctgaacctgtccaccccgggcgcatcaagatcttccagctgggtacccccgatttgggccgactttgcacctccaaacaaccttagcatgatgtcttatcttaagcaaccgccttacgcagtcaatgggctgagtctgaccacttcgggtatggacttgctgcacccctccgtgggctacccggccaccccccggaaacagcgccgggagaggacgacgttcactcgggcgcagctagatgtgctggaagcactgtttgccaagacccggtacccagacatcttcatgcgagaggaggtggcactgaaaatcaacttgcccgagtcgagggtgcaggtatggtttaagaatcgaagagctaagtgccgccaacaacagcaacaacagcagaatggaggtcaaaacaaagtgagacctgccaaaaagaagacatctccagctcgggaagtgagttcagagagtggaacaagtggccaattcactcccccctctagcacctcagtcccgaccattgccagcagcagtgctcctgtgtctatctggagcccagcttccatctccccactgtcagatcccttgtccacctcctcttcctgcatgcagaggtcctatcccatgacctatactcaggcttcaggttatagtcaaggatatgctggctcaacttcctactttgggggcatggactgtggatcatatttgacccctatgcatcaccagcttcccggaccaggggccacactcagtcccatgggtaccaatgcagtcaccagccatctcaatcagtccccagcttctctttccacccagggatatggagcttcaagcttgggttttaactcaaccactgattgcttggattataaggaccaaactgcctcctggaagcttaacttcaatgctgactgcttggattataaagatcagacatcctcgtggaaattccaggttttgtgaagacctgtagaacctctttttgtgggtgatttttaaatatactgggctggacattccagttttagccaggcattggttaaaagagttagatgggatgatgctcagactcatctgatcaaagttccgagaggcatagaaggaaaaacgaagggccttagaggggcctacaaaccagcaacatgaaatggacaaaccaatctgcttaagatcctgtcatagttttagatcattggttatcctgatttgcaaagtgatcaaaagcattctagccatgtgcaaccaaacaccaaaaaaataaaatcaaacaaaactaagttgtgaaggaagggagggaaggtcatagccttcttaagcagaggtgttccattgttttagccaatccttggttgaatcttaggaatgaacagtgtctcaagctcattcacgtttcatgaccaactggtagttggcactgaaaaaacttttcagggctgtgtgaattgtgtgactgattgtcctagatgcactactttatttaaaaaataatgttcataaggagtcaatatgtagtttaagagacaatcagtgtgtgtcttataaatggtacatctgtggtttttaatctgtgctagacttcaaaactgtgatctcctgttattgtatgcaaccttgaactccacctctgcaggggttcttctgtgattaaataggttataattataagcaaaattcagagcaactgagtactgatctaaaaagattacctttggctggaggtgagctgcactgaaactttacgacaaaatgtctctggacaaagagagtcagagaagagaagcaaaaggacactaattcatctgtaatttactgttggtaagcctagcagtaaagagacattggtcaattgctctgaccctgatgaattattaaactgagatcattgtcgtttatgcttgcagatgttaaatggaaaagttatatatgcataaaccttttcttcctggatttggcagatatgtataattatattaaaatggttctagcacaaaaaaaaaaattatattaataaataataaatataatatataaaaataaaaaaaa

SEQ ID NO: 126330 - DNA, 2227 bp, Homo sapiens
tccaacacagcctccactgtgattaaaaataaaaattgctagagcagccctcactcgccacatctactttgatagctggctatttggaatttaaaggatatttgactttttctaacctcccatgaggctgtaagttccactgctccaaacccacccaccaaggactctgaacctgtccaccccgggcgcatcaagatcttccagctgggtacccccgatttgggccgactttgcacctccaaacaaccttagcatgatgtcttatcttaagcaaccgccttacgcagtcaatgggctgagtctgaccacttcgggtatggacttgctgcacccctccgtgggctacccggggccctgggcttcttgtcccgcagccaccccccggaaacagcgccgggagaggacgacgttcactcgggcgcagctagatgtgctggaagcactgtttgccaagacccggtacccagacatcttcatgcgagaggaggtggcactgaaaatcaacttgcccgagtcgagggtgcaggtatggtttaagaatcgaagagctaagtgccgccaacaacagcaacaacagcagaatggaggtcaaaacaaagtgagacctgccaaaaagaagacatctccagctcgggaagtgagttcagagagtggaacaagtggccaattcactcccccctctagcacctcagtcccgaccattgccagcagcagtgctcctgtgtctatctggagcccagcttccatctccccactgtcagatcccttgtccacctcctcttcctgcatgcagaggtcctatcccatgacctatactcaggcttcaggttatagtcaaggatatgctggctcaacttcctactttgggggcatggactgtggatcatatttgacccctatgcatcaccagcttcccggaccaggggccacactcagtcccatgggtaccaatgcagtcaccagccatctcaatcagtccccagcttctctttccacccagggatatggagcttcaagcttgggttttaactcaaccactgattgcttggattataaggaccaaactgcctcctggaagcttaacttcaatgctgactgcttggattataaagatcagacatcctcgtggaaattccaggttttgtgaagacctgtagaacctctttttgtgggtgatttttaaatatactgggctggacattccagttttagccaggcattggttaaaagagttagatgggatgatgctcagactcatctgatcaaagttccgagaggcatagaaggaaaaacgaagggccttagaggggcctacaaaccagcaacatgaaatggacaaaccaatctgcttaagatcctgtcatagttttagatcattggttatcctgatttgcaaagtgatcaaaagcattctagccatgtgcaaccaaacaccaaaaaaataaaatcaaacaaaactaagttgtgaaggaagggagggaaggtcatagccttcttaagcagaggtgttccattgttttagccaatccttggttgaatcttaggaatgaacagtgtctcaagctcattcacgtttcatgaccaactggtagttggcactgaaaaaacttttcagggctgtgtgaattgtgtgactgattgtcctagatgcactactttatttaaaaaataatgttcataaggagtcaatatgtagtttaagagacaatcagtgtgtgtcttataaatggtacatctgtggtttttaatctgtgctagacttcaaaactgtgatctcctgttattgtatgcaaccttgaactccacctctgcaggggttcttctgtgattaaataggttataattataagcaaaattcagagcaactgagtactgatctaaaaagattacctttggctggaggtgagctgcactgaaactttacgacaaaatgtctctggacaaagagagtcagagaagagaagcaaaaggacactaattcatctgtaatttactgttggtaagcctagcagtaaagagacattggtcaattgctctgaccctgatgaattattaaactgagatcattgtcgtttatgcttgcagatgttaaatggaaaagttatatatgcataaaccttttcttcctggatttggcagatatgtataattatattaaaatggttctagcacaaaaaaaaaaattatattaataaataataaatataatatataaaaataaaaaaaa

SEQ ID NO: 126331 - DNA, 2174 bp, Homo sapiens
gttagtgctggaacgtggaagagctgctgcctccgaagcagtaaaccagcccctctgtttgtttgtttgctttgcccttagttccactgctccaaacccacccaccaaggactctgaacctgtccaccccgggcgcatcaagatcttccagctgggtacccccgatttgggccgactttgcacctccaaacaaccttagcatgatgtcttatcttaagcaaccgccttacgcagtcaatgggctgagtctgaccacttcgggtatggacttgctgcacccctccgtgggctacccggggccctgggcttcttgtcccgcagccaccccccggaaacagcgccgggagaggacgacgttcactcgggcgcagctagatgtgctggaagcactgtttgccaagacccggtacccagacatcttcatgcgagaggaggtggcactgaaaatcaacttgcccgagtcgagggtgcaggtatggtttaagaatcgaagagctaagtgccgccaacaacagcaacaacagcagaatggaggtcaaaacaaagtgagacctgccaaaaagaagacatctccagctcgggaagtgagttcagagagtggaacaagtggccaattcactcccccctctagcacctcagtcccgaccattgccagcagcagtgctcctgtgtctatctggagcccagcttccatctccccactgtcagatcccttgtccacctcctcttcctgcatgcagaggtcctatcccatgacctatactcaggcttcaggttatagtcaaggatatgctggctcaacttcctactttgggggcatggactgtggatcatatttgacccctatgcatcaccagcttcccggaccaggggccacactcagtcccatgggtaccaatgcagtcaccagccatctcaatcagtccccagcttctctttccacccagggatatggagcttcaagcttgggttttaactcaaccactgattgcttggattataaggaccaaactgcctcctggaagcttaacttcaatgctgactgcttggattataaagatcagacatcctcgtggaaattccaggttttgtgaagacctgtagaacctctttttgtgggtgatttttaaatatactgggctggacattccagttttagccaggcattggttaaaagagttagatgggatgatgctcagactcatctgatcaaagttccgagaggcatagaaggaaaaacgaagggccttagaggggcctacaaaccagcaacatgaaatggacaaaccaatctgcttaagatcctgtcatagttttagatcattggttatcctgatttgcaaagtgatcaaaagcattctagccatgtgcaaccaaacaccaaaaaaataaaatcaaacaaaactaagttgtgaaggaagggagggaaggtcatagccttcttaagcagaggtgttccattgttttagccaatccttggttgaatcttaggaatgaacagtgtctcaagctcattcacgtttcatgaccaactggtagttggcactgaaaaaacttttcagggctgtgtgaattgtgtgactgattgtcctagatgcactactttatttaaaaaataatgttcataaggagtcaatatgtagtttaagagacaatcagtgtgtgtcttataaatggtacatctgtggtttttaatctgtgctagacttcaaaactgtgatctcctgttattgtatgcaaccttgaactccacctctgcaggggttcttctgtgattaaataggttataattataagcaaaattcagagcaactgagtactgatctaaaaagattacctttggctggaggtgagctgcactgaaactttacgacaaaatgtctctggacaaagagagtcagagaagagaagcaaaaggacactaattcatctgtaatttactgttggtaagcctagcagtaaagagacattggtcaattgctctgaccctgatgaattattaaactgagatcattgtcgtttatgcttgcagatgttaaatggaaaagttatatatgcataaaccttttcttcctggatttggcagatatgtataattatattaaaatggttctagcacaaaaaaaaaaattatattaataaataataaatataatatataaaaataaaaaaaa

SEQ ID NO: 126332 - DNA, 2248 bp, Homo sapiens
tagccgccttcctcattttcgttctttaaaaaaaattttttttggttgtgtttgacttttcatggaagggtgaagactgcaaggtttctaactcaatactcttgatttcttttaggatagctggctatttggaatttaaaggatatttgactttttctaacctcccatgaggctgtaagttccactgctccaaacccacccaccaaggactctgaacctgtccaccccgggcgcatcaagatcttccagctgggtacccccgatttgggccgactttgcacctccaaacaaccttagcatgatgtcttatcttaagcaaccgccttacgcagtcaatgggctgagtctgaccacttcgggtatggacttgctgcacccctccgtgggctacccggccaccccccggaaacagcgccgggagaggacgacgttcactcgggcgcagctagatgtgctggaagcactgtttgccaagacccggtacccagacatcttcatgcgagaggaggtggcactgaaaatcaacttgcccgagtcgagggtgcaggtatggtttaagaatcgaagagctaagtgccgccaacaacagcaacaacagcagaatggaggtcaaaacaaagtgagacctgccaaaaagaagacatctccagctcgggaagtgagttcagagagtggaacaagtggccaattcactcccccctctagcacctcagtcccgaccattgccagcagcagtgctcctgtgtctatctggagcccagcttccatctccccactgtcagatcccttgtccacctcctcttcctgcatgcagaggtcctatcccatgacctatactcaggcttcaggttatagtcaaggatatgctggctcaacttcctactttgggggcatggactgtggatcatatttgacccctatgcatcaccagcttcccggaccaggggccacactcagtcccatgggtaccaatgcagtcaccagccatctcaatcagtccccagcttctctttccacccagggatatggagcttcaagcttgggttttaactcaaccactgattgcttggattataaggaccaaactgcctcctggaagcttaacttcaatgctgactgcttggattataaagatcagacatcctcgtggaaattccaggttttgtgaagacctgtagaacctctttttgtgggtgatttttaaatatactgggctggacattccagttttagccaggcattggttaaaagagttagatgggatgatgctcagactcatctgatcaaagttccgagaggcatagaaggaaaaacgaagggccttagaggggcctacaaaccagcaacatgaaatggacaaaccaatctgcttaagatcctgtcatagttttagatcattggttatcctgatttgcaaagtgatcaaaagcattctagccatgtgcaaccaaacaccaaaaaaataaaatcaaacaaaactaagttgtgaaggaagggagggaaggtcatagccttcttaagcagaggtgttccattgttttagccaatccttggttgaatcttaggaatgaacagtgtctcaagctcattcacgtttcatgaccaactggtagttggcactgaaaaaacttttcagggctgtgtgaattgtgtgactgattgtcctagatgcactactttatttaaaaaataatgttcataaggagtcaatatgtagtttaagagacaatcagtgtgtgtcttataaatggtacatctgtggtttttaatctgtgctagacttcaaaactgtgatctcctgttattgtatgcaaccttgaactccacctctgcaggggttcttctgtgattaaataggttataattataagcaaaattcagagcaactgagtactgatctaaaaagattacctttggctggaggtgagctgcactgaaactttacgacaaaatgtctctggacaaagagagtcagagaagagaagcaaaaggacactaattcatctgtaatttactgttggtaagcctagcagtaaagagacattggtcaattgctctgaccctgatgaattattaaactgagatcattgtcgtttatgcttgcagatgttaaatggaaaagttatatatgcataaaccttttcttcctggatttggcagatatgtataattatattaaaatggttctagcacaaaaaaaaaaattatattaataaataataaatataatatataaaaataaaaaaaa

SEQ ID NO: 126333 - DNA, 801 bp, Homo sapiens
atgcagaaagagcttaaggagaagctctgacaagggatagacagtttacttatggaaacaagcagaaaattaaatctggtctctgcccagcaagcatctcacctcccaccatagcgtctggcagagaagtgagccaaggtggcccctggcgcagcaaatgtttggcacatccatttgcacaggagggggaagaaggcgcattctcaaacacccttcccatcacctttcaggatcttaggtgccttctctacagccatggcacaaacctttaccactagggggcggctagacatttcgattggctaccaggcaagcggccagctcaggacaggagcagtgctctgtgaaagaatggattcctggtttgttctaagtacaaacaagggggaaatgcttctgcagggttaaatgaggttgacacgctccccgcggctgaccagacagtccctcctaactcttacccaccctgggcagctctctcagcgcggtgtggggcgggagtgggagctgatggggggtgctctctattcagactctacttgttctagactgagtcactggtgggggcagcggtgtttgaaagtgggcatcactcttgggctcccacattgactgtagttttacggaatgtttggctctctgcgtgatgtttttacttaccaaagacacagacctgggcttcctggggtcccccttctgcagctgtgataatcagcagtcttcccaggacagagtcaggttctgttgcccaggctggagtgctgtggcatgatctcggctcactgcaacctccgcctcccg

SEQ ID NO: 126334 - DNA, 189 bp, Homo sapiens
taaacctctgcagggagagctctggccgtgactcctgggagccggtgaggtttagccaaagccccgagtggggaatgtgaggggctgaaccgcacaggggggatctttccaacagaagaggctaaaggaactggaggaagtcgagctgatcgcccatcgaggccaggggcctgacgctgctgccctgtt

SEQ ID NO: 126335 - DNA, 631 bp, Homo sapiens
gtacttgccactctaagcctactacactttgctgaggaatcagaaggcaagactcctcagaattagtaaggagcctggattatggacaattacgaagatgttccattttatcacttttctactatgcatagtaaattataaggggctaacaaagtatcacataggagcattcttttggaggatctattgtagtaaatagaaaagacagttgaatagttttctatatgaacagtgcttctaagtgcttaagaagagcttatgtcatgtaggttgagcaggcatgctgcaatgctttttatgatatttatttgttttgtcaaccctttcactccttaaataaaggtaaacttccgctcaccccgtcagaaggatcaacatggagaattagtggacctggagttcataaggttttactgtaacagcgattaggaaggaatgcacatgtgtttgtctccaggaaggttagaaatggaaataaatgcaaaaatatgctttgtggcacgtcatcatttttcatatgaaaatggaaagcacaagacagctttgttttgcctttttggggggctcgtggctgattttctcttcttgcttcctggtttttgttagaaagaaacttgttcatttcccaccc

SEQ ID NO: 126336 - DNA, 299 bp, Homo sapiens
  misc_feature (285)..(285): n is a, c, g, or t
  misc_feature (288)..(288): n is a, c, g, or t
gctgttgactaggtagcctgggaccaatttatggaaggtgttgaaagttagatagaagaagttgaactgcatgtgataggcaatgggaagctttccattttttaatgggagagtgacttgatgaatgtgatacattgaggaaaacaaagaaaaacattgaaacggatggtgaattgaagggaagaaagttctgacagcagggcagatcagctggaggccattgcgttttagtagatgtcagttgagaatctggttagggtgaagatagcaaagaccccaaaaggngtnccgagctcgaa

SEQ ID NO: 126337 - DNA, 394 bp, Homo sapiens
tcctctcctccttccccctcacacctgctttctctttcgtcatgtaagactccctccctcaggagacatttctctcctggaagatgaatcgagtggttaagcccccagctctgaagccaaatgtcctagcaccgagtcctgcttctaccacatgcatgctgtgtgactttgcctaagccactcaacctctctgtgcttcagtgtacatcagttgctcagaacagtgcctactgaattttgataaacatcagcgactacaactatgactaggaactcctgagtcctgggcctattttgatctgtgggcactgagagcctcagaatcactgtctagttcttggactgctagaaaggtcagtgccaaatcttggctccaactgcagcacctatgaag

SEQ ID NO: 126338 - DNA, 897 bp, Homo sapiens
gggatttgagatctggtccaaagtttgcataaactacgataacttgaataggttcccccaagccttaacttgctgtgaggcagcggtaattctaccaagcggattatctgtcacaaaaggcagcctcttctagagaaatgagctgttcagtcaattgaattaagaccaaaatgcatcagttggagtcatcatacttcttgaagacactcacttgcttttcaaattaataatatattttcatttttattaaaatattgatactttgaaatatagatactgatggtttgattagtgttttttatgatgcttctcattccagctttaataacattgtctttctcttattttcacctttctcttgacaggcatgctactttattctccatgctcagcaaatgttcagttcagtttattttgagaaataatgttccatgttcagttattaatttgaaagtaatcattttttttctgataatcttccacacatttaatttgcaggtcaaatttcagtagcttactaactgagaaagaaaaaaaaatgatagggtttggttcctttattcttataagaaaataattatagagcaacattcacatttgttctggggaaaattaatctatttttagctgtaaattatatgctggagataaatataaaattagcagactagaattgactgctcactgtcagccatgcaggaacattactttgaatcctgcactcaggtgccttggaagttaattgacacatacgttccttaaatcccagaatagttgacaaacagacttacgagctaatttcgtgagagccattaaattatctttctttttttaggtgtggtataatcagaagggttttcattccctaccttcctacttaaatcatctaaacaacct

SEQ ID NO: 126339 - DNA, 531 bp, Homo sapiens
atcaagacacaggaaaaaggaatgcagggatttaggaaagctgtactcacttctcttccaccttagcagcaaaagcaagaaggttctcaaaattctcctgataatagttctgttgcttaagcaataggatgccggggagtgtgggggcctgaggcatgggcattcaagttcttctcaaggtgttttatcttctcagcttgggcacagtgttctcggtgaaaccatgccaggcacaggagcatgctcttcacccgattctgtactcagagccatccaaaaaccattatttcgactaggttcttggagtccgctatgtccaccaccagcagggcctggcgcatccacgccacttctggaattacaacttggtctgggcctaaggtcactcactcaagatctcatccgccagccacgcctccaggtagaacaccaaagggtctctcagttcctgcaccagaaaccaccaaggccggaggccagagttttaaaatctgctacaaagaaacctacatccattctgacatacataaa

SEQ ID NO: 126340 - DNA, 333 bp, Homo sapiens
gagtacaatggcgtgttctcggctcaccgcaacctctggctcctgggttccagcgattcttctgcctcagtatcccaagtagctgagattacaggcatgtgccaccatgctcagctaattttgtatttttagtagagacagtttctccatgttggtcaggctggtctcgaactcctgacctcaggtgatctactcacttcggcccctcaaagtgctgggattacagacgtaagccaccacacccaggcagggccttccttcttaatacctgcacacacagtctctctgagtaataatctgttaaggtgctcatctcccttactaaactaagaa

SEQ ID NO: 126341 - DNA, 376 bp, Homo sapiens
taacactgtctgttcctgtgggggcagagttgacctatccataaattaacaacccttattttgccttgtgttacactttagggagtgaggatttggcctgtaactgtcaaataacagagcccatcctaactgcttctactgtgggtaaaataatgacatactgcctaggtgtgcaggtggatggtgacccatctacacctgttagatgtcactgcatgaactgaccctcacctggttgtgttttgagccacagaagcagtactagaatgttctacttcgtcttcatttccctgaacctgaattttcctcagtgagctaatttttttttttagggtgatatttcaaacaattgtagggtagcttgtttttttgtttt

SEQ ID NO: 126342 - DNA, 141 bp, Homo sapiens
ctcctgattgaaattcttattatcctctcctactcaatagcccccaaggtatgttagccttcttttaattcctcagacatgtaaagcttattcctctttccttaattattttgtactctctcattctactgttcacatagt

SEQ ID NO: 126343 - DNA, 647 bp, Homo sapiens
actccaatcacggctccacccccacagcctaggtggcggtgtgacagttggtaccttcggtccagatcgcagccggccaggcgcccactatttcgggatccccccaccgtagcccctcgatgccccctgacgacaaaacaggtgggaccccccctccccgaggagcgctccccttctctccaggccgcgtaacagcccgccaggctcgcgggcggctctgagaccccgcagggctgcccccgcggggcggggacgtttaggggcaaggcctggaggggaatcggcgcagcccagaactggacagtctctccaggacgccgcttttccgtgacagagggggtctgcgctatcccccagcgacgtgtcaagggcaaaacagcagcagcagcggctgcctctcccaccgtcttaacccgaactcgggcttgtggcgtcctcccgtgggccggatagagtgccctagtccagctaacggattcagcctggagcgttctggtgaatgctgctttcctctttggtgccgcgaagtagaaatcgggataagggttgtcatggccggagggagcgaagagaatccaggcaggtgcttctcagatgtttcttttcaccttcaaacagtacagacttcagcggtacacgcttacgaa

SEQ ID NO: 126344 - DNA, 381 bp, Homo sapiens
tcccattggcagcaccctatgatctactccacttttggccacttatatttttcatttcatcaaccaaaggccagagaatctagggaaagtgaaagaaaatagctgaagtttgaaaaaagctgctaaaaccctgattcctgcctttagttaataaccactgctttggacattaggagcccttccaactttttgcacttaggaagttaccccatccacttaccagacaatatgagaagtgtcttttaaatccagaggctaaccagcaacaacagagctgagcaagatggactgtgctgctctagtctaaaaggtaataggcacacttaggtagctttgtaggaatcaagtccttggaattctgactgatgtgctctcaactgc

SEQ ID NO: 126345 - DNA, 447 bp, Homo sapiens
taaaccacaaggtacagagaggaaatacagcgtagtagaaagagtagtcagttctgaggaacactattacttcaaaatattcatgagaggatagcaggagaaaggcatcatgataacttcctctctcagatattgacattgcacatatttagcacataaatgcctctgagaagttttggagtaaggacaccactatatctcaacatttcccaattttgcttgaccctgaaatcaattatctccaatgatgtcttgaatatgttctactaattatgtgatctggggcaagaaatctaacctctttgagtcatcatttccctataaataaaaaagatcaaactagtttatcagtctcataagatgacgggcaggagcaatgatttagtatttaccatatgcactactggctgtatgttattatcattactacactaagagtaacagtga

SEQ ID NO: 126346 - DNA, 224 bp, Homo sapiens
aatacgtgtgcgcagctgccacatttcagaacagcaatcaaacctcgttaatatcatcttgcttaataccaagtcccatagatcataagctatttttattgtgtatttaacagatttgtgtattgtcttccctgccagaatcttcacagtccaatacagaagactctgccatcacagagccttaagacctgcggccacccaaggttaagtcaggagaaggagga

SEQ ID NO: 126347 - DNA, 192 bp, Homo sapiens
ttgttgctcttgtggtgctgagttggattgcgtaaaggtggggacctccagatcttccacgggaaaggtacgtttttcttgttgatattgtgaagtgtgtatggggttgtactttggcaccttgtagtgagtcagtttccccccattggtgatcattgccatatcactacatttgaggtttcaaaatgttat

SEQ ID NO: 126348 - DNA, 381 bp, Homo sapiens
atgcctaattttttattggtgctcaaacttaaaaggaatttatcatatgaaatatgcaaaaggaaataatgcgaaatgtactggccaatggctgctaatatggctttatggtgaatcatagtagacatgtatgctcgacctccaaataactaaagctgcttctgtccaatatctcagaaagtcatttttattttaaaaatgcagatctagtaacttttctcataacctttaacatccctttttcacagagactgtcttaatgaatttaggccttttttggtgaacacattctttagtcacctcaatctatataaatattaaatagttaactattgaaagcctgaacacttgtattaaaaatattatttcctaatattattt

SEQ ID NO: 126349 - DNA, 184 bp, Homo sapiens
ccatactgctcaaggaatggggtcgaaggccagctagagctgtcccaggaatagtctcttctggaaggatcattatttcaactgtgaactgctggcacgacactaggatgtgcaaccccaccgcgccctccagagcaccaggatttccttcttgctcctggcactgaagttggtactagtagca

SEQ ID NO: 126350 - DNA, 193 bp, Homo sapiens
aggtgccactaatttaattagtgcctacagtagaaaagggcatccgttttctatgaagggacactatatcaaaggcaagttataattacacacacacacatttgagagtctccctctgtcgcccaggctagagtgcagtggcccgagatcatgccactgtactccagcccaggtgacagagccagaccctgtg

SEQ ID NO: 126351 - DNA, 255 bp, Homo sapiens
attttacattttccaaaaacaagtacttttgctcccaactactgtgtttccatggggtatattattagaaccgaataatgatcacagtcttttctgttttgtgtaaagggagcaggtatggtgggaccagcggctgagatgagactgctgtttctctttgaggtggcagtcagtgactgcagagagaaataggaaggaacacaagtgttaacttggctgatttgggtatatttatttattaatggaaatagccct

SEQ ID NO: 126352 - DNA, 250 bp, Homo sapiens
tcttatttgctaccaaaataagggagagatttttatgaaactgtcattttaaataatagtcaatagctgcacacattaagtaaacaaattcagttcaagggaagaacttcatcaccatttggtggttgtaatttagattattctagcgtgtaatactttaattgtataaaacaaagctgatgtcacaaatacaaaagaatttcttgcaaagcaagtaccacaagtaatttctatgctgccactgatggct

SEQ ID NO: 126353 - DNA, 266 bp, Homo sapiens
tcttattggctggaaaggaagaagcattctttcattggttggtgtgtattgccttgtcaaccaataagaggatgccatttatccttttctgactagctgagtgagcagggtacacagaaggattgaatctgccttagttccatccagtagcaaaggacagaactcagagtcctggactcaggatctggaattgactttggctaatccagattgcactgacttgcaaggatgacattttttacctacctattcgcagcttacttcaa

SEQ ID NO: 126354 - DNA, 195 bp, Homo sapiens
ctggccccgcggctccggtctcctctgcgcctcctaccctgtggatgctcagaggcttaaaggcaggctccgggcgcagatcccatgcggcggctgggccatgcaacaaccactaaagacatcactggggcgtcaaaacagcactgaaatcgtaacgaaaggaagataacagtcgttaacagttcccacctgtat

SEQ ID NO: 126355 - DNA, 877 bp, Homo sapiens
gagatgaataaataatgactaggtaacaaatctttttccaagtcaggtggtgtttaattctttgctttaaatgaaaataaaggaaggtctaatttagtcatcagttaatcaccaaaactattttttgatatgtgatctgcaaaattcaactgcttgtaacattatctgctttaaataaattgttattaataaacttctttgtaaaagtacactaaaatatgagtataaaaacgaaaatttttctcttaaaaaagtgtgttaattttgttacatgatgatagcatcaactactataactttaaaaaagtatcatctttattaaaatacaattcacagtatattctttcgaaccatataattcagtgatttttaataaaggtgtgcaatcaccaccactatctacattcagaacatttactccctaaagaaactccatacccaccagcagttattctccaaatctcttccaccaccctcactagggaccacctggcaagcacaaatctgcattttctttatacagatttgcctattcaggacatgtgaaataaatggaatcatataaaatgtagccttttatgactagcttcttttacttaacatgttttccaagttcatccatgttgttgcataaatcagtatttaatgtccttttatttctaaacaacattccattgtatggatataccaattgtgtttcttcatttataaattgatgtaactatctctttgctaatatagggttatatcgatagtcggtactgtcatcccggtaataggggaaggcagaaccgacagaggaacttaggggatatcaagaggggccacaaaaccttttggggggggggccacaacgcttaatatatatatatgttgc

SEQ ID NO: 126356 - DNA, 254 bp, Homo sapiens
tattgcctctacccatcttagttctctggctgaggtcctgtaaattagactggccaaagacaggtttgtagccacagacaaaacccctcagacaccgagttgtagaaggaagggctttattcagctgggagcatcagcagactcacgtctccaaaaaccgagctccccaagtgagcaattcctttccctcttaagggcttacaactctaagggggtccacatgagagtgtcatgatcgattgagcaagcagtgg

SEQ ID NO: 126357 - DNA, 171 bp, Homo sapiens
taacagtaatttgaatgcctttaaaaaaagatagcaatgagagttacaactggccacagttgtgcaaaaattagtggtgaaataaaaagttcaaaagcaatagcagggaagcatgaactaagagaatttatatgagtaagtaaaaatattgttccatgggaaattaatgag

SEQ ID NO: 126358 - DNA, 459 bp, Homo sapiens
acaggggctggtgttcaactttgttcctgagcccccttctctccttgggctaaaatcccctcagggaggaagatcaccgaccaagtggtcctcagtatttacaaaaaacaaagcctcctctcacaactccaggaggcccccgaggctagaatggttcctgtgctctaggagcacaaactgtggacgcacactgacaggcccagcacttaaggctgtgtaggtggcatattgcacatgggctctcgctctaaaggggtgagttggggctgacatctagcccaagctccaatcgccaggccatgcacactggcatgaggacgtatctacccagaagaagggccacctttttaaaatctgcacaaaagaagcttttatgtggattagcaacgttcctacccagagacctgagttcaaattccagctctcacttactctatgaccttgggcaggttccctttt

SEQ ID NO: 126359 - DNA, 240 bp, Homo sapiens
ccacgaggcactcacagctgtcataacatgttactcagaaacaacacagagggtgcgaatgcacatggcagctgcgaagagcaacattaagtatttggaggaaggagagctcacatccagcctgtgtgcgcagggacagaaaaaagctttggggcagatgaaatctacaagctgagattcaaagataggtgagaaaaaaatctcggccgggagcggtggctcacgcctgtaatcccatca

SEQ ID NO: 126360 - DNA, 239 bp, Homo sapiens
cacatctggaggggcgaggagcaggcagtggggagagaggggtcttcctcattgtgctgtctggatccaactcagaggcctcatttggggttattaattgggggagcaggcaggggatctccttcctccagtccagtaggtcctgggccagggtttgtactgaggctgggacaaaccaggagcaaggtagacatgtcccccagtccagccctgtgcagcggccctgggccattcctatt

SEQ ID NO: 126361 - DNA, 501 bp, Homo sapiens
agtatagaataaccgatgacctacgtggccagttaagttttatggcttgacccattcccttgaataaggaaataattctaaatccatataggttattgtaaattataccaaaaatacttagttttaattagtgtaatcttaaatttcaacttctgtcatccaaaaatactctgctcattacttgaggggcattgccatagccatttacggtaaagcattctgttacatgaaatgaagacaactgtacagtttatacgctgtataatgactttggtcaatgacagactgcatatatgatggtggtcccataagatcataatggaactgaaaaattcctgtctaaagacaaaggcatcgtaacatcttagcacaatgcattactcacatgtttgtggtgatgatggtgtaaacaagccgcacagtaggctgcatgtagaagtatgacacatagaattatgtatggtacatgatacttgataataaaataccatgttactggca

SEQ ID NO: 126362 - DNA, 318 bp, Homo sapiens
tctagaggatcccatattctgcacccacagcccaggaggagcgttgagacacacggcagaggtggggagaaaccaggcaggaaacagcatgtgtacctgggtcctctcagccccactgtggcctcctgtgtgttgcttttggtacatttctatgccctgttggaggtaacgggagggatactgaagccatctttgaggtaagagaagaggtttagcctcatgcgtaagactactggagagatggccttgcccaagagtagttggagatgcttctttggagagtgacctccaccttctgcaaggcccttgttagggaca

SEQ ID NO: 126363 - DNA, 447 bp, Homo sapiens
cttcccttagcttctgtagctaaactacagctatccaatccttttaatctcttcagccgcatccttcctcgggctctgaattcattcactcttattgctattctctgcacttccaaatagcctgagcttccctagtaatgaagtggtgggaacacaacgtttggtgccaggtgctgctcagctacaactgtccacagaggaactgttattccgtgcccttctgcacaggcagactcaacctggacttctctttcatcctgccagactgcatggatggcctgaatttaatttgccaaccactgtgcctcctgggcctactttggcatcactgagatctggcatctgcttcccagaacagctctgtgtatggattctctttccccaggtgtattcactgccttcgctttttcaaatgctcacaaagttattattcccagcttgctcaga

SEQ ID NO: 126364 - DNA, 184 bp, Homo sapiens
acaggcacgtgggcagaaataaacacccacgttcccatcagttacatgatttaaaattatgggccgtggagcaaatgttgtggaaatgtttttgaaaatgtgtgataaagtttcagtgactagagcttttagcgtcttgtaacattcacctcaacagttgagcacttactcatgatcagtgaaa

SEQ ID NO: 126365 - DNA, 193 bp, Homo sapiens
attttggagcgtctgcatttcagatttttggattatagaggctcaacctctacgttctctatcggccaacattctctctactgttctcttttgtttccagagattgtgggacaaatatggtcattcactattttgccccagatatgtgctatgatcataaggcaaagaaaacaccaagtctccaaccctgaaa

SEQ ID NO: 126366 - DNA, 673 bp, Homo sapiens
gattctccttgtaaccctctagttctttcttctcttttccttattcctcttctgcctgcttctttaaatgttggtgccctcaaggcttctgtcctagtcatattcttctgcttttgtttcctgagcaatctcatccattattgtggctttaagtattaattaaattctgatgattcctattgctctgtctctaccctcgacctctctcatgagctttcaacacatcttttcagctctctactacttgatgtcttttaggtcacttaaactaaaaaatacccaaaatggaactcattatgtttccccaaaacttgtttcacttctggtactctctttttctatgaatggtgtctttcatcagtttcaagccagaagctgtggagtcctcaattcttcactctcctgtcacttcccacatttacttggtcatcggatcctttgagttctacgtcagaaatgtctcctgagtccagctacttctgtctgtttccacccccattgctttagttcaggctgccaaaatttcttacctgaaccaggaagacagtgtcaacttgttcctttaccataacactctccggactccatctgccatattgctgccagagacacgattctgaaaacagaagctgactctgttatatgcccaaaggtgtatttgcccaccctaccg

SEQ ID NO: 126367 - DNA, 265 bp, Homo sapiens
caagggtgattatttctctaataagcttttaacaagcaccatattgagtgaagtgcatttgaacaagataattatttagcctaacagagtgcaaacaagacgtggcatggcacattgtctgctagcagagaggcatccagaggttctcggagtggctggattatgtctcctggacttctctctcttgagttcaccatgcacttttagagaaagacgctcagaccctctcccagaggctcgcttgagaaaggcaaaactaaaatac

SEQ ID NO: 126368 - DNA, 266 bp, Homo sapiens
taaggacacacgctgagatttgggttacagaagagggtatgttttgggtggtcttcctatggcagtgagtcatgaagaaatacaacttatgttgccatgaaaattccacagggcacacacaaaaggatacaactccctctggggtgctgaaaaggactctagaaaaaaatgactgtctgatttataggaagaaagcaaagggagaaaatgaaaacctatactcagtcattagaaatgtatgcaaagcactgtaatcccagcacttt

SEQ ID NO: 126369 - DNA, 303 bp, Homo sapiens
gaaagtgcgtagagagaatgtgccattgggtctttgaaggaaaagaacgtcctgtccttaatcagtgagctaaataattaagagccaaaggatcggagtcaaagccttgggctgttttgctcagcatagttgtcataccatatttagatgtctacacccacctttatccaggccatttgtatttcttggcaggaacgtgagaacaagcgtcacctggggttgtggtatctgagggttgcaaagtgtcagcgctggaggagctgagtgatcactcatctgaccttccctccaaagcaggagtac

SEQ ID NO: 126370 - DNA, 372 bp, Homo sapiens
ttctctgattctcagtgaggatttcccaagctaccttaaccattcaactctgcaggcattcctgtattccttccccgctttattttttccactgagcatttatctaacatattatatattgtacttatttatcttacttattatctcttcctgccactagaatgtgagctatatgaaggtagagatattagcccggcattttagtattcactactgtatactatttcccagaatagagtgggtgcttaataaatatatggtaaatgaatgaacagatacatgatgagctcctcctcctcagttgttaaaactgaggtcaaaagtgatgcttaaggctaggcacggtgctcatgcctgtaatcccagcacttt

SEQ ID NO: 126371 - DNA, 474 bp, Homo sapiens
atgttacatagtaatatgtcataagtataatattttcttttctttgtagaattagatgctaaacctagaagatgaagttattttcatgaaatcatttctgaactactgattttagacacaactcctcttataagtactcaccattctgaaaataaatgcttagtttgaagttattctgtaagaatatgtcctcatatctaaattaccccaaactttacattttttttaaaagagatggggtctcactctgttgcccaggctggagtgagactctgtctcaaaaaaaaaaaaaaaaccgggagggttcttggtctctagtcaaagcatatctgggtttaaaataagagacatcaactcgagctatatttacctaaaagagaaattcataagaaggatgccaagagcaatgtagtgctctggagactggaaaaccctcaggggacaagaaaccatctgtcttaacttctctctctt

SEQ ID NO: 126372 - DNA, 306 bp, Homo sapiens
ctcctacctttctccctgctgagcacgagggatctgctgggacaccacctgcgtgtatgtgtccagatatgtacgtgcaagctgaccagcgattcccactgatctgccaccaagagcaccaactcgtgctggaggatcaggtgttggctccaagaccccaatgggagcagggtgaagatgaggctggacacccacccaagtggtagaaacctctgcatacttcctaagactggagccaaggcaccctccatccaggtgctatggccgtgacctcatgatgcctgaccccagaaggccaccagaggt

SEQ ID NO: 126373 - DNA, 333 bp, Homo sapiens
acagcaactgttgagagttaacctctcctttccaaaggaggtttgcagaggcaggacagtgagagctgataccaccaattttattcttttctcaggcatttctaacttttatgatttcccccctccttcctttactatctgtctttgtgcctccagggccagtgaaagagcagggcagattctagattgctttcagagtttgccttctctgatgatggattaccatgtcaatttaaacagcataggattaatttgtttcaatgatttctctttaggctgaatgccagccgtttttctatctttctctttgctcttcagaacaacaacaacaac

SEQ ID NO: 126374 - DNA, 403 bp, Homo sapiens
gggagaggggaaagttccaaagacatcagtgaatggcagagagcaaccaagaggtcagctggtaccagggccaaggacaggaagagatgaggggttggacagagagaaaaaaagctctggccaggcgtagtggctcccgcctgtaatcccaacactgggaagccaaagagggaggatcgcctgaatccagaagttcaagaccagcctggacaacaaagcaagatctcaggtctacaaaacataaaaaaatgtagccgagcatggtgatgcacacctgtggtctcagctactcaggaggctgaagcaggaggattgcttaagcccaggagttcaaggctgcaatgagcgctgatctcaccactgcactccagcctaggtgagagggtgagaccctgtctctaaa

SEQ ID NO: 126375 - DNA, 229 bp, Homo sapiens
ttcatggtgcagcctcatgacccttgcctcgtggtgttgcccccatgcgtaacatggctaaaagagattctgcaggtggaattaagatgattgtccgagtgggcttaatctactcacatgtgctctttaaaagcagagtttcctcaggccagcagcaaggaggaagtcagaaagatatgaagctcaggaaagattccacactgttgctagctctgcagatggagggcgt

SEQ ID NO: 126376 - DNA, 736 bp, Homo sapiens
cgcggtggctcacgcctgtaatcccagcactttgggaggcggaggcgagtggatcacttgaggtcaggagttcgagaccagcctgaccaactacggtgataccccgtctctattaaagcatacaaaaaaatttagccgggcatggttgcacacacctgtaatcccagctacttgggagggtgaggcaggagaatcacgtgaaccctggaggcaaaggttgcagtgagccataggtcatgccattgtactgcagcctgggaaacatgagtaaaactccatctcagaaacgaacaaatcaaaaataagaggaagaaactatgagataggagtccaggatatatatattctcagaatcatttcatgagccactacacccagccgaggataaagatttttagatgggcagggtttcataaactttaacttttatgcagcctttctcatgaaactactgaagagtatgttttatcaaaaagtgagaataagtttaggaagatgaaattatgagatctagcatcaaggggtgcaacacaggagagaaagaaagagaattcttagaatgataatggaaggtagttgcaggacaacagtttgtgcaagacagctagaaagcaattcagattgaagtagcaggacagaaggctctaggaggaatttctgcaggaaaattaaataatagaattgattatctgttgtgtaaaaaaattgtccaaccttcagttggagaattagggtt

SEQ ID NO: 126377 - DNA, 521 bp, Homo sapiens
ttggaattacctagaaactttcaaaaactattgatgcctgtgtctcaggcatataatttaattggtctgtggtatggcttgggctttggaatgttttaaatatccccaggttattttaagtgtaggcatatggcagaggacacagagtgaacaagcacacagagccatgcttttaaagcatgatggccatagccttattttgagaggtgtaaactttggtaggtggtatttgtacattttggtgtaaagaacacagtaatatagaaaatgagataagaactgctgtaattcacattcctttacaggtattttctagacaccaggatagtatgttgacaattaagattagcatattagaagaaaaaaaattatttttatcttttgtataattcaggcttattggtgggatgtaataattatttttgtgtgtgaactcggcagagaagtatgtaaataattttttaaaaaacaaaggaaaagaaaagtcctgtggcaaaaaatgggaacacctagttttaata

SEQ ID NO: 126378 - DNA, 291 bp, Homo sapiens
ctcatgatccgccctcctcggcctcccaaagtgctgggattgcaggcgtgagccactgcgcccggccgtaagccatgcttttgacatcttgaaccttttacgggagttcttagagggggagtcaagtgcctggcatacagcagatgttcaggaagccattgctattaccggcctctgggtaggttcccctgccagggctggttcagagatgagtcctctgggctttatactcttctggtctcatgaggcagagagacccctggccgctcttgtcaggaggaggccacatgg

SEQ ID NO: 126379 - DNA, 156 bp, Homo sapiens
ggaatatacaggagacctcgttactgcccaccccactacctcctacagacaccaaacagtctgagacagaaagcagtcactcaggaacagacctaatagcagtctctccctgcctgctgaatgcaatacaatgggaacacccggcagagggagggc

SEQ ID NO: 126380 - DNA, 317 bp, Homo sapiens
ctgggattacaggtgcgtgccacctcgactgattaattttttgatatttttgtaaagatgaggtttccctacattgcccgggtctcaaactcttgggcccaaatgacccccctgccttggcctcctgagtagctgggaccacaggggtgagccaccgtgcctggccctatttgtgtaatttgggggtagattgagcagtgggtgggtggttgctgagtggtgtgcaccttctgcagcggggtggggggggcggtggctgcgtccccttctgcagaccgtcctcctctgcattcccagcaacggtgcgtgacacccca

SEQ ID NO: 126381 - DNA, 498 bp, Homo sapiens
gctggaacaaggactcagaccccttcctagcccagagctctacccactctttgctggccttgggtcttgctcctcccagcagatttgggtgttccctccacagtgctccccaagggccttgcacagaccactgtgaaagcatgtaccagaatctgttgtcacaaaatacgcagggttttggagaccagggacctcgtgtcatgtctccggacctacagcttcttctgtaagcctggcccacagaaggcaccaggaaatgttggaaaaaggcaggagaagagggaggggggcagaggaaagagggatggaggagcagcaggggatggcaggggcctccactgtgaggggggtcccccaagacagcctgtcattacagccgagtcagaaggaactgtgacctggttgactgtgagcaggaggtgtctgaatacggttttgtaacaatcatggtaatatagagttcacaaatacactctgctttatccgattcccagtgct

SEQ ID NO: 126382 - DNA, 502 bp, Homo sapiens
ggctggtgggggataaaatgggataatccacagaaagccaccaactaggtgagcaacaaatggtagctgtgattattccctgatctcatgcttattgctgtgtggccttggcaagtgagcggatgcctttaggagatggaggtgataactccagctaccctacaggttgctgtaaaggtgcacatggtcacagaagcaggtccctcatgcttgtgaggctttatggttcccatcactcttcgcatccatggtcacactgtcctcaggcaacccaaggagggaagcagaggactagtatattcccatgttgcagatgtggacactgaggcccagagcagggaagtggctcttccaagaccacacaactaattagcaataagcctcttggtccccatccttgtatcttttcagcccaggggacagatatgggagaaagcctttacaaacccatgtgccccacacatatgcaggtagctgtgtcagcccatctgttccccacagt

SEQ ID NO: 126383 - DNA, 277 bp, Homo sapiens
ggcccagggctccatttccttactgtcttgcctgatccaaggtaagtgtctagaaagaaggatagactccacatcctataggagattctggcagtcttctgtgaatattatttcttgcagctacttttgataaacattacaagtggcccagaattaggatgtaggtccacgaaggcaaaaacttacgttgcatccccactgttgagaacactgcctgacacctggtaggtgctcaatacatatttgtagaatgaatgaattgattctctctggttac

SEQ ID NO: 126384 - DNA, 829 bp, Homo sapiens
atggtatgtcattctatttgttgatgtctacttttgtattcttcagtagtatttaagttgttctttatatagttatagcaatactgagtgtattcttaggtatttcatcttgttgctattataagtgggaaaatttcccccattctgtcttcttgttactggtatatatgagaattcttgatttctttaaattttatgctctggtaccttattgtttgggtcgttttcagtaaattctctttgagtttcccaggtgttatctgcaaataatgatagtttccttcccagtttctatacttttaatttctcttgagtggttgtgttagcgggtactttcagtacataggtaagtactagtgatgatagttcagaatttgaagcattgttccttttaacttccaggcagattcaaaggcattttctttataaatcctttccttcctccaagcttttgggttttgttgtcgtagttcgtttgtttagtcactgatgttcagaaattcacagtgatgttccttggtgtaggttttgagtcataatgatggattaacaggtgaacccctttaatcttggaaacttaacgtccttcagttctgggacatggtcttcattgtttctttaataacttcttgtcctggaattctcatcgtcagatgttagacctttgcaattgattttcaaatattctcttctattttctatctctaattttttttgttctactttctgggcagttatctcaactgcatttttctaaaattaaagttttttttctaattctttgaatttttaaatttctgctatcatatttttattttccaagaacaat

SEQ ID NO: 126385 - DNA, 495 bp, Homo sapiens
catgcccggctaaatttttgtatttttagtagagatggggtttcaccatgttggtcagggtggtcttgaactcctgacctgaggtgatccacccgccttggcctcccaaagtgctggaattacaggtgtgagccacagtgcctggcctttatccatgggttctttattcatggattcaaccaaccatggattaaaaatatttgatgctgggcatggtggctcacaaccgtaattccagaactttgggaggctaaggtgggagtgtggcttgagctcaggagttcgagactagcttaagcaacatagcaagacctcatctctactaaaaataaaaattagctgggtgtggtggtgtgcacctgtagtccaagctacttggaggctgagtcaggagaactgcttgagcctggaagagagaggctgcagtgagctatgaccatgccattgcactccagcccaggcaacagagcgataccctgtctcaaaaaaaaaaaa

SEQ ID NO: 126386 - DNA, 107 bp, Homo sapiens
cccggtccatgctaagtgctctgttggccattatgattcccacatcacacatggagggagtacagtccgggggaaggacttgtctgacgaagcctgacaacacactg

SEQ ID NO: 126387 - DNA, 168 bp, Homo sapiens
gaggctgactgggtgatgagagtcacctctcctggcttccctggaaacgaagctgccactccccatttcttgcttctgctgcaaagaaagctgggcgtcctggggtgctttttgcctttgacctctggtgagacccctaaacctctcagtgaccgggctgtggtggga

SEQ ID NO: 126388 - DNA, 254 bp, Homo sapiens
gctttggtgtgaaaaaattgaaaaatgatccacagaaggttgggaagctggaggtggaaggtacctggacagcaccaaaggttcccttgtgcagacagcaggaagcctagctgtggcactacctatctcttacccaggtttgctttcacacaattcagtctcagtaacaaaagattttaggggagagagtagaggtagacaaagcaggaagaaaaaagaaattcattgaggaaacattttgtaatcaagaatga

SEQ ID NO: 126389 - DNA, 508 bp, Homo sapiens
tgcccggcaaatttttttgtatttttagtagaaacagggtttcaccatatttgctgggctggtctcgaactcctgacctcagtgatccacccccccttggcctcccaaagtgctgggattacaggagtgagctactgcgcctgggccatatttgcttttttactttctcactctgcagatgtatccatataaaacttgttttcctgattcatttggaaaaaagttgtggacatcaggacagtttacccctaaaccttgaagtatgcacaaaccagtacatattcctacatgacacaccaccattattagacccaagaacctcagcactgatgcaattatatcctctagtctatagttcttcttaaatctctctaattgccctatacctgccttttatagattttttaaaaatctaggctctgaagaaacatgttgcaactggttgttatgctaacgttatactagccaaataaaatctggattatccatggttgacagatctttgtta

SEQ ID NO: 126390 - DNA, 380 bp, Homo sapiens
ggggaataggggaatatcaacttaagtctagaatcatttagaaacatacaatattggctgggtgcagtggctcacacctgtaatcccaacactttggagggccaaggcgggtggatcacctgaggtcaggagttcaagaccaacctgaccaacatggtgaaaccccatctctactaaatacaaaaaattagctgggtgtggtggcacgcgcctgtaatcccagctatttgggaggctgaggcaggagaattgcttgaacttggaggcagaggttgcaatgagccgagattgcgccatcgcactatagcctgggcagcaagagcaaaactccatctcaaaaacaaaaaaaagaaacatacagtatgcccatcatataacaa

SEQ ID NO: 126391 - DNA, 591 bp, Homo sapiens
aacggtggctcatgcctgtaatcgcagcacttgggaggctggtggttggaaaattataactatattaaaagaaagacacatggtagaggtgaagatattaaagagagccatcatcctctatggtggaaaatcaataaatgcctataaaaaggaaaattaagatataacaatttagggctgagcacaatggctcatgcttataattcgagcagtttgggaggctgaggcaggtggatcgcttgagtccaggacttcaagaccagcctgggcaacatagggagacctcatctctataaaaaaaaaaaaaaaaattaaaaaaaaaaaaaaaaacaaaacaaaaaaacagttgtggccgcggcccaccgcgcaccgcgaaaaaaaagtttttacaccaccaatcgttgggggggggccgggcccccaagaggggtaatagtgacccacggggccaaacgcggttccccaaggaaaatcgctggcctgaagtaagggtgcgtgtttccacaccaaaaaaaaggccgcggggacaccacgtcgttgtgaacaacccagaggatcagagacacggctaacagagcaacggagcgatat

SEQ ID NO: 126392 - DNA, 352 bp, Homo sapiens
agctgctctgtgcagaggggacaggaggccagacaaaaagatggacaaacacccacgtagattcacacacacacaaacagacacaccacacagaaaaatatgcatggacgccactgagacacgctaacaccacacactcagacacaaacacaccacacacacagactcacacagatacacacagagaaaaatacacatggacgccactgagacacatacactcagagacaggcagtgcgctctgggcaacaggaagcttcctccaaaccagtgaagggcccaggaaagcatgagcggccctgacgtgtatggagggtccaaaggctgcgggaacttgcccgtgagtgacctt

SEQ ID NO: 126393 - DNA, 216 bp, Homo sapiens
ctcttgtggtgagcagtgcactcccgctcgtggccgtggtgtcctctgtccctgcagtgagggctcagcagccgtgcccattgatctacacctgagactgtgcatcaggggagactgtccaggaggccccaggcagagtcacatcaccatcctgatgctgggagtggggctggccctcataattaggtggctcatggtccagggataaagctgctt

SEQ ID NO: 126394 - DNA, 317 bp, Homo sapiens
ccccaggggacggggctggacagtgggtgggaagcagctcacccggcagcctggcctgggagtgcactgggcagggtctgggctgggggagtaggaggctccgtgagcctactgggcagatggctgggagaggcggcccttcaacaggggaccagaggcgacttgtcactggcttttcccagcctgacaagaaagtgcggttgtgaccacaatgttgtacatgtggcccgttccatctggaattctaggaaccacagactctcaaatgtccacactccttctcgagggtgtaattttacatttacaagcacacatga

SEQ ID NO: 126395 - DNA, 515 bp, Homo sapiens
gactatgaccaaaactcttccctcactccaaatgggaaggcggtgacaaaggctttctcaccaccctccagtcccggcttctgcgggggtggggggagtacaaagacccccttctgagctcttggtaaagaagggtaggacgcaagccaggtcctgggggctgacaaatcctgattcatggctcaagtcacacttagctcacacacaaaatgagcgattcagccactccaggctatggggaggaggcttcttcaaatgtgctgtaggtctgttttcaaacagaccaccactgacaggaggtgctgactcagcagcacccctgtgaccactctccttggccaactgtccatgcctttatgtatcctggactgagtcaaacatcattttatccaagttaggggtgagccacaaaaaatgaccagtgggagtcataaatatcttcacatgactctcaccctctacatactgaattatgaaactatggtcagtcagtaggtcgagtcatcacacatcct

SEQ ID NO: 126396 - DNA, 357 bp, Homo sapiens
agagtcttgacttaaagactaagctaaaggaaatactaattattttaccagagtgagtaatttttagataattcagcattagatatatacaaataacttttaatatcaaaagatagaatgtatttcttagtgtctagtagctggatcttagatttttaaaagcatctttgtaattaaaaaaagtattggcgttttcttcttgaaaatgtcttataatttaaaaaaagataaaccagggccaggcatggtagctcactcctgtacttccagcactttgggaggccgaggcaggtggatcacccgaggtcaggagttggagactagcctggccaacatggtgaaaccccacctctactt

SEQ ID NO: 126397 - DNA, 252 bp, Homo sapiens
acaatcaagtgagtgccatccccttaaaatcttcagtgtgagtctaaagaattttcccccaaaggctcccacatctaaaaacagtggccatctcctcttagaattcctagagatgcccagcatggtggctcacacctgtaatcccagctacccaggaggctgaggtggtgggaaagcttgagcccagacattcgaggccagcctgggcaacatagcaaaaccgtatttccgaaaaataaataaggccgggca

SEQ ID NO: 126398 - DNA, 643 bp, Homo sapiens
gataagaacagtacatgtgtgacatgctcatctcaaggcttcacatctgcaggcacgtgatgcccatctgtttcttgttagtgatgttacatgaggccaccagatcaaagggttgtcttatttctccactgtataattactattttatttttcccccttccaactaagaagtgataggtgggaagatatcttaagatcatgcaaatatctgattcctcatcagaatttctctctagatttggaatctattaatgtttcttgccttatccaatctcactatgattgcaaaatgattatttttaaatccctgcattccctccacatttaccagtctgccctcaggaagagccctccctgtcagcaagagccctcccttcttcttatgtctctctctctctcacctatctatctaatgttagtatgaacttatgagttcttaatttttcaatgatttataattaatcatgctagtgctcaaattgtcataggtttggccaggagaagtctcttcaatctgggcacctgtgtctttgtgactcgctcctttttttttttttttttttttttttgagtactttctcactttctgacttaagctgttttaggcacatcttgtatccctcttgcctcaactctggaattg

SEQ ID NO: 126399 - DNA, 292 bp, Homo sapiens
ctaaacctttctcagtgctaaaatcctgatcccatgagctggcattgaagaatggttaagatttggaactctataaacactaaacccttcctctgggaactgctctcctgcccttccagccactactccatccatatggttcccataaaagctgacatctctgcctacagttgatttaagggttggcacctgacctagctgggccaataagaatccttaccctaagaattttgcactggaaatgagaaagagaagacagcttttgtctgggtgatggaaactgaatatatgt

SEQ ID NO: 126400 - DNA, 779 bp, Homo sapiens
  misc_feature (15)..(15): n is a, c, g, or t
  misc_feature (22)..(23): n is a, c, g, or t
gtctgctctagaggntaccctnncaggcttggagcaagactgagctgagggatttcagccttaacctaaggtctcatactcggagcactatgacatcgccccagctagagtggactctgcagacccttctggagcagctgaacgaggatgaattaaagagtttcaaatcccttttatgggcttttcccctcgaagacgtgctacagaagaccccatggtctgaggtggaagaggctgatggcaagaaactggcagaaattctggtcaacacctcctcagaaaattggataaggaatgcgactgtgaacatcttggaagagatgaatctcacggaattgtgtaagatggcaaaggctgagatgatggaggacggacaggtgcaagaaatagataatcctgagctgggagatgcagaagaagactcggagttagcaaagccaggtgaaaaggaaggatggagaaattcaatggagaaacaatctttggtctggaagaacaccttttggcaaggagacattgacaatttccatgacgacgtcactctgagaaaccaacggttcattccattcttgaatcccagaacacccaggaagctaacaccttacacggtggtgctgcacggccccgcaggcgtggggaaaaccacgctggccaaaaagtgtatgctggactggacagactgcaacctcagcccgacgctcagatacgcgttctacctcagctgcaaggagctcagccgcatgggcccctgcagttttgcagagctgatctccaaagac

SEQ ID NO: 126401 - DNA, 725 bp, Homo sapiens
tttaccctattgtatcatatttagagcgattaagatactctaaccagggatattgaacagtggagaggcttgcggatcagctagcctaggacgaattaatagagatcggtcgtgactggaagagaccctggccgctcgaagacgtgctacagaagaccccatggtctgaggtggaagaggctgatggcaagaaactggcagaaattctggtcaacacctcctcagaaaattggataaggaatgcgactgtgaacatcttggaagagatgaatctcacggaattgtgtaagatggcaaaggctgagatgatggaggacggacaggtgcaagaaatagataatcctgagctgggagatgcagaagaagactcggagttagcaaagccaggtgaaaaggaaggatggagaaattcaatggagaaacaatctttggtctggaagaacaccttttggcaaggagacattgacaatttccatgacgacgtcactctgagaaaccaacggttcattccattcttgaatcccagaacacccaggaagctaacaccttacacggtggtgctgcacggccccgcaggcgtggggaaaaccacgctggccaaaaagtgtatgctggactggacagactgcaacctcagcccgacgctcagatacgcgttctacctcagctgcaaggagctcagccgcatgggcccctgcagttttgcagagctgatctccaaagac

SEQ ID NO: 126402 - DNA, 704 bp, Homo sapiens
  misc_feature (15)..(15): n is a, c, g, or t
  misc_feature (22)..(23): n is a, c, g, or t
gtctgctctagaggntaccctnncaggcttggagcaagactgagctgagggatttcagccttaacctaaggtctcatactcggagcactatgacatcgccccagctagagtggactctgcagacccttctggagcagctgaacgaggatgaattaaagagtttcaaatcccttttatgggcttttcccctcgaagacgtgctacagaagaccccatggtctgaggtggaagaggctgatggcaagaaactggcagaaattctggtcaacacctcctcagaaaattggataaggaatgcgactgtgaacatcttggaagagatgaatctcacggaattgtgtaagatggcaaaggctgagatgatgggtgaaaaggaaggatggagaaattcaatggagaaacaatctttggtctggaagaacaccttttggcaaggagacattgacaatttccatgacgacgtcactctgagaaaccaacggttcattccattcttgaatcccagaacacccaggaagctaacaccttacacggtggtgctgcacggccccgcaggcgtggggaaaaccacgctggccaaaaagtgtatgctggactggacagactgcaacctcagcccgacgctcagatacgcgttctacctcagctgcaaggagctcagccgcatgggcccctgcagttttgcagagctgatctccaaagac

SEQ ID NO: 126403 - DNA, 217 bp, Homo sapiens
ctgatttctccagagcagcaggaagtccaaatatttatgggaaatttcccaatattccaatcactgtagttgcaacattagacatggcctgcacgctgtcagttctctgtcccaccttaggggccgggtggcaaagagggtctttggtgcaatgctgccaagtctctgtttctgggtctcctgccctgcaccccctccccactgtcctgtctcagca

SEQ ID NO: 126404 - DNA, 565 bp, Homo sapiens
gcaacgtgttgtattacaggtgtgagccactgtacccagcctacaatatgtttttgagtgagatttcatgggttgctttagtgcttatcaggtacatctcaaccaaatcttccttagatttgttactagttttatgccagtcacgcatagaaacattaccactatatggctctactttctcttcctcctttttatgctattattgttatacatattgtatctgttataattattagtataattttgtcttttatagaagggaaaagaaaggagagcaagtatacgtttatagtgttagatgacccttcttatttaccattttttgttctcttcattggttcctatggaatcctgttaccatctggtggtgtttccttagtttggtaaagctttgttcccacccaccactcttctgttactcacagatatatgacatttctatatgttataggtacaatagtacaattacgtacatattttgtgcagttttttaaaatcagctaagaaaacaaatacgcacatatgctgagttttaattagataattacttttactgacacccaga

SEQ ID NO: 126405 - DNA, 166 bp, Homo sapiens
tattttttgtagagctggggtcttgctgtgttgcccaggctggtctcgaactcctggccacaagccaccctcctgcctcagcctcccagagtgctgggattacatccccttcttaccttctctgtcagaggagcccccacagcatgtgagtactgagtcatgcggt

SEQ ID NO: 126406 - DNA, 682 bp, Homo sapiens
atgaagtgtatttaaggaagttaaactatgttgattttaattattaagctgtttctcacatctgccagaatgtaatcttcacatattttgatgttgttggtttacagtcacgtattagtgccaaagtgcaattggccaatcttgtcttcttcagaaaggctctgagagaatttttttctaaagaaaatgcttaattagttcttattgatagtgtacatactctttagctaatcttcttgctgtgaaaatcagcttttagatatacctaaatgagacagtttcgtatatttccacatatccataatattcatgcatgggattagaaaatgtcagagccttgctgttctatattaaagtatattttaattgcccagtaatcaaggaaagttaaattctaattagtatgaacttcgtacctgattcacaggtattttatgataaatctaacttcagtgtttgtctaaaacattttagtatactagaatcacagcatcataggacctgaaagggcaggaaagagtatttagttccactgtcttattttacagatgaagagactggaatccagggctgctaaatgacttatccagggttacacgaaaataacactttcccattgttgacactcatttgtaaggacccttgaagaatgttgagaaaaggcctcttagtaactagtgaa

SEQ ID NO: 126407 - DNA, 761 bp, Homo sapiens
ctacttgacagggaaaaagcccaaacaagacgtagttgtccaattctacatctgttttccttcctagacaggcatgttttagtaaaacagagggaggaaaaacattttattgagacagctaaaaataaacaagtacacgaagagtaaactcctgtgtgtgtgttaaatatcatctacctacattcagtttttaaaatgacgcatccttatatattttacttctttagatgattttgtatgtgacttctttcaaggagaaaaatcgcgtaagcagtttaaattaccgttgcttggctatatttagagttctgttgatgacctttcacattatttaaaaataccacttggaatgtattaaagacatatctcctaaacagcactatttcattaatggttattgatgatgctatatgtttccttttaaagcactcataaataaaactaccaaaaacaatttttggactttccattctattttgtacttcacatttaaagctctctgtgagacttagtagaacttctttgtcagctatttggaacttcagagtagcaggtatgcaccagacattatttttttctccaactttcataaatctaatcatttgatcccatcagaaccaggccagaacatttgtaagtttactttaatcatgaagggtaattatttgaatattaatctgtaaaattaatttgaaaattaatttgccagtctatgcaacttgaaattctcgtagtcttgtaaatagtaaccacagtgaatg

SEQ ID NO: 126408 - DNA, 645 bp, Homo sapiens
gatatataataattagtaaccactggttattttgccgcacacttattctccaaaccactaaccattgcttgggatggaatgcaccaggcctagatatttgccccagatgtcttcccttcagcagtatccaattagagggatttttacaaattaaagcttaattctctataatatatagcaaaatataaattaaggaaggagaaacccgatttccttggttggttccatgggttacggaggtgagggctagtcttcaggtgcacctcttagtttatgcttcagtggctagtggtgactgttctatatcatggtccttggtatttttgctagtctttttggtagcttaaaaacatttcagaggcgaggcatggtggctcatgcctgtaatcccagcactttgggaggccaaggtgggtggatcacctgaggtcaggagtttgagaccaccctggccaacatggcaaaaccccgtctctattaaaaatccaagaattagccaggcatggtggcacgcgcctgtaatctcggctacttgggaggctgagacaggagaatcgcttgaacccgggaggcggaggttgtggtgagctgagatcgcgccactgcactccagcctgggtgacagaggctcaaaaaaaaaaaaaa

SEQ ID NO: 126409 - DNA, 654 bp, Homo sapiens
aataacagggaaggcatttctagaaagaggagagtccataggcttacagtcagggtgacccagccaagggcctgtgtaagcagccagagccgagcctgtgctccccttcacttcccctcttactcagtgtacaacgtggataatcactctctaccaatgcatttcggtttactgggtcagcccacccagccaggctctctcaagactgaccttcttatccactcaataactaagccccaccctcagcttctagggctattcatggcaggagggacttaatggctccaaaccaatgtttctggggtcaattccaagtttcccctgccccgaccactctgctccagtctgaccactcattcgtgactcctgagagctttctcaaacacttagccccttcttggtgaggggatcctgcctcgtattgccattctccttccctgaacccaagccacatcccagcggtgatgcttttacctgctgggcagcatctccaatgttggcagcatctgtgccctgatgcctgcaagtcacctctctgcttttccatctcctagttctctgctaacctgtccacttactgcttccttttcctatcttggaagctcatttctaagatccagtctggaccatggattttcccagccaactacattt

SEQ ID NO: 126410 - DNA, 1099 bp, Homo sapiens
gggaaggaaaagaaaagaaaagaaatcaaagataccaaaaacatgatccatgaaggaaaaggtaaattgggctttattaaaattaaaaacttctgatctgcaaaagacacagttaaggaaacgaagagacaagccacaaactgaaagaacacatttgcaaaacacatgtctgataaaggacttgcatccaaagaatacaaagaactcttcaacctcaacagtaagaaaacaaacacccaactaaaaaatgggcaaatgaatctggaattagacaccagaaaacagacaacccaactaaaaaattggtaaatgaatctggaattaggcaccagaaaacaacccaactaaaaagtgggcaaattaatctggaattaggcaccagaaaaaaaattggcataagatcacccaagaaaatgcagagagcagataagtatatgaaaagatgctcaatgtgacttgtcattaaggaattaatgagatattactacacacttattagaatggccaaaatccaaaacactgacaaatgctggtgaggaggcagggcatgaggaactcacattcgttgctgctaggaatacagaacagtgcatccactttggaaggcactttggcaatttctcacagcgctgaacagtcttaccatatgatccatacaactaaattgaaaacctaagtccacacaatggttgaatcaaacacagaggatttttagggtagtgaaactatgaaaacataaggaatattggacattatgcatttgccaaaatagatagaactttatagttcgaagagtgaaccttgatgtatgcagattttaaaatatcacttaggaagttagcggatcccaaggtggaacgcagactactacaatacaatctaactatattataagtgtgtgaaacatccccactgaagggaataggggaaagaaactgcccaagtaattttgggaatgaggctgttagcgtaaaggcaaacagaactgcatataagcattgtactctaactgacaaagttgttccccagtggggaacaattctgatgttgccatgcatgtatactagaatcaaacaactaattaaatagatggtggatg

SEQ ID NO: 126411 - DNA, 112 bp, Homo sapiens
tcacttttatgtagggactaagccttgagtgcccaaaggcatacagagtgatgcaatgaactttggagactcggaacggggagatggtcaggaaggagtacgattaaaaaaa

SEQ ID NO: 126412 - DNA, 545 bp, Homo sapiens
  misc_feature (19)..(19): n is a, c, g, or t
cgtggtgatctagaggatncctcacgccatgtcacaagccacaggaatctgggcacgctatgagcctctgagtctcacggaccacagagactacaggtcagcatgtgagagcttcatgtaggacccagcacctgctgaacggaggttggatgtgggcatcatcgtggtcgttgagtgtggacaccgagagccttcacacaggatggagggtggatgtggcacctgctgaacggaggttggatgtgggcatcatcgtggtcgttgagtgtggacgccgagaggcttcacacaggacggagggtggatgtggcacctgctgaaccaagggtggatgtgggcatcatcgtggtcgttgagcatggacgccaagagccttcacacaggacagagggtggatgtggcacctgctgaaccgagggtggatgtgggcatcatcgtggtcgttgagcatggatgccgagaggcttcacacatgacggagggtggacgtggcacctactgaaccgagggtggatgtgggcatcattgtggtcgttgagcgtgga

SEQ ID NO: 126413 - DNA, 667 bp, Homo sapiens
gggttgggggtgggggggcatggcaggacaaaaatcaaagctaaaaagggaattctgggagttattcaattccattatctgccctcaggtaagtagcctaaacctgcccagtaaaggaaagccaactcttaagactttcagggaataagaattctgaaaccaacatagctcaacattccacaaaaaataaaaataaaaaacaaaaaaatactgcttcgaggactgttaaaagaaggatgaaactaaataattcaagacttcctacagcaggactccagctcattcacttcattcagaacccaattcaaacagagggtgcgaagttatataatgtcaggctttacattacacaccccactggtatgttcaggctcacaaagatgcaaccaagaactatatgcggttgcaagcacatattacagaaggttttattttaatgttaaggctgatgaatcttgtcctaagcaggtaggacacctcacaagcactgagtctgaagcagtgaagatttttttttctttagtttaacaaactgcttaatcgttcatcaaattaccccatatatcatgaaggccccaaacatagtgaagcttcactagtttttcatttttaagatgtattcaaacatcaagtaatgcacaacttgccaagaatatttgaaaatggt

SEQ ID NO: 126414 - DNA, 743 bp, Homo sapiens
ggcacagaccatgctaagcattagtccatagtctcaaagcacacattctggtagaaaagaaataaatatctatagaaagcaggttaataatggagtcatggagtaatacagaggaaaaagtatctgttagaattttctattcagaaaatagtcaaatgacaaatcatttaagtagaaaggaaagtctatttccacccaccctccccagggggaaaaaaaaaactcttttgaggtagtgtctatagctggcctgaattgtcctacactgtattttgattgatatactgataaagaaaacctcagttgctggtgtaagtgaaaaccactaattatagtgctctcccttctctgtctctaaattggtgataatcaccacacatttatgttaaagtggggcaagataataacatagcaggctgcatctgcgaattttgtgcatgcctcatctccactctgtcctacagaatggagcctaagacctatcaaaatctgggcatgctttggaatgcgaaatgggcaatggatatagagaaaatatattcatattgcaccaccattcctattaatgactcatccatgtagtcaatgatgcaaaatacatgccagacactatgctaagcattggcaacacttttctttttcctcatggagcatccagtttggttggggagatagacattaattatgtgattgaaattataatttctcatttttctctccagcctataaagttaaaactccta

SEQ ID NO: 126415 - DNA, 404 bp, Homo sapiens
tcattttatcagcaacttgtaaggagagtctccagggaataggctgaacctccctcaagccaggccagtggactagtcatgaagagaatggggagggacaaattagcacctgcaccccctttctcaccctccctgtgttcctgcagcacctccctgactctggggtcagctgccacagtgcctggctccactctgtagccagatggctagggctgggaggaggaagagagagaaggggattcgtttgcatccctctacatccttccctctcccccaccagatactcctggcatccaaccccaaacaccactgctgaacaccctctcctccccccagcaccccctccaaacatgacttagaagagtctgaagcagatcttggcagccagtcccctaattctggaa

SEQ ID NO: 126416 - DNA, 587 bp, Homo sapiens
gtatctgttagatctagttggttttatgttgttcaagtctatttccttgttgatatcgtgcgtggtgattctaagcattatttaatatacggtgctaatttctcaataaaacaatttctccctccaattctgtccattgttctttcacggcttattatgtgttcagaaggaataagactttttccctacactcatacaccactcaacacaatagtcactgaagtatgtgggggtttctccacattcacaaccaattctccaggagacaccagttgggtgttttataattcaattataatactatgtatctgctgatttcatgagctcatacaggttaagggctcagccctacaagatcaccccaagtttcgggtgtcaattggtagcagtgggttgtcagttatacttctgaccaatcagctataaatgggggtttgcaggatcatctatctgggtttaatttactaggagggctcacagaactcagggaaacatttatccctttaatatcaaagatattgcaaaggatatagataaacagtgagataaagagatacacagagtgaggtctgaaaaggtcctaagtg

SEQ ID NO: 126417 - DNA, 572 bp, Homo sapiens
tctgcctcctggggctgttatgagggctgaagaaggggcaggcacagaggagacacttactatatgatcattgtcctcctagagtatcatcaccatcaggtggacttcagtggccatcccaggcctccacggatcaaccacaagatcttggagaatgtccttaccctccaagcctcagtttacctttagggtgaccaaccatcctggtttgtccaaaactgagggttttcctggcacagtcccaggcaaactgggatggtgagtcactgatatagtttgactctgtgtccccaccaaatctcaccttgaattttaataatccctaggtgtcaagagcaggaccaagtagagataattgaataatggtggcagtttcccccatgctgttctcatgatagtgagtgagttctcacgagatctgatggttttataagcagcttccccctttgctcagtatcactctccctcctgccgccctgtgaagagctgccttccaccatgattgtaagtttcctgaggcctccccagccacgcagaactgtgagtcaattaaacctcttttctttataaat

SEQ ID NO: 126418 - DNA, 359 bp, Homo sapiens
actatagacacatagaaaagatgccagaagcagatgccttctggccagagcgcagagcatgcagggcagagatatttgctagttacaattattccataggctttatgcttgcctgggtgctgaggttggcacacgctcgggtatggcacacgctttcttaggagactattatctataagttaaagctagggagatgtcactattagaactccaaacacactcttctgctttaaaacaggttgtctgccctctgctttggtatggcattcgggtgtctgttttgtggttgctttagattggaggggtgaccattttattagcccccttgataacatctgttgcagatattgcctttctgg

SEQ ID NO: 126419 - DNA, 764 bp, Homo sapiens
tgaaatacagaatgtgcttaatatttgcatgttaagaggtcttcattagtaagaaaatcttcagaagctgtaatggacaaaagtataaggaagtattaggaaggaatcgagtttcctgtgagagtaagggtctttgtgacatgcggttgataactctcctccagtcttttattatttcattcctttcatccctttttttctcctggatccctcctatccccttttctcttagagtgcagatgggatgactgtaaagtggaccttttagagtagaccagaataaggagattggatcgagggagatggggaccagaactggtaggttaattatattttgtaacttcccaagctggttctaatgttccagcacagttactggaaaccaaaagaactaaaaacatagatttttttttttttagaagcactccacactctgctgaagttggtaatattataaaagttgtagaattctctgttagtcttccaacctacacctgtcaaatctaccttctttgttttctcttttaaaaattttccttttttttcaccttttttccttctgttcaaacattgtttgcttcaagtgatttttttttataagggaataggaaatataaagtgaatatactcttaagacggatattctttcttttaataaatctctggactgtcgcagttcttatccttttttaaagagaagagtttgctgaagtggttaaagatattttactgaaatttcatcttggtaaaaaaaagacagttaa

SEQ ID NO: 126420 - DNA, 324 bp, Homo sapiens
agatctagaggatcccattaggcgcgttctgcgtcccagaaacacatggagaagcctttgcttctcacctttacagcttccctgagctactccaggtaggcctgactcaggcccctctggtcacgtggtgtgttccacgtgtgcagacccacccaagccactgcacagaacgagccttctctgtgagaccaacacagacttgatgtccaaatggtgcagacgcacccaagccaccacacggaatgagccttcgctgtgagaccaagacagacttggtgtccaaatggtgcagacgcacccaagccaccacacggaatgagcctt

SEQ ID NO: 126421 - DNA, 380 bp, Homo sapiens
gtatggcccaattgttagatttggtagaagacctagttttgatcatcagttctgctgctttctggctgtgcactgtcaggcaattccctgacctctctgggccccagtgtccagtgaatcccaagcctcacaggacattgacgaggatgcggtgagaattctgagattgccagcagacatccccgctgctgcttattagtggtggtgttctacgttaccacttatttttctaaattacaccaaaagctttgagtctttattctggaagtgttactctctgttttagcagtgtttttatagacttaacaacatgaagtgttgcctaagaatgaaatgcaaatcggtacctggtggctctcattgtggctttgcttgtcagc

SEQ ID NO: 126422 - DNA, 367 bp, Homo sapiens
tgtgccattgcccatgcccacctgagggagctgcagtgaggttcttccttaaagagcaggggcagcctgtgaggtcaacagggatagtttggtgacatgggaatgggtttggcctgattagcaaagtttgtgtcgtaaggtgagactcatgtaacatttctggaaaagaagttattgactgttgacatgcttatcaactccactggcccagaggatctctacatccagcttacatcacttactcactgactttggggtttgggtgggtggatggggtggcaattaagcctcctgggaaaaattgggaagctcagtatctcagtaatggttgaggcagcagtgaggctgagcaaaagttaatcagtga

SEQ ID NO: 126423 - DNA, 792 bp, Homo sapiens
ggggcagtcaagtaggctgaggagagagataggaacagtgatgatcatgctggcgattagtactccaggacaccatgctgtttaaaacatgcagaaagctggattatttctggcttgagatcaggtcagggactcaattactcattttgtatagagagacaaatccactgggagttgcagaaaactgcaacttactctcagtaaagtttgccatcacttaaaatgaaagtttttcaaaagtgctccagaaaataagcaagagacagttatttaaaaagtaggaattaggataatatttggagttaacctaaaactctctcctttttgttcccctaagagttgaaaagcactgttttagcagtcaggaaggaaaaatgcattaaaaagtgcttttgtcttaacaatgaaatcactgatatgcttataaaaatctcacttttaaaaaatatataatatgttcagttttttatttataatattttatctgctgatgacttatgtaagaataaaagcatatatttagtacttgtgtttttataaaattaaatttttatttactgctttatgttttaaacatttttatatttgaatgtattaaatagataaattttccaggttaaaaaataagttctgggctgaatgcagtggctcatgcctgtaatcccagcactttgggaggccaaggaaggagaattgcttgaggccaggagttcaagaccaggctgggcaacatagtgagacctcatctttacaaaaaaaatttaaaaaattagccagcatgctggtgtgtgt

SEQ ID NO: 126424 - DNA, 311 bp, Homo sapiens
ataacgtgatacagtaattcactcattttctgcagttaccctcaactctcttttccttctttgcatctacctagcagaaggccaaacaacctagatgaatcaaatctaaacatctccacacccatacctggacacataaatgctcctggataccatcactatacaggcatatctataaatttccggtcacgaaactaagctgggccttctggcaggcttagtgtgattctcccagtctctaataatcatttcagtccaggcacagtggctcacgcctgcaatcccagcactttgggaggccgaggcggacg

SEQ ID NO: 126425 - DNA, 204 bp, Homo sapiens
tcaaggtactctgtggtcaggcccctgctgcccacatcagccccatggggcatccctatcccacttcctgctgtactctagctctttgcaagttcatgctttctctatccagctttggtgcttcacatacactgactgctagcatctctcaggtcccagctggaggtcactttcctgatggccccagttggattaggttccctc

SEQ ID NO: 126426 - DNA, 654 bp, Homo sapiens
gtagacttagccagccatgagaagttgccttttgttgaaggaggtgttttacaaagggaaatagggtgtctcctgggcatcgcattagcaattaaatacatgtatcactgaaatgaaaagaaatgatgaaatgatgaaatgaaatgatgaaatgaaacgaaatgatgaaatgaagaaatgaaataatgagatgaaatgatgatgaaatgaaatgaaatgatgaaatggaatgatgaaatgaaatgatgaagtgatgacatgaaatggtgaaatgaaatgaaatgaaataatgaagtgaaatgaaataatgaagtgaaatgaaatgatgaaatgatgaaatgaaaagatgaaatgatgaggaaatgatatgaaatgatgaaatgatgaaatgaagtgaatgatgaaatgatgaaaaaatgaaattaaatgatgaattgatgaaatgaaacgatgagatgaaaaggtgaaatgaaacgaaataattaaatgaaatgagatgaaaagatgaaatgaaattatgagatgaaatgaaatgatgagatgaagtgaaatgatgaaatgaaatgatgagatgaaatgaaataatgcaatgaaagatgatatgatgagatgaagtgaaatgatgaaatggaatgatgaaatgaaatgatgaaa

SEQ ID NO: 126427 - DNA, 403 bp, Homo sapiens
tttgagcatttgtgggaaaagagaatcaaaagtatgcttccaatagggaatcatggaaagagcacaggctctgagacgtaaatgaccaagttcaaatctcagcttcagctgagcatacttctcttaccataggcttccctaagcctcatttccttatatgtaaaatgatcgccttttagggttattgagatgaaatcacatgttcagcaagtgcctggtatataattctcactcaactaatgctaactcttcctgaatccttcccgaatggcctcacctccctaccctgaccccataactgctagagagctagatattttcatctcttccttgtcatttcttcctccctcactaagacaaagttttgtcttttttgtttgttttgattttgtttggggggcaa

SEQ ID NO: 126428 - DNA, 1182 bp, Homo sapiens
agcgaacccatgaatgtggagtagacctctagtggctgagagagttactgcaacccttaatggtatgaatcttgtttaatgcataactttcacgagcttggctgcactgtattatatattggaagctgaatgtaagtaacatccatcctgacagcagtaacagctgacaacctaaaatcttacagagtcagaagaactacagaatgcattttttaaaaagaccggggctattttgggataaggtaaatccacctgtatacctctttagatcctaaagacatcactgtgtcacaaaaaaatcataattggtgatgttgaaataacaacattaacaatattattattattaacaacaacagcaactaaagggcttttttttttgttctggtgctatattaatcattttacttgcattgacttaattctcacagcacttcaatgagaatggtactgcaattatctctatattacaaggtgaaaacgccagcttagaaaggttaattaacttgcccaaggtcacacgattggaaaattatatgactggaatacaaacccaggccgtgtggctctacctgtgttttagaaatcctctataccacctaataacctccaagccttaggccatgatgaaataaggttcaggaagcccttttactgccacgctgaaattgttaccacttgttggcatttccaacgacattatgacaaccggctgacaaaattgacacacaatggcccattggtcctatgggcaatgaagttcttcgttgcgaatcacgggcatttctccaccgcaattgggccgaaaattacagacacggaacacgaatatatgagattatagtaacccacagaaggaggaagtcagggacgacaagatttacagaaccacttgggcaaaagtcagaaacaaccccgagggagaaaagagacacaccaggaccacaagatccaacggaaagaacaaggagaaataaagagaaaggaaccacaaaaagacacgggcaaaatagcgagcatgaagaagacagcagggggatccagagatagagagacacaaaacaaacgagaagaaaaacagaggcaaagacagccacaaggaggaccaacagagataagcagaccgcgagtgtaaagaaaaaagaagaagacagtagtgggagaacacaagaaaaccaaggg

SEQ ID NO: 126429 - DNA, 271 bp, Homo sapiens
attaccttactgcattgtgaccaaagatagtcttatttctacttttgaggaactgattgacatttttagcaagtcttccaatgtgattaatttctacaaatgttccatgaactgtcagtttataaagcagacaattacacattttacatttttctttctaagaagagaataatgttatttctgtattattggtttcttaagagaaagagacctgtcttgttcattttctaactctaacacctggtattgtatttggtacatagctgttgtt

SEQ ID NO: 126430 - DNA, 806 bp, Homo sapiens
ttatggttctgcaggctgtacaagaagcagatacttatggtgccagtatctgcttctgataagtacctcaggaaactttcaatcatggcagaaggtgaaggaagagcaggtatgtcacatggcaacagaggaagcaagggggggggaggtgccacacttaaacaaccagctcttgagtaaactaatagagcaaaaatgcactcattaccatagggaccacaccaagccattcctgagggataaacccccatgacccaaacacttcccactaggccccacccacctccaacactgcagatcaaatctcaacttgcgatttggagggacacatatccaaactatgtcaaagataatgctgacttcacagaatgaattagtgagtgttctttcctcttcaatgttttgaaaagtctgagatggattggtgttagttcttcttgaaatgttgatagaattcaccagcgaagtcatcaggtccagagatttctttgttgggacattttcgattacaaatgcaatctccctatgagttatgagactatttacattttctatttcttagtagtttagtcttggtaggttttgtgtttctaggatgtgaccatttcatctaggttacccaatttgttggtgtacaattggtttattaatctttttccccaaaaaactagtcaagtgcagtagtaaggataggggaaagagtagaacaagttctatctgtaactgactgtcaacaatcaattaagacaattcactatctccagaccagcctacaattgcttatcgtagtctattataatctcttt

SEQ ID NO: 126431 - DNA, 260 bp, Homo sapiens
gggagggaggcatgagggcttggaaggacagaaagagccagcaggcgggagcatggcagaagagggacaatgacaccaaggacactgctgaggtaggcaggagccagaccacatctggaacttggttcctgaggggctttaggcaaggccatgaagtagcagccgtgcattttcaaaggtgactgtggcggccgggcacagcagtgctgggaaggggcaagttaggaggctcctgtgaagttcaggtgccaagatggtgg

SEQ ID NO: 126432 - DNA, 330 bp, Homo sapiens
aggaggacctaaaggggtccacttgtgtgaccatggtagagccaggaaatcccatcaacctagaaagtaaaaaatgggagttttcctcagtcaccaccttgtgatcatacttctcccaaacaccatgcctttcccttctcctcagctcagctactcctttaacaagtttctatatctgaaccattttcccctgatctcttcattttcaaaggcctttatctttatcctttaaatccaatttgttctgaatgcctgggaaccaaaaaagctttaaggaatgctttctcggccggacacagtggctcacacctgtaatcccagcactttggg

SEQ ID NO: 126433 - DNA, 404 bp, Homo sapiens
tcttgcctcccagtgtgacttgtaatttttaattgaaagctggatatgatgtatttggcaatgggaagtgagggaaatatgtttttagtgtgagggtttatgttaatctttctcagagttgggctgtttaatgttttgctgtggtctgaatgttccttaaaacttgtgtgttgaaacttaattattattgtcatggtattaagaggtggggcctttgggaagtgattaagacatgaaggctccacattcatgagtggattcatgctttttaaaaggactggaggaaagtagtgtaggctatttttttgcccttgtgccttccaccatgtgaagatatagcattagcccctcctgccatgtaaagactcaggaagaaggccctcagctggacatggtggtgcatg

SEQ ID NO: 126434 - DNA, 314 bp, Homo sapiens
ctgcacgcttagaggatcccgtctgagcagctgggaactcagcttagcttgcgtggttttagaagagctcttgactttctttgagagtacgtggcagtagcagatggaagtgctgtcacttttcaggaaactctgaccagtgcattaatttataataggtaaaggagggatagagcctttttggaattaattttaacaactgtatttgcttattttaagaaatacaacatcactgtcttcagtagttgagtaactgccacactaactggaggctgtgggcgccctgtcaaccgccccttcccagcttgctcaga

SEQ ID NO: 126435 - DNA, 315 bp, Homo sapiens
aagaccaactcgtacatcttttatgagaaaactcctaccacttacattagcattttgcagatgctatatctcaatgcttgtcctaatttccagcatcccaccccaaacataggaaatatatctgacaaaacaatcaccatacgttaatgcaacatgctgagcgcaaaggttgcaccctataggatttatttagatgatactcttgtaaaagcaaaactatagggacaaaaaaaacagatgagtagtttccaggggctgcgagctgggaaggatttgacgacaaaaggaaggaagagaatttggaggccgatggat

SEQ ID NO: 126436 - DNA, 435 bp, Homo sapiens
aagtctgactctagagtatcccccctaacaggcggagccaaaataagattagaactaaaatactggacaacaatgacaaaggggaggagatgaaagttaaagtcttgtattgtttgcaggggagtggttagatgctgattaactttagactttgttcatttaactacatgttaaactttcaaggtaacctctacagaaacaggacatataactttcaaacccaaaatgtggagaaaaaaaaaaggtgcttaaagaaattaaacacaaaattagctggacatggtggcatgcacctgtagtcctagctgtacagggggctgaggcaggaggattggctgagcccaggaggctgagctgcaatgagctatgactgtatcactgcactccagcctgggagatagtgggagaccctgtctcagaaagaagagagagaaa

SEQ ID NO: 126437 - DNA, 510 bp, Homo sapiens
agcctttattagtcaaatcagccaagcagtttttcaggctcttagtattcagtgaaaactttatatcctttacggtcctccatcttcaagaaaagtagaacggactaaaggtcttttaaaaacacacctcaccaagctcagccaccaacttaaaaaggactggacaatacttttaccactttcgcatctcagaattcaggcctgtcctcagaatgctacaaggtacaccccatttaagttcctgtatagacgctcctttttattaggccccagtctcattccagacaccagaccaacttagactgtgccccaaaaaacttgtcatccctactatcttctgtctagtcatactcctattcacggttctcaactactcatacctgccctgctcttgtttacactgtttctccaagccatcacagctgatatctcctggtgctatccccaaaccgccactctaaactcttgaagtaaataaatagtctttgctggtgggaagctgaaacccct

SEQ ID NO: 126438 - DNA, 368 bp, Homo sapiens
tatccccagggacaacagtacgccctttcttttctcttgccgcagttttttacagaagctgtattttttatcataaaaggaggggaagctgccattcaaaattgctgttattttcctattctgtttctctggataaaacaagacttctaaactaacaaaggacaataatcagtgcggaggcaacatacgctgaaataaggaaatgctgaaaactaacattcaccacgccacacataaaaagcagctgaaactcaacgtgaaagctaaacctcaagatatgacttcacacagctataacgggaaacataaaagcaacttgggatttcctctatttgaagggatgcatttccgcttactttgtactttcc

SEQ ID NO: 126439 - DNA, 425 bp, Homo sapiens
tgtgttataaaacctataatgcattattatttttgctttaagcaactatctttttaaagctactatttctttaattcacaatgttgtgcaaccatcaccactaactgcagaacatttccatcgtgcaaaaagggaaatcctgtacctgttagcaatcaccttcaatgcagtcatcttttaaagagaataaaatggaaaaaaaattcttatgtttactcccagttaccatttctagcacttttcaatcctttgtgaagatctaaatttccattttaaaccatttgccttctgcctgaataacttcaacacttcttgtgcaggtctgctggcaacaagttccagtaggcctttttttttttttttgggaaacggggtccccccttatcccccaggaaaaggggcgggggggcccattaagggccaag

SEQ ID NO: 126440 - DNA, 370 bp, Homo sapiens
cctgaacaggctgagttcctgagggcagcacatccttgctcattccccaggccctggtacctaggacggcactgggcacgggcttggaatacataggtggatagatgaggcagtggctgggtgaaccagtcttcactcagggacacaccatttcatggggcaccttgggtgtcacccacctgtgctgctgtacttaaagcgcacaagccatgtgaggccacctcattcctgagcagtacggtctggggcctggatttgatgggctccactttctcaccactcccacccgcaacccatctgctctcagtactgcaggagccatgatggtttcaggcattcctgctgatctgcccgaaccattagcgaaggc

SEQ ID NO: 126441 - DNA, 486 bp, Homo sapiens
catcctcccagagccggaacacaggagcctgccccgctccacctcttccaagctgcatggacttgaccaagcacctttacttccccatttcctcctatctaggatggagataataaaacctcctccctgcaaaccaccatctcagaaggctgtagtgagaatcaagcaagacaataatggagaaacttctttgaaaacagtgaggtgccagtcaaatctaagggcttctgagagggcagcagtaaataggtattgcacacggcagctcctgggggcccactgggagccactcaccacgagcatggtgcacgtgcctgtgagcagggcagacagagtggctgcaacacaggcttctttccttcggtattttttataaaggggaatcgggtgaaggaaatgtctttggaatagacaatcttcctaaactcccccaaaataacttcagtggaaacaattgtaacgtccactctgccggcattgtttcag

SEQ ID NO: 126442 - DNA, 395 bp, Homo sapiens
gttttgtaccctagtgatgttagtgatgctttctagtacagaaagtcaatttgttttgactacatacaataaatactacatatctgaaaaaagctaccaagttgggggaaaggggactgtttttcgtcatgtgaataacaacaagcgaactgactactagggtctaaatgtttgtgctctcctcgccccccgattatgttgaaagctaacacccagtgtgatggtgttaggaggtggggcctctgggaggtgatgaggtcatgagggtggacatgtcatgagtgggattagtgcccttacacccgagagagcaaggtgaggacacagcaagaaggggccatcgatgagccgaaaagtggaccctcatgggacaatgaatctgccatcacctttat

SEQ ID NO: 126443 - DNA, 417 bp, Homo sapiens
ttttactgtagttcaggaaatagaaatgtaacatggtcagtggcattggctatcttcctactgacctagagaataactactttcccaagggtgtcatcagatatgaatgtgccaggctaagctaagatcctgtgcctaccaaaactgttatgtggcattaatcatttctgaaagtgtaagtagatctttcagccaggacaagtgccaactgacccaagtgccaataccttttgaaggagtctatgaaaagtattaaaattcaagtggtcactgatgaaactccaaataaagccagcatgaaaagtctttaaaatttaccagtacttcctacaggcaggaaaaagaatgttcaaacctgcaagaaaatgcttttctattttgtttttattttttaaggtacaagtgacaaacgtattc

SEQ ID NO: 126444 - DNA, 392 bp, Homo sapiens
gtagtcccagatacttgggagggtaaggcagaagaatcgcttcaacctgggaggcagaggttgcagtgagccaaaatcacgccactgcactccagcctgggtgacagagcgagactctgtctaaaaaaaaaaaaaaaaaagaagtggcagctctgtctgcttctcacagagttgctagggacaactgctgaggcaggcacctgccctcgggctccccgggtgggctgctatttgcctgtgggctctgcctgcccgcctgtccagtccccagggatctgaactgtgacctcccccttgctcttcttgccctttgcattgcctggcttggcctcattaatgtccccaaatctgtgttcttctctccagctcctctggcaacccctgaccccctt

SEQ ID NO: 126445 - DNA, 167 bp, Homo sapiens
gggctgactcagctcatgaggactgttttccacacccctatgattttatctccaaccaataagcagcaaccactgcttagcccctcccaggcaaattatccatgaaaaccctagcttccaagctttcagggagactgatctgagtaataaactcctatctcctgctt

SEQ ID NO: 126446 - DNA, 470 bp, Homo sapiens
ggcacaactggaatcctgaactctcccttccccaccattctggggattcccttcacttttcccttgtgatcagtgtcctgttttctacatcctatgacttttcatttctaggtatgtttctgtgttggggtgaggcatatccgccaatggctcctgagaaacggcttccttctgaagcatagaagcaacttatatgaacataatctcattttttttctaatttggcttgtaaagagtagagatctatttggagtctaaaccaaagaattgtgatttgaggaaggcctttttttgggaatctaagttaatattctaggatgtcacttgtgggcaacttaatttgataccagcagtctgagttagtggaaagggtagagggcttggcaacagaaaactcatttaaatttcccagttttgacacttgctagccagggaatttgagtcctgtaatctcatgagcctctgtttct

SEQ ID NO: 126447 - DNA, 636 bp, Homo sapiens
gaagtctgtggttagagaaataagtctgaatttcttacttggaaaatttatatcaaagatcatgggaacaggggcaacgacagggccatttaatcctccctaacactttctgtggattcatgaatgtaggagaggcccaaagcttctgctatgattttcttcagtcaaattcctaagcaagctaaagattatagcaatgcagaggaattcataaggataatgagagggggaaaaaagaaaacaaatggaaatagcgcaagcagacattggaaagtaatttgaagtaggagagtttggagctaatagttttactttgcattattgaatttctcccatacatagtaatgacagtgtccatgaatggtgaaaatgtgtgtgtagtatgtgtgtgtgtctgtggtgtgtaggaaggaaacgtacagagagagagaaggagaaaaagagaaaaatagggagggagagagagagagaggaggagagagagacagagagaaagaaaagcaagggaaagactaaagttgagaaagcattagaaagcccaagataacatgtgcacacgtgctcagatactagggctgaaattctcagggccagcttcttgctttatggtgaaagccaaatcagctagagtatttt

SEQ ID NO: 126448 - DNA, 622 bp, Homo sapiens
tatggagggtttttttttttgtaagactattcaggaaagtaaggaagacaggaaaccgtctcaactgctgcacagccagaccccatagagatctggaatgacattcaggatgttacaaacatgcaaacagtgtcagtgtctgtttttattcattacttcatccctgcacctatgcttgtcacacagtgagcgcccaagcattaatttcatgatggatttccgatgctctaccccatctatctgctctttcctgtattcccagcctacattctgtctgcagcatggcttctgtttacttacacagcctttgctgcctcatggtttctgcttacttacctctctttgtatattgtttctttttcatgccatcacgctgtgtggggattgcatgtatctcattcaaatacccaaagagaaaaactgtgattagatagaccactctccaatgtggagccccagctcatagtgaaatgattgggcttctgttgttgccttgaggtcagggacctagccatggtctggttgtctgtggccaactagcagggccatggatgtaaaggatggtcttgcttataagaggaaagcggttatgacaaacacttagaatggtgttcccataatt

SEQ ID NO: 126449 - DNA, 284 bp, Homo sapiens
aagacatccagttttaaatgtatgtaaaaatgtgcttatagaattagtcagtggcaggggatggggtgatgttgctaaatggacactaggcagaagagataaagctatttaatgtgcctgttaactatatgaattctgtaacttgtgtgttgcattgagagtgatggctggcccattgccgtgactcatgcccagtcccaacacctagggaggctgaggtagaaagatcactgaaggccaggagtttgaagccagcctgggacgcttagtgagatctcgtctct

SEQ ID NO: 126450 - DNA, 329 bp, Homo sapiens
ccctagtagctgagattacaggcgcacaccaccacgcctggctaatttttgtatttttagtagagatggggtttcaccatgttggccaggctgctcacaaactgctgacctctcgacctgcccgcctcagcctctcaaagtgttgggattacaggtgtgagccactgcgcccggccatgccagagaactttagacatgcccttagatgtgtgcgtgtgattaatggattttgtttgtttgtttgtttttttagagatagtgtctttctctgttacccaggccagagtgcggtggtgtaatcatggctcaccacagccttaaacctccca

SEQ ID NO: 126451 - DNA, 731 bp, Homo sapiens
gttgcccgagctggagcgcagtggtacaatcgtagctcactgtaacctgcaactcctgggcccaaacaatctttcttcctcagcctgttgggtagctgggaccataggcaggcccagctaatttttaatttttttgtagagacaaggtctcactgtattgcccagcttagtcttgaactcctggcctcaagccatcctcctgcctcagcctcccaaagtgctgggattacagacatgagccactgtgcccagcccctgttttctttttgagtagttttctttttctttcttttgtggctggttcaataagagggtctccttttcctaagcaggcaaaggattttttaaaccagtttggagccctaaggaggagtcccaggggaaaaagagaggcttacattgatctagcccagttctcaaggcatcaaagctttttagtaataaagagatttgtggaggaaagggaaaatgattttttttattgttggaacaaaaaacggtctgcttaaacccaataatttgtctgtgtttaccgcaaccatctctgtggcttacaagaatgagttcatgactgtctgaattccaccaggcagtggtgacaataatttattttttaaccttgtgggaacttcacatgggctgactcccctttgaccccgcacccatcacaagatgattttttcctagaagttgcctctggggctgggcttctggagatgaaccccattctc

SEQ ID NO: 126452 - DNA, 114 bp, Homo sapiens
tgaaacaatcttgtgtctactggaacctgaaagaccttttccttgagagaatagaaaagaacagttccttgctgaagggaaacaaagaaaacagtataactgcttaaatagaaa

SEQ ID NO: 126453 - DNA, 239 bp, Homo sapiens
tgtatacgcgtggagcagtgaggggcctctggtcttcatagcatttgttctctactggtcaggtcccaggggagcattacagcctctgctggcagccactgaaaaccagaaagcaagcagaaaaggatatcgaggtgatgagaggccgtgggactaacagctgaaggtgtttcaggcatcagagaggcagccacacaggagggggatcagcagggctcagtgtgacccagagagatgag

SEQ ID NO: 126454 - DNA, 334 bp, Homo sapiens
gaatagtaaggattgattgtatggattgaattgtgtccctctaaagttcatatattgaagttgtaacctcccagtacctcagaatatgactttatttggagagagggtctttacaaaggtaatcaagtttaaatgaagtcattagagcaggtcgaaatccaatatgactggtgtccttataagaaggggaaatatggaaacagacacacatatagggaagatgatgtgaagagacatagggagaagatggccaactacaagccaaggatagaggcctggaaacagatccttctttcacagccctcagacggaactatctctgctgatgttgatt

SEQ ID NO: 126455 - DNA, 479 bp, Homo sapiens
tattgaaggtggggcctaatgggaggtgtttggatcatgaggacagatccctcttgaataaattaattctgtctcttggaggtgagttcttactcagttcccatgagagctggttgtcacaaagagctggtatctccccatcttcttgcttcctctctctccatgtgatctctgcacatgccagctctccttcaccttctaccatgagtggacacagcctgagggcctcaccagaagctgaatagatgctggcaccaggcttcctgtatagcccgcagaaccatgagctaaacagacctcttttcttaataaattacccagcctcaggtattcctttatagccacacaaaatggactaagacaccctatcactggagtccactcagactaccaggtgagataaatccaggagcttccaggttctttgttcttgattctggcaatgggtccaaataaaagacaatgaaaggatatgctat

SEQ ID NO: 126456 - DNA, 736 bp, Homo sapiens
ggagaaccagcccaagtctcaaaactgagcaacttgggagtcctatgttcgaaggcaggaagcatccatcatgggagaaagatgcaggctgggaggctaggctcgtctctccttttcacatttttctgcctgctttatattcgctggaagctgattagattgtgcccaccagattaaggctggatctgccttcctcagaccactaactcaaatgttaatctcttttggcaacacacacacaggcacacccaggattaatactttgtatcccccaatccaattaagttgacactcggtattaaccatcacaccatctaacagctctttcagcttcccctggctccctccccattttctcttacagatatttcccctactaaatttcttgtatttctaaccctgtcttggtgtctgcttctcagacacagctgtattcttaagacatccctttaagatcatcctgggaatttccttcactttttcttttgggagacctcttatttctggatcccaggtcttcatcattcttggtttacttcctttattggtggactacatcctccacatgggaggtaaattgttgaaaccttgcatgactgaaaactttattttaatctcaccctcaagggatgatttggctaggtatggaattctagtttggaaataatttgctctcagaattttaaacacattctccattgcctcatagttttggcgtaaatgttgagaaatacaa

SEQ ID NO: 126457 - DNA, 454 bp, Homo sapiens
ttaggaaatatcactccttgccaggtgctggtggctcacgcctgtaatcccagcactttgagaggccaaggtgggcagatcacgaggtcaggagatcgagtggctaacatgctgaaatctcgtctctgctaaaaatacaaaaaattagccaggcgtggtgacgggcgcctgtagtgccagctactcaggaggctgaggcaggagaatggtatgaacccgggaggcggagcttgcagcgagccgagatcgcaagactgcactccagcctttatcgcttcttactcctacctaaccaccatacacattacaagtgatgatatgaaaatccaagatacattacttagaataagatatgaatataaatatagtcattcttatgttcaaaaaaatgtatcggggtaatcattttcctggaagaatatacacagccaactgctagtattagtcatctctg

SEQ ID NO: 126458 - DNA, 337 bp, Homo sapiens
aactatgtgatctaacattgtaacagaaggtccagaaagaacagaaaaaatacaggacattacctaataaataaaacaaaaaaaatgccaaagactgaaagacaccaatccccagactgaaaggatctaaagggtacaaagcacagtaaaaaagttacatgtcaaggtatattatattgaagtttcagaatatcacacaaaaaaaggaagtttataaaatattcaaagagggaaaatgttataaacaaacggcaagaaatcaaaatggctttggacttctcaatagcacaggacatggactcatgacttcaaatctctgacggaaatgctctcaggc

SEQ ID NO: 126459 - DNA, 197 bp, Homo sapiens
cacacaaacatcctccaggatagaccacaggctaggacataaaaaatcctcaataaaatttgaaaagaaatacagaagctgggcgcggtggctcatgcctgtaatcccagcacttcggtaggccgaggccagtagatcatgaggtcaggagtttgagaccagcctggccaccttgatgaaaccccatctctactaaa

SEQ ID NO: 126460 - DNA, 234 bp, Homo sapiens
gtgtttagcagtgaacaagtcccagtgcttgcctttcttaatctcagggtgcagaagagttaaaatcagatgccagagtggctcatttctgtaatcccagcactttgggaggctgaggcaggtggatcgcttgaactcctgcttcggcctcccaaagtgctgggattacaggcgtgagccactgagcccaactttttaatcacacagattctagtagctgatgccatgtgtctg

SEQ ID NO: 126461 - DNA, 702 bp, Homo sapiens
ggcagacaaatgttctcaggcctatttttctactttccaaattcctttcctggctcagcaccttgctgcggccttagcccatctttctgcagctagttaacgaatccttgcctacgggtagacagaaaggtggtttttcctgttacatcttccccatccctccctgggaagcttcaatttcagatgtactttcaaatttcaagacccaaagaaataaatgtttaatgtggaatgacagacaatactttgatatttgtggggaagggtcctcgctcagcactcctccagtatcagttctagacagatcttggagaagagaagaaactcagcttgttcaagtggctcatcctataggaaatactttctccggcttatttctctgtgcctccttaaaatcaatctatgatatgccaaatattaacaaggaaaaaattatctccgaagaagacactgacaattttgcctgtgccctcctcagtcagaggcaatgtggggtgtagggagcatcgtagaactgtcagcgagttaagggataaacatgttgagatagattggattaaacagcattgttccaattaatcatgctgaatttagggccaggagacattagattctgctcttgattttgacatttacattctctgtgaccttgagcaggccatttcacgtgtttggttgcagttttttcatatgtaaagggct

SEQ ID NO: 126462 - DNA, 433 bp, Homo sapiens
tgctaagacaatatagttatgttgcttggatacagctatgtcatcaaagcaactgctagttactccttttggcttaagagcacaacaaaactcctcagacaccaagggcactatataccaggaaggcttgtgaacctctgtcctagcgagttattttatgtggtagtttccactctaagatacaaaggtgaaagctgttcaaggtaatgttttatggaaaatgtagcacttttttttttttttttgggtggtgcggagaaggagtctcactctgtcgcccaggctagagtgcagtggcgctatctggcttactgcaacctctgcctttcatgttcaagcaattctcccgcctcagccatcctagtagctgggatcacaggtgtgcaccaccatgcccagctaatttttacatttttagtagagacgggatttc

SEQ ID NO: 126463 - DNA, 197 bp, Homo sapiens
cccaaacagaagctccctgagatcaggatcctcgtcagcagtctgttgtattcccagtgtgtagaacagtgcctggcacatagtcataataaaaatagctaatctttatatatgcttatgatgcattaatatcagataccgttctaagcactttaccctcattaactcattgaatcctctcagcagctctgtgttat

SEQ ID NO: 126464 - DNA, 280 bp, Homo sapiens
cccttaaacccctgccacacctgcccccacaaaatccccatcctggatcgctctaagcaactatttttgcacttctacgtcagcctgccaagcactgcaaaagaaagtcgcacagttgtttaggtaggtgggggccatgacaaaaatcacaatctccagcctcaggtggatgcacggtcagtgctgcccacaagtccttctccaggccctagccagcaacctcccgttcccctgccaagttatctatttcaagctgtcttcacggtcctcaggctcccac

SEQ ID NO: 126465 - DNA, 347 bp, Homo sapiens
tcgatttagaggatcccctgggctggggaagagggctggcctgggagagggctgggctggggaagagggctgggctggggaagagggctggctggggacgaggggagataggttttgctgagtcttcttgctctctttctcttcctgtgtcagatgcttgtttcctctcctcaggaaggacatcagattctatgttcttcagccttggaatctgggacttaaaccagcagccttctgggggccctagggcctttggcttcagactgagggctgcactgttggcttctctggttttgaggttctcagacttggactgagtcatactactgtcctctctccctccccag

SEQ ID NO: 126466 - DNA, 351 bp, Homo sapiens
caaaggacacagtgaggctaaggtgacatccaaagagctatccacccatggctgccagcactcacgaacagcaggggcagctgaaggcaagggagacactctggagtgactccagcccaccagatggaaagcagggcagcctgagtctagacattaaactttctcactttcagacaagtgttgtgttactacagcatagtttttaatgtgagtcacaagataattgtaaaaaacaaaaaccaatgattatctaaatagacacagaaaaagcttttgataaaattcaacacgcctttgcattaaaaactctcaataaactacatattgaaagaacattcttcaaaataataa

SEQ ID NO: 126467 - DNA, 107 bp, Homo sapiens
cccgtaagtgtccattagtgtggaatgatgaagtaggagagtgttaaaaattgcaaatattagggaatttctttctctgtggcttaattacaagaccagcagtgata

SEQ ID NO: 126468 - DNA, 149 bp, Homo sapiens
atatctgagcaagtatcccccagggcttcacgtgactctcacatagccttgtcctcctcctcctctgctgtccgcagccctgggtggagggcctgcagtggggagcttgtcctgcatcagcacctcagaggggcagtattccctcatcc

SEQ ID NO: 126469 - DNA, 816 bp, Homo sapiens
gttactgtaatcaatactataggcaattataacacagtggtacttgtgtatctcaaatgtgaacacagaagaggtactgtcaaaatacagtataaaagacagaaaatggtgcacttgtatagggcacgtctcgtgaatggagcctgcgtactggaagtgtctctgggtgagtcagtgaatgagtaatgagtaaatgtgaaggcctagtacattactgcacattactgtaggctttataaacatggaacacttaggcaacactaaatttattttaaaaaattgagttatggcggctatgatgtcactccgtgataggaatttttccactccattataatcttatgggaccaccatagtataaaatgtcattatgctgcatgtgacagtagtctgttcctgttttttgtttgtttgtttgtttgttttgttttttttgttttttttgacagagtctcactcggttgcccaggctggagtgcagtggcacgatcttggctcactgcagcctccgcctcccgggttcaagcgattctcatgcctcaacctcctgagtagctgggattacagacatgtaccaccatgcccagctaatttttgtatttttagtagagacggggttttaccatgttggccaggcaggtgttgaactcctgtcctcaggtgatccgcccacctcagcttcccaaagtgtaggctgtttctttttgttgttgagtagtattccattttaggaagtactgcagtatgttcattcatttgatgggacatttgggttcttctcatttttttggcaatgtgaataaagtcactatgaac

SEQ ID NO: 126470 - DNA, 709 bp, Homo sapiens
gcacacaacgaaggagaggaagaagggaggaaggcacttcacaagcagagctgagccagcagggcagcaaggcagaaagggactgagattgtacctggaagtatcccagtggctggatattcaagatcattatgtccatgccagagaaatcaagttataccaccacttcttggccttttgcctaagatcaagtgtagaaatcaagttaaaccaaaccaagtgaggatttcagttatttctctgaaaagctggaagtagtctctttgaaaaccagtacaagataaggatgccctttctttccactcctattcaacatagtattagaagttctggccaggacaatcaggcaagagaaagaaataaagggtatttaattaggaagagaggaagtctagttgtctctgtttgcagacgacatgattgtatatttagaaagccccatcatctcagcccaaaaacttcttgaactgataagcaacttcatcaaagtctcaggatctaaaatcaatgtgcaagaatcacaaggatttatttacatcaacaataggcaagcagaaagccaaatcataggtgaactcccatttataattgctacagagagaataaagtacctaagaatacagctaaaaagggacatgaaggacctcttcagggagaactacaaaacactggtcaaagatataagagaggacacaaagaaatggaaaaa

SEQ ID NO: 126471 - DNA, 489 bp, Homo sapiens
aagcaaacttggggctataaacagttaacatgtgtccacatggaaagagtctgtatgagaaaaaatccaggcagaggcaaatggaaccaaaaatgaaaaatcaaagcaaagccctggtgacactgaagttctgaaccagccatacctgaatccagtaagattatcacctttagattttccagttgtatcagttatattaagcaacaaattccttttgttgctgtatgcttccgatctaacctgtgaaaggtggataataatactacctaccttgtagcatgtagcaaggactacgttaaataatatgtacaaaacaaagcagagaaacgtatcaggtagctgttgctgcataacaaactattacaccttcaaatttgtgttaaaacaatcattcactgagatcacaattctgcatgttgtctggctgtttgggttgggttctgtttggtggttattcccatctcagctctgctcactcatgcatcttgg

SEQ ID NO: 126472 - DNA, 359 bp, Homo sapiens
aagcaatctgcctgccttggcctcccaaagtgctaggattgcaggcctcagccaccataccctgcccccgataccttcttttgatgacagcagtcaccaattcagaaaggaaagaaggctctgccaagagtgcctgtaacatgagctgagacgataagaagttggggaaaggtgggagacagcaaagagctaatggcaagataggcaactggttttttgtaaatgatgaaataaacataaaaaataacagtcatgttaatacatatataggaaaaaagaatgaggtccaaattatagagattgaatctgtagggtataattaggggaaacttctacttactaagatttccttaaaaagg

SEQ ID NO: 126473 - DNA, 713 bp, Homo sapiens
tatgactagtctaatagcttaaaacacatatatatccaaagtgtgataattcattgcagtaattccttcatgtcattttgatacaagttgccagcccttactctataggattaagaacaatccagaaaaatcagaagagctatgtatctagatagcctctgaccttgacagagggaagacatttatctgatacaatgatcagtgtaataggtagcttgtcctcattgaagctttaagaacactgaattgtacataaaggagagtcgtggtcttaactatgctgcatatgtgagtgtctgtgaaagtgtgtaggctttctttcttagctgtaaaaccacacattagaggacacgatagtgttggctaaaaagccaactgcctaatatttcttttctaatgagatacagtgttgggtttttctttctaatttatgcaaacggaatatgtttttttaatacttcatggagccttaagttctttttttagcaagttgtaatttgaagaatgccaagtgcttgggctccccccattttttgtttttcttgattacccatcccactcataactgttcctcctcttctctttcttttttttctcttcttcctcttcttcctcacgtgcctccctagctgcttccctgattctttccttccccttcccctctttttctccctttccttactcctttcctgccttcctgccttgtatgcctt

SEQ ID NO: 126474 - DNA, 278 bp, Homo sapiens
aattttactgacttaacaagaaaaagataaaagagggatgggcaaaaaggagatgaaaattctgattcttatccatcttccttggtagaacacttactttgctgaagaaatgtgatataacaccaactcagctggttttagcagcaacaaaataaaggaaaaataatcaaaatacaaacaaaagccaaacccaaggtttgcctttggaatatgaaagcatatatgcaaacaatatttcatgtggaggttttggccttaaaatgaatcacatgaaggtg

SEQ ID NO: 126475 - DNA, 745 bp, Homo sapiens
gattaatgcccttgacgtgaactctacaagtaatcaaggttcaaaccttgtgatttctagtttttaggataatagcatccaccaggagaattcacatgaactctgtttcctaatgaccagtctgtcctaccatcacttcccctgaccagaggccaaactgtttttcacagattagactcaaccatagggaacaagctggaaactcaatatagtcttcttattaccaataatatcatcctcatcataaaggacagaacctttctgtctgtttggcctacttacctagcacaacaaaatagtttagatttttaaaattttcattttgctgaagtattctcatcagaatcattatttcattattttccataggaaatttttttcatgcaaaccaacaacttgcaattttccatgtaacatttttaattcttatttatttatcgttttttgttcataccaaccaattatactgtctgcaattggaaatttacttttttttttcgagacagagactctgtcgcccaggctggagtgcagtggcgcgctctctgctcactgcaatcctgcctcagcctcaaaagtagctggaatcacaggcgcacgccaacacccctggctaatttttgtatttttagtagagacagggtttcaccatgttggccaggctggtggtgaactcctgacctcaggtgatccacccacctcagtctcccaaagtgctgggattacaggcatgaaccaccatgcc

SEQ ID NO: 126476 - DNA, 658 bp, Homo sapiens
cgccacacacccctgcactgtgtttcctcaacaaccaagcctgggaacattcccaaaagggtccaggaagcagctcactcagcagacgtttggtgatttcagaaaacaaaagggtcggcaggtcacgtccatcagctccctgaagagtcctccaggatcacgcctgctgcgtggcttggcacaacctgcatcacgacaacacggactttccatctttactgtccttttgatcacttctgcagggggatagctcaacttacaaaccacgtaaatattttcctttcggcaccaaactttcccctggggagctggaagcccagctggggtctttttgtctctggcctccgggtccagggctgacctgggataggagcatttgtaccagcctcccggagttgcagtgagaggtaccggcaggtttcagggacaggaggctgttaggactgccacccaccacatctggtgtgagggaccacaggatggaagaaggcagatatgcggagttctgaggcaggttatgtgggcccttggagttgctgaaccaaagtacacctgcaatcataaagccaattaagatgtttgttaaagaggctgggcatggggccgggcacggtggttcacgcctataatcccagcactttaggaggccgaggtgggt

SEQ ID NO: 126477 - DNA, 331 bp, Homo sapiens
actgcaccctagaccttggaaaatcttatggcttacactaaaactaatcagccacttttaaacagaaagacgtttaaagaaatcactagaataggctgggcacggtggatcacacctgtaatcccagcactttgggaggcagaggtgggtggatcacctgaggtcaggagttcgagaccagcctggccaacatggcgaaaccccgtctctaccaaaaatacaaaaaattagccagacttggtggcgggcacctgtaatcccagctactcaggaggctgaggcaggagaatcagatggagtgccagtctcaaggttactgatagattagaga

SEQ ID NO: 126478 - DNA, 773 bp, Homo sapiens
cattgttctagtctctcaggcaagaaattcagacactctgaactcttttctcacttcctctctatacctgctgtgtcagcaaggcctgcctcagcctccaaactcccagtgctgtgcacagctatgcttgatctctggattctctgctcttcaacctgtcatggccttccaaacctgaaaatgctccctgtgactctatgccaggctttaagtcccttcacaaacttggtatgcccttttctcatccttattcctggaagcccctcaaaatcttcccagactcaacacatctctgctatggattttacctctaaacattccctgcatttctaaatgatactttatgaattacaacttaaggatgggaagtgtgactccaaggtaactggactaattctttggtgttaggttctggttattggtgtagccacctctctcattaaatcatgaactttactttcctgtcaatgtgccccgcacctgacagtgccttccttgtccgtcgtagaattccaaaactgtcctaggagttgggcgtcaccaccaatgtgctttgtgattcttccagatgtgttagttctgttagccagctagataaaaatatttttgaagcaaaaccatacacttctattccctcctgctcccttggctgctcaggaaatactttttgagtgcctgaccactcagagtataaataatttatgtgtttttttatattttgtctttgctaatgcacatgcaaaatgtttgtattttataggtgcttatatata

SEQ ID NO: 126479 - DNA, 224 bp, Homo sapiens
catcatcctctcaatgaggtcttccctgaccaccttattttaaaattccaagtcccccatctatagcccccttatcctgatctactttcctgtttttccagagaaccccctgcctttgaacacacaaaacatttacttcctgggtttactgcttgtcagctgtgtccactcctcccactcctacccttagggtaagaatctttgattgactcattgatatgtct

SEQ ID NO: 126480 - DNA, 367 bp, Homo sapiens
ccggggtcgactactaccactaaattcgcggccgcgtcgacagatttaatgaaattaaatctcaatgttgagttgacagcgttttcatattctatgtgctaaaatgggaagtattcctgctaccaaccaaagtaaaatgcatgtctccaggaaaaacacctgtgcaatcattttatttgctttttccagcaaggcttattaacagacaagccttggttattcaaatttgggaacctgacagacatttttctcaaaagcgtatgaaatgagcttgttgctttaaagaaaatatacaagaacacaggatggggttgaatattttcttcatgtcgaccggccgcctatttaatagtaataggccgccagc

SEQ ID NO: 126481 - DNA, 496 bp, Homo sapiens
ccggggtcgactactaccactaaattcgcggccgcgtcgacagatttaatgaaattaaatctcaatgttgagttgacagcgttttcatattctatgtgctaaaatgggaagtattcctgctaccaaccaaagtaaaatgcatgtctccaggaaaaacacctgtgcaatcattttatttgctttttccagcaaggcttattaacagacaagccttggttattcaaatttgggaacctgacagacatttttctcaaaagcgtatgaaatgagcttgttgctttaaagaaaatatacaagaacacaggatggggttgaatattttcttcatatatttcaacaaaaataacatatcacaacagactgaaggcagacacatatatgataatctgtcttcaattaagccagacattaaagaaattttcaaaaatgtccaacaatgtcattcttctcattagttttaaaaagtacccctttttgttgctgttgttgttgagac

SEQ ID NO: 126482 - DNA, 231 bp, Homo sapiens
ttttccatcttcaataacaacttattgaggcacctactgtgtggcaggtactataccaggcacaactgggtatgttctaacaatcatctggtaggagagatgtaaatatgtgctacatgaataactgctacattagaaaacgggtgacaatcaactaaggaagacaaaatgctacagaaattcaaagaacatacatcaatgaaggcatcataataaaatcttatttggagg

SEQ ID NO: 126483 - DNA, 313 bp, Homo sapiens
aagtctctcctttctaccccactccacaatgagcctttctttctcagattgtgcagctcacaaatctgctccacatggatccttccagcagggatgcagcattgtctatcattttctcattgtctcacatatctacgtcatctctcctaactagactaagagctgttaaaggcaagcaccaattcttccactttctgagcagcccccacagtagccgaagaggaacaggacacagaaggaatttaagcatttactgatttgttgcactaaagcagaatcactgtgtaagctatatcctcatgaaagaatggta

SEQ ID NO: 126484 - DNA, 155 bp, Homo sapiens
gggattacaggcatgagccaactgcgcccggccatgtattggcttattctgccaatgtttgtgtcttgccttagtaaagtatgctcctcgagagttagaatagtgctttttacatctttatatacatacctacagtgtccacagcactgtgctcg

SEQ ID NO: 126485 - DNA, 712 bp, Homo sapiens
tctttggaggagcttacttaatatttcctaaaggagaggttaagtaggttgtctttggtgcgttagttatgcagagagaagagaaatgtaactctcctgactccagggccccaaatgcaaacactggcctagttgttcccaaactttcttcttgatgtggatgacttgaatggtttattttcacttgatgagccacacccccaggccactttagtattcatggcagaccccaacactaagtccctttgttgtctttgttttttgcatttttttgttaactagaaaagataaaattatgagagacctgattatagactgaggttctgttgctgatggttcccaccacttttttcacatctcagagaaaggcaaaggcctggatgggcaacagaaaacagcaaagcaaacataaacatcacatcacgtctgagcatcagcgtggtgctaccagagtgggaagggatatagtcattatcaaaatataaagatggttctttgccaaaagcattaacattgtcagcattttaaaaagtttgaagcttgctgtagaagcaatggtcttttcttcaaggaaaaaaaatcttttttcttgaagaaaaggaaaatggattaagaattttaaaaatccgcattattgttctgacctagacattaactaagtgaatgacatttaggcaagtagcttaatttgtctgtgtttgcgcatgtgtgc

SEQ ID NO: 126486 - DNA, 798 bp, Homo sapiens
gcgtgcgcggctggaggcggagcgagccggctgcgcgcacggcccaggggctcccgccagaacccgagcccacgcacacaagggtcgcggggctgggaagctcgtcatccaagcccgtcagggagcccccccatcacccgaccgcgaaaggctgagagaagggagggttcgtgccaccaggtcctggtcccccggctagatgtggtgggcgcgcgccccgactactcgtcccacgccccccttcctcttcccgcgcgcccctgaggggtgactgggttggtgggcgggcaggagcgcacctgggtccgtcctctcagggctcgctcgctcgctcgctcgctcaggcacgcgtgcgcagaagggcgggaagggagaggagacacgccggggcccagcgccggccggcctgaccccctcagtctgtctctatgggcgcgcgccgacagcctcgagcaccggacacggggcccggctgagggtgcgcgcgcagaacccccgggaagcgtggggggcgaggcgggtggcgggaaagatgccgcgcgcaagtcaagcccgccatggcgacggggggaacatgtgcgcggcgtacagacaagctaggtctacacctcttcccgttaaccttggcgttacctaccgaggaagcgttgcggaaaccaacagcccacgcattcccgggctaaggaaggggggaaggggcccaccttattgggccaaccggagctacccgacggccttttacaactcaccgcgtgagagactgggcgagtaaactggcacaccagactatgctctacg

SEQ ID NO: 126487 - DNA, 107 bp, Homo sapiens
cgtccggagcagctaggactccaggcatgagacaccacgcctagctaattttttttttttattttgtagagatggggtctcactatgtttcccaggctggtctcaaa

SEQ ID NO: 126488 - DNA, 299 bp, Homo sapiens
caatgtgtaaatgctgattataagtctggggaaaaaatcataagattggtggacagtctctagttcttgaaaagtacagggttgagctgttttgtttctgttgtggtgatagttgtggttattttccattaatacaaaacagtccctggtttggagaacaacttctgtaattcaaagtacattgttatagtccaagtcactgctcagtgaatgtcttggtgtgcaagactattaccttaaacagttttatatctgtgggttgtattcaggtcagttttagctttgggacagaggtcagc

SEQ ID NO: 126489 - DNA, 225 bp, Homo sapiens
aataattgatatgaattttcaacctaattcacataggcttttggcatggaggtgaaactgtacaacaaagtaggtagaagacagagtgagagaagacacttcctggaaaagtttattcatccactgctcatgaaacaaatatttactgaactcttagcatgtgtcaagggcaatgctaagtgcttgatatacatcaggaacaaaacaaaaagatatctgccctgg

SEQ ID NO: 126490 - DNA, 419 bp, Homo sapiens
ttacatttatacagctaggaatgtaaaaaccatctacttcagtaagaaaatggcaaaagtcattattctaagtaactcgggaatggaaaaccaaatattgtatgttctcacttgttagatgggagataagctatgaggatgcaaaggcataagaatgatacaatgcagtgggctcccaaaccccctgccatggactgttatcagtctgtggcctgttagaaatcatccacacagcaggaggtgagcaagtatttccgcttgggctccacttcctgtggagtacaagagtactggagtacaatggcacaatcttggctcactgcaacctctgcctcagcctcccaaatagctgggattacaagcatgcaccaccacgcatggctaatttttgtatttttagtggagatggggtttcacca

SEQ ID NO: 126491 - DNA, 846 bp, Homo sapiens
gggattaaaaaacatcgtggctaactttatagacaccataagcaatttctcagatggtgactgctttggaatatttggacatgggtcactgtagctgcatgctttttatatatgcaaaaagtaacatgaaacccattttgcaagactgcagaatgcactaaagtaataatttatggtgaacaccagcagtcaccaaaactcccactgaatcacattgtaattatatggagaaaacagtatttgtgttctcaaatagaatgttgtatttttatacaagtcaaaagatgttaaaaatgtgccataagaaaagaccacgctgtggattctaaagttttaaaaattatagtaccaagaaattaagatttatatatttttgaattactaaatatctagattgaccatatctatttttgttttaattttccctaaatattctgaaaatcattttatagtttttaacacaccatcatagtttgtgcacggatggccacctttagtgtgtgatttcagtgaagttcccattgaagttatttataagcagtggacctattttacttcttatatttgaacttcttaagaagtttcttgaccaggcatggtggctcatgcctgtaatcccagcactttgggaggctgagacgggcagatcacctgaggtcaggagttcgagaccaacctggccaacatggcgaaacttcgtctctactaaaaatacaaaaattagctgggcgttgtggcaggtgcctgtaatcctagctactcaggagggtgagacaagagaatcacttgaacccagcaggtggaggttccagtgagctgagatcgcaccactgcactccagcctgc

SEQ ID NO: 126492 - DNA, 333 bp, Homo sapiens
ccatgcagctactatgaacaatttctccctctttcttctcttatttaaaacaagtgtaacctggaacactcagataaaagtatagaaatgggacagatgcatgcgctacatgggccaagagttctgtgacattttccacgtttgtgttttaagtgatggactaaaaaagccttccagttattaagtctaattactcttcttgaatgttaatttgccattaaaagacattttttcaaacaacctaaaatttccaccactggtcatgagtaggagaatggacccagacggacgtgcagacagttccttttagcagcggtctctatgacagtcaag

SEQ ID NO: 126493 - DNA, 546 bp, Homo sapiens
actgcaggggttggtggagatgaggccaacaggcgttcagggataccagatcaccctccagagaaggaacagctcactctggctggctctgcctggaacatctgttacttgaaacagttcgtgcacaggatggaaggggtgagggcttgactatgcagccagatttctcctgaattcatgctactccaaaaagaccgtgttgtgggttagaacttgatgctggccatgttccaaaaatagccagacccaagttcagtaagggcacgaatttctcagaacaaaagctgccccatctgtgcttgccttgcaggctgctcttcttacacatcacagaattcaattcaaatcatcacagtgacccagctactgggaaggctgaggcagaaggattgcctgagcccaggagttcaaggccagcctgggcaacatagcgagactccatctcttaaaaaaacaaaaaacacacctgtaatcccagcactttgggaggccgaggtgggtggatcacctgaggccaggagtttgagaccagcctggccaacatgg

SEQ ID NO: 126494 - DNA, 382 bp, Homo sapiens
tgcagttttgattgcatttccctaagtgactaatgttgttgaacaccttttgatatgcttattagccatctgtatgtgttctttggagaaatacttattcaacttctttgcctagtttcaaattgaggtgtttgtttttttgttgttgaattgttgagtttcagatacatgatttgaaaatattttctcctgtcctgttggttatcttttcactctcttttaacaacgtcctttgatgcacacaaattgtagttttaaagaattctactgtatctgtgttttctttcattgccttagctcttggtgtcatgtttaaggcagaacttccagtactgtgttaaacagaagtggagaaaatggtcatcattgtcttattcctgat

SEQ ID NO: 126495 - DNA, 529 bp, Homo sapiens
tatcaaaggtcatctatcatgtcatcctcaactttctggaatctgtgctaaaagaaacccctatggaattgaggctcttgcctgcgtcctgcctgcactgccttaggttgaggcatgtgctaagcagattctggagatggtgaaaaccctaacaactttccagcacctctaactgcttctgcctccgctaatctggtcctgggcagtggggggcaatgggggaaggggatgaggtgtcagaggcccggacaagttcgtaaacccccagacacctgccagagcttaaacttgcgtcagagtctgtctccaccaaaatgaaagaaaccaagagtgccacacccaaatcacagtagccggagtgaaaaatatagctctgacacaggccgttggctctggggaaaattctgccgatgaaccatactgagactcaacgttgtttatcttctatagttgcagtcttttttttttttttttttttttttttcccctttggggcccggccgcccggttcggggggccttttttctca

SEQ ID NO: 126496 - DNA, 360 bp, Homo sapiens
agggcccctccccagctgctcccgggggcgggcaggcgggtaggtgtggatggtgcagagcccgaaccagcgaaggtccaccctgtcccctgcctggccaggcccaggtgctccaggggcgtcaagaaaacagaaccagtgtctgtcccatctggttgcccctggcctgaggaggagcccccagcctgttggccacccacctgggaactgggtactgaggctggagaccctgggctgccgtagcagcggttgggccggaaccttcagacgcccggagcgaggcccactcacgagcatcgtgaggagaggcagatgtcccggccgcatccccacagggaaaggctgtccaggggcccagcc

SEQ ID NO: 126497 - DNA, 179 bp, Homo sapiens
gagacagggtctcaccatgttgcccaagctcatcttgaactcctgagcttgagcaatcctcctgcctttgtctcccaaaatgctggggatataggtttgacccaccatgcctaacccatccttcttattgatctttgtagccacagataattatttcaaaacaattaagtgatactctt

SEQ ID NO: 126498 - DNA, 330 bp, Homo sapiens
gcagcagcgggtgctgctgggaacgcctgccggcgcctccacacgcagagatacgcggcgccgacacgggaggcttcgtcctgccggcgcctccacacccagagatacgcggcgccgacacgggaggcttcgtcctgccggcgcctccacacgcagagatacgcggcgcggacacgggaggcttcgtcctgccggcgcctccacacgtagagatacgcggcgccgacacgggaggcttcgtcctgccggcgcctccacacgcagagatacgcggcgcggacacgggaggcttcgtcctgccggcgcctccacacccagagatacgcggcg

SEQ ID NO: 126499 - DNA, 470 bp, Homo sapiens
gggcgggtggggacccttccagtcaagctgggggcgcagacaggggccttctccagggctcccctgtttacccacagagggatgggcttcctggatcctgtcccagcattacccagtaaaaagaatcaagccacctaggatgtaggtcacccaggggtcaaagtggttctgggctgggtcacctcctgtataaggctttgcatagtgggaggcctgggggctgagaggccactagcaaggaaagacaagcatacaaaagccaggctccctctgaccgcttagagggagaacaatgaagccagggacggctctgctgggtgctgggttctgagacacagagctcttcttcaggcagggtctgctgattcagcagggctgagcaaggatcctatgactcggagatgtcacccatgcgggcgtaggcgctcagagggagggtgaggtggacaaggaggccccagccacgtgtc

SEQ ID NO: 126500 - DNA, 597 bp, Homo sapiens
tagctgggactacaggcgcccactaccacacccagctaatttttgtatttttagtagagacagggtttcaccatattggccaggctggtctcaaactcctgaccttgtgatccgcccacctcggcctcccaaagtgttgggatcacaggtgtgagccaccaagcccggcctcttttgaaaattttaactgatgtacatagaaattgctggcaagaaatttggaactgtgtattcacttggagtctgcttaatttttatgtatctacacagcaaaggaaaatggcttgtcggctataagttttgttcctcatgaactgaacattttactcctcctgaactaaacagaaaggcatgactggtggtactttgagtatgctgtaatttttttaattttttttttttaattattttttttaaaggcagggtctcattttgtcacccaggctggagtgcagtggtgcaatcatagctcactatggccttgcacatctgggctcaggcaatccttctgcttcagcctcctagtagctgggcgtggtggcgggtgtctgtggtcccagctactcgggaggctgaggcaggaaaagacttcatctc

SEQ ID NO: 126501 - DNA, 369 bp, Homo sapiens
tcctacccacccccttactctcccctctctgttggccgctgtctggctccatcccatttctgtgggtacgacttctggggtttcttgtcctgtctgctcctgtcgcaggtccgtaagtcacacccctgatggtgagaccctcctgctaaccttcatgatttccttgtgactcacttgcccattcagtggcttctgaacttggggctggccgtctcctctggaccttgtttgtgtggtgttggggaggccgttggaagagaagccaagaggaagggactgagggcaagtggggggtgcaattgctgagggctaggtctctcctgttctgagtgtcttgtgtgcggaggccttgaagggctacatgctggg

SEQ ID NO: 126502 - DNA, 319 bp, Homo sapiens
agagggtagagtcaagatagtagtatcagtactcagtactgtatgaccttaaacaaatatttaaccactctggatctcgatgtgtaaagtgagcataataatggtacattctgcataaggtcattttgaaaactatatgagttaggctggatgcagtgactcacgcctgtaatctcagcactttgggaggccgaggagggtggctcacctaaggtccggagtttgagaccaacctggccaacatggtgaaaccccgtctctactaaaactacataaattagctaggtgtggtggcagatgcctgtaatcccagctactc

SEQ ID NO: 126503 - DNA, 226 bp, Homo sapiens
ttcaaatgcaccactcacatgcttgccaaggggcctttgctctgcccagaactctttttctccagatatccatatggttcatttcttcccttcctgaaagtctcaactgacatacacatcaccctattaaagaggcctttaagatgcatattccccctttgaaagagtcccctcttctctacccttgtcaccccctttgtttcttctttcaagctgctggtacttc

SEQ ID NO: 126504 - DNA, 488 bp, Homo sapiens
tatgtagcctaggtgtgtagtaagctatttcagctaggtttgtgtaagtacactctgtgatgctcacaatgatgaaattgcctaatgacacatttctcagaattatccctgtcgttcagtgatacatgactatcgttgcttaataaatgggaggaatggtcgttgttataaagcctgactttcccctgagggtcattcattcacctccacttctcccctagagtctttaagggaacttgccagtggagatctgccatgatttggggttattctccactcagtttagaatgacattgcaagattaatgttggagtcagatgttatggccaggaagattgtgtatttggtttgtgaagctaaactgtggttcaggaattggaaaaggaactatcctttgagttcaaagtgtactcagctaaagatacttggtatgtgaggtacagaagccatgcctgcattttccactgtcctggcctacatagtaggta

SEQ ID NO: 126505 - DNA, 294 bp, Homo sapiens
accaccacctccagcatcttgcttccacctactattgaagtacttattatgtgttaggcattgtactactagcttaactatattatccctttttaccatcaccacaaccccatttacaaatgaggaaactggggatgacagaaatgaggtagtttgtccaaactcatatggctagtgtgcagcctggctgcaaacccaagcattctggctccagagccttcactcttatcaattgccatgctattaccaactgtcttgctttaaaaaagaaaaacaaacaaaccgctttgggcg

SEQ ID NO: 126506 - DNA, 308 bp, Homo sapiens
ctatgcttgtattgagtggaacatgttcctttatttcctgcaaccaaagcattacagataaaccacattattaacaaattagctagctgaggccactgctctccaagccaccataagcagtttcaactgcaccaaatcaaaccatgaagaaattcaatcttgcccccacatgaaataaaaagagcacttttatgatatccacagttatctgttaattcagtaaacattcatgaacatgccactgtgagtgtaaactagttagacaggagggatcaggaggttggaccaaaatggggtttacgcagggg

SEQ ID NO: 126507 - DNA, 375 bp, Homo sapiens
catgcagctggagaccctggggaggagctgatgttctagtttgagggtcatgcagctggagaccctgagggggagctgatgttccagtttgagggccgtgcagctggagaccctcgggggagctgatgttcctgtttgagggctgggaagctgatgatctggtttgagggccgtgcagctggagaccctcaggggagctgatgttccagtttgagggtcatgcagctggagaccctgggaggagccgatattccagtttgagggccgtgcagctggagaccctgggaggagctgatgttctagtttgagggtcatgcagctggagaccctagggagagctgatgttcccgtttgaggattggggatctgatgttc

SEQ ID NO: 126508 - DNA, 376 bp, Homo sapiens
ccttcagtcttgtatcttagtttatggaactgcctactcaacacctctaccctgatgtctaacgagcacctcaaataacatgtttcagtgagtgatgccaccattcacccagtcgctcaagctccaaatacagtaggcatccttgtttcctccatcaaacccactgtcaagccaccagcaaatattttggctcttctttcaaattctatctcaatctgaccacttcttatcacctccactgccacaaccctagttcaggctattatctacttacctggactactgagatagcctcataattgctttgttttcgtagtccattcaccataaagcagtcagttatctttttaaaaacacagatcatatagtttcactc

SEQ ID NO: 126509 - DNA, 242 bp, Homo sapiens
aggcatcaatgtgagaaaaggaatggcttgcgtagagaaccacaaacagtttgggactgctaggaatataacaataagtgatgagttgtaaggctggaaatacagtcagaggccatgtcgtggtggaccttgtatgcataagtatcctaaaatcaattcagtaggtgttttttttttatttttatttaatcactggaaggtgtctatcagacatggttgaagtaacatttttaaaatgtggt

SEQ ID NO: 126510 - DNA, 698 bp, Homo sapiens
gcgactctagaggacccagcgggaaacaacacttaaaactcaacaacaagaaaccaaacaatccaattaaaaactggtcaaagaacttaaatttgtcaaaaaacaaaacaaaacaaaaacccacaagggccagtaagcacataaaaagatactcaacatctttaatcatttggaaaacacaaatcaaaagcacaatgagacaacaactcatcccattaggatgggtactataaaaaacaaaaacaaaacaagttttgaagacacatgtggagaaattggaacccttgtgcactgtcagtgggaatacaaaatggtgcagctgctatggaaaacagtaaggcagttcctcaaaaaattagaaatagaatcaccaaatgagccaacaattccactttgtggtatatatttcaaagaactgaaaacagggtctctaacagatatttgcttacctgtgttcatagcagtattattcacagtagccaaaatgtagaagcaacttaagtatccattaacagacgaatgaataaacacaatatggttctgtgaatgtatgggaaaaacaaattcagttcctcctatactgtcacaatacaaaatacttctgtgacctcagatcttgttagttgtccaccccaacaccatgcaagcaatcaattctgcagcaaacaccagctggttgctaccaaattcaattcaat

SEQ ID NO: 126511 - DNA, 526 bp, Homo sapiens
tgtgaaatgggatgttgctctgcatttagcctagaatcacataattttagaatgggaaaagaacaaaagatatggtaggactatatttttcaaatcaagaccaaatcacgtggtttaaaagaggatttcaggccaggtgcggtggctcacacttgtaatcctagcactttgggaggccaaggtgggcagatcaagagttcagaatcagcttggccaacatggtgaaaccccatctctactaaaaatacaaaaatagccaggcatggtggtgggtgcctgtaatcccagctactcggaggctgaggcagaagtggcttgaacccaggagtcggaggttgcagtaaggtgagatcgcaccacttcactccagcctgggcgacaagagtgaagctctttctcaaaaaaataaaagaatagggcaggcgcggtggctcaggcctgtaatcccaacactttgggaggctgaggcgggtggatcacgaggtcaggaaatagagaccatcctggccaacatggtgaaaccctt

SEQ ID NO: 126512 - DNA, 166 bp, Homo sapiens
taaaatgtataaaaggtttaatttaggcagatacagcttagtaactgtacaagttctgaagtctgactacttagatttcaatcctagctctgccacttggtagctttgtgacctccgtgagtaagtgcctgaacggagctgtgcttcagttccttaactgtaagat

SEQ ID NO: 126513 - DNA, 205 bp, Homo sapiens
gagggtatgtggggggactccagaagtaaaggagaaagcaaaagatgatagccaagctacatagtgatggctgaagattgtcttttgtgttttgttttgtttccattttccattgacaatatctgctctgctaggatataaacccccatctgtgttatcaaatgtgcagtgaagactgttacacataaagtccccatgagggttt

SEQ ID NO: 126514 - DNA, 484 bp, Homo sapiens
agattatttatttactttaagagttaagagtggcggtttggggatagcaccaggagatatcagctgtgatggcttggagaaacagtgtaaactggcagtgtaaacaagagcagggcatgtatgagtagttgagaacgctgaataagagtatgactagacagaagatagtagggatgacaggtttttgggggcacagtctaagttggtctggtgtctggaaggagactggggcctaataaaaaggagcgtctatacaggagcttaaatgggctgtaccttgtagcattctgaggacaggcctgaattctgagaagcgaaagtggtaaaagtattgtccagtcctttttgagttggtggctgagcttcgtgaggtgtgtttttaatagaccattagtctgtcactggatactaagagcctgaaaaaaggcttggctgatttgactaataaaggctcgtctgttatcagactgtattgaggtgggaa

SEQ ID NO: 126515 - DNA, 595 bp, Homo sapiens
tctaaaaccactaactctcacgcatgtgcgtgcgcgtgcacgcacgcgcgcgcgcgcacacacacacacacacacacacacacacacacacacacacaaaatatccctcatagacaacactttataattcaggcaaaggaagaccaaaaggagaacttaatacttcttatttattccattcaacagtaaagtgccttaaaaaggccatgcaattatattgttatgtgataattattaattctgctatgagcttccactgagcccagatcccatcaagcacctctaattttgcctacaagtccttctgtaccacctgatgggtgctgggaaaagagctgcccttctcaactcctggcatttggctttgatgggtttccactgcatatgccttcctttttcatcagccaccattttctaacatctttatgcataaaaaagacaaacttattgggaggaaatatcacaatcccccaaaatgcaattttcttcctttccatctccaataaagcatgtagtggaaaagttattagacatttttcctagtggattgtttgtcaataatattaacaaagccagtgtgttgaatacctgtata

SEQ ID NO: 126516 - DNA, 296 bp, Homo sapiens
atactttattttaaaaatttcactcttagtacaaagactctctcacagtgcaccaggtgttaaaattatgcaaaatggggcatttgtccagtaggcatcctacttgggggatgccaagtaggctccccttctgtattttggtatatctcggggagcaatttggacctgatgacaactccaaatctgggtgactcatgatgggaagggcagaggttaaaggaaaacaagtttaagtgtacataaccccttttttggattaagaagctaagcaccacaacttctcacaatttcttccc

SEQ ID NO: 126517 - DNA, 618 bp, Homo sapiens
atgaatattgtatcacccacatcaatctttataaccctgtatttcataatctatatttttaacattttacacttgtattaaccatatgtattattacgtggtttatacatgtatatataacataaacatattgaatatgtagcccatctctccaactggtatcatatcctatacaaagaaatattccttgacccactgagttggtccttgcgctccagttttaggtactcctaatgtactttttcttcagctttacatttattttgaggttattttgttcctgtttatgttgtgaatatttgattattttctgtctctgccattacattgtaaattcagtaatgtgtttttacctaatattgtattcccatagcctgacacagtcatcacccaatatgatcttgtttaataatgaatgaattcataaaccagacatcacagaggctagaagacaaattagaaaaaatacttacaggaagaacacaactcataaaccatatttgctttgacaccaccagcatctgtggagatttaagtgggagtcactatgatgagaagattgctttgagtcgagtccagcaaaaggagctacttcaataattaaggggtactacttgg

SEQ ID NO: 126518 - DNA, 387 bp, Homo sapiens
tgaagcctgattataggaagcaaagactctggtctgctgatgtgaaggctcacctgttagctggttgcatttatggttaaaatggaatgaatttgaattctggctatacagcagtctctgtgagcttgggttagtatgagtttacctgtgagataaagttccagagcagagtgacttgtgacttgtgttgggtccatactaagtggcagacagtggaccagaatttataccacaaatccaggttggctctgagaagacactgccactaaggactgatctaaactcagttccctttcaagttcaccaattgtatgactcacatgacattgaatgaggccgggagtgtgatactagctggactcaccttcaagaacccaaaagacccca

SEQ ID NO: 126519 - DNA, 147 bp, Homo sapiens
tgcggggattacaggcgtgagccaccgcacccggccagcagcatgcatttctgagatccaggtgaagtggccgtcctgggacacgtcgctgagggcagattctgaacccaggtttcccagcttcaacactccatcttttcccactgc

SEQ ID NO: 126520 - DNA, 361 bp, Homo sapiens
gggttactgcccatgtcgggctcccccccatgtatagctctgtttctgatttctgtggaaccctgtcacatgaggacagggttccacagaaatcagaaacaggagcttcactggggatggcgttgatgtcacttggaagaaaagggtccctgtgaaaagccctttgaaaaaggagattggtatcccagggatgcctgccacccccagaatctgatggaaataacgaccagcaattgtagtaataaactatccgcacatgttagtccattttcacatggctctgaagagctacctgagacagggtgatttaggaagaaaagaggtttaatcgagccacagttctgcaggctgcataggaagc

SEQ ID NO: 126521 - DNA, 220 bp, Homo sapiens
acaagacaataattatttttgtttaggtatggttgacagagctttcactttttactttataaacctgtgctctgattcaatgttaagagtgcctgttcagaaaaatgcattaaaataacaaaagaaactcaattatatatgtcattccatttagacattcagtcatgtgccacataccaatgttttggtcagcaacagactacatatacgacagtggtcc

SEQ ID NO: 126522 - DNA, 979 bp, Homo sapiens
gaatgatctcagtcagaaactcagaatgaatcatatgaattaaacattggacaatgtccaatgctcagcatgtgtttttggtttatactaagagcatattatgccaccaaatacagatatttactattatacttcgtgtaggaggtatattgagacattgttctagactaccacagttccatatttgtgaaaagttatattgcacttttttttttttggaaagtgtgcccaggctggagtgcaagggcatgatctcggctcactccagcctccaaaccccaggtctcaagggattctcctgcctcggcctccctagtagcggggattacaggggggcaccaccacatcgggctaatggtcggtatcttaagtaaaagatgggggttccgccatgttggcgccaggctgggtctcgaactccggatctcaggggctccacccgcctaaagcctcccaaagggtcgggggatcacaggcgtgatccaccaggcccagccttatatttcactcttggggaatggcatctaacggtaatcttaaactacactaaacttaacttaaggtaaccctttggtcaaatggctcagagaaggttccaacttgggtcatagggactcaaacacttcaggctcttggctctacacactagacttctaaagcaaccaaccataggttaacaacgcaggggctcctgtaccaaagagggtaactcttttcctagaaactcgggcgacacccatttaaactatccaggtattaagccataatggcggggggcgtcaaccacgagtggcgtctcccaaggtttaatacagattttgcataagattgtaataaaggcccgttaacactgaaattccctttcactggagattccacatcggtgggcgggaacttccaaggattgtcccggagtgtttcacacggccacagctttatggtgccggccccaaactcattgcgaggcggggcagaatca

SEQ ID NO: 126523 - DNA, 221 bp, Homo sapiens
caggccaggtaatctgtaatcccagcactttgggaggctaaggtggtggtggttacacaaagctacacttgataaagttgcatagcactacacacacaaacacacacacacacaaatgagtgcatgtaaagtgaaaaatctgagtaggctctgtgggttgtctctgtttcttggttttgatagtatactgtatttacgtaggatatcaacacttggggaga

SEQ ID NO: 126524 - DNA, 416 bp, Homo sapiens
aggtctgttgatccaggtgtaggagatgcttcagcatcagatatggctcctacagttacatatcttgccggtgggaaaataaatacgtccaaacctctatgaaggtccatttgccaatatccataataaaaacacatatactctcggccgggtgcaggggctcacacctgtaatcccagtactttgggaggctggggcaggtggattgttggaggccaggagttcaagaccagcctggccaacatgacaaaaccttgtctctactaaaatacaaaagttagctgggcatggtggcacatgcctgtaatctcagctactcaggaggctgaggcaggagaaccacttgagcccaagaggcagaggttgcagtgagccgagattgtgccattgcactccagcctgggagactatgtttc

SEQ ID NO: 126525 - DNA, 105 bp, Homo sapiens
tccttagtgctggcataacaaaagactaaatatatataatttccccattaaaaacactcaagagcaaggacatgggaaaagattttcaagggaaaggaccagctc

SEQ ID NO: 126526 - DNA, 406 bp, Homo sapiens
tgatcaatatcccaagttactcatcatgtcatggttggtaaaagcttctcagaatgggtagttttgatatgggccttccttaacagatgataggacttcaaggcaggtacaaacaccataaccagaagcaagaatactaatattggccgagtgcagtggcttactcctgtaatcttagcactttaggaggctgaggcaggcagatcacctgagctcaggagtttgagaccagcttggtcaacatggcaaaaccccatgcctacaaaaatacaaaaaaattagctgggttcagctactcgggaggctgaggcaggggaatggcctaaacctgggaggcagggcttgcggtgagccgagatctcgccactgcactccagcctaggcgacagagcgagactccttctca

SEQ ID NO: 126527 - DNA, 442 bp, Homo sapiens
gggccgggagcctctggaccagctcagggtgtcgggcccggttggggcagacaactggccgcagtccacacccacatggtggctgagccctcggacacttgtgggcctgtgggtgatctttctaatttttaaatttctttttgagattgagtcatgctatgttgcccaggctggccttaaatccctgggctccagcgatcctcctgcctcggcccccagagtagctggaactgcaggtgtgagccaccgcacctggctggggatgctcatggtagtttctcctcacaggggcactgtgacagggcccaggagtcaccaggcctgcccctgcagccactccccacagatgcagcggggagggatggtctgggggcttgtgtctggtaactccagcacctgatggtcacccagcccacaccagtgctgtgtgacctggcacctg

SEQ ID NO: 126528 - DNA, 705 bp, Homo sapiens
gggatccctgtctttttttccccataggtgtttagttctggctattttttgctctcaatgggaatctcaatcttaggtatattgtatcacccagcctatgatatgtagacacaattggtggaacggtaaaagcatgtttgaggtaggaagactcaagaagggattaatttgtttccaaatgataaattaatgaaaggtgccaaccaactggttggacaaacaacgaattcttacttttcaacgttttcactattttgcaatccttcagtttcagaaaagattcaattattttcccatttaccaaacttggattttatacaaggattaaagcaaaaggtttttgcctagttaacttttgttaaatacagattttattctgaactttaaaaattttaattagagacaattttattagtaatattctattttttaaaaatcttaaacattaaatattatttacctaatatttacttttaaggatttttatttgatttttgtaattaatttttgcagctaatataattcacatttttgtgaacataaaatagcaacgtattactttggacagcatttaatcggaaattggtacttcaaatggcatttgggaaattttattaattcttcttaaattttaagatttatgttttaagatttatatccttagaatgggtttgtgatgaaaacaggaatcatttgcttgactag

SEQ ID NO: 126529 - DNA, 445 bp, Homo sapiens
aaaacagtttttcactttagaatccagagagcactgatttcatttagttgtcacatctctttagtctgtaacagcactgatcagttgtcttctagagtggccttgtctgactggacttgtctgactggaagtatgtttcctcatgactcggcttcatcaggctaaatggtttgggcaagacacatgttggtttgtcccattcgtggtgatgctgagtgtgggcacttggttaagtggcctctcccagatttctccgcaagggtctcaaaggtgtcttgttccctttgtaaagaagaaatgatctccaggatagaccatgtgactattctgaactcaggtgatctgcccgcctcagcctcccaatttgttttggtttttatggtccaggatccacccaggatcactatctcatttcattgtcagattttaaaatctgcaacagttc

SEQ ID NO: 126530 - DNA, 470 bp, Homo sapiens
  misc_feature (230)..(230): n is a, c, g, or t
atgtctatcgattacacagtcagcccagtcagagctacccgggcacgagcaccaggtggttcattcatttgaccatataccagcgctacctgcagtaatcatacataatcgtaaaacctgacaaaggagtagagaagccacatactgaaggttcccaaatcggagaaacgaccacagatcctttctcagaaggtgtcagcgtttttgtgtgcaagtttcttttccctatnagaggttgcagtccaaaaacaaaaagaagggtttgtcatagagatttgcaggagaaaaaaaacttggccaggctggacctattcttattttcagtgaagtcaaacagtaaattgatttatattctgtgatcttttccatggcccagggcatctaaaatttacagagagatggccaggcatggtggtcatgcctgtaatcccagtactttgggaaaccgaggcaggtggattgcttgagcc

SEQ ID NO: 126531 - DNA, 230 bp, Homo sapiens
tcaaactatgcaccacagctgtacttatcactccacagagaattcacactcccttctctaaggagtccagagtgagacagaggctcgtatctgtcatcccagaacttggattgcttgagccaggagttcaagaccagcctgggcaacatagtgagacccccatctctaacaaaaatttaaaaattatctgggcgtggtgacacgcgcctgtagtcccagctactcaggag

SEQ ID NO: 126532 - DNA, 560 bp, Homo sapiens
gagggtggccacgggcccagaggaagcatatagagctgaagttgggtctagcaatgcaggaagggcttcctaaaaggagtgatgtgagaagagtttgcaagagtcagtcggatgaagcagggaggggcatctgagtcaggcacaagtaggctgtgtgaattcacgatggattgaaacagcaaggctcatgaaggttcaagggcatagtgcatgcaagggggctcctgcgacatggccaggagttgggacagcagtgctgcaagccttgcaagagagttgacagcaagacggatgggtattcaagtgatccagtaagaaatgaggagggctgacctatgcgaggggaagtgttgaaggatagaggggtagcaaataagagagaaattaagttcaggagtagagaggtggttggcagtccattggctacagaagttgataacgagggagcaatgaggatccctccgtggatgctggctggggtcgccaggtaatttggtacaatcctccacattagagattacagtaggaaaacaaacaggcttgggaggagaggtgttatg

SEQ ID NO: 126533 - DNA, 494 bp, Homo sapiens
taagtataattgaaaatttgagttttctcaaattttctcaaatttctgtgaatgcacatatattacttttaaaataaaaattaatataaaaacaattaaaatggcatattaattcatagttaaactttatcctgcactaaataggatgttgtatgttgacttagaagacagatatgttcagccattctataaattaatttataaattaacatacattttcatgaagttagaaatttatgcttacttcatgtattgttcaaggccctgaaactattataaaacattcaatgcatacaccagtttgcttgacttgaacatctttctcttccctacttgtatcctaagctttcctgtctatagacttagctcatgttcttctcattttaatctagaaggttctagcctttttcaccttcactgtctctatcataatatttatttatttatttatttatttagagacagagtctcacactgtcgcccaggctggagtg

SEQ ID NO: 126534 - DNA, 662 bp, Homo sapiens
atgacaactaagtgaaatgtggaatctaggattagaacctgggccagaaaaggggatattacttggataattggcttaattttaagaaggtccatggattatttaatagtattattgttaattttctggttttgatgattatgttaatgattatacatgatgtgaacatttgggaaaactgagtgaagcacacactaggactctactattttttgaaagtttgaaattgttggccgggcgcggtggctcacgcctgtaatcccagcactttgggaggccgaggcaggcggatcacgaggtcaggagatcaagaccatcctggctaacacggtgaaaccctgtctctactgaaaatataaaaaattagccgggcgtggtggcgggcacctgtaatcccagctacttgggaggctgaggcaggagaatggcgtgaacccgggaggcggagcttgcagtgagcagagatcgcgccactgcactccagcctgggcaaaagagcgagactctgtctcaaaaaaaaaaaaaaaggcatagtgtgccgtagtatatacaatagctgatctcaataaatagctaaataagctgaatccaaggtttacaaaatccctattttataaacggttaatcccctttgggaagccctttttgaaattccggaactg

SEQ ID NO: 126535 - DNA, 186 bp, Homo sapiens
tctctaaaataaataaaataaaagagttgcaatattgaaacaaagattgtagaaaccaaaggcatacatctgagcctgaaggctgttacttacctaccagctgtgtgatgcaattaagatctctggacctttgtttccttatgtgtaaattgaaggcaataaagcaaattttacaaagatattgcg

SEQ ID NO: 126536 - DNA, 283 bp, Homo sapiens
gctggtctggaactcccgacctcaggtgatccacccgccttgacctcccaaagtgctgggattacaggcgtgagccaccacgctcggccagttatatcttaaatattgtgacttgttgaataatttggcccctatgggtggcaagttattttgttgtaatacatgcttggtagttcatagggtggttgaaactggttggttggttaaaatttcatgttaaggatggtccatgcaggactcccatataggggaaaagaagtaactaataatcttcattgagcac

SEQ ID NO: 126537 - DNA, 754 bp, Homo sapiens
  misc_feature (1)..(1): n is a, c, g, or t
  misc_feature (5)..(5): n is a, c, g, or t
  misc_feature (7)..(7): n is a, c, g, or t
  misc_feature (11)..(11): n is a, c, g, or t
  misc_feature (14)..(15): n is a, c, g, or t
ngcananttcnagnnaaaaatatcagtcggggagtaggactgaatgaaatgaaattattttaaagttttacagtgtaaaattcagtctaacaatagctgagagattgatttcagaaatactaaaacttactacaaagctgctgcaattaaaaaacaaaaaaagtgataattagcacagtaatgaaacagtggaaccagaatagagagtctagcaaaagatctcagtatatttcagacttagtaatttgttaaagttagtacagatattttatctgaaaccttagggccagaagcctcagaattaatttttcagcttcagaaaaccaatatgcaaggctgggggcagtggctcacacctgcaatcccagcactttgggaggcttaggtgggattgcttgagcccaggagttcctgaccatagtgagatctcgtctctacaaaaaataaaaaattagccaagcatggtggtgagtgcctatagtcccagctactcaagaggctagcatgggaagatcacttgagcccaggagtttgaggctgcagtgagccgtgatcacacaatggcagtgcagcctgggcaacagagtgagactcctatctctaaaataaaataaaaagaaagacaatatggtattagcactaacctctccaacaggatctggggaaagcgccttgtagttgagtcacaaataattcttcacatgacttacatataaatgaaaaatgtaatgtcagttcacatttagccaccaaa

SEQ ID NO: 126538 - DNA, 340 bp, Homo sapiens
aaacgttccacacccaggatctcgagcattctccaactacagtcctgtctctttgtcctctcttactggatattccacttgccctctgtcctctgcccatgtttgaagcactttgttctcatgtgcctctctacttagccaggatcccaagatcagacttatcaataatgccctagatcaaacttcaggtaatgtttggcatcacctggaaagtttgttaaacagattcctgggctccaccttgaaattctcatctactaggtctgaggtaggggcccaagaatttgcatttcttacaagctcccaggtagagctgacgccacaagtaggcacatcacac

SEQ ID NO: 126539 - DNA, 309 bp, Homo sapiens
aagagttaaaagggtttaaaaggtcttgcttaaaccatcctccaaactatgtccctattttctttaaaatcacctgagcaggatatcccacagtcactcttgtttacatgctccacagcctgaagtttcaggtttaagacattgcaaaacaaccttttagagctggaagagatcttgttagctggaaggctcctaggctggttgagcaggaggagagctctgggggtgtcaggggcaggttggggacaggagacgttcttaagagcagaagtagtaccagtagcgtgcatgctgcctcagtttttcttg

SEQ ID NO: 126540 - DNA, 561 bp, Homo sapiens
ttcatataatagtaccagagtatttgctgtggggggatactattattaccattatttgacaggtaaggaaatggggacacagagagtcacacaacaaggatgggttactagctagttctactctacagccaagctctaaaacacttgctctgaatcatgtgccatcttgcttcccccaaagactctccccaacacagtccaagggcccagaatccaaggccctctgggttatgcagcacgatctctgcatttccaccaaagcctgtcttggtctatgcaatcttttttcttcccattcaggccagatttttggtctactattcgtttaagtttccctagagcacagcatatagtagcaggtgtcagtggatgtctgttgaattgaatcactggatgtcagaagggtttctggatcctctctcacaggaacaaagtggccactcactgtgacttgaacattagagtcagtccaggacttgctgcactggcctccaaacccactcctaacccctagaccctttttgtaaattaagttatatttaatatgcgcccagggagctt

SEQ ID NO: 126541 - DNA, 411 bp, Homo sapiens
gaaacaatagtaagatcagggactatgtatgatgcctatatgtgccaggcactgttgtaatcattttatacacactaacttattcaatgaacacatagacacaaacccacacacctttgagctatatcccattgtgatcatcctgaggtacacagaaagtgctttgttcttgtcacagagctaggaagcagcagaggcaagagttgaaactagccagtctgtagagactcgcatatttcatgccaagatgtttggacaagagaggaactgaagcatgctaataacgtgattaatatccctagattctgactaagtttgtggaagttatttataaggaggaaagctggagaaccaaggcaacaggtcttcttggggtcagatgcagtagctcaagatagcagaaagaggtca

SEQ ID NO: 126542 - DNA, 269 bp, Homo sapiens
taagcacccaaagtgattactaagcattcattaaagtttgtattacttttcagatacaccattcttactcatttattttttggattaagcatagagccagttgcttgagatggagaatatcttggtgggtaaacccagtagcctggcactaaacttcccatttgtcaggaccctgcaaaagccatctcaaaaatgctcagttgatgaatcatagccctgggtcagaattctttatgccacaccctactgttttacattgtccttagtaa

SEQ ID NO: 126543 - DNA, 292 bp, Homo sapiens
gaagatttaccatgtgcaagatattgtgctgagtgcatggaacttctaattaacaatatatgtatgacaatggcaattgtggagagagccatccaacccatcttagtgtgtcagagtggtttcccaaaggaagttatacctacactgagatctggagcagttacctcggtgaacagggtggaaggtggtgctggtgcataggagaataatccaggaagagagatgaatagagaaaaactggtggttgaaagaactgagaacagtttgatacagttaaagtataatgttgggg

SEQ ID NO: 126544 - DNA, 692 bp, Homo sapiens
atttttcctcatggaaaatgagttaataggtgaagaataaatgtcatagtgcatactgatgtgactgagggacaacgacagatatttaaaaagccagcttgtgagtgttgtgtaattatctaacaagccagaactcgtgtgaaacatttttacagtctgtttctatttttggcaggatctttttcacccatgctttccagttttgggtctgggaagcagcttttacttcatataaatggttttatggaaattaattttgagattggtttattattttaagtcattttattcacttatataatttgaaggcactaaattaaacagtcattcgttatccatctttctgatggataaaagcaaatgtcaagatgagagtgctgtattgtagaaattcctcaggatatgtttattggatcagttattttattaacatttagaatttaaattcttaaaaatttttactttattttttaaacttaatttatgttcagctagcttaatttgacagtttttatgttctagtaactttaatcttgttttaatatttgtttgggagaaaacatacttatctttagagacatcatttagtgttatcttccaaaatttgcagctgtttagaaccagatacttgagggaagctactatggtatgatgaatgccttccttgttaggtcatgtgtgacaaaggcaaa

SEQ ID NO: 126545 - DNA, 427 bp, Homo sapiens
ctgtctggctgcagtggctcatgcctgtattctcagcactttgggaggccagtgcaggtggatcacttgaggtcaggagttcaagaccagcctggccaatatggtgaaatcctgtctctactaaaaatacaaaaattagctgggtgtggtggtgcatgcctgtagtctcagctactcgggaggctgaggtgggagaatcacttgaacccgggaggcagaggtttcagtgagccaagatcgtgccactgcactccagcctgagcaacagagtgactccatctcaaatgcaaaacaaaacagaaagaatacatgctgacgaaaaaaatctaagacaataaaattgtattactaggctgttaacatgatattttgtttcccgttaaatgtgtgacatgcaaaagtatttattaaatgaaaatatttttta

SEQ ID NO: 126546 - DNA, 815 bp, Homo sapiens
attagcaaaacacagactttacagatctcattactatatttagagaataaatcttagagtaaaatgactttgtttcttggcttgaaccaaattatgtggagtttttataattagaaaactttattgaagagcttcagaaataatttaagtatcaatattcaatcttcaaaaactcttccagtacagtctatgacagctgcacagtaatacatattgtcttagattttcttaatattcacatctgccttctgttctttgaaattctttttgtgtttatgtttaaaaatagatatacaattcaaatatgttctaggtgaggactggttatttaaataacatatatatgctttacttacacctctctcggggttccactgaagtatatattcttctaggtatttgggggactgtgtcattaaggctaatggtggtttaatctaagaggaaaaaaatacatgcataccaaggaatatttttcagtttcttggcagaacacaatagagaggaaaagtgatttgactttttagctccaattgctttcaatttcttaggtaaggtcaatgttgtaaaatctgctgagactttttttatagaacctgagtgaataaaatgcagaggtaaatcactactttctatttaaagcaaactagctttttacaaagcttatgaccatttttaaagaaaaagaaaggaggccaggtgcagtggcacacgcctataaacccagtgccctgggactacaggcgtgtgccaccgtgcctggccggttcttctttcttctgccaggcagtccaccctaggtgggcaggcttcct

SEQ ID NO: 126547 - DNA, 762 bp, Homo sapiens
attagcaaaacacagactttacagatctcattactatatttagagaataaatcttagagtaaaatgactttgtttcttggcttgaaccaaattatgtggagtttttataattagaaaactttattgaagagcttcagaaataatttaagtatcaatattcaatcttcaaaaactcttccagtacagtctatgacagctgcacagtaatacatattgtcttagattttcttaatattcacatctgccttctgttctttgaaattctttttgtgtttatgtttaaaaatagatatacaattcaaatatgttctaggtgaggactggttatttaaataacatatatatgctttacttacacctctctcggggttccactgaagtatatattcttctaggtatttgggggactgtgtcattaaggctaatgtttcttggcagaacacaatagagaggaaaagtgatttgactttttagctccaattgctttcaatttcttaggtaaggtcaatgttgtaaaatctgctgagactttttttatagaacctgagtgaataaaatgcagaggtaaatcactactttctatttaaagcaaactagctttttacaaagcttatgaccatttttaaagaaaaagaaaggaggccaggtgcagtggcacacgcctataaacccagtgccctgggactacaggcgtgtgccaccgtgcctggccggttcttctttcttctgccaggcagtccaccctaggtgggcaggcttcct

SEQ ID NO: 126548 - DNA, 455 bp, Homo sapiens
cacaatagagaggaaaagtgatttgactttttagctccaattgctttcaatttcttaggtaaggtcaatgttgtaaaatctgctgagactttttttatagaacctgagtgaataaaatgcagaggtaaatcactactttctatttaaagcaaactagctttttacaaagcttatgaccatttttaaagaaaaagaaaggaggccaggtgcagtggcacacgcctataaacccagtgctttgggaggccgaggcgggaggctcatgtgagtccaggagtttgagtccagcccgagcaacatagtgagacccaggtgtgatggctcatgcctgtaatcccacctactcgggatgctgatgtgggaggatcacttgagcccaggaggttgaggctgcagtgagttgtgattgtgccactgtactccagcctggaaaacagacaagaccctgtctcaaa

SEQ ID NO: 126549 - DNA, 349 bp, Homo sapiens
agtgaatgttccatgtacagcaagaaaacggaaatcttcagggagaaaagtccatcttccctcctcctcttaaaatgttctcttcacctgttctctcttcttacacctcagaagagatgccacccaccctagctgcaaataaagatactctgataccacaaaatcctgcctcttctacagctcctcccactcctgacaccttgtgcagaatccatacacacacacaggttcttctcctacttaaaaaataagcttggccagacacggtggctcatgcctgtaatcccagtactttgggaggctgaggtgggcagatcatgaggtcaagagattgagaccatcctggcca

SEQ ID NO: 126550 - DNA, 260 bp, Homo sapiens
ttccaggcaagagtgcgcaatgctagtgtctggagcctgattcttggctgctggaatctacttgacttgtgactggatcacacacgcccagaataactaagtttcagagatggattaaatccaaatgaagcctttgcttggcctgctcaaggactctcattgaccttgaagaattctttctatgtcaaagcaaagaggaccctctgtgtcagctttaggaatcattttctgatgagtgctccttctgtgggtgtccattt

SEQ ID NO: 126551 - DNA, 175 bp, Homo sapiens
ggaaggcagtggtgggcaccatagcacatgaaaactgcagggagactacagacctgtggatgtgtaggaggaagaggttatgcacagaggaataccatacaagatctaaggccttcagaagaagcttgggtgagattctgggaaattaagacatttacaggcagccagaggaaac

SEQ ID NO: 126552 - DNA, 799 bp, Homo sapiens
ctctagggaagacttccatgcctttctcttaacttgcagtgttacctgcaatccgtggcattccttggatcatgtcagtctctgggatccatgatcacatttgcattctccctgtgtgtctatgtcccaatttctctcttcttatagggcatcaatcattttagatcaagggcccaccctactgcactatgacctcatcttaacttgcttgcatctgcaaagaccctatttccaaattcgatcacattcacagcttctggatagacatgaatttccaggtgtgttgggggaaggtgacactattcaactcaatacagtgtgaaacagaaagtgactaaaatagcaggtcagtatccagtctgttatctgagtgtcattgtaactgaaaatagtattggcttgatatttgtaaagacttgattccaatcatgtatggattaataaagtgtggcagagggatgtgagggttctcagagaaagagggaaaaaatgtcctgggcataaaaccagaagccacagttcacttactattcatgtctccatggcatttcaaatctttaaacattcttaacactttaaatatagcaaacacaaatccaaatatataacttatttttagtcagcagtaatgattatttttttgaataattacctcatacacaggtacacattgatcacatttttcccaccacttaaatttccaaattttattagcattgtatgtcttgttgcttctacaaattaaactcttttattcttttagcggtcaacaaaacagagtgtaataaaattcaaatga

SEQ ID NO: 126553 - DNA, 389 bp, Homo sapiens
cccaagttgatgtgtggatccctaatccccagtgcagcggtgctgggaagtggggccttggggagatggttagttcctgaggcaaagccctcatgaacgggatcaatgtccttagagaagacatctcaggggcttgttctgccatgtgaaaacccagaaacaaggcaccatctatgaagcagaaagagccctggccagatgtcacatctgctggcactttgatattggacttccagctcccagaactgtgagccatacacttttgttgtttataagttattgagtccaaggtatcttgttatagcagtctacgtggcttaagacagtgtccttcttagaatgggtatttacccacttgcagaggtgcaaacagtgctgacttggtggtg

SEQ ID NO: 126554 - DNA, 2124 bp, Homo sapiens
cactctacctctgcatccaaatcaaggtctcccagaatcagtgaaattccacttcacagtttcagatggagaacacacaagtccggagatggtcctcaccattcacttacttcccagtgatcagcaactgccagtgttccaggtcacagctccacggctggcggtcagcccaggaggcagcacttctgtaggacttcaggtggtagtaagagatgctgagacagcgcccaaagaactcttctttgagcttcggagacctccacagcatggtgtgcttcttaagcatacagctgagttccgaaggccgatggccacaggtgacactttcacctatgaggatgttgagaaaaacgctctacagtatatacatgatggttcctctacccgggaagacagcatggagatctcagtcacagatggcctcacagtgacaatgctggaggtgagagtagaggtgtccctgtcagaagaccgagggcctcgactggctgctggctcctctctgagcattactgttgccagtaaaagcacagccataatcactaggtcacaccttgcttacgtggatgattcttcccccgacccagagatctggattcagttaaattatctgccctcatatggtactctcttaagaatctcaggatctgaggtggaagagctctcagaagtttccaatttcacaatggaagacatcaataacaagaaaatcagatactcagctgtgtttgaaactgatggtcatctggttactgatagcttctatttctctgtctctgacatggaccacaaccatctggataatcagatatttaccatcatgatcactcctgctgaaaatccacctccagtcattgcttttgctgaccttatcacggttgatgagggagggagagcaccactctcatttcaccattttttttgctactgatgatgatgacaacctccagagagatgccatcattaaactaagtgctctgcccaaatatggctgcattgagaacacaggaacaggtgatcgttttggccctgaaactgccagtgacctggaggcatcatttcctattcaagacgtcctggaaaactacatttactactttcagagtgttcatgaaagcattgagccaacccatgatatttttagtttttatgtgagtgatggaaccagtcgttcagaaattcacagcatcaatatcaccattgaggtaaagactttggaagttggaaaggttgagcccttgaccacaatatttcacaccattagagagctttctttatagggactcaaaagcaaagaagattggatttgaccttcaaaattgaaggtcgttcttaaaatatagccttcaggaatcttgtagaattaaggttggcatttggggaaggcttgagttagaaatctaaatttccatttcaggattgaatttatttgttcggtgtgaaaaacagtttgtgaaggtcagagatgctttgccagtctcatatataaatgaaaacttacatatgtctatgtttctctgaaattgtgtttggttctatatgcatatttgccttttcttattttactgcatttatttatttaattgtaacatcaaagaaatgtgttccttgatgctgtatttattctcatttgagcaactacagaggcttgctctaccgagagagagacacaggggaggggaaagataaatctcagaatgaaataccctctgccttgggaaaataaaatgtaaagaaccctctgcactcttaagggtcagtggtggaaaggggctggcaccagggcagggagacagctttagagacccacactttcaaatatagtgtccttctacaggtactgtggtatgcttagcattttctaagagagttctgagttatattagtatggtcttttatcttcaaagtatgttaatacttgtacttgtcaaagcacatatccatatttttggtctagaaaatatggtcattgtacttacggaagatatctgagaaaacttttatgaaatgtccatcagcttcttttgaagggggcattttgttgcctggacttgctctcttttcaaactaactattttgcttgggaagtaaagatggtgccacattaaatgctattttgaggtg

SEQ ID NO: 126555 - DNA, 437 bp, Homo sapiens
cactctacctctgcatccaaatcaaggtctcccagaatcagtgaaattccacttcacagtttcagatggagaacacacaagtccggagatggtcctcaccattcacttacttcccagtgatcagcaactgccagtgttccaggtcacagctccacggctggcggtcagcccaggaggcagcacttctgtaggacttcaggtggtagtaagagatgctgagacagcgcccaaagaactcttctttgagcttcggagacctccacagcatggtgtgcttcttaagcatacagctgagttccgaaggccgatggccacaggtagctacacacctacacactctgtcactgacctgcttggaggattttttgctctacaatcagttgttatgtgtctcagacgagagcaaagcgtctttgtgatacagactatgaggagct

SEQ ID NO: 126556 - DNA, 352 bp, Homo sapiens
ccggacctctcctacggtatctagctgactgcacggcagggctcatttggagaagcaatgggagatcagagcagagagtcgatgatggccaaattatgaaaactggaatgccagactatatttgcacttgtagaaggatacttacggctttttaacagaaaaattatggtggttaactttggagcacttaagcgttgttgcctggacatttggtgggtccccatctcctgactcaccaatgtttccctgtcacactgatccccactttgagcagctacttttcagaaaggttgcagttggaaagaaagcagtattcatggggcacaactccttccttcataggcagagggaa

SEQ ID NO: 126557 - DNA, 207 bp, Homo sapiens
attgtttacttaaagatggcatttgatttccttaaacttgggagatacatactagcaaatgcctgtagtcaaaggtggttcctgggtaattcaagggtgccaattagagtatactttaagccacgtgtaattatgtccaggctttatatatacttagagcataaaaataaactttcattctctcatatttaagtccattttatatag

SEQ ID NO: 126558 - DNA, 467 bp, Homo sapiens
tggattgtgttgccatccttcaagataagaaatacaagcaagaaagcaggctataggagaagatagtgagtttcatgacagatgtgttgaattgtaggcattttaatttttgaagtaggtaaggataaggacatgcttaagaatttatgtcatacaattttataatgttaagtcattaaattttcttcttcctgctggatatctctaaatgggagggccttgtcagttcctcatcttctctccaaagccagatttttcttctgtgttcccagttttagttattggcatcaaccaatagtcaggaacttaggacagcaatcttgaagtcattttcaatgttctgtttccctcaccttatgtgtccggtcagttgccaagtgccatcaattctaagtctgcaatatctcttttacctctgctcatttctcttgtcgttgtgtctgctctatatcatgctctcatcattt

SEQ ID NO: 126559 - DNA, 674 bp, Homo sapiens
ggtttaattgactcacagttctgcattgctgggaaggcctcaggaaacttacaatcatgatggaaggcaaaggagaagcaggcaccttctgctttgccttctaagggtggcaggacagagtgagtgcaagcgggggaaatgccagatgcttacaaaaccataagatttcatgagactcacttgatatcatgagaacagcataggggagactgtccccatgatcctattacctccacctggtcccgcccttgacatatggggattatggggattacatttcaaggtgagatttgggtggggacacagagccaaaccatatcgcatggcctcccccattgtcaacatcccccactagcgtggtacatttgttgcaattggtgagcctgcattaacacatcagcatcacccagtccatagtttacattagggttcactcttagtgttgtacaatccatgaatgacatatatccatcactatagtatcatacagagtatttttcactgccctaaaaaccctctgtgctctatttattcataacctgcctaccctacctgcctcccccaacccttggcaaccacagttctctttactttttccatagttttgccttttctagaatgtcatatagttgggtacatataatatgtagccttttccttttttctttcttttt

SEQ ID NO: 126560 - DNA, 337 bp, Homo sapiens
agctccgacaaggatagctccaggcttcttttcaaatcctctggagagggaatgtgtgcgagaggaagtcggggggaagagcagagacagaaagatgtaaatcaccgtcacttcataaaacggagttttcttgtaatatgctttggtaatgttgagctgaaaatagattgacaatcaaaatgggcttaatctgatattaaagaattctcttaaaatcccccaaacaattgagatttttttttccctttggtttgttttgcgttagctcttccaagaggctgtggatgtaaagaaatatattgacattaattaaagtgagttttgtgttgcttagtgg

SEQ ID NO: 126561 - DNA, 573 bp, Homo sapiens
taaccaaggagaaggatgttgaaaggatgactgaaagagtgagtctgaacaaggctattttcatttctacatgaccatcttgaaggcatcttatttcagcttggaacaaggtgcatgagcccagcttgtttgttgcatgtgggaagtgtatatttttagttgccttgtagagtggctttccacctcatttatgaaattggctttttatttttatccttttctctttttccctttcaccagagttggaacgtgaagcacagtttctacttgctgacgtagtatttcctcttgatttttagtggggttggggtgttttatgagtactaaggtcacattgaactttggacacctagtcaccttgttgctggctgcagagaagagcttgagaaggagacagaaatcttctcgtcttctcatcatggctttgacaaatgcccagggagactgcaactttcttctcaacttggctgtaacactggagcccttggccacttagaaggcctgagtttttttatattttccaccaagctgctgattctaaactgtggtggggtttctttcatggccagaatg

SEQ ID NO: 126562 - DNA, 303 bp, Homo sapiens
cctcagtcgccttaagggccacacagagctgcattacgtggatggagaggactgctttcactcctcagtgttcgtgctgggaagtccactcatgctgtctctgctacttagcatctctactgggtttctaatcggtttctcaacttcatgtatcggaaactgagctcgaaaagtttctccctcagtttttcctctctctgaaaatggcaacttgaactaatccttgattactttctctcctcttcctctctctcctcttcccctcctctcctctctcctctctctctctctctctctctcttc

SEQ ID NO: 126563 - DNA, 885 bp, Homo sapiens
atccttatatggcagaagggcaaaaaggcaaaaggggagaaatggctcccttgcatctcttgatgttattattttagcaaggacagagccctcctgacttattcacttcctaaaaggagccatctctttagtaatgttgcattgggattatgtgtcaacatatgaaattgggggaggcatattcagaccatagcacatttttcaatggaaatataatgttgaggaaacccagagaaggcaacattttcttgctcaaggagatgagaaagagggtaaaaaaggagataaaatttgacctatgtcctgactgtggtaatagaaaagttcatcttggctaaaaggagcagcatgatataaaatttgaaacctcatggtgtgttggagactgatgatgagtggctatgcctagagttgacagtatcggatttgaagagtgtaaggagtgatgtggatcatcagactggaaacagaatgtgagggtccagatcaatccattgggaccttatcctataggacatacagggaagccatttaaagttttaaagtgagaaggtgacatgtttagacatgtgctcctgaaagtacctagaggaaaaaaatctttggctgcatattgagccagaaatacaaagggaaatacagtatgttagcctcctcctctaagcccttctcagttcaacccactggacaagaaatgtatgtttctaaagaaagattgatgaagacatttaaagtctcttgaaagattttaataaagtgcttggcatgtagctggtactcaacaaatatttgttgaatacagggtgcctgttaagatctgatattaggtgaagagtaagtatgtccattcatttttcagttgcctatacatccatccattcatcc

SEQ ID NO: 126564 - DNA, 410 bp, Homo sapiens
aagatgctcaacatcattagtcaccagggaaatgcaaatcaaaactacaaagaagtaccatttcacactcaaggatggctataaaatttttttaacgggaaataattgttggagaggatgtggagaaactggaaccttcatatatttttggtggtaatgtaaaatggttcagcaactatggaaaataggtggccgtttccttaaaaagttaaacacataattatcatgtgacccaacaatttcacttctaggtatacatccaaaagaactgaaaacagtacatattaatgtacaaatatgttcacattagcaccattcatagtagccaaaaagtataaaacagctgggcgcggtggctcaccgcctgtaatcccagcactctggagcctgaggcaggtggatcgcttgag

SEQ ID NO: 126565 - DNA, 308 bp, Homo sapiens
ccaaactctgagcctttccaactagaacacggaaaaggaaagaaatgcaagataaggcactttgctgtgtcactccttagaaagtcagagaaaattaaataagtacaaccaaatggatttattgcttgggtgacgatcttcaagtgacagggaaaaagaataagaaaataaaaatgttagcactgaataaggagcagaacaataaatacttagaagatcaatgtacctggctgagcatgctggctcatgcctataatcccagcattttgggaggccgaggcgggaggattgcctgaggtcaggagttc

SEQ ID NO: 126566 - DNA, 550 bp, Homo sapiens
cgtggtggctcacgcctgtaatcccaacacttgggaagccgaggcgggcagatcacaaagttaggagatcgagaccatcctggctaacatggtgaaaccctgtctctactaaaaatataaaaaattagccgggagtggtagcatgcgcctgtagccccagctactcaggagccagtatgcttggctaattttttaaaaaatttttttgtagagatgggctctcactgtaacccaggctggtctcaaactccggaggccaagccatcctcctgcctcagcctcctaaaatgctaggattacagacatgagctagggtgcctggccttaaatttgttataaaataaaatgaacatgaaaaatccttggccttgccaatgatcacgagaccagcctggacaatgtggtgaaacctcatctctactaaacatacaaaaaaaaaaaaaaaatagccaggcgtggtggcacacacctatatagtcccagctactagggaggctgaggcagaagaatgacttgaacctgggaggcggaggttgcagtgagtcaagat

SEQ ID NO: 126567 - DNA, 286 bp, Homo sapiens
ctcaatataacatctgtttataccaaactgataaaatataattagataatatattgtaagtcgtattctgtctttttcttcaaggtaatatgtttactatcaattatatgcagagtagtgttgtaataagtagaccctggagatggacagtttctgcttttaaggtttaattcaagagaaaggaacatttgataaagacaaaaaaattatggacgaatcagagaagtggagcctgttggcaagaaatgggctttggagaaatgggctttggagaaatgggctttgg

SEQ ID NO: 126568 - DNA, 372 bp, Homo sapiens
gctcacggcaacgtctgtctcccgggttcaagcaattcttgtgcttcagcctcccgagtagctggattacaggcgtgtgccaccatgcccagctaatttgtatatcttttagtagagatggggttttgccatgttggccaggttggtctcaaactcctgacctcagattttatccttttcaaaaacctgagcttgttaattgtctcactaaatgagacttaagtttttatctttgtaaaacaaaacaaaaaacccttgctcaactcaactgggaatccacttgacttctggaggtctggaaacaaagggattgtgcccaagggccactctgggtgttcatgggccacaaaaaaacaaaaacaaaaacaaaac

SEQ ID NO: 126569 - DNA, 321 bp, Homo sapiens
ttcatggtctctgtctccctttccaccaagtgcagaccactcacgtgagctcacaaccaaactgaaggaagagccgaggcaaggtgatgaggttaaaaagtgaggccagggagtcaggagataaggctccctcctcttctggtctcaaccagtctcacagcccttgtacagtgccccggaaaggtatcattcctgggagtaaactgcctgaaaaggtcatggctggctcggggtgctgccggcccttggttgtctgatgcatgtctgcatggcctcagagcacccaatgtcctgtctgcatctctaggaacctgccagtcc

SEQ ID NO: 126570 - DNA, 412 bp, Homo sapiens
attcttcccacagcgagtccttccacctgcctccctcagcctcctaacaagcctccctcctttcagaaatctttcatcctccctttcagaaatctttctaaaacccccatctcagccagaagcagtggcttatgcctataatcccaacactttggaggctgggtgtggtagctcacacctgtaatcccagcacttcaggaggctgaggcaagagaatcacttgagcctacaagttcaagaccagcctgggcaacacagcaagaccctgtctctaccaaaaaaaaaaattagccaagtgtggagtggggacctgtggtcccagctactcaagaggctgaggtgggaggatcacttgagcccaagaggttgaggctgcagtgagttatgaatgcaccactgcacttcagactgg

SEQ ID NO: 126571 - DNA, 2498 bp, Homo sapiens
  misc_feature (1857)..(1857): n is a, c, g, or t
aatttaaatccactttttattctttcacagattttaacaattatacacaacttttaacataaaggtagtgaaatctcaaggataaggaggcaatatatatggcctcttctattcgttattcaggatggaaggaaattttcaaagtacagtgtgtgagattcaacactggaaaaatacatatgaaacttgtttaattggctccacttaggaccagacacagcacaataaatacagaactgcatcatctttttaaaagatcattgtaattttaacacattcttactaaagaaatacatactatcagtgaccgatctgaaactctgtaacaggtgaagggagacttacgatgaatatctgagcataggttcgctagcatcttcacactcatacataaacattcttaaagggaataagaatgatttcaaattcaaaacaacaacaacaacaaaaaaacaaatttggtcaaactttcttcatcataccattcattgctatcacaatcctagtttgctggtaggtttaagaaaggaatagaaagtttttgaaatccttttaatttctaccagtcttagggcctcttgagtaggccactttggaagcaaactgattaaacagcaccatcaagtccgtatctcaacaaaccattgcataatttctgtcaatgttctcaaaggttaaaacaagttgtatagaagaatacctttcctcaatagcaggccactgtaaaaacatgtaatctgcaagaatttaaacaaaactatcctgaattctctactgattgcttctttccttaatagaccaagagataggcattacctaaaaaattaaataataatatactgaggcataaaataaatactttatttatgctatcacaatttgggtatttgaagattgttagccatgttcacacaccctttcctcttcccaaagaggaagcaacggtgccagcactattggtcagaaagagttaatgggaaactgttgctctcagagctgttctgcaatatgcagacacataaattattattttaaacatatacttaaaagacggataaaatgattttttttcatgtgacccagattctgttatcagtagatacaaaattaatttcattcctattaggatggaaactggtatgctgctgtggccatagatattctgagaaacctcttaagccagtgaaccaaaaaccatatgaaagaaagtaatactttctatgattggtcaactggctgttcaaaaattcaacaagcaaacaaacatgcaaacatgtgacatatgtcattattttgtaaaaacataatgccactctggccccaggaatcactacagcccagctggtccttaaaggtgcaaacagcctttaattgctactaaacatcttctctggtattttactgcccatcacacttgccacatgattctcagaagcttaggcttccaagatgtttaaggaaaataaacagggtgtgatgtggatcaagttttcagtgattgttttaagtgtcattttaaaaagaacttcctagtaatgaagtatgtaatagtccttgatattaaattttttctagtgaaataaactatgctttaataagacaatgttgctctaagtttgaccgcctgattttttttttctcttttttagagggtactatttcatatattgtgtgagccccacaaatgtctattttaaaaagagtatagtccctggccaggcgcggtggctcacgcctgtaatcccagcagtttgggaggccgaggtgggcggatcacctgaggtctggagttcgagggaagctctacgtcttgggggccgcatggtgccgagagcgcagaccagacccgccccgccnctccgtgccacgcacgcgctcggctccgcgcttaatgaagcagtatctgactgtgttgcccaggctggtcttgaactcctggtctcaaatgattctcctgctttggcctcctaaagtgctgggattacagcaacgcgaatgaaatttggtgccatcactcggatcaggggacctcccttgggagatcaatcccctgtcctcctgctctttgctccatgagaaagatccacctacgatctctgctcctcagaccaaccagcccaaggaacatctcaccaattttaaatcggatcttctcagcttagcggctgaagactgatgctgccagatgactttggaagccccctggaccatcacagatgcccagctttggataactcttacagtggaggacaggaatatcaggtctctgagcccaagctaagccatcatatcccctgtgacctgcatgtatgcatccagatggcctgaagtaactgaagaatcacaaaagaagtgaaaatggcgcgtgcctgccttaactgatgacattaccttgtgaaattccttctcctggctcatcctggctcaaaagctcccccactgagcaccttgtgacccccactcctgcctaacagagaacaatcccctttgactgtaat

SEQ ID NO: 126572 - DNA, 2101 bp, Homo sapiens
  misc_feature (1857)..(1857): n is a, c, g, or t
aatttaaatccactttttattctttcacagattttaacaattatacacaacttttaacataaaggtagtgaaatctcaaggataaggaggcaatatatatggcctcttctattcgttattcaggatggaaggaaattttcaaagtacagtgtgtgagattcaacactggaaaaatacatatgaaacttgtttaattggctccacttaggaccagacacagcacaataaatacagaactgcatcatctttttaaaagatcattgtaattttaacacattcttactaaagaaatacatactatcagtgaccgatctgaaactctgtaacaggtgaagggagacttacgatgaatatctgagcataggttcgctagcatcttcacactcatacataaacattcttaaagggaataagaatgatttcaaattcaaaacaacaacaacaacaaaaaaacaaatttggtcaaactttcttcatcataccattcattgctatcacaatcctagtttgctggtaggtttaagaaaggaatagaaagtttttgaaatccttttaatttctaccagtcttagggcctcttgagtaggccactttggaagcaaactgattaaacagcaccatcaagtccgtatctcaacaaaccattgcataatttctgtcaatgttctcaaaggttaaaacaagttgtatagaagaatacctttcctcaatagcaggccactgtaaaaacatgtaatctgcaagaatttaaacaaaactatcctgaattctctactgattgcttctttccttaatagaccaagagataggcattacctaaaaaattaaataataatatactgaggcataaaataaatactttatttatgctatcacaatttgggtatttgaagattgttagccatgttcacacaccctttcctcttcccaaagaggaagcaacggtgccagcactattggtcagaaagagttaatgggaaactgttgctctcagagctgttctgcaatatgcagacacataaattattattttaaacatatacttaaaagacggataaaatgattttttttcatgtgacccagattctgttatcagtagatacaaaattaatttcattcctattaggatggaaactggtatgctgctgtggccatagatattctgagaaacctcttaagccagtgaaccaaaaaccatatgaaagaaagtaatactttctatgattggtcaactggctgttcaaaaattcaacaagcaaacaaacatgcaaacatgtgacatatgtcattattttgtaaaaacataatgccactctggccccaggaatcactacagcccagctggtccttaaaggtgcaaacagcctttaattgctactaaacatcttctctggtattttactgcccatcacacttgccacatgattctcagaagcttaggcttccaagatgtttaaggaaaataaacagggtgtgatgtggatcaagttttcagtgattgttttaagtgtcattttaaaaagaacttcctagtaatgaagtatgtaatagtccttgatattaaattttttctagtgaaataaactatgctttaataagacaatgttgctctaagtttgaccgcctgattttttttttctcttttttagagggtactatttcatatattgtgtgagccccacaaatgtctattttaaaaagagtatagtccctggccaggcgcggtggctcacgcctgtaatcccagcagtttgggaggccgaggtgggcggatcacctgaggtctggagttcgagggaagctctacgtcttgggggccgcatggtgccgagagcgcagaccagacccgccccgccnctccgtgccacgcacgcgctcggctccgcgcttaatgaagcagtatctgactgtgttgcccaggctggtcttgaactcctggtctcaaatgattctcctgctttggcctcctaaagtgctgggattacaggtatgagccactgtacctggcctacattttctttttattcaagtcaggtcaagttatgtttttggtcacttgccaacctttgttaagacagaggaggcagaagaaatggagtca

SEQ ID NO: 126573 - DNA, 4243 bp, Homo sapiens
aggctctcagttcttcagacctgctctatctcacctctcattttgttcatattctccacctcttgtgcttgatgaactcctattcacctatcaggtcacaacttaaatattttttcctccaaatctctggactacataggtccaggcccccatcaaatgctcccatagcacattgggcttcctcatcaacatgctcgttatacttttctagaattgctggcttgtcctccttgttatctccctaatgcagagaccattactcatcattgtagcagatatttatccatatcaggtactcagcaaacatttgtggaatgaatctatatgtgaaactatacttctatggcaagtttgtttggttcagaaggcttgcatttcatgtatattgggagactggccaacatttttatattcttcctcctatgctcaaaccataaataattatgttagcaaacactgaactttgtcttttgaaacataaatagaaacatccttagtaacagtactaacagtaatcatttttcagaaataagaattcacaccagtgatacagaatggcctttgaccattatctcagagaactagcagtcgatagacatgctgaagtgataattccaaaaacttcagtttcattcatccctacttaaatataagagaatcaacttctattttatgtctgtattcccattttctaatatactacttgtcacagaggagatgcccaaccagtgtttttcgtaaagtacctgaatagattaataataatgctagtgaaatatatttagtgctgttctaagcactttacatgaattaactcatttaatcctcaccgcaaccataggaagtagattctattatttatccaattttacagatgaaaaaactgaggctggtcacttgacataaattaccagtgctggccaggactttagagaccatttaatccaatgctcttattttacagaggtgcagctgaagcctaaggaggtgatatgatttcctacacattcatgcaccttcgtgcacatccattaaaacttttattaaatggaacccactatccatactccaattagctaggtgccttttttcccccatttagtaatttacaattaattggaggactttttatagttatatttagaggaaaggagcatgttttactctatatcaactttcttttctgcttaaaagcattttgattctttattttaccagtcattttagttcttttaataggtttaatacacagatcaaacaagacttaaatacatttttaacaatgtaacaatttaaaagaaattgcctaaaacctaggtcttctaacttggagcccagtgctttttttattgctccgctgagtcaaaaggtgaatatataaacatgatttcagatagaatgcagaagctgtatttaattaagttggcttttgtcattaaagaaatcagaaagtttggacaactcaggaatggatttccatcctagatggtatttactactatttctggaattaagtttactgtctatattcaggattttgtgcataagagacgtgaccactgaggttgtgtgtcattcttatctctactccaggggtcagcaaactttctctgttaagggtcagatagtagttttttggcttttcagtctctgtttggctctgctataaacaatacataaatgaatgagcatggctatgttccaataaaacttaattgacactgaactttgaatttcatgtacttttcaaatgtcacaaatgttttccttttgatttttttcagaaagccattaaaaaaatccaaagaccattcttagcttgcaggctgcacaaaaacaggaagcaggcggggtttgcttatggactgtggctttcccacccttgttcttagatagggacacaccaatatatcatgattagttgtaaaggatactgccagtaacatattattactggttagttgtaagaatatcaaagttagtgaataatttgcttttaaaataaattattgttgatttatttttataaataaatggcacagggcatctcatgctcttgcattctaatatattttctggaattgatgcaaaagtggtggcagtaaagtacagagccggctaagcagcagttttgtcttaagtaactgtggtgatcatggacaaccattgcgctgaactgctcttcatggtaaggatttcagtgtttcagagtaattcattaacctagagatgttttaaaaagttgtatcggccgggcgcggtggctcaagcctgtaatcccagcacttcgggaggccgaggtgggcggatcacgagatcaggagatcgagaccatcctggctgacacggtgaaaccccatctctactaaaaatacaaaaaaaattagctgggcgtggtggcgggagcctgtagtcccagctacccaggaggctgaggcaagagaatggcgtgaacccgggaggtggagctttcaatgagccgagattgcccctctgcactccagcctgggtaacagagcaagattccgtctaaaaaataaataaaataaaataaaataaaataaaataaaataaaataaaagttgtatcaaaatctgctgcaccatgggagtgttttacacatgtgatgtggcatctaccttatgtaccataatggaaaaatgtttgagaaccactgcactaggccaaaggctgggatgtgtatactttgctgccgtgtataattgtatgtccttgttctctaaatggaattggttatgtttagtgaacagttaggtggttctccgtgtgtttatatacacagacgatccccgaatttggatggttcaacttaagagttttcaaacttacgatgatatgaaagtgatatacatttgatacattcctacaacttacaatggggttatgtcccataattgttttgacttatgatattttcaacttacaattgatgggtttactgagacataaccctcttgtaacttgaggagcatgtgtatatttgtacatacatgatggtgtgtgtttatacacaaaggcctgaatatacacaccatgagcatttgaaggtctttgtcaaggttgtttctgtttctgatctcttgcctactttaaaacccaagaggtagaacattatgcatattacaggcaaaactatgcttgagtttatagcaatgtagtttgtagaaaggattcctgggatgttttactaagcctttcctcctccattcaacattatatgaattgttaagaacatataaagtaccactgttgaatgtgacttttctatactgttagttaagaaaccaagactagtgttagctgagtaactggcatgttgatgcaacctatacaggttttgtatttaattaggttccttattcagttattcaagtatccagttatttagtttcaaggtagatttctttgtttttatatttaataaaagacttgcatataagttcctcttcatgaaaatagtggctaggctagtgtgattttaagtatgtctggcaactcaaaatgtaatggattcatcaagctatttgggatttttaacataaaacacactgctgcttgattaatgtgttcagttttcccctggatatttgctattaggctgatagccatttggttggattcttctggagagtaattgattctctaaggtaatggggtgctgcagtgggtgtagcattcacccaggtcactagaatcctacctgtttcatcacatagaaggccctggccatggggaagagtgaatgcagcttctccggatgccttatttccacagacatgctgatatgctggaacagtctggctccaggagtattaatatacttttttgagactgtctacaaaatactattttgtaaaaactatgcctttacatagacattgataggttatatttgttttataacaattgtgtacctaatgtttgtgattaattttgagatttatgtatatttataagcctatcttatgtaaatttttactctaagatgtgtggcacattactaataaagacgtggatttctatttatgtaaagtaattgtagcaatattcctagatgctacctaaatgattgttctgtccatttgccatcacaaatacttttatctttggatgattatgttagtcagaatatattaattagatttaaactttaaaataagaattacaacatagtttgaaattcttcctgttgaagtaattaaagttagtttataattcctta

SEQ ID NO: 126574 - DNA, 4189 bp, Homo sapiens
aggctctcagttcttcagacctgctctatctcacctctcattttgttcatattctccacctcttgtgcttgatgaactcctattcacctatcaggtcacaacttaaatattttttcctccaaatctctggactacataggtccaggcccccatcaaatgctcccatagcacattgggcttcctcatcaacatgctcgttatacttttctagaattgctggcttgtcctccttgttatctccctaatgcagagaccattactcatcattgtagcagatatttatccatatcaggtactcagcaaacatttgtggaatgaatctatatgtgaaactatacttctatggcaagtttgtttggttcagaaggcttgcatttcatgtatattgggagactggccaacatttttatattcttcctcctatgctcaaaccataaataattatgttagcaaacactgaactttgtcttttgaaacataaatagaaacatccttagtaacagtactaacagtaatcatttttcagaaataagaattcacaccagtgatacagaatggcctttgaccattatctcagagaactagcagtcgatagacatgctgaagtgataattccaaaaacttcagtttcattcatccctacttaaatataagagaatcaacttctattttatgtctgtattcccattttctaatatactacttgtcacagaggagatgcccaaccagtgtttttcgtaaagtacctgaatagattaataataatgctagtgaaatatatttagtgctgttctaagcactttacatgaattaactcatttaatcctcaccgcaaccataggaagtagattctattatttatccaattttacagatgaaaaaactgaggctggtcacttgacataaattaccagtgctggccaggactttagagaccatttaatccaatgctcttattttacagaggtgcagctgaagcctaaggaggtgatatgatttcctacacattcatgcaccttcgtgcacatccattaaaacttttattaaatggaacccactatccatactccaattagctaggtgccttttttcccccatttagtaatttacaattaattggaggactttttatagttatatttagaggaaaggagcatgttttactctatatcaactttcttttctgcttaaaagcattttgattctttattttaccagtcattttagttcttttaataggtttaatacacagatcaaacaagacttaaatacatttttaacaatgtaacaatttaaaagaaattgcctaaaacctaggtcttctaacttggagcccagtgctttttttattgctccgctgagtcaaaaggtgaatatataaacatgatttcagatagaatgcagaagctgtatttaattaagttggcttttgtcattaaagaaatcagaaagtttggacaactcaggaatggatttccatcctagatggtatttactactatttctggaattaagtttactgtctatattcaggattttgtgcataagagacgtgaccactgaggttgtgtgtcattcttatctctactccaggggtcagcaaactttctctgttaagggtcagatagtagttttttggcttttcagtctctgtttggctctgctataaacaatacataaatgaatgagcatggctatgttccaataaaacttaattgacactgaactttgaatttcatgtacttttcaaatgtcacaaatgttttccttttgatttttttcagaaagccattaaaaaaatccaaagaccattcttagcttgcaggctgcacaaaaacaggaagcaggcggggtttgcttatggactgtggctttcccacccttgttcttagatagggacacaccaatatatcatgattagttgtaaaggatactgccagtaacatattattactggttagttgtaagaatatcaaagttagtgaataatttgcttttaaaataaattattgttgatttatttttataaataaatggcacagggcatctcatgctcttgcattctaatatattttctggaattgatgcaaaagtggtggcagtaaagtacagagccggctaagcagcagttttgtcttaagtaactgtggtgatcatggacaaccattgcgctgaactgctcttcatggtaaggatttcagtgtttcagagtaattcattaacctagagatgttttaaaaagttgtatcggccgggcgcggtggctcaagcctgtaatcccagcacttcgggaggccgaggtgggcggatcacgagatcaggagatcgagaccatcctggctgacacggtgaaaccccatctctactaaaaatacaaaaaaaattagctgggcgtggtggcgggagcctgtagtcccagctacccaggaggctgaggcaagagaatggcgtgaacccgggaggtggagctttcaatgagccgagattgcccctctgcactccagcctgggtaacagagcaagattccgtctaaaaaataaataaaataaaataaaataaaataaaataaaataaaataaaagttgtatcaaaatctgctgcaccatgggagtgttttacacatgtgatgtggcatctaccttatgtaccataatggatgccgtgtataattgtatgtccttgttctctaaatggaattggttatgtttagtgaacagttaggtggttctccgtgtgtttatatacacagacgatccccgaatttggatggttcaacttaagagttttcaaacttacgatgatatgaaagtgatatacatttgatacattcctacaacttacaatggggttatgtcccataattgttttgacttatgatattttcaacttacaattgatgggtttactgagacataaccctcttgtaacttgaggagcatgtgtatatttgtacatacatgatggtgtgtgtttatacacaaaggcctgaatatacacaccatgagcatttgaaggtctttgtcaaggttgtttctgtttctgatctcttgcctactttaaaacccaagaggtagaacattatgcatattacaggcaaaactatgcttgagtttatagcaatgtagtttgtagaaaggattcctgggatgttttactaagcctttcctcctccattcaacattatatgaattgttaagaacatataaagtaccactgttgaatgtgacttttctatactgttagttaagaaaccaagactagtgttagctgagtaactggcatgttgatgcaacctatacaggttttgtatttaattaggttccttattcagttattcaagtatccagttatttagtttcaaggtagatttctttgtttttatatttaataaaagacttgcatataagttcctcttcatgaaaatagtggctaggctagtgtgattttaagtatgtctggcaactcaaaatgtaatggattcatcaagctatttgggatttttaacataaaacacactgctgcttgattaatgtgttcagttttcccctggatatttgctattaggctgatagccatttggttggattcttctggagagtaattgattctctaaggtaatggggtgctgcagtgggtgtagcattcacccaggtcactagaatcctacctgtttcatcacatagaaggccctggccatggggaagagtgaatgcagcttctccggatgccttatttccacagacatgctgatatgctggaacagtctggctccaggagtattaatatacttttttgagactgtctacaaaatactattttgtaaaaactatgcctttacatagacattgataggttatatttgttttataacaattgtgtacctaatgtttgtgattaattttgagatttatgtatatttataagcctatcttatgtaaatttttactctaagatgtgtggcacattactaataaagacgtggatttctatttatgtaaagtaattgtagcaatattcctagatgctacctaaatgattgttctgtccatttgccatcacaaatacttttatctttggatgattatgttagtcagaatatattaattagatttaaactttaaaataagaattacaacatagtttgaaattcttcctgttgaagtaattaaagttagtttataattcctta

SEQ ID NO: 126575 - DNA, 2541 bp, Homo sapiens
aacaacgagcttaagtccctcaccagcaagttcatgaccacattcagtcagctccgagatgtgcccgtggagaagctggccgccatgccagccttgcgcagcatcaacctccgcttcaacccactcaacgccgaggtgcgcgtgatcgccccgccgctcatcaagtttgacatgctcatgtctccggaaggcgcaagagcccccctaccttaggccaccctcctcatgcccacccagcaagggacagaggccacaggcctggaaccctggaagggagggaggcccatgggaggccaagcctgggggctgggggcgggtgggccgagcagcacgtggtgggtggggtgcagctggtctggatagatagcttacagcagtagtgggctctggaatgcccaagggaagaggcaaggtggggcctgcagcctggactcggcactcacagctgctgtgcaaactcaggcagatctcctgccctctctgagccttgtcacttgaaaaaaacaggaccctttccctcctttgggctccctggaggtttttaagcagtacgtgcctccaagttacctccagatcagcaggcacaggtgggcattgccaggtattttctgagcccctgcgggtttgaggccttgtttttagtgctgagagccagttgctgccctgagaagagaagacaacctccatctatttattgcttcctgagaactgacctggatgcggccctctgcagggcccagtcttcagtcctgtggtccctggactggtgggaacctgaactaggagtcctgggagagctgtggtgggaatatgggctggcactgctgcagggcaagaacattcatgtaggagcccgaggaccagcaggctgggaatggggagcaagtcacgtcagctctgtcattccccacagttaacaaattggcggggtgggaagtcctgagtgctccgtccctctagcatcactcctgagctgcgggagaggtggcccagagaacagcagagtcagttacacctgcagctcttgtctaaagtgattagatggccaccctcaccactgtccagtccagcagcagcctggctgccttgtcatggcctcctgggggcagaaggcgatgtggaccacgggatttgtagccagccagctcccaggccaacgcccaaagccctgatgacctggttcttctgaggccctcaacctggcatcttagggtatggtcaggcaacagggtgaccagctgtcctggtttcccaggacatggaactttcaatggcctggggctcttgcttcccgagaacgcctgtggcttgaagaaccttgactgcttggtcctcaggtatctacctcccaccttctcctcatctgtggagcaagccaactcagtgccccagaccccacctgatctgcatctttgtttgcatctccagagacacctgaggccccagagcttgaggcaaagccaggccgtccaaatcctgtgtgccgtggacgagtggccactttactactcctaaggctaagatgttgagagctcagaccactgctcagagcagtaatccctgctcagaatgctcccagttccctcgtccctgcccaggtctcttgtctcttgggaaggaactgataggtcgggccattgttgggccatcactgagcgctcagtatctcaagagactctgttcattctgctcgtatcccaaggcctggttggtcaaactctgggcaaagggttttcaggatgaggaggtcaagacaggatgtccagagctaccgagttcatctgtgggtgttgggggcaagtgggggctgaagtcctgtgcaggctgcgctggccccacctgccttgtgccctggagtggggtttctccttgttgaagaagaggcatccttctctgatgtgcacaaacacaatgtatgaccagagccttgcaactcaaagtgtggtctgtggaccagcagcggcagtgacacctgggagcttgttaggaatgcagagtctaggcctcaccctatacctcccgactcagaccctgcattttagcaagacccccagctgattcctataagcactttagagtttgagaagcaaggacctaggctggggatgtcctccgagcagagggtgaagtttctctcagttctctccctgccacttccagggatctgagcctgtgttcagcctcctccctaacccaccctgggagacacttggcctgttagattgttccagagtctgcatggcactcctgaagaagggagtgtgacctgcagtcaccaggagatgagggttaggtgtgcccagccctccagacccggcctttctggttaacccctgcatgccaagctgcctgctgccccaggtcctcacctcaggcctttgaaggggcagcttctggaagttgttttctcctctgcttggagagtttgcccttgtctgtcttggaaagtgtgggcagccacagatgcccccaaatcagagctcacagtgagtgagcccctaagcttcagtctgcaataaagaatgcattggtttcatctgc

SEQ ID NO: 126576 - DNA, 2252 bp, Homo sapiens
aacaacgagcttaagtccctcaccagcaagttcatgaccacattcagtcagctccgagatgtgcccgtggagaagctggccgccatgccagccttgcgcagcatcaacctccgcttcaacccactcaacgccgaggtgcgcgtgatcgccccgccgctcatcaagtttgacatgctcatgtctccggaaggcgcaagagcccccctaccttaggccaccctcctcatgcccacccagcaagggacagaggccacaggcctggaaccctggaagggagggaggcccatgggaggccaagcctgggggctgggggcgggtgggccgagcagcacgtggtgggtggggtgcagctggtctggatagatagcttacagcagtagtgggctctggaatgcccaagggaagaggcaaggtggggcctgcagcctggactcggcactcacagctgctgtgcaaactcaggcagatctcctgccctctctgagccttgtcacttgaaaaaaacaggaccctttccctcctttgggctccctggaggtttttaagcagtacgtgcctccaagttacctccagatcagcaggcacaggtgggcattgccaggtattttctgagcccctgcgggtttgaggccttgtttttagtgctgagagccagttgctgccctgagaagagaagacaacctccatctatttattgcttcctgagaactgacctggatgcggccctctgcagggcccagtcttcagtcctgtggtccctggactggtgggaacctgaactaggagtcctgggagagctgtggtgggaatatgggctggcactgctgcagggcaagaacattcatgtaggagcccgaggaccagcaggctgggaatggggagcaagtcacgtcagctctgtcattccccacagttaacaaattggcggggtgggaagtcctgagtgctccgtccctctagcatcactcctgagctgcgggagaggtggcccagagaacagcagagtcagttacacctgcagctcttgtctaaagtgattagatggccaccctcaccactgtccagtccagcagcagcctggctgccttgtcatggcctcctgggggcagaaggcgatgtggaccacgggatttgtagccagccagctcccaggccaacgcccaaagccctgatgacctggttcttctgaggccctcaacctggcatcttagggtatggtcaggcaacagggtgaccagctgtcctggtttcccaggacatggaactttcaatgctaaaactgggacagtacccagcaagtggggatggttggtcccctaccaggagagggcctggggctcttgcttcccgagaacgcctgtggcttgaagaaccttgactgcttggtcctcaggtatctacctcccaccttctcctcatctgtggagcaagccaactcagtgccccagaccccacctgatctgcatctttgtttgcatctccagagacacctgaggccccagagcttgaggcaaagccaggccgtccaaatcctgtgtgccgtggacgagtggccactttactactcctaaggctaagatgttgagagctcagaccactgctcagagcagtaatccctgctcagaatgctcccagttccctcgtccctgcccaggtctcttgtctcttgggaaggaactgataggtcgggccattgttgggccatcactgagcgctcagtatctcaagagactctgttcattctgctcgtatcccaaggcctggttggtcaaactctgggcaaagggttttcaggatgaggaggtcaagacaggatgtccagagctaccgagttcatctgtgggtgttgggggcaagtgggggctgaagtcctgtgcaggctgcgctggccccacctgccttgtgccctggagtggggtttctccttgttgaagaagaggcatccttctctgatgtgcacaaacacaatgtatgaccagagccttgcaactcaaagtgtggtctgtggaccagcagcggcagtgacacctgggagcttgttaggaatgcagagtctaggcctcaccctatacctcccgactcagaccctgcattttagcaagacccccagctgattcctataagcactttagaagtttgcccttgtctgtcttggaaagtgtgggcagccacagatgcccccaaatcagagctcacagtgagtgagcccctaagcttcagtctgcaataaagaatgcattggtttcatctgc

SEQ ID NO: 126577 - DNA, 2597 bp, Homo sapiens
aacaacgagcttaagtccctcaccagcaagttcatgaccacattcagtcagctccgagatgtgcccgtggagaagctggccgccatgccagccttgcgcagcatcaacctccgcttcaacccactcaacgccgaggtgcgcgtgatcgccccgccgctcatcaagtttgacatgctcatgtctccggaaggcgcaagagcccccctaccttaggccaccctcctcatgcccacccagcaagggacagaggccacaggcctggaaccctggaagggagggaggcccatgggaggccaagcctgggggctgggggcgggtgggccgagcagcacgtggtgggtggggtgcagctggtctggatagatagcttacagcagtagtgggctctggaatgcccaagggaagaggcaaggtggggcctgcagcctggactcggcactcacagctgctgtgcaaactcaggcagatctcctgccctctctgagccttgtcacttgaaaaaaacaggaccctttccctcctttgggctccctggaggtttttaagcagtacgtgcctccaagttacctccagatcagcaggcacaggtgggcattgccaggtattttctgagcccctgcgggtttgaggccttgtttttagtgctgagagccagttgctgccctgagaagagaagacaacctccatctatttattgcttcctgagaactgacctggatgcggccctctgcagggcccagtcttcagtcctgtggtccctggactggtgggaacctgaactaggagtcctgggagagctgtggtgggaatatgggctggcactgctgcagggcaagaacattcatgtaggagcccgaggaccagcaggctgggaatggggagcaagtcacgtcagctctgtcattccccacagttaacaaattggcggggtgggaagtcctgagtgctccgtccctctagcatcactcctgagctgcgggagaggtggcccagagaacagcagagtcagttacacctgcagctcttgtctaaagtgattagatggccaccctcaccactgtccagtccagcagcagcctggctgccttgtcatggcctcctgggggcagaaggcgatgtggaccacgggatttgtagccagccagctcccaggccaacgcccaaagccctgatgacctggttcttctgaggccctcaacctggcatcttagggtatggtcaggcaacagggtgaccagctgtcctggtttcccaggacatggaactttcaatgctaaaactgggacagtacccagcaagtggggatggttggtcccctaccaggagagggcctggggctcttgcttcccgagaacgcctgtggcttgaagaaccttgactgcttggtcctcaggtatctacctcccaccttctcctcatctgtggagcaagccaactcagtgccccagaccccacctgatctgcatctttgtttgcatctccagagacacctgaggccccagagcttgaggcaaagccaggccgtccaaatcctgtgtgccgtggacgagtggccactttactactcctaaggctaagatgttgagagctcagaccactgctcagagcagtaatccctgctcagaatgctcccagttccctcgtccctgcccaggtctcttgtctcttgggaaggaactgataggtcgggccattgttgggccatcactgagcgctcagtatctcaagagactctgttcattctgctcgtatcccaaggcctggttggtcaaactctgggcaaagggttttcaggatgaggaggtcaagacaggatgtccagagctaccgagttcatctgtgggtgttgggggcaagtgggggctgaagtcctgtgcaggctgcgctggccccacctgccttgtgccctggagtggggtttctccttgttgaagaagaggcatccttctctgatgtgcacaaacacaatgtatgaccagagccttgcaactcaaagtgtggtctgtggaccagcagcggcagtgacacctgggagcttgttaggaatgcagagtctaggcctcaccctatacctcccgactcagaccctgcattttagcaagacccccagctgattcctataagcactttagagtttgagaagcaaggacctaggctggggatgtcctccgagcagagggtgaagtttctctcagttctctccctgccacttccagggatctgagcctgtgttcagcctcctccctaacccaccctgggagacacttggcctgttagattgttccagagtctgcatggcactcctgaagaagggagtgtgacctgcagtcaccaggagatgagggttaggtgtgcccagccctccagacccggcctttctggttaacccctgcatgccaagctgcctgctgccccaggtcctcacctcaggcctttgaaggggcagcttctggaagttgttttctcctctgcttggagagtttgcccttgtctgtcttggaaagtgtgggcagccacagatgcccccaaatcagagctcacagtgagtgagcccctaagcttcagtctgcaataaagaatgcattggtttcatctgc

SEQ ID NO: 126578 - DNA, 418 bp, Homo sapiens
cagatgtggtttggagcacagagaagtcaagcaattgtccaaggccacacagaacgggacaaagccaggacttgaatccccacggtttggccccaggtctttgctcttcactactcaatacactgcttgtccactagcagaggggtgtgggaatcgtaatgacaaagcagcctgttgagcacccactccaggcaccatgctgagcactgtgcgtggttaacgtgccggacctccccacaccgagtcgttggccacatgtgggtttgcatctgagtccagcgcttgcatccaagcctcagcgcttgcatccaagcctcagcactggcccactggcaggagcacgcttttggtcctcactccctggagggactcatgccctcaccctgtccagcacgagtttggctccggggactgttgg

SEQ ID NO: 126579 - DNA, 426 bp, Homo sapiens
cagatgtggtttggagcacagagaagtcaagcaattgtccaaggccacacagaacgggacaaagccaggacttgaatccccacggtttggccccaggtctttgctcttcactactcaatacactgcttgtccactagcagaggggtgtgggaatcgtaatgacaaagcagcctgttgagcacccactccaggcaccatgctgagcactgtgcgtggttaacgtgccggacctccccacaccgagtcgttggccacatgtgggtttgcatctgagtccagcgcttgcatccaagcctcagcgcttgcatccaagcctcagcactggcccactggcaggagcacgcttttggtcctcactccctggagggactcatgcccaacccacagcaagctctccaggcacactctaagtgattgttccccgct

SEQ ID NO: 126580 - DNA, 261 bp, Homo sapiens
tttcagagtaagttcttaaactgaggaggcatcgtgagagcgcagttcaagaaagaataacgctccgactcatacccaatggatatgtgtacttttttagaagccagacacaaaagaccacatatattgtgtaattccacttatatgaaatatccagaatagaaaaagccacagaaataaaaaggagatcagtggttgccagcggacaggtggaggggaagatagggagtgattgctagtgtgctagctgaataatctcaa

SEQ ID NO: 126581 - DNA, 625 bp, Homo sapiens
ttgaatcaaatccggctgcccctagaattcattctaattatttttgttttctgaactctcaggagtcgacactttttttttccttttttaaatcactcgttgaacatctttatggccctctgaagcatttctcagatgcagaaaagtttctttgctctttattctttatttcttaagttagtgttaatatttccaaacatagatcattttcttttatgtgctgcagtagataatagaagaagcaagatatatcagaacaagtctttccaaaatgtaagtaaatacctggagagatttgaaatgccttcctagacccaaatacctaaagttgtattcttgttctatggcaattgaaaatacctttttcatatcaaatattaactctgcatcaaaatgacgtgtcttacaagttttgaatgtaacttgtttgcagtcccgtacgtagcctgatgacatgattgtttcttaatcaagtgtcatgttaaagagtgtatgtatatattcccacaaaagctgttactgtaatttcttgcttaaactctcaaagtgtaatttaccccatcaagaaaaatattttgtcagggcacggtggctgtagtcccaaggcaggaggatcacttgagcc

SEQ ID NO: 126582 - DNA, 245 bp, Homo sapiens
gctctttgggcaaggtgggtaagggcgtgggtgagggctccggggtcaacgcgggaaccacactggagtcaggggtggacaaagcaaagtcagggcttgtcaagatgaggtcggggttcgtccgggaggccgggtctggggtgggtggtgaagtgtccggagcgtcagaggtcgcctcggacgtcaaggctgagtggggagtgagctctcgactggagtcagaggtcagcgctgggcctgggggt

SEQ ID NO: 126583 - DNA, 1566 bp, Homo sapiens
cgcggctgtaccgcgcgggcgaggacgccgtgtgggtgctggacagcggcagcgtgcgcggggccaccgccaacagctcggccgcgtggctcgtgcagttctactcgtcgtggtgtggccactgcatcggctacgcgcccacttggcgggccctggctggggatgtgcgagactgggccagtgccattcgcgtcgcagctctggactgcatggaagagaagaaccaggcttcctttgcctgaagctgttttgggaagggtctccacacaggcactgatctcccaagctttggtcatgatgtcttttaccatttgataattttaaacattgtttttaaacccaaaacatttagtggtccgttgcctctgaagatgtaaacaaacaaatacactatttctgggaacatttatattgagattctttgtggctattggtgtgtctcacaggcaaaatttgatttggctaaaataggctcagatgtatttgtgtgcccgtgtgtgtgtgtgtgtgtgtgtgtgtgtgtgtgtgtatgagagagagagagactttgacggttgtagatattttttccgctttgcctactttatgttgtataatcatgtgtttactaacaagttgatgacatggatgtattcataagaccatgtaatattgatgtgattgttgtcgcttgagaaaaaaaggcaacagctgattctttcaacaactgtcacagaatggctgggctgagaacgctgcccagggccctgcagctggcgggagaggtgtctggtgggagcggtgtctggtgcgtcagcctgctgcttcgtgtctcactcgagagttgcttctggtttcacactttttaacccctctgtgctttagcagccgtgaccttgccttcattgcttcatccagtgcaggcctgggttattgaagacaccaaagtgtttctcttccagtttgaaaaccaggcaggtttacacgtgggtttcagtgtatttgcctttgaacccttcaaactaaactttagccttttggctggtgttgaatgtctttagctggggtgacctggagtgacctgggacggtgttgtggtttaccgtctccagcttcagcctttccagaaacccttgtggagggcagtgttggctgcaggtttcatcatattgcagtttgaggtcaccactatttggggaacaagcttgcgtcctgctgaggggcaggattttcagcagagcgtcggtggggctgggccgtcgtggaggtggccccaggagtcatatggccatactcagacacaccttgtgtggcctgctcagagctggatgccacctttaggcaatgtttagagtctattttctaaagttttaagtattttaagaggtattgagactaatgaatataatagttcagtaatttaaatgcttatttattttcagtggaaggatttttattaaaaagaagctaattgacatggaaatgtcagtgaaatttcttacctgcaaggaaagtgaacattttgtatttaagtaaactataatgtgcacattttaataaagaaatctgacatttgaaaaaaaatga

SEQ ID NO: 126584 - DNA, 2314 bp, Homo sapiens
ctctttttaacaggggaagacctcggggtaatttctctgtgtcaaaatggcgcatccctggcgaatctcaaagtccgcttcaagcctccttctcccagggtgtttaccgtcacaatagtagctctctggatgttcccatcttgcttccaggatcgtgacaatcgacgggggttgcagactttccacggccagtgttagttcgttcccccacaagcacgtgtacatccttcgcatgcccttcaatttgtgccccatcctgcaggccttgtgttttggtatttggagtacttcgccgcatccccccgtcggctcttggctcccccccccacttggccctgcgtgcaccctccagtccgctcgctccccgtcgcccccggtcccgcccacgccccctgctccaggctgccaagtgttttcttttagccgggcggggacagacagagccggaagcgcagtcggcctctgcagcccctccaagcaagtgctccagggactatcctgtgtttgtagctgcttccctagggcaggttcctgagggctctccttgttcctccgggtgttcgacaccagacgtggggatttcaacaggggaggagccaaggaattctgtggctgtgctgcgtttcagaaaataacccccagaggccttgggctgtggacctgggggttggaaggatgggggctcatttaaccctcagaggcagcgcctttgtctgtctatctggtgacaagagagagacaagtaaatgggggccgttgggacggcgggtgcctggagggcagctctgggctcagcgggcagtgcttagagcacaggcccctctgttgggggatggggaggagagcagtctgcccttgggagcgtaggccccagggagacttctaaagccccccctgtcgtctgctcttcacccagcaccacagaggcacctgctgcacacacaagcatctcactcggcccacggagggggccaggcttcctttgcctgaagctgttttgggaagggtctccacacaggcactgatctcccaagctttggtcatgatgtcttttaccatttgataattttaaacattgtttttaaacccaaaacatttagtggtccgttgcctctgaagatgtaaacaaacaaatacactatttctgggaacatttatattgagattctttgtggctattggtgtgtctcacaggcaaaatttgatttggctaaaataggctcagatgtatttgtgtgcccgtgtgtgtgtgtgtgtgtgtgtgtgtgtgtgtgtgtatgagagagagagagactttgacggttgtagatattttttccgctttgcctactttatgttgtataatcatgtgtttactaacaagttgatgacatggatgtattcataagaccatgtaatattgatgtgattgttgtcgcttgagaaaaaaaggcaacagctgattctttcaacaactgtcacagaatggctgggctgagaacgctgcccagggccctgcagctggcgggagaggtgtctggtgggagcggtgtctggtgcgtcagcctgctgcttcgtgtctcactcgagagttgcttctggtttcacactttttaacccctctgtgctttagcagccgtgaccttgccttcattgcttcatccagtgcaggcctgggttattgaagacaccaaagtgtttctcttccagtttgaaaaccaggcaggtttacacgtgggtttcagtgtatttgcctttgaacccttcaaactaaactttagccttttggctggtgttgaatgtctttagctggggtgacctggagtgacctgggacggtgttgtggtttaccgtctccagcttcagcctttccagaaacccttgtggagggcagtgttggctgcaggtttcatcatattgcagtttgaggtcaccactatttggggaacaagcttgcgtcctgctgaggggcaggattttcagcagagcgtcggtggggctgggccgtcgtggaggtggccccaggagtcatatggccatactcagacacaccttgtgtggcctgctcagagctggatgccacctttaggcaatgtttagagtctattttctaaagttttaagtattttaagaggtattgagactaatgaatataatagttcagtaatttaaatgcttatttattttcagtggaaggatttttattaaaaagaagctaattgacatggaaatgtcagtgaaatttcttacctgcaaggaaagtgaacattttgtatttaagtaaactataatgtgcacattttaataaagaaatctgacatttgaaaaaaaatga

SEQ ID NO: 126585 - DNA, 318 bp, Homo sapiens
ggcatattgaggccgtaatttggatcagatcttgctggtctgagcatacgcaacaagagagagaaccctggctgaatttttgcgagtggctccagtagagctgctggtgacccatcttgctctcaggagtgcagtgagacaaaaggaaagagctccagttaatttttataccttgtaattaacagggactactatgttaaactgggagggagcccaagtatttcccaaactggggagtcttgacattccctagaaatgtctttctgttgtacctgctgatggactctcttagacaatgaatcttgtctacctgggtag

SEQ ID NO: 126586 - DNA, 448 bp, Homo sapiens
aaggggtggtgtcccaggctagagctgaagggtcccagagctccccgtcactgccctccaggaaggcactgcctgcctggatggtgaaggcaaggcttaggaggcagcccctctagcagcatctgaccatgcagtacctgccctcactgaagtgctacaggaagccatcagcttggcccagtgctgagcacccaaaagcctgcacccagccccttcctcttttaaagtcaagattccagggaagagggtcaaggacaggaagggggaggatccaaaaatgagacagcaaggccagagttgccttagttggtgcgaaatgcagcaatgaccaagctctgtgcatggtgccaaagagacattccaattccctgcatccgcatagtcagcacagggccagcttggagccatctgcagacatggacccttcaagcaaagcacgccggctgga

SEQ ID NO: 126587 - DNA, 521 bp, Homo sapiens
ctccacggccccatggctaatggctgccatactggacggcaaacactcaacatttccatcatcacagacggtcctactggaccgactcccagcagcacaggccgcacagatcactgtccacctgccgcccactctccctctctgctgagtatatttaggggcagcaacaggtctagcttaaagacgtttccgagctgctggaagccaggcatgatgacatgatcaatatctgggcctgagatgtaagcaccagtgttgtgttgaactccaggaaacctctaagagaaagctgccctgctggggacggagcttctccggcagtcctgcggctccctctcctccacactgtgactcatccatgacagccagcgacggtcagggcacggaggtcatgcccaagcacacacgagtgaaccacagaaggctgtcctggatgctaagcagtcactaattctgccctggcctgctgaccttctatgtggagaagaagtgcacttctggtctctttcatattcttgata

SEQ ID NO: 126588 - DNA, 624 bp, Homo sapiens
ccgtgatgtaacatggaatgtttttcaggggctctttgtaacatcgtccagtgaggagcgggcccctaatgctctcacttcagctgagttcatgcttttgtatgccttattttagttgccgtcagacacaggaaaccaccaggtaatttatctgcctgccagtgggaggactcacgttgactggattcagactctccctttctgtctctgttggtctctctcttttctctcccctccctctgcctctctctcctccctttctttctctctgtgtctctctcacatacacactcacacacactctcacgccctgtctcgtacatatacatatcagcacacacacttacacatagtcactgacacacactaacactcaattcactctcacacagtctcatacacatatgcacacattcttacacagttgctcacacatgctcacacttatacataaactcagtctcatgcactctcacatacacatacacactatcacacacactcttacacagtcgctcacacatgctcacatacgtaacaccctcacacagtctcatacacttacgcactcacatactctcactgtctcatttacgtaccgtcacacacactcttacacacagt

SEQ ID NO: 126589 - DNA, 749 bp, Homo sapiens
ctcgaggggctcctttgtacacagccagccgcttctcttgggaacaagctgtcctgggggccttacccacgaggcaggagtcaggatgcaccagctcagcaccaggaagtcatcctggacccaggacagtggaaaggcaggcagagggagaggcactctgaggtcaggcagggtaagccagttggcagtcaggttaggtctatgaggagaacctcgagttaggaattcccggttctcagaattgttatcactctggtgcatgctgtcacaggggccgttgcgtttggctttgtggagggcctggacccttccacaagaacacccgaggttccagggcactcaggacaatgtttccaaggaacgagtcgaccaggaaagaacagtgagttctgcaaggggctgcgttatcagcatgctctccctgccttgggcttttctttccgtcatgttttccttttcgtgttccttctctgatttctcttgtctctgctgctcacaggcctgcccatcagtcagtacagatactcagtgtctggtttctggccagctccgtggagggggctttaagcagaattctgactctttggggtgggggattaggaactgggggaaacttaatgatccagagattcccccaagaggagtgtctggaaggatctgtgcctggacagtggcagaacctttccagtgttcttttggttctgatttcatcagtctcaataaagttccgatctctctttaaaaaaaag

SEQ ID NO: 126590 - DNA, 453 bp, Homo sapiens
ctcgaggggctcctttgtacacagccagccgcttctcttgggaacaagctgtcctgggggccttacccacgaggcaggagtcaggatgcaccagctcagcaccaggaagtcatcctggacccaggacagtggaaaggcaggcagagggagaggcactctgaggtcaggcagggtaagccagttggcagtcaggttaggtctatgaggagaacctcgagttaggaattcccggttctcagaattgttatcactctggtgcatgctgtcacaggggccgttgcgtttggctttgtggagggcctggacccttccacaagaacacccgaggttccagggcactcaggacaatgtttccaaggatctgtgcctggacagtggcagaacctttccagtgttcttttggttctgatttcatcagtctcaataaagttccgatctctctttaaaaaaaag

SEQ ID NO: 126591 - DNA, 1078 bp, Homo sapiens
ctcgaggggctcctttgtacacagccagccgcttctcttgggaacaagctgtcctgggggccttacccacgaggcaggagtcaggatgcaccagctcagcaccaggaagtcatcctggacccaggacagtggaaaggcaggcagagggagaggcactctgaggtcaggcagggtaagccagttggcagtcaggttaggtctatgaggagaacctcgagttaggaattcccggttctcagaattgttatcactctggtgcatgctgtcacaggggccgttgcgtttggctttgtggagggcctggacccttccacaagaacacccgaggttccagggcactcaggacaatgtttccaaggaacgagtcgaccaggaaagaacagtgagttctgcaaggggcatccacggagcctgtgataggggctgatgagatggaatctgtcctggacttttcttctcattaaccaccctccgcaaaccccagaacccctcgcctcatctctgtactgtctgccctcttgggggatgggccctcccactttcccctgcctgctcctccatgctgtgagctgctttggcagatctgtttttctgtgtagtcaggggaaaaacaaaaaaagatgcacaactgtgtgggcattgtcatagctgttggtgtcaccactgctttgggggaaatggctgggatgaggctaatacattcatgcaatatttatattttcagggggctgcgttatcagcatgctctccctgccttgggcttttctttccgtcatgttttccttttcgtgttccttctctgatttctcttgtctctgctgctcacaggcctgcccatcagtcagtacagatactcagtgtctggtttctggccagctccgtggagggggctttaagcagaattctgactctttggggtgggggattaggaactgggggaaacttaatgatccagagattcccccaagaggagtgtctggaaggatctgtgcctggacagtggcagaacctttccagtgttcttttggttctgatttcatcagtctcaataaagttccgatctctctttaaaaaaaag

SEQ ID NO: 126592 - DNA, 711 bp, Homo sapiens
ggattaattgcattcagtttgagaagcatggtattgaatgttacatgtaaacaaaacaatctatgcaggatcactttgtttcatttttcttttttctcccaacacctgggagtacttgggaatatcttccttttctgtttgtacaaatattagaaagtttccccctgggtcttggttgtctaatctttttctttttaatttagtcttaactgttttcctgatttatttttattttgctcttccctatgctgaagattttagaaaatgtaattagagtgtaataagaagtcttattgttaaaaaaaaatacgctgctttagtacttattaatataataatttggtagggaggaagataatcagacttgaaatgtacagcattaagatattctgaaaacatttttaaaactattcatttcgctaacccccaaaagaatgaaatgaaatgggtctccttttttctcctacatttcactaacactgatcagtttcttaaactgtttaatatcatttttagtgtccttagtgagaagtagcgtcttctgtataatgtaatttaaaaatatttgccaacattaaatgtgtgattatttcatatgatatctttgaggcttaattttaactcttaaaagattgaaacactttctgttgtgcattataagcaggtgtttagtatttcctttttcttcccatcctttagctccacctttag

SEQ ID NO: 126593 - DNA, 339 bp, Homo sapiens
tctctagaggatccggtccgtgatctcccactcggcctcccaaagtgctgagattacaggtgtgagccaccggccacaaaattattactactggtaattaatactactggtaagctagattgtttgagataccgtactctctagaggccttaaataaaaaataaattattgctagtaatatattttacatttttaatttttcttttattgaaaactgtctgtcatgagacagtaggttaagagcacagactcaggtgctaggctacatggtttgaatcttgctcagtcatttatcatttctgtggtcatctctttgtgcctagctcccctctataaaat

SEQ ID NO: 126594 - DNA, 706 bp, Homo sapiens
cttctctgggtgaggtggtacaaactccttggcatactctattcacctttgtggatcctgattgaatgccttgtcttaagtgtaagctccctgacccttactactagccgaaggttttgtctctgcaggtcaattccaaactaacaggcagatgctgttagctatctgcctccagggataaaccccatctttcaagcttgcttcttgcttgatgctttctgctgctttcttgcttttgtttcagctcgagtttgttgttgttttttttttttcctgtttctgtcttgaatgtagagggtatttttatttttattttttctgtttctctcttgagtgtatagtgtagagggggtttctgtcttgagtgtaggcctggagatttcccttatatggtacaaaccagcaatgaattaagaggtctcttttctccaagatctagtgttttgtactaggagaactctaaaaagtatctattccactgtagtgccaaagtacaaatttatttggatttattttttgccatcttattttttaatatatttctttttctatgttgtgcttctttcccacctttatctctcctatcttttgggatcagttgggttttctatttaatcatatattttccctttactgatttggaatgtgaatgttacaagtccttttgattatccttaaacatctaaaaatgctaccctctttccaa

SEQ ID NO: 126595 - DNA, 508 bp, Homo sapiens
gatgctagggtggaaggatggtcttagagagatagcaggggacaggtcagagggaattctggatcatgactttggctttcattctgagtgacatggggagtcgaggggacatgatttgacttaggttttaaggagtcactggctgctctgttgataatagactctgtaggggggcacatgaaaaggcagccagcctggccgcaatacagagtaccaatctgtaaaggaccctaaaaatagcgctgggaatgtaataaacaagacattgttggtactagaacttaccatagggaaagcactgtacacagggagggaaagagcccagggatgtttagttggttaacaaatatatctattgaatgccttcttagaaggataagctagtcagcaaaagggatagacattttgttttgctgagtcagaactccagtttccttcttagaccagagttcttgttgaatcagatcacttggagtgccccgtgtgtcagtcccactgccctcaggag

SEQ ID NO: 126596 - DNA, 560 bp, Homo sapiens
gtaaacactttaaaattatatggggaaatattttggggcaaggtatctgtctaagggcctagaaggctgtcctgtggagccagtccccactgtttcccttgttctttcttttctactttttgagtaacaaattctttcattaaaaaattttagagacctttaattacaaaaataatgtaaccacaccaaatgatgcatatgtataaaaaagtgatagtcccttcctcatcacttctccattcatctacttttcagaacaacttttaacagttccatgtgtgcacattataccttgaaaaaaagatgagtaactttttattacagttatctttttttaaaaactgtatcttggcatgtttgcaagatagaacataaacatctattgttactttaattcttgctttgtagtctgttgtatgattatcataatgtgtttatacatgttcctattgaagaatatttactttccagtttttgcagttaaggtactgtggtggtaagcattgttctacatactcttgcatgtttgcctttttttttttaaatttttttttatattt

SEQ ID NO: 126597 - DNA, 826 bp, Homo sapiens
aagggaaagataacatccaaagttttggaggtagtttaagcatttgtcttaagttttgtgtttgcaaaatactcttcagttgcctctcatttatccttacaagcctagccacacctgcccccagtgaacatctcatatttactgagaaataaaaatttagtacaggtgatttgccttgggtattgttaccagattgtgtttttgcccagtggagaagcagatgcatttaaaactgcacttgacacctgaaaaatcactgtcccagaagctactaagtcctttgtgaaattacaatgaggcggcgggctgaaccactggtggttctcctacccagggctcggcttcccacagacataagtgaatcagatgccagggtgtttcagtttaccgtagggggtgtgtaaaaagacgtaagattatttacttaggcagtgtagtgtggggacatcaccacagaccaatagtaagaaggttggccctgatgctgggctttttctaatagcatagacttgatcacatcattaacctctcttacctgtaaaatgaagacacctgcctttcctatgccacaggtggttgtatcaaatgaggtaatgtttgttaacattttttttgcagcctccgaagtactttggaaacgtactagcaccattctccgaggcccgatgatcgtacagtggctggaaacggcattttcgcatgtgcttttcctgagtctaggttgtcaggtggatccttcttaggctcctcagtttgaacaagctgtcagagtgtatcaaagaataccagataggaggagaagaaaaagtaacagctgaaaaaaaaa

SEQ ID NO: 126598 - DNA, 271 bp, Homo sapiens
gtaaaaaacaaaaaaacaaaaaaccaacaaaacaaaaacagaaacaacaaaaacatattggacgtgttcaggcagatttcccgtttaacatctgcatgtttctcagggacctgaaacctcagcactccttctggatacaaggctggcaggagcctctctgcctccctctccactgcaaaggagacccacgagggcaggggcttggcacatacggtgcctcttatctggtggcccccaagggtctcacagcatcctccctgcgtccctgtct

SEQ ID NO: 126599 - DNA, 428 bp, Homo sapiens
catcctgttcctcatagtcacattactgcacttcctgtctccacttctgcactatttatccctcacaccattgcaacgtcaataaaactgccactccctccactcgctctaaacctgatttttccccttgactctttaattttggttaggggcatagtcatccattctgtctcacaggtgagaaacctgtgagtctccttgggctcctacatctgcatctaattggtcttcaagtaccaccttctcctctctatctcccctgccctgtttagttcatctccaactttctcctggacatatgcaatactctgttattatctggtctttctgcttccaatcctacacatcctctctttcctcaaacccctcctacactggtgacaagattatgtattatgatactcatatcttacaccacacatatgtcc

SEQ ID NO: 126600 - DNA, 163 bp, Homo sapiens
aaagttcaaaattcgaaacacttctgactccaggcattttggataagggatacccaacctatattatgaagtggtagcaagaaaattacattgaaatggaacattttttcagtttatgtatccttttgcgaggtttttatttcaaaatatcacagtccaagcc

SEQ ID NO: 126601 - DNA, 704 bp, Homo sapiens
agccgtggcttatacctataatctcagcactttgggaagctgaggtgggcagatcacttgaggccaggagttcgagaccagcctggccaacatggtgaaactctgtctctactaaaattacaaaaactaaactaaactaaaataaataaaaatagagacgtaaatagtttaaagtaaaaggatgaaaaaagatacatggtaatactaatgaaaagaaagctggattggttgtcttaatatcagactaggtaggtttgagatccaaaaatattaccaggtaggaaacaggatgttttctaatgataaagagatcaattcatcaaaagaccataatattcctaaacatttatgagtttaataaagaatttcttaatacataaagcaagcactgatagaactactagaagaaatagacaaattcacaattagagtcagatatttcaacaatactttctcgataatagattaaaaaacatctagacagaaaattagagaatatagaagaattcagcagctatactgaccttattggcatttatagagcactccactgaaaaacaggccaggcttggtggctcacgcctgtaacctcagcagttgggaagctgaggcaagcaggttgtctgagcccaggagtttgagaccagtctgggcaacatggtgaaacgccttcgctacaaaaattagtcgagcatggtggcatg

SEQ ID NO: 126602 - DNA, 453 bp, Homo sapiens
gatagaagatacctgcttgcattatggtattgccaaatgtaatagccatccttaagtttctgagggtgttaatgagatttttatggagcaaagagagctttaaagtatgatgccctcataaactcagctattctacaaataatagctgttaatgcattacattgtaattactctatcaaagtttattcctctgacttgaaattttaatctagttcaaatccttcagcatatgtcctatccatttataatctgctattttttaactggtgaaagatgaactaaaaactacagtggaagaaaggaagtcttcagaagcctcccccactgcgcaaagaagtaaagatcacagtaaggaatgcataaacgctgccccagattctccgtccaaacagcttccagcacaagaacagcacaagaaccgcacgccagcacgagaaccagcacaagaaccac

SEQ ID NO: 126603 - DNA, 4095 bp, Homo sapiens
  misc_feature (2)..(2): n is a, c, g, or t
tnggtgaatatagaaagtttgtaaaaaaagaggtggtacggtcggaattcccgggatgtagcgacggcggccgggaggcggaagtggaggttgttgtggctccgagggctgttcgaggagctgctgctgctgaggcggcggcaactgcattgaggtggtggcggcgctgccggccccgggccgctcggcctctcggctcgccttccagcctcgcctgagcccgccggggcccgcgccggccagcgcctgccctatgagtgtgtcactggttgttatccgattggagctcgcggaacactcgcctgtccccgccggcttcggcttcagcgccgcggccggggaaatgtctgatgaggagataaaaaagacgacactagcctcagctgtagcctgtttagaaggcaagtcaccaggagagaaagtagcgattatccatcagcatctcggccgtcgagaaatgacagatgtgatcattgagaccatgaagtccaacccagatgaactaaaaactacagtggaagaaaggaagtcttcagaagcctcccccactgcgcaaagaagtaaagatcacagtaaggaatgcataaacgctgccccagattctccgtccaaacagcttccagaccagatttcattcttcagtggaaatccatcagttgaaatagttcatggtattatgcacctatataagacaaataagatgacctccttaaaagaagatgtgcggcgcagtgccatgctgtgtattctcacagtccctgctgcaatgaccagtcatgaccttatgaagtttgttgccccatttaacgaagtaattgaacaaatgaaaattatcagagactctactcccaaccaatatatggtgctgataaagtttcgtgcacaggctgatgcggatagtttttatatgacatgcaatggccgccagttcaactcaatagaagatgacgtttgccagctagtgtatgtggaaagagctgaagtgctcaaatctgaagatggcgccagcctcccagtgatggacctgactgaactccccaagtgcacggtgtgtctggagcgcatggacgagtctgtgaatggcatcctcacaacgttatgtaaccacagcttccacagccagtgtctacagcgctgggacgataccacgtgtcctgtttgccggtactgtcaaacgcccgagccagtagaagaaaataagtgttttgagtgtggtgttcaggaaaatctttggatttgtttaatatgcggccacataggatgtggacggtatgtcagtcgacatgcttataagcactttgaggaaacgcagcacacgtatgccatgcagcttaccaaccatcgagtctgggactatgctggagataactatgttcatcgactggttgcaagtaaaacagatggaaaaatagtacagtatgaatgtgagggggatacttgccaggaagagaaaatagatgccttacagttagagtattcatatttactaacaagccagctggaatctcagcgaatctactgggaaaacaagatagttcggatagagaaggacacagcagaggaaattaacaacatgaagaccaagtttaaagaaacaattgagaagtgtgataatctagagcacaaactaaatgatctcctaaaagaaaagcagtctgtggaaagaaagtgcactcagctaaacacaaaagtggccaaactcaccaacgagctcaaagaggagcaggaaatgaacaagtgtttgcgagccaaccaagtcctcctgcagaacaagctaaaagaggaggagagggtgctgaaggagacctgtgaccaaaaagatctgcagatcaccgagatccaggagcagctgcgtgacgtcatgttctacctggagacacagcagaagatcaaccatctgcctgccgagacccggcaggaaatccaggagggacagatcaacatcgccatggcctcggcctcgagccctgcctcttcggggggcagtgggaagttgccctccaggaagggccgcagcaagaggggcaagtgaccttcagagcaacagacatccctgagactgttctccctgacactgtgagagtgtgctgggaccttcagctaaatgtgagggtgggccctaataagtacaagtgaggatcaagccacagttgtttggctctttcatttgctagtgtgtgatgtagtgaatgtaaagggtgctgactggagagctgatagaaaggcgctgcgttcgaaaaggtcttaagagttcactaacctcacattctaatgaccattttgccttcctgcttggtagaagccccaactctgctgtgcatttttccattgtatttatggagttggcgtatttgacattcagttctggggtaggtttaagatgttaagttatttcttgtaacctcaaaggtaaggttatctagcactaaagcaccaaacctctctgagggcataacagctgctttaaagagaggtttccattggctattaaggagttatgaaaactccctagcaatagtgtcatatcattatcatctcccccttcctctggggagtggaagaattgcttgaatgttatctgaaaagaggcctggtagtaaaccaggccctggctctttaccagcagtcatctcttcttgctctggggccagccaggaaaaacaaacaacccggggcacattgggtagactcagtgtaggaaaaatggtggcagctccactgtttatttttggtgacttcgtacgtcattatgaaccgcaattaaggaggaggcttaatggctgttcccaaactcaaatctcagagtgggtatcctagcatctagcaagactgagtggggagatttctcatccgtgtgaaaatgtagagtgaggcctctgactagctaattgtgtattttgttgggtttagtattttctaaatgtttacaaaatattgggctgcatgttcaggttgcagctagagggagcttgggcagattttcaattacgctttcaagatataaccaaaagctgtttctaaatcctaaaattagaatttcaacagagccccctttagaacagtcatataacgcttgtgtgggccaacagaggggctgtgtactctctctggaaccataaatgtcaaataatttataacctgcagtaattgagcaaacttaaaataagacctgtgttggaatttagtttcttgaagaggtagagggataggttagtaagatgtattgttaaacaacaggttttagtttttgctttataattagccacaggttttcaaatgatcacatttcagaataggtttttagcctgtaattaggcctcatcccctttgacctaaatgtcttacatgttacttgttagcacatcaactgtatcactaatcaccatctgtttttgtgggatgtgctgcagcatttcccaaaaaactttacgtgtaatgttgcaaaatgaatgtactcagacattcttaatttttacttagggcagaccaactctttgagtctctcttggacttatatatacagatatcttaagagtgggaatgtaaagcataacctaattctctttcctatagagattctattttatttaaaatctatttttacactagttagaatcctgctgttttggccaagtacttgtcttgcatgtctgaccttgcagaagctggggtggatcatagcatactaatgaagagaattagaagtagtttacaaagctcgctcactcctcatttctctgtgatcccttctatccagtggccccaccaccacctgggaaaacagatttttcagtacaggtgggataaatgctctgaaaggctgtgcccagaggaatgagcaaataggcaagtgtttccaaactacttggaggtttacaaaaaatatgtcccagaaaaaaaaaaaatcttaccaagatacgtaaagaaaaaaaaatttttttttaaacagtcaaagagtcatgtttgaatttcacaaaatcacatcagacagaagttgttttcttcaggagggaaatgaaccacttaatatacccatactaccttgaacaatgaaattgaattaaaatagccaaactttgaaattaaaatgccccg

SEQ ID NO: 126604 - DNA, 3867 bp, Homo sapiens
cgccgcattccctgtagccgggtctgggcccggagggcttcccttcccaaagcactggcccgggaaaagcccgcggcgagggctgttgcccaggaagacacggagagccggggaaatgtctgatgaggagataaaaaagacgacactagcctcagctgtagcctgtttagaaggcaagtcaccaggagagaaagtagcgattatccatcagcatctcggccgtcgagaaatgacagatgtgatcattgagaccatgaagtccaacccagatgaactaaaaactacagtggaagaaaggaagtcttcagaagcctcccccactgcgcaaagaagtaaagatcacagtaaggaatgcataaacgctgccccagattctccgtccaaacagcttccagaccagatttcattcttcagtggaaatccatcagttgaaatagttcatggtattatgcacctatataagacaaataagatgacctccttaaaagaagatgtgcggcgcagtgccatgctgtgtattctcacagtccctgctgcaatgaccagtcatgaccttatgaagtttgttgccccatttaacgaagtaattgaacaaatgaaaattatcagagactctactcccaaccaatatatggtgctgataaagtttcgtgcacaggctgatgcggatagtttttatatgacatgcaatggccgccagttcaactcaatagaagatgacgtttgccagctagtgtatgtggaaagagctgaagtgctcaaatctgaagatggcgccagcctcccagtgatggacctgactgaactccccaagtgcacggtgtgtctggagcgcatggacgagtctgtgaatggcatcctcacaacgttatgtaaccacagcttccacagccagtgtctacagcgctgggacgataccacgtgtcctgtttgccggtactgtcaaacgcccgagccagtagaagaaaataagtgttttgagtgtggtgttcaggaaaatctttggatttgtttaatatgcggccacataggatgtggacggtatgtcagtcgacatgcttataagcactttgaggaaacgcagcacacgtatgccatgcagcttaccaaccatcgagtctgggactatgctggagataactatgttcatcgactggttgcaagtaaaacagatggaaaaatagtacagtatgaatgtgagggggatacttgccaggaagagaaaatagatgccttacagttagagtattcatatttactaacaagccagctggaatctcagcgaatctactgggaaaacaagatagttcggatagagaaggacacagcagaggaaattaacaacatgaagaccaagtttaaagaaacaattgagaagtgtgataatctagagcacaaactaaatgatctcctaaaagaaaagcagtctgtggaaagaaagtgcactcagctaaacacaaaagtggccaaactcaccaacgagctcaaagaggagcaggaaatgaacaagtgtttgcgagccaaccaagtcctcctgcagaacaagctaaaagaggaggagagggtgctgaaggagacctgtgaccaaaaagatctgcagatcaccgagatccaggagcagctgcgtgacgtcatgttctacctggagacacagcagaagatcaaccatctgcctgccgagacccggcaggaaatccaggagggacagatcaacatcgccatggcctcggcctcgagccctgcctcttcggggggcagtgggaagttgccctccaggaagggccgcagcaagaggggcaagtgaccttcagagcaacagacatccctgagactgttctccctgacactgtgagagtgtgctgggaccttcagctaaatgtgagggtgggccctaataagtacaagtgaggatcaagccacagttgtttggctctttcatttgctagtgtgtgatgtagtgaatgtaaagggtgctgactggagagctgatagaaaggcgctgcgttcgaaaaggtcttaagagttcactaacctcacattctaatgaccattttgccttcctgcttggtagaagccccaactctgctgtgcatttttccattgtatttatggagttggcgtatttgacattcagttctggggtaggtttaagatgttaagttatttcttgtaacctcaaaggtaaggttatctagcactaaagcaccaaacctctctgagggcataacagctgctttaaagagaggtttccattggctattaaggagttatgaaaactccctagcaatagtgtcatatcattatcatctcccccttcctctggggagtggaagaattgcttgaatgttatctgaaaagaggcctggtagtaaaccaggccctggctctttaccagcagtcatctcttcttgctctggggccagccaggaaaaacaaacaacccggggcacattgggtagactcagtgtaggaaaaatggtggcagctccactgtttatttttggtgacttcgtacgtcattatgaaccgcaattaaggaggaggcttaatggctgttcccaaactcaaatctcagagtgggtatcctagcatctagcaagactgagtggggagatttctcatccgtgtgaaaatgtagagtgaggcctctgactagctaattgtgtattttgttgggtttagtattttctaaatgtttacaaaatattgggctgcatgttcaggttgcagctagagggagcttgggcagattttcaattacgctttcaagatataaccaaaagctgtttctaaatcctaaaattagaatttcaacagagccccctttagaacagtcatataacgcttgtgtgggccaacagaggggctgtgtactctctctggaaccataaatgtcaaataatttataacctgcagtaattgagcaaacttaaaataagacctgtgttggaatttagtttcttgaagaggtagagggataggttagtaagatgtattgttaaacaacaggttttagtttttgctttataattagccacaggttttcaaatgatcacatttcagaataggtttttagcctgtaattaggcctcatcccctttgacctaaatgtcttacatgttacttgttagcacatcaactgtatcactaatcaccatctgtttttgtgggatgtgctgcagcatttcccaaaaaactttacgtgtaatgttgcaaaatgaatgtactcagacattcttaatttttacttagggcagaccaactctttgagtctctcttggacttatatatacagatatcttaagagtgggaatgtaaagcataacctaattctctttcctatagagattctattttatttaaaatctatttttacactagttagaatcctgctgttttggccaagtacttgtcttgcatgtctgaccttgcagaagctggggtggatcatagcatactaatgaagagaattagaagtagtttacaaagctcgctcactcctcatttctctgtgatcccttctatccagtggccccaccaccacctgggaaaacagatttttcagtacaggtgggataaatgctctgaaaggctgtgcccagaggaatgagcaaataggcaagtgtttccaaactacttggaggtttacaaaaaatatgtcccagaaaaaaaaaaaatcttaccaagatacgtaaagaaaaaaaaatttttttttaaacagtcaaagagtcatgtttgaatttcacaaaatcacatcagacagaagttgttttcttcaggagggaaatgaaccacttaatatacccatactaccttgaacaatgaaattgaattaaaatagccaaactttgaaattaaaatgccccg

SEQ ID NO: 126605 - DNA, 2898 bp, Homo sapiens
ctaattaagatcttacctcttccggcagaatctttggatttgtttaatatgcggccacataggatgtggacggtatgtcagtcgacatgcttataagcactttgaggaaacgcagcacacgtatgccatgcagcttaccaaccatcgagtctgggactatgctggagataactatgttcatcgactggttgcaagtaaaacagatggaaaaatagtacagtatgaatgtgagggggatacttgccaggaagagaaaatagatgccttacagttagagtattcatatttactaacaagccagctggaatctcagcgaatctactgggaaaacaagatagttcggatagagaaggacacagcagaggaaattaacaacatgaagaccaagtttaaagaaacaattgagaagtgtgataatctagagcacaaactaaatgatctcctaaaagaaaagcagtctgtggaaagaaagtgcactcagctaaacacaaaagtggccaaactcaccaacgagctcaaagaggagcaggaaatgaacaagtgtttgcgagccaaccaagtcctcctgcagaacaagctaaaagaggaggagagggtgctgaaggagacctgtgaccaaaaagatctgcagatcaccgagatccaggagcagctgcgtgacgtcatgttctacctggagacacagcagaagatcaaccatctgcctgccgagacccggcaggaaatccaggagggacagatcaacatcgccatggcctcggcctcgagccctgcctcttcggggggcagtgggaagttgccctccaggaagggccgcagcaagaggggcaagtgaccttcagagcaacagacatccctgagactgttctccctgacactgtgagagtgtgctgggaccttcagctaaatgtgagggtgggccctaataagtacaagtgaggatcaagccacagttgtttggctctttcatttgctagtgtgtgatgtagtgaatgtaaagggtgctgactggagagctgatagaaaggcgctgcgttcgaaaaggtcttaagagttcactaacctcacattctaatgaccattttgccttcctgcttggtagaagccccaactctgctgtgcatttttccattgtatttatggagttggcgtatttgacattcagttctggggtaggtttaagatgttaagttatttcttgtaacctcaaaggtaaggttatctagcactaaagcaccaaacctctctgagggcataacagctgctttaaagagaggtttccattggctattaaggagttatgaaaactccctagcaatagtgtcatatcattatcatctcccccttcctctggggagtggaagaattgcttgaatgttatctgaaaagaggcctggtagtaaaccaggccctggctctttaccagcagtcatctcttcttgctctggggccagccaggaaaaacaaacaacccggggcacattgggtagactcagtgtaggaaaaatggtggcagctccactgtttatttttggtgacttcgtacgtcattatgaaccgcaattaaggaggaggcttaatggctgttcccaaactcaaatctcagagtgggtatcctagcatctagcaagactgagtggggagatttctcatccgtgtgaaaatgtagagtgaggcctctgactagctaattgtgtattttgttgggtttagtattttctaaatgtttacaaaatattgggctgcatgttcaggttgcagctagagggagcttgggcagattttcaattacgctttcaagatataaccaaaagctgtttctaaatcctaaaattagaatttcaacagagccccctttagaacagtcatataacgcttgtgtgggccaacagaggggctgtgtactctctctggaaccataaatgtcaaataatttataacctgcagtaattgagcaaacttaaaataagacctgtgttggaatttagtttcttgaagaggtagagggataggttagtaagatgtattgttaaacaacaggttttagtttttgctttataattagccacaggttttcaaatgatcacatttcagaataggtttttagcctgtaattaggcctcatcccctttgacctaaatgtcttacatgttacttgttagcacatcaactgtatcactaatcaccatctgtttttgtgggatgtgctgcagcatttcccaaaaaactttacgtgtaatgttgcaaaatgaatgtactcagacattcttaatttttacttagggcagaccaactctttgagtctctcttggacttatatatacagatatcttaagagtgggaatgtaaagcataacctaattctctttcctatagagattctattttatttaaaatctatttttacactagttagaatcctgctgttttggccaagtacttgtcttgcatgtctgaccttgcagaagctggggtggatcatagcatactaatgaagagaattagaagtagtttacaaagctcgctcactcctcatttctctgtgatcccttctatccagtggccccaccaccacctgggaaaacagatttttcagtacaggtgggataaatgctctgaaaggctgtgcccagaggaatgagcaaataggcaagtgtttccaaactacttggaggtttacaaaaaatatgtcccagaaaaaaaaaaaatcttaccaagatacgtaaagaaaaaaaaatttttttttaaacagtcaaagagtcatgtttgaatttcacaaaatcacatcagacagaagttgttttcttcaggagggaaatgaaccacttaatatacccatactaccttgaacaatgaaattgaattaaaatagccaaactttgaaattaaaatgccccg

SEQ ID NO: 126606 - DNA, 1322 bp, Homo sapiens
  misc_feature (2)..(2): n is a, c, g, or t
tnggtgaatatagaaagtttgtaaaaaaagaggtggtacggtcggaattcccgggatgtagcgacggcggccgggaggcggaagtggaggttgttgtggctccgagggctgttcgaggagctgctgctgctgaggcggcggcaactgcattgaggtggtggcggcgctgccggccccgggccgctcggcctctcggctcgccttccagcctcgcctgagcccgccggggcccgcgccggccagcgcctgccctatgagtgtgtcactggttgttatccgattggagctcgcggaacactcgcctgtccccgccggcttcggcttcagcgccgcggccggggaaatgtctgatgaggagataaaaaagacgacactagcctcagctgtagcctgtttagaaggcaagtcaccaggagagaaagtagcgattatccatcagcatctcggccgtcgagaaatgacagatgtgatcattgagaccatgaagtccaacccagatgaactaaaaactacagtggaagaaaggaagtcttcagaagcctcccccactgcgcaaagaagtaaagatcacagtaaggaatgcataaacgctgccccagattctccgtccaaacagcttccagaccagatttcattcttcagtggaaatccatcagttgaaatagttcatggtattatgcacctatataagacaaataagatgacctccttaaaagaagatgtgcggcgcagtgccatgctgtgtattctcacagtccctgctgcaatgaccagtcatgaccttatgaagtttgttgccccatttaacgaagtaattgaacaaatgaaaattatcagagactctactcccaaccaatatatggtgctgataaagtttcgtgcacaggctgatgcggatagtttttatatgacatgcaatggccgccagttcaactcaatagaagatgacgtttgccagctagtgtatgtggaaagagctgaagtgctcaaatctgaagatgtaagtgtgaattgttcctatatttaattaaaatatatcagattggtgtaaaattgaatgctaaggtatctgtgaaatacccagaataggccagtccatagacacagaaagtagactggtggttatcagggcaggaagagacgaatggggagtgcctgctaacaggatacaggctttcttctggaagtgatggacgtgttctagaattagatagtgatgacagttgcacaaccttgtgaatatactacaagccaatgaactgtatactttaaaatagagaattttattgaatatctcattttctaaaatttcaaaaaacgta

SEQ ID NO: 126607 - DNA, 391 bp, Homo sapiens
gacggtatgtcagtcgacatgcttataagcactttgaggaaacgcagcacacgtatgccatgcagcttaccaaccatcgagtctgggactatgctggaggtgaataccactctcttttctaatttggactcattctgtgtggaaactttgccttcacaacgccttcactttccctcccagcttgaaatgtcatcttttgacagctgttgcaaacccaaattctcagtttccctgagggcactatttttctaggaatgtcttgaatcacacattataaagggagttaatacttccattcttgctttctccctcccctctaaaattcaaatgatttgacacttttaaagaaatattgtaaggcatttaaattagatctgaaaaaaaaattttg

SEQ ID NO: 126608 - DNA, 730 bp, Homo sapiens
ctgggattataggcgtgggccaccaggcccggctaattttgtatttttagtagagacagggtttctccatgttggtcaggctggtctcaaactcctcaccttaggcgatccgcccgcctcggcctcccaaagcgctgggattacaggcgtgagccaccacgcccagcccaatgctgacatttccttaaagagttctttcataacaagcgtcagttattatttggttccaggctttgcagaaatgagtgtttactttcagctgcacaagtgatgactagagggaaaaaaaactgctattaagggaaatgttgactgttgctggttgaatatgaaaattgtaccagctttcagcttgttgcacttcagtaccttctgccagttcaggtaaaaactctgttgtagcccaggaaatactgtaaacatggaatattgacttacagagtgtgattagcctaccaatcagcttcagtagatgtgacttttggtggttgctctctctcctaagtataaattttaaaagctgatgagaatgaataaagccatgcatattgaatataaagcagattttcagggtatctgtcttaatttttttccttttccccattggtgtacataggctgatgcggatagtttttatatgacatgcaatggccgccagttcaactcaatagaagatgacgtttgccagctagtgtatgtggaaagagctgaagtgctcaaatctgaagat

SEQ ID NO: 126609 - DNA, 329 bp, Homo sapiens
tacattttggtctttattctctatgtttctagtattcatatttactaacaagccagctggaatctcagcgaatctactgggaaaacaagatagttcggatagagaaggacacagcagaggaagtaagtctgtttggtttgggtgactgcggaaatgacacatggcagggcactctgatggggggtgtggaaggcagagtacagggaaagaggaatcttaccatcttcccttctcaggcaggtaataggtggagaactgttttgccactaaaaagaaactttggatttaaaggcttgactgttttgatattttggggtcttagggggttt

SEQ ID NO: 126610 - DNA, 2177 bp, Homo sapiens
  misc_feature (2)..(2): n is a, c, g, or t
tnggtgaatatagaaagtttgtaaaaaaagaggtggtacggtcggaattcccgggatgtagcgacggcggccgggaggcggaagtggaggttgttgtggctccgagggctgttcgaggagctgctgctgctgaggcggcggcaactgcattgaggtggtggcggcgctgccggccccgggccgctcggcctctcggctcgccttccagcctcgcctgagcccgccggggcccgcgccggccagcgcctgccctatgagtgtgtcactggttgttatccgattggagctcgcggaacactcgcctgtccccgccggcttcggcttcagcgccgcggccggggaaatgtctgatgaggagataaaaaagacgacactagcctcagctgtagcctgtttagaaggcaagtcaccaggagagaaagtagcgattatccatcagcatctcggccgtcgagaaatgacagatgtgatcattgagaccatgaagtccaacccagatgaactaaaaactacagtggaagaaaggaagtcttcagaagcctcccccactgcgcaaagaagtaaagatcacagtaaggaatgcataaacgctgccccagattctccgtccaaacagcttccagaccagatttcattcttcagtggaaatccatcagttgaaatagttcatggtattatgcacctatataagacaaataagatgacctccttaaaagaagatgtgcggcgcagtgccatgctgtgtattctcacagtccctgctgcaatgaccagtcatgaccttatgaagtttgttgccccatttaacgaagtaattgaacaaatgaaaattatcagagactctactcccaaccaatatatggtgctgataaagtttcgtgcacaggctgatgcggatagtttttatatgacatgcaatggccgccagttcaactcaatagaagatgacgtttgccagctagtgtatgtggaaagagctgaagtgctcaaatctgaagatggcgccagcctcccagtgatggacctgactgaactccccaagtgcacggtgtgtctggagcgcatggacgagtctgtgaatggcatcctcacaacgttatgtaaccacagcttccacagccagtgtctacagcgctgggacgataccacgtgtcctgtttgccggtactgtcaaacgcccgagccagtagaagaaaataagtgttttgagtgtggtgttcaggaaaatctttggatttgtttaatatgcggccacataggatgtggacggtatgtcagtcgacatgcttataagcactttgaggaaacgcagcacacgtatgccatgcagcttaccaaccatcgagtctgggactatgctggagataactatgttcatcgactggttgcaagtaaaacagatggaaaaatagtacagtatgaatgtgagggggatacttgccaggaagagaaaatagatgccttacagttagagtattcatatttactaacaagccagctggaatctcagcgaatctactgggaaaacaagatagttcggatagagaaggacacagcagaggaaattaacaacatgaagaccaagtttaaagaaacaattgagaagtgtgataatctagagcacaaactaaatgatctcctaaaagaaaagcagtctgtggaaagaaagtgcactcagctaaacacaaaagtggccaaactcaccaacgagctcaaagaggagcaggaaatgaacaagtgtttgcgagccaaccaagtcctcctgcagaacaagctaaaagaggaggagagggtgctgaaggagacctgtgaccaaaaagatctgcagatcaccgagatccaggagcagctgcgtgacgtcatgttctacctggagacacagcagaagatcaaccatctgcctgccgagacccggcaggaaatccaggagggacagatcaacatcgccatggcctcggcctcgagccctgcctcttcggggggcagtgggaagttgccctccaggaagggccgcagcaagaggggcaagtgaccttcagagcaacagacatccctgagactgttctccctgacactgtgagagtgtgctgggaccttcagctaaatgtgagggtgggccctaataagtacaagtgaggacgaaggccggccttcgtggccttagagatggatgaggc

SEQ ID NO: 126611 - DNA, 3896 bp, Homo sapiens
  misc_feature (2)..(2): n is a, c, g, or t
tnggtgaatatagaaagtttgtaaaaaaagaggtggtacggtcggaattcccgggatgtagcgacggcggccgggaggcggaagtggaggttgttgtggctccgagggctgttcgaggagctgctgctgctgaggcggcggcaactgcattgaggtggtggcggcgctgccggccccgggccgctcggcctctcggctcgccttccagcctcgcctgagcccgccggggcccgcgccggccagcgcctgccctatgagtgtgtcactggttgttatccgattggagctcgcggaacactcgcctgtccccgccggcttcggcttcagcgccgcggccggggaaatgtctgatgaggagataaaaaagacgacactagcctcagctgtagcctgtttagaaggcaagtcaccaggagagaaagtagcgattatccatcagcatctcggccgtcgagaaatgacagatgtgatcattgagaccatgaagtccaacccagtaagatgacctccttaaaagaagatgtgcggcgcagtgccatgctgtgtattctcacagtccctgctgcaatgaccagtcatgaccttatgaagtttgttgccccatttaacgaagtaattgaacaaatgaaaattatcagagactctactcccaaccaatatatggtgctgataaagtttcgtgcacaggctgatgcggatagtttttatatgacatgcaatggccgccagttcaactcaatagaagatgacgtttgccagctagtgtatgtggaaagagctgaagtgctcaaatctgaagatggcgccagcctcccagtgatggacctgactgaactccccaagtgcacggtgtgtctggagcgcatggacgagtctgtgaatggcatcctcacaacgttatgtaaccacagcttccacagccagtgtctacagcgctgggacgataccacgtgtcctgtttgccggtactgtcaaacgcccgagccagtagaagaaaataagtgttttgagtgtggtgttcaggaaaatctttggatttgtttaatatgcggccacataggatgtggacggtatgtcagtcgacatgcttataagcactttgaggaaacgcagcacacgtatgccatgcagcttaccaaccatcgagtctgggactatgctggagataactatgttcatcgactggttgcaagtaaaacagatggaaaaatagtacagtatgaatgtgagggggatacttgccaggaagagaaaatagatgccttacagttagagtattcatatttactaacaagccagctggaatctcagcgaatctactgggaaaacaagatagttcggatagagaaggacacagcagaggaaattaacaacatgaagaccaagtttaaagaaacaattgagaagtgtgataatctagagcacaaactaaatgatctcctaaaagaaaagcagtctgtggaaagaaagtgcactcagctaaacacaaaagtggccaaactcaccaacgagctcaaagaggagcaggaaatgaacaagtgtttgcgagccaaccaagtcctcctgcagaacaagctaaaagaggaggagagggtgctgaaggagacctgtgaccaaaaagatctgcagatcaccgagatccaggagcagctgcgtgacgtcatgttctacctggagacacagcagaagatcaaccatctgcctgccgagacccggcaggaaatccaggagggacagatcaacatcgccatggcctcggcctcgagccctgcctcttcggggggcagtgggaagttgccctccaggaagggccgcagcaagaggggcaagtgaccttcagagcaacagacatccctgagactgttctccctgacactgtgagagtgtgctgggaccttcagctaaatgtgagggtgggccctaataagtacaagtgaggatcaagccacagttgtttggctctttcatttgctagtgtgtgatgtagtgaatgtaaagggtgctgactggagagctgatagaaaggcgctgcgttcgaaaaggtcttaagagttcactaacctcacattctaatgaccattttgccttcctgcttggtagaagccccaactctgctgtgcatttttccattgtatttatggagttggcgtatttgacattcagttctggggtaggtttaagatgttaagttatttcttgtaacctcaaaggtaaggttatctagcactaaagcaccaaacctctctgagggcataacagctgctttaaagagaggtttccattggctattaaggagttatgaaaactccctagcaatagtgtcatatcattatcatctcccccttcctctggggagtggaagaattgcttgaatgttatctgaaaagaggcctggtagtaaaccaggccctggctctttaccagcagtcatctcttcttgctctggggccagccaggaaaaacaaacaacccggggcacattgggtagactcagtgtaggaaaaatggtggcagctccactgtttatttttggtgacttcgtacgtcattatgaaccgcaattaaggaggaggcttaatggctgttcccaaactcaaatctcagagtgggtatcctagcatctagcaagactgagtggggagatttctcatccgtgtgaaaatgtagagtgaggcctctgactagctaattgtgtattttgttgggtttagtattttctaaatgtttacaaaatattgggctgcatgttcaggttgcagctagagggagcttgggcagattttcaattacgctttcaagatataaccaaaagctgtttctaaatcctaaaattagaatttcaacagagccccctttagaacagtcatataacgcttgtgtgggccaacagaggggctgtgtactctctctggaaccataaatgtcaaataatttataacctgcagtaattgagcaaacttaaaataagacctgtgttggaatttagtttcttgaagaggtagagggataggttagtaagatgtattgttaaacaacaggttttagtttttgctttataattagccacaggttttcaaatgatcacatttcagaataggtttttagcctgtaattaggcctcatcccctttgacctaaatgtcttacatgttacttgttagcacatcaactgtatcactaatcaccatctgtttttgtgggatgtgctgcagcatttcccaaaaaactttacgtgtaatgttgcaaaatgaatgtactcagacattcttaatttttacttagggcagaccaactctttgagtctctcttggacttatatatacagatatcttaagagtgggaatgtaaagcataacctaattctctttcctatagagattctattttatttaaaatctatttttacactagttagaatcctgctgttttggccaagtacttgtcttgcatgtctgaccttgcagaagctggggtggatcatagcatactaatgaagagaattagaagtagtttacaaagctcgctcactcctcatttctctgtgatcccttctatccagtggccccaccaccacctgggaaaacagatttttcagtacaggtgggataaatgctctgaaaggctgtgcccagaggaatgagcaaataggcaagtgtttccaaactacttggaggtttacaaaaaatatgtcccagaaaaaaaaaaaatcttaccaagatacgtaaagaaaaaaaaatttttttttaaacagtcaaagagtcatgtttgaatttcacaaaatcacatcagacagaagttgttttcttcaggagggaaatgaaccacttaatatacccatactaccttgaacaatgaaattgaattaaaatagccaaactttgaaattaaaatgccccg

SEQ ID NO: 126612 - DNA, 3013 bp, Homo sapiens
tgctatcagtcagggggtgcctgactcaagtgctggttgggacaggatgggacaggactgcttcatggggtcagggagacaggtaagtttatttgagttatacatagatttaaaaccactgtggttcttcttaaagtcagcttgaccagaataaaggtttttataagtacatttattctgactagattgtaagccccaggaagacagaagcataatgtcatttgtgtcccctggtccagtatatattgagtagagtagaaccagggcgtaaatatacattctgttggttagttttagttttctgtggatcattaaatatcagatttttaaattggatttcagaggctgacaacagtgacttacattttggtctttattctctatgtttctagtattcatatttactaacaagccagctggaatctcagcgaatctactgggaaaacaagatagttcggatagagaaggacacagcagaggaaattaacaacatgaagaccaagtttaaagaaacaattgagaagtgtgataatctagagcacaaactaaatgatctcctaaaagaaaagcagtctgtggaaagaaagtgcactcagctaaacacaaaagtggccaaactcaccaacgagctcaaagaggagcaggaaatgaacaagtgtttgcgagccaaccaagtcctcctgcagaacaagctaaaagaggaggagagggtgctgaaggagacctgtgaccaaaaagatctgcagatcaccgagatccaggagcagctgcgtgacgtcatgttctacctggagacacagcagaagatcaaccatctgcctgccgagacccggcaggaaatccaggagggacagatcaacatcgccatggcctcggcctcgagccctgcctcttcggggggcagtgggaagttgccctccaggaagggccgcagcaagaggggcaagtgaccttcagagcaacagacatccctgagactgttctccctgacactgtgagagtgtgctgggaccttcagctaaatgtgagggtgggccctaataagtacaagtgaggatcaagccacagttgtttggctctttcatttgctagtgtgtgatgtagtgaatgtaaagggtgctgactggagagctgatagaaaggcgctgcgttcgaaaaggtcttaagagttcactaacctcacattctaatgaccattttgccttcctgcttggtagaagccccaactctgctgtgcatttttccattgtatttatggagttggcgtatttgacattcagttctggggtaggtttaagatgttaagttatttcttgtaacctcaaaggtaaggttatctagcactaaagcaccaaacctctctgagggcataacagctgctttaaagagaggtttccattggctattaaggagttatgaaaactccctagcaatagtgtcatatcattatcatctcccccttcctctggggagtggaagaattgcttgaatgttatctgaaaagaggcctggtagtaaaccaggccctggctctttaccagcagtcatctcttcttgctctggggccagccaggaaaaacaaacaacccggggcacattgggtagactcagtgtaggaaaaatggtggcagctccactgtttatttttggtgacttcgtacgtcattatgaaccgcaattaaggaggaggcttaatggctgttcccaaactcaaatctcagagtgggtatcctagcatctagcaagactgagtggggagatttctcatccgtgtgaaaatgtagagtgaggcctctgactagctaattgtgtattttgttgggtttagtattttctaaatgtttacaaaatattgggctgcatgttcaggttgcagctagagggagcttgggcagattttcaattacgctttcaagatataaccaaaagctgtttctaaatcctaaaattagaatttcaacagagccccctttagaacagtcatataacgcttgtgtgggccaacagaggggctgtgtactctctctggaaccataaatgtcaaataatttataacctgcagtaattgagcaaacttaaaataagacctgtgttggaatttagtttcttgaagaggtagagggataggttagtaagatgtattgttaaacaacaggttttagtttttgctttataattagccacaggttttcaaatgatcacatttcagaataggtttttagcctgtaattaggcctcatcccctttgacctaaatgtcttacatgttacttgttagcacatcaactgtatcactaatcaccatctgtttttgtgggatgtgctgcagcatttcccaaaaaactttacgtgtaatgttgcaaaatgaatgtactcagacattcttaatttttacttagggcagaccaactctttgagtctctcttggacttatatatacagatatcttaagagtgggaatgtaaagcataacctaattctctttcctatagagattctattttatttaaaatctatttttacactagttagaatcctgctgttttggccaagtacttgtcttgcatgtctgaccttgcagaagctggggtggatcatagcatactaatgaagagaattagaagtagtttacaaagctcgctcactcctcatttctctgtgatcccttctatccagtggccccaccaccacctgggaaaacagatttttcagtacaggtgggataaatgctctgaaaggctgtgcccagaggaatgagcaaataggcaagtgtttccaaactacttggaggtttacaaaaaatatgtcccagaaaaaaaaaaaatcttaccaagatacgtaaagaaaaaaaaatttttttttaaacagtcaaagagtcatgtttgaatttcacaaaatcacatcagacagaagttgttttcttcaggagggaaatgaaccacttaatatacccatactaccttgaacaatgaaattgaattaaaatagccaaactttgaaattaaaatgccccg

SEQ ID NO: 126613 - DNA, 1123 bp, Homo sapiens
  misc_feature (2)..(2): n is a, c, g, or t
tnggtgaatatagaaagtttgtaaaaaaagaggtggtacggtcggaattcccgggatgtagcgacggcggccgggaggcggaagtggaggttgttgtggctccgagggctgttcgaggagctgctgctgctgaggcggcggcaactgcattgaggtggtggcggcgctgccggccccgggccgctcggcctctcggctcgccttccagcctcgcctgagcccgccggggcccgcgccggccagcgcctgccctatgagtgtgtcactggttgttatccgattggagctcgcggaacactcgcctgtccccgccggcttcggcttcagcgccgcggccggggaaatgtctgatgaggagataaaaaagacgacactagcctcagctgtagcctgtttagaaggcaagtcaccaggagagaaagtagcgattatccatcagcatctcggccgtcgagaaatgacagatgtgatcattgagaccatgaagtccaacccagtaagatgacctccttaaaagaagatgtgcggcgcagtgccatgctgtgtattctcacagtccctgctgcaatgaccagtcatgaccttatgaagtttgttgccccatttaacgaagtaattgaacaaatgaaaattatcagagactctactcccaaccaatatatggtgctgataaagtttcgtgcacaggctgatgcggatagtttttatatgacatgcaatggccgccagttcaactcaatagaagatgacgtttgccagctagtgtatgtggaaagagctgaagtgctcaaatctgaagatgtaagtgtgaattgttcctatatttaattaaaatatatcagattggtgtaaaattgaatgctaaggtatctgtgaaatacccagaataggccagtccatagacacagaaagtagactggtggttatcagggcaggaagagacgaatggggagtgcctgctaacaggatacaggctttcttctggaagtgatggacgtgttctagaattagatagtgatgacagttgcacaaccttgtgaatatactacaagccaatgaactgtatactttaaaatagagaattttattgaatatctcattttctaaaatttcaaaaaacgta

SEQ ID NO: 126614 - DNA, 185 bp, Homo sapiens
aggaattcaactgtacttcactgaagggctgtcagctggcttattaggataaattctgggattttatgctgggcatagtgatttcgtgcttattttactgctggaccaaatgggaagcaaaggaagtgtgtcaaagaaggtggagggttagaaggtaccatctaatatttggggaatagaatctc

SEQ ID NO: 126615 - DNA, 184 bp, Homo sapiens
tttgcccaacacattatgcttccttgcctagaatgtggcttccctactgatcggcggggggaagcctagaagccttgtaataagataaacctgatccagatctcagatctactacttacttttgactttaggcaagttactttatttcactgagaatcggtttcctcatttctaaaatgaagat

SEQ ID NO: 126616 - DNA, 328 bp, Homo sapiens
gtttttgaagatgggatcttgctatgttgtccaggctggggtgcagtggccgttcacaggcaccatcatagctcactgcagtctcgaactcacgcctggcctcaagtggtcctcagcctctgaagtagctgggactactacagactaccacatttgactactacaaatccctaccgtgtgccaccacgcctggcttagtagcctgttatttttaatagctgctaaatttgtcattatttgctttcttttctttcttttttttttatggcagggtctcactctgtcacccaggctggagtacagtggtgtgatctcggctcaccacaac

SEQ ID NO: 126617 - DNA, 394 bp, Homo sapiens
ttcccagcagcaaagacaggtgtatgctatagtacaagccactagcccgcctcttagaacctctcatttccgtttccatggtggaaatctatcctcaaggaaataacttctcagtggtgccatctgcatattctactactcctcagggatgatacaggccccctccgttccctagcacatcaagcttgatgatttgcgccacccaggactggcaagattagctcaactcaagatgccttgaagacagatagagtgacaatatctcttgggctaggtagtagaatagcagatggacaactgagaagttatttccttgaggatagatttccaggatggaaaggaaatgagaggttctaagaggcgggctagtggcttgtactatagcatagcctgg

SEQ ID NO: 126618 - DNA, 786 bp, Homo sapiens
catggtggcgcgcacctgtagtccctgctactcaggaggttgacgtgggaaaatcacctgagcccaggagattgaggctgcagtgagctgtgatggtgccactgcactccagcctggatgacacagtaagaacctgtctcaaaaaaattcactgttttggagctcagtagtcccagtttgaggaagaaaaatactaaatacacaaagattaattatctcaataaatatttattgagtacctatatgtgccaggctccattctgggcaatggaaataaaagaagtgaacaaaatagagaaagattcttgccttcatggaacttacgtcctaacaaaaataaataaactagaccatttaatagataaaatagtatactatattatcatagctgctgtgaaaagaaaaacagggaaaaggatgggggatttgatgacgggggcagtttacaattttagagggatggtcagggaagatctcactgtaagtgacatctgagtaaagacctcttagaaagtgagggagcaagccacataaacatccaggggaaaggggcaaaagcattccaggcagaggcaataacaaatgcaaaggcctgagatagagcatgttggatgtgttgttgaaggaggagcaaaaacgtcactaaggctaaaagtagatgcaatgaagggaagagcaggagatgaagtgagagaagtaggtaaagacagatcacataaaaaaataggcctggcatggtggctcatgcctataatccaagcactttaggaggcctaggtgggaggg

SEQ ID NO: 126619 - DNA, 419 bp, Homo sapiens
ggatgacccagatgcccctctgcagcccgtgacacccctgcagctgtttgagggtcggaggaaccgccgcaggagggaggcgcccaaggtggtggaggagcaggagtccagggtgcactacaccgtgtgcatctggcggaacggcaaggtggggctgtctggcatggccatcgcggacgtcaccctcctgagtggattccacgccctgcgtgctgacctggagaagctgacctccctctctgaccgttacgtgagtcactttgagaccgaggggccccacgtcctgctgtattttgactcggtccccacctcccagaagtgcgccgggtgcacccaggcgcacttctctcgcagactccgcgacctactgacccggcgactgacaggctccaactacccgggactcagtattagccttc

SEQ ID NO: 126620 - DNA, 393 bp, Homo sapiens
gactattgaagactctcactatgggttttctgtggggtgtttgtttcttggggtgaaagcttccctctccccaggcaggcccagcaaaatctgtaggattcagacagggttctgacagctgaagacaagttgttgaggaaattcctgatggaggatcatggggtgctcaggagggagaatataaggtttcagaggctgagagggaaagaaaaggtgagggggagtcttagaatagtggctcccattgcccaacacccagaaagaagacatgccctgcaatggggagaaggtgagtatgagacattggctgtagcagcgatggcattgcccaggctgccaaggactcagagagtccagccttgcccactgacctatgaggagggaatgatgttc

SEQ ID NO: 126621 - DNA, 1356 bp, Homo sapiens
atttccactctattctattctacttctagaaagtctctcagatctaactcttcccatttatattcatggtcattgccttaccttagattcttatcatcttttgcctggactactgcaacaatctacttactggtctcattctcttcaggctttcttctctctaataataccctccacaccatcaagaattatctttccagcaatcactcccctgcttaacggctggtgacttcagggtaaggtctaaatgcctcagcctgatactacaaccttcacaaactagacttaaccttgtttcacagcttttcccctaccagttcccacacatggaactccctgagctctagtacaaccaaactactttttactctccacacgtaccacagtctttcaaaacctctatctacccatttggatatgctacaccctttgcctaaaattccgtctctgctctctgcctataaaatactaattggcctttcagagtcatctaaaatatcactttttctgcaaaggcttccaaattatcctagagttagtttttccatcttgtttatatccattcatttatcgttgttttactttggagtccctttttagagtctttccaattacattagaaacatcttagaggtatgtctttaacatataatgtaatgaagttttgcctcattattaaacatgagagtctttttcttttaatggatagcaactaatcacactgaactgtagcttcttatttagggatctgttctgctttatgcaatgagccctgtgagagcaagtgaccatctttttaaaaaatttccaatactgttacatagtagataaataagaactgtctgctcagctgatgattaaccaattatctaatgatcaaatgattatcaaagtaagagttgtagatgtaggcacgcaaggcatcatatggctccgagtaccctgcattcctgaaatgctttgtttttctctaggctgacaggcacagcgacacaatagactatatttcctaacagctggcctttgagagagatttgaagaattacaatttagagaggcctttcaattttgtagggtatcattcctcagagaactctgttgtacaaaatattcaatgaagaaactttaatagcaccaacccattatcaaattttatataatattctcttctcaactctagaaaaaagataagctttgataccaatagactcaatagggaataatggcaatttctgtctatataaacctctcttcataattaaatcagtaccaagtaaaaagtgttcaaatcctagctctgtcagctatcactgtcactgtgggttagttgttgctttatcttcctgagcctcagtt

SEQ ID NO: 126622 - DNA, 247 bp, Homo sapiens
aagaacctttgtcactctggctggtaagaatacaaactattcctggccctgtgagaattgttctacccatttctttgcagtgctttcctcgtatagacacactgactagtaagtaatcagctaagactccagaaatctttccagatctcctgaatttttaaaacacttctggcaatcggtcctgcaaattctaaccatcgtaggctctctatatttctcaactctgtctcctcaagtcagggagacc

SEQ ID NO: 126623 - DNA, 513 bp, Homo sapiens
acatctgatgcgacctatgctgctcactgtttctaggttacattctctacccttgcagtgtaaattaatttttgcctggttccatgtttcttgcttaggttatctcttaggtcttctgtctgatttaaatataagccttcttaggactagatagtggtgatggttgcactactttgtcaatataccactgaattgtatgtattcactcttttaagaatgagtttatttttatttttatttttattttgagatagagcctcactctgtcgcccaggctggagtgcagtggcgtgatctcagctcactgcaacctccacctcccgggttcacgccattctcctgcctcagcctcccgagtagctgggactacaggcgcctgccaccacgcccggctaattttttgtatttttagcagagacggggtttcactgtgttagccaggatggtctcgatctcctgaccttgtgatccgcccacctcggcctcccaaagtgctgggtttacaggcgtgag

SEQ ID NO: 126624 - DNA, 752 bp, Homo sapiens
cttgggaaataacttggataggcaggcagtttggcacggctagatgctgctgcaggggatattagaaatacacaaaatagagttgagatgctggcttgtgttggacattgacacaggcagttaaaaatggagctctgagtcagtgaggctgctgttaaggtagagacaaaaggaaatacaccagcacagggctatctgaggctaggagtatgctttcttgagcagaaatcttggatgcaaatgcttttagttcctttagatctgaaaggactccatactgaggggttttttctttgttgtgacagttataattctacagttatagctccatgtacaaatcacgtacaaacccaacttctatgttatattgataccattcctctgtttaccaatcacatataagttaattggtattgtagaaaaatgtaactgtattgacagtatatgtttggagttcagaagtgaggtcaggctagagatacggattcttaagagatctgaaacaaaagtgacagttgaaacaccctagagtagataagatttttaatttatttagcattcaaatatttgtgagctctaggcgtgggagatacactgttttgctaaacatacatggtctctaccatttaggtacagcatggtgagagggggagccattaaaaaataaccatacataggccaggcacagtggctcacgcctgtaatcccagcactttgggaggccgaggcgggtggatcacgaggtcaggaga

SEQ ID NO: 126625 - DNA, 773 bp, Homo sapiens
ggaaattatatatgtagctagaaggatagcagtgaaaaggaatgctacactcctcactcagcagaacagccaggtcaaagcctcagacccatgcagggcagctatgaggccagcacgcagctggtgcctcacacttgtaactcccgccaagaaaactgaggcatgctcatctcttcacctccagcaactgagacaaaccctgacacacaataggtaccagtaaaacctctgaatgattgaaagcatgactaggggccaggcttggtggctcacgcctgtaatcccaatgctttgagaggctgaggcaggtggatcacctgaggtcaggagttcgagaccagcctggccaacatggtgaaaccccatctctactaaaaatacaaaaattagccaggcgtggtggtgcatgcctgtaatcccagctacctgggaggctaaggcaggagaatcacttgaacccgggaggcaaagtttgcagtgagccaagattgcaccactgcactccagcccgggcaacagagcaagactccatctcaggggaaaaatacaataaaaaataaaaaaagaaatcctgactacagggcagtagttaatgtgaatgtggtagctgttatgatggcagaatctgacaaaagaccatgggtggagtggctgagctgttcatgtgcacagccaggctgcttgcctgccggtccagctcagaggggtgacttctaccattcagcattcctggtcctggggccccagggtctaccctcgctattttgtatctc

SEQ ID NO: 126626 - DNA, 422 bp, Homo sapiens
tgttttccacagggctaggcaatttctttttcttgtaacccattaacattctatgtattttggggaatactgactgagagattcacaagtacacacagacattcatgcaagtaaatatgtatactttaaattagtattttcatgtatacataaacacatataatccaggtaaagcaaaaatatctttgcagcaagggattccgtgtaagagattaagtgttgtaagagttgattctgttttcgtggtctggtaacaggaagtctcttctgcacatgccttctatgaacctctttgaaccacttaaagtctataaggaaaacatttggttgtatatgatttacacacaagggaatgagaggaaaccccaaaacttctatcctatcacaaagctaaatcatttttcccccaacactaccctaac

SEQ ID NO: 126627 - DNA, 99 bp, Homo sapiens
tctgtttcagccgtttatttactggaggcagatcagagatgcacctcgcaaaaatgacaccatgaaagtcgagttagaaccgggaagagcttattcagt

SEQ ID NO: 126628 - DNA, 392 bp, Homo sapiens
cttttggggtctttgctcctaacaggcccaccacagtcgaatgatcagcatgaacacgagtgtggaaagggaaggactgaactgtgtatccccacagaggacccaacaacaaggaggaggaatcacttcccttgtggcattcctgccaagaacacaaaccagaatgtaatcatgaggaaacaccaggcacccaaattaagggacgttctaaaaaataattgacctgtaattttcaagtgttgaggtcaaagacaaacaatgaagaactcttccagattaagcagactacagacaattaatggcatcgcctaattctgaactgggaccttttgctctaaacttggacattacaaagcaccttcagaacagatgtgaaacagaggtttgaggac

SEQ ID NO: 126629 - DNA, 380 bp, Homo sapiens
ggtaccaacacgatatgctttatttgacaatagacccagatacagtggtgctgacagaatccactagcaaagtgctctgtagtaatttgcttgttcactggagcttgctcaatgctttttcacaaatcattaggtatttcatttctagatggtattttacctaagcagcatttttcattgacacttaatccaaatcatcttaaattgtgtcacaataaatttatattgtactggtagccataaaagtctgagaattagttgagtacaacagtcaacaagtgaatactgcctatggatcattatgatggagaagttgcctgaaagcagaacaacaggacataggcacatttcaggtagagacataagttagatacacacac

SEQ ID NO: 126630 - DNA, 250 bp, Homo sapiens
ctcaagatccacaggtaaagaaggaagtctctggcattagtttgaatcccagctgagccacttgtgggctgtgtgaccaaggggaaattcttagtctcatgaatgcctcagttttctcatctgtaaaatggaggtagtaatgttgtgtatgttcaatgaaaagatgctacacagttttggctcaagaacatctcacgttctctaaggagaggcaggcaagtgcaaattctacacaggccttgacaagtgc

SEQ ID NO: 126631 - DNA, 225 bp, Homo sapiens
gaattatgagatgataaatttgtgttgttttcagccactcaattggtggtaacttgttagagaagcaatagaaaactcatatgttggctgggcacagtggctcgctcctgtaattccagcactttgggaggccagggtgggctgatcccttgagctcaggagtttgaaaccagcctgggcaacatagagaaaccctgattctacaaaaaatacaaaaattagctg

SEQ ID NO: 126632 - DNA, 585 bp, Homo sapiens
ggatgtggggacagggagtatatgggaactcgctgtactttttgctcaattttactgtgaacctaaaactactctaaaaaataaagtctattgaagaagaagaaaaagaagaagcagagaaatctcaaataagtaacctaaacttacaccttaagaatttgttttccttaggtctttcatgttagtaaagaaatttttttaaaaagcaaacaaaaccaaaagcaagcagggggaaagaaataataaagactagagtagagataaatgaaacagagaatagaaaacaatacagaaaaccaatgaaactaaaagttagttctttaaaaataccaacaaaatttgacaccttttagctagactaactaaaatgtaagaagattcagattactaaaatcagaaataaaagatggggtatcacaattgaacttacagaaataaaaggattataagtgaatattatgaaatattgtaagccaacaaattagataacccagatgaaatgagccaacttccagaaagacacgaatacctaaactgacttaataagaaatacaaaatcttaatagacttataacaaatagagat

SEQ ID NO: 126633 - DNA, 317 bp, Homo sapiens
ggaattttcgtagtatgtaagctagagagaatagtataaacctaatgattttatcatccagcttcaacatttatcaatattatgccaatcttcttttaactgattttgttctggagtatttaaaacctatcccagacatcctattacttcacccatcaatatttcagtagaaacatttatttttctcacatcctactgtttcttttttacctggaataagatttacatataatgcacagaactttttttttttttaattatactttaagccctgggacacatgtgcagtacacgcaggtttgttacatatatacggg

SEQ ID NO: 126634 - DNA, 404 bp, Homo sapiens
tactgcctggggttttgactgaaatacccagtgtagagagttcctctctctaagaagtgtattgaggcttgaactttgatattaaaattagtgttaatgatactcttttatctagggaggcaacatattcagttttttcattcaaatgcataagtgtctttggtatcatgaatttctctgtagaaatattacatagtatacaaatatgtctagaaatgtcttttttatgttaaacagatgttcaccaatacctttatttttcattaggccaattttaaatattattgttattctaagcaaattcaaatttcttgatatttgggtgatatttaatcaaggtactagcaaatttcgtcatctattttgtgtcctggaaaataaaggataaaatactataaaagtta

SEQ ID NO: 126635 - DNA, 463 bp, Homo sapiens
tgcccagcagtggagttctctgagtaagaagagggggagggtggcacatactaacacagaatggatgcttgtatgcagaccaggctgtaaattacatagcaatgacagctttgatgttgcatctgaaaaggtgtaataaccccttctagcaggtctctctcatggtggaggggaaagtggtttgtgctttattttaatcagcgaggcccttccctgctggtaacttgaggtcattccatctcatctcagaaggtcgtcttgtccttgggttgccataatctcctttggttataaagaggacctggagccatgcaagggtgggatgttgacttgccatctcagtagcacatttaatcctacaggactctggcttcccctatgcaagcattagaataagagttcaggtgagtgtgacctgcgttacaaagggcagtcttcaccatgaaccgtaggaagggcaggt

SEQ ID NO: 126636 - DNA, 785 bp, Homo sapiens
tgctgagggttttagtcataaagcgatgctggattttgtctaatgctttttctgcatttattggatcatgtgatttttgtttttaattctgtttatgtggtatatcacatttattgacttacgtatgttaaaccatccctgtgtccctggtatgaaacccacttgatcatggtggattatctttttgatatgctgttggatttggttcactagtatttttttgaggatttgtgcatcagggatattggtctgtagctttcttgttttgttatgtccttccctggttttggtattagggttatactggcttcgtagaatgatttacgcaggattccctctttttctatcttttgcaatagtgtcagtaggattggtaccaattcttctttgaatgtctgatggagttcagctgtgaatccatctggtcctggactgttttttgttggcaattttttttattaccatttcaatctcactgcttgttattggtctattcagatattctgtatcttcctggtttaatctaggaggattgtatatttccaggaatttatccatttcctctaggttttctagtttatgcatgtaaaggtgttcatggtaactttaaatcttttgtatttctgtggtatcagtagtagtagctctcgtttcgtttctatttgagcttatttggatcttctctcttcttttcttggttaatcttgctaatggtctatcaattttatttatcttttgaaagaaccagcttttggtttcattcactcactcattcattcattcat

SEQ ID NO: 126637 - DNA, 424 bp, Homo sapiens
ctgccagtcatcatcctttgagttcctgtccctccctacatgttgagggagggacctggtgggagatgattagattatgggggcagtttcccccatgctgttctcatgatagtgagtgagttctcatgagatttgatggttttaaaaattgtgctttctccttcgctctctctcctgctaccatgtaagacatgccttgcctcccctttgccttccaccatgattgtaagtttcctgaggtcttccagctatgtagaactgtcagttaattaaatctccttactttataaattacccagtctcaaggagtatctttatagcagttatagcagtgtgagaatggactaacaaaaataaccacctccagattggaaatatatgaaaagttgagagtcaagaaactatagtccagtctagaccacag

SEQ ID NO: 126638 - DNA, 309 bp, Homo sapiens
ttgggtgctctagaggatcctgatcacgtgcattgtgcagcacgaggggttgcggagccctcaccctgagatgggagcatcttcccagcccaccatccccatcgtggcatcgttgctggcctggctgtcgtgtctgtctgggggatctctgagttttctcaaggcctgagcaggactgggacatttcaaacagacgagtaggaagtgagtgctcctggcttggaactcagagcactttgtggcctctggactaggctgggcacaaggcacagcatccagttccctgggcttaacatcgtggcatgtgtt

SEQ ID NO: 126639 - DNA, 246 bp, Homo sapiens
cttctatcagggagtaattaagacacaaagaaaaatccagatagtctcaactacaagtacatttcccatttacaaaacttcaagtaatagctggatttgtttttacttttagcactctaaggctttttagaaaaaaaaaaaaaaaagccttttgactgaagaactatcttcccttcagtagggtttaacaatttaaatgaattcaatttccttttcttttttttttttatttctgggacagaatct

SEQ ID NO: 126640 - DNA, 380 bp, Homo sapiens
tcccccttcccagccctccctcccacctccaccccagctcccagacgcccaggcgcacttggtgcaggtgtgtctcaaagtggtcaggagaggggacaatatacaggggttggcctcagtactggaaaatgccatttgcaccccctaacaccactactagtgggaaaaaccagtggggccacaggctgccccgaagtgaatgtgctgggcggatcacagccccaccacgtgtcatgtagacacccagggctacaggagagtcaaccatatttgggcatgacgtgctggccaacccagggcctccatctctcactggtctttagcagataaattaattattactagaattgaacaggagggacagatacctgccttcctag

SEQ ID NO: 126641 - DNA, 682 bp, Homo sapiens
tgcctttctgggggtactttacagaaataaggtagctcgatgtttaaatttctgcctttgagaacccagaaacttcttactgggcatgttagcaggcccatacctgctaaaatgagtgatccctacctgctctgtactgaaccaatatggtataggagaaaggttgtgggttttggcatcggaagttctgggttcaagatctgcctctgccccttacaagctgtgtagccttgagtgagtcaactaatttggcctcagttttactggctgtgaaatgctataactgtatccattttagagggtttttgaagttttaaaaattaaaatttacttaagtgtaaagaacaacacaaatattaattattaatgagaatgaccctggcttttctccctatttatcaaatagaccatcctccatataaatgacaggagaaccaggattattattgaaagagatgagggaaggggaaaagtaagaggcagggtagataattaataaagacacaggtgtgaattcaagcatccattgcctcacagttagtggcacactgcggctagtgacaaactgttctgactcccagctcctgctgcggcctcttatttccccagagatgctttctgtttactcataaagatcacatcctgagctaatgaatatcctggcccttaaatatggccagga

SEQ ID NO: 126642 - DNA, 1012 bp, Homo sapiens
ataaatgagtttatcgaagccaaaaatcaattatatttctatatactaacaattgataactaacaattaaaatttaaaaatacatctaccatttacaaacaactttctctaaaaatgaaattttttatttaggtataaatcaataagacttgtgcaggatgtgtatgctgaatactgtaaaacattaatgaaagaaatcaaagacctaaataaatggagagatatactgagttcatggattagaaaactcaacctaataatgatgtcagttctctccaaattggcctacagatttaacacaattccaattcaatctctgcaggattttgtttatagctataaacaagccaactctaaaatttatatgggaagataaatgaactaaatgaaccaaaataatttttaaaagaagaataaagttggagaaatcatgctacctaattttaagatttactataaaactacaataatcaagacagtgcaatgttcgcaaaaaaattaaatcaatgaaacagaatagactgtccaaaattagacccacagacatattgccaacagttttcaacaaagatgccacaacagtttaatggagaaaggatagtcaacaaatggtgctttgacaattggacatccatatgcaaaacaagcacatgtttaaaaccttgttgatttttcaatatgcaaataaaattacacaatagttacaagcccaggaataataataggatacaatagtaataatagtatacaatgccatgtatacaataataatagtatccaatcccatgtcatcattcattgttgtaattacatagagactgtgaagctaattcttaaaaataattttaaatgaatactttaaaacttctaaggtcaagaaagctaatttggtcagagtgttaaagaaaaaaaaagtctcaatctatggtatcatttttggagtaagaaaatgttccaggtatgttatttgcagatggagaaactaaggcccagagaggttacataacttgcc

SEQ ID NO: 126643 - DNA, 417 bp, Homo sapiens
aggaatcgagattctttaaggggaaggttattgaaaatgttacttaggctgtttttcttaaatttccaaagattgtctcttagtaaggttgatttttctggaatctttttttggtctgtttctataatgtatgaataagtcacactatgtgtgttttattctgtatcctgcctggacgacagagcgagactctgtctcaaaaaaaaaaaggttaaatggctttacaagacactttccccaaattttagaccaatacggtttcttaaaaaccttcatttagggtttggtggtggtggtggttggttggttttggagatggagtttggctctgtgttgcccaggctggggtgcaggggcgtgatcttggcttcccggggcttcaagcaattctcctgcctcagcctcccgagtagctgg

SEQ ID NO: 126644 - DNA, 715 bp, Homo sapiens
atgtatattgttttctttttcattggatttattcgtgtattaactttgttttctccttaattgttttacatgtaaagacacaagatatattttgttttttttgttttgtttagagacaggatcttgttcagttgcccaggctggagtgcagtgatgcattcgtagctcaatgcaacctcaaactcctgggctcaagtgatcctcccacctcagccttttgagtagttgggattacaggcatgtgccaccaagcccagcaatttccatttttataccttacattatttctggttatatacttccattgagaattgaagggtaaattaatttagaaactgatttttatcagttactgagaatagtttgatttcactgatagtaaatttcattaaataaaatgtgatgctttatcttgagtttttatacaagtaatactttttaaaataaaaattatctccccaaatacaaaaatatatagaataaaaaataacatcagtccctttataataatttaatttttaattgtttgcccttgtactgttttgccactgtaatatatccttggaaaaaaagttttttagggaacgagaagtggtagaaatgaaggttttcctaccttaaagaaaagcctcactcttaaaccaagaatggtttagcctcagttttggtgagcttttcagttgtattcttgatatataattttttggtgaataga

SEQ ID NO: 126645 - DNA, 399 bp, Homo sapiens
ggttcctcttctgactctctagttgtttctttgtctctacttatttctctctctctctctcttctctctttttttcttagactttttaaaggttcatcaaatgtatcttttcaaaaaattaacttttcattttgttgatcttttgtattctgtatgttttcatttcaatgtcatttatttctgctctgttctttattaatttcttcagctaattttacatttgcgatttgctcatgcttttgtagttctttaagatgtattgttagcttgttcaagttttaaaaaaaaatatttaggatcatatagctatacatttttctcttagtacttcttgcgctgtatcccatagatgttggtatgttgatccatgttcatctgtttcaagaaattttaaaattt

SEQ ID NO: 126646 - DNA, 231 bp, Homo sapiens
atctcctttggtatttaaaagcttcttaaggaatgtgagtgtgcttatcatagtgcttagcaagactctaagagtactcaaaagaactaatttagagttttctgtgtactatttcacaatacccagtcatcagatgtaagctgagtaaaatcagtatcttaattgtatctcccacagttcggtgctttcagtgtggaatttctacaaatcatcattgaacaaatgaactac

SEQ ID NO: 126647 - DNA, 247 bp, Homo sapiens
aatctgtaagccattttcaattgtatatttcaattttatgtatgtgtgtgtatatacatatctattaaccatatataatttttttcttcagatatttctgcaaaataaaaaagctcaatggattatagaatgacagctactttcaaaagaaacttatctcattttcaaggcgctacatacttcacacatgacacacttcaaagccggtcaacaatcattatcagatattgactcagcgtgcacacac

SEQ ID NO: 126648 - DNA, 633 bp, Homo sapiens
gcttagatccccaatctcagctggagagagacacctaataccagaacagaaaactacagtttcaaacccaactctgacctgacccaattcaatttctaattagatcaaagcaatcagcccctcaccacagttaagacaaaagaaaagagaaagcactcatgggtaagggaaaggatactatctacttcagtctctacttttcctttacacacaatctccagtgtacaataaaaatttacaaaaccagataggaagactcaatattgtcaaaaggtcagttcttcctgatttaatctacagattcaatgcaatcctaataaagatcccagcaagctattttgtagatattgacaaactagttataaagtttgtattgagagggaaaagacttagaatagccaacacaaaattgaagaacaacaaagttggaggactgacactacccaatttcaaaacttactataaggctagttatcaagacagtgtggttgatatggtttggctgtgtccccacccaaatctcatcttgaattatagtttccataatccccacgtgtcatgggagcaacccagtgggaggtaattgactcatgggggtagttacccccatgctgctgttcttgtgacagtgag

SEQ ID NO: 126649 - DNA, 156 bp, Homo sapiens
ccttagatatagactcccacagtccctagatatagactcccacggtcccgagatacagacccccacggtcctgagatacagatccccacggtcctgagatatggacccccacggtccctagatatagaccccacggtccttagatatagactccca

SEQ ID NO: 126650 - DNA, 332 bp, Homo sapiens
gaaggagtcctgcattaggagtcagaagacttagatttgttgtcttggttctagtatttacctgttagagaatcatgggtttgtgtctctggggaaaaggccgaagtaaccctgagacccagtttcctttctaaaatgtgtgtgatgacacctgatttactaatttataagctagttgtgagaaccaactgtaatagctttgtgtatgtgacaatacgtgtgaaagccctttgtaaacttttgggcagcatatagatactacttatgatatgacatgcccagataaatgggtgtttgataggttaagttgctcccttttcttacatgactct

SEQ ID NO: 126651 - DNA, 529 bp, Homo sapiens
atttgttaagaaattattgttctggcagtagtattcacatgtatatatcctgcactccatattttgggggaatgctttattagttgatcaaatacttaagtatcaatttggggccaggcatggcactgtgttagggttatgccaaaggtaataaaattcctgccatcttaaggcattcttagtcaagtgagggagattggtaagtaaatgagcaattagaaagcagtgctaaaatatggaaatatattgattgcgctagggatcagaaatgaaagaaagcctaatttgggggatgtctaggaaagttttgcaaaggagatgttaactgtattgagtcttgaatgagttagcagttaagggttgactgtgagagggcagtccagacagctattagtatggttaaagattagtcttattttccatatatcagaggaaataagacatgtacacgattagttttggtgcaagatataaagtgataaatgctgcatgaagtaaaagtaagttgttgtgtgagttcaaagtagaa

SEQ ID NO: 126652 - DNA, 285 bp, Homo sapiens
tgtcctagtgaatggcagctgagaagtgatcttcaagggggtgtctgaaaaatgttttactcactaataggcttagaggaggaaatcctgctctctctggacattgtcttttctgactctgatagttggaactgctgcagccaactaatgatcacaaggagacacggactcagactgaggttagctcagtggaaagatagaactcaccagagcctttgataatgccggtaagcttcagaattaacccattctagagctgctttacatgtggacttatgttgatat

SEQ ID NO: 126653 - DNA, 299 bp, Homo sapiens
tagcgatctagaggtccctcagccatgtcacaaccaaatgctattacataaagttaacaatacttaaatgctgatatgaagtaaatcttaatgtcccatgataaaaggaggctgggcgcagtggctcacgcctgtaatcccagcactttgggaggccgagatgagtaatggcttttgacagtaatagagggtctcaacctgatttttcttaagtttgcataaggcttaggagaggataaaataaggcaggatctagagattggtgaggagaaacggaagtcctcattcttgacagctct

SEQ ID NO: 126654 - DNA, 510 bp, Homo sapiens
  misc_feature (16)..(16): n is a, c, g, or t
acaggacgcacagtcntctcaagatgatatacagatggcaatatgctataaaaagagttcattgctgggcgcggtggctcatgcctgtaatcccagctacttgggaggctgaggcacgagaattgcttgaacccaagagggagaggttgcagtgagccaagatcatgccactgcactccagcctgggcgacagagcaagacttgtctcaaaaacaaacaaacaaaaaacaacaaaaaaattaccattaaaaatgagagagttttcattggcaaagttaaaaagaaaggtgaaagaaaaacctactcttcttgatttgtgtttgttcacttatggagaatttattttgtcataatgtctgaatcataattaaatatgttcttgggtctagcagttcttctatttcttgtattagaagtaaacttggaacatcttaaacactgataatgaagactaatttgaaataaaaagttactagcctttcatacaatgaaatatgttgccgttaaaaa

SEQ ID NO: 126655 - DNA, 598 bp, Homo sapiens
agccactctttgcttcttgtttcttttatctctaataaatagccttagtatttttcagttcagctgcttaacctgaatgttaatacatttttaataaggaaaaaagatctggattgaattcctggtttaaaagttgaactcctgaattataatttagtaattatgagtgtgacatatggttccacaaatctcttaagaggtttgtattgaattcaaatttagaagctggtaggcttaatcgtttaatttttttaagtgaaaactctcctatatgatattcactcatgtttagttgtttttgcttattaaccacttgttttgacattgtgtgcttttctgcaaataggtcattcgcatagaaaatgctgacactttaccgagctgacatttaacttcataattcatcatagttaagtgaattgtgtcgtgtaaacttgacagtatgtaatgccttttaaaagatcattatgcaggctgggcacggtggctcacgcgtgtaatcccagcactttgggaggccaagacgggcagatcacttgaggccaggagttcgagaccagcctggccaacgtggtgaaacccccatctctactaaaaa

SEQ ID NO: 126656 - DNA, 726 bp, Homo sapiens
caaaagagagtttttattagaaggcagttttcatccctctatcaagaatttaaatcacttatttcatttcttttccctagaggaaatggagaagaaatgaaaaatgtaataaaaatttgctttagaatccataaaatcaaaccaggtcctgacctgactataatatattttatgtttctgaaataaaaaaagaagtttatatccagaaaagcaaagcatgatcctagaaatgtaatttaataaagatcctaggcagtgaaatttgttgaaatttgtggccaaaaagtagataaattattctccatttacaataaagatgtgctacatactatatgactctgtttatataacattctgtaaatgaaaaaattatagaaatgaagaacagataagtgtttgcagggactggagaaggagagggaagctgtgaccaggaaggaaagcaggagggagttccactttggtgagagaacagttctgtatcatgattgtgctgccatgacagctataggaatatatatatacatgtattaagcatgtcatagaattatctaccaagacaagaaaaaaaaaaaaaaaaaaaaaaacaatttttggggcggttggggcccttggaaaaggtttttaaaacactttttttgggggggggggccccattgggttaggtggaacctggggcaattaggtggttccagggagaaccggggccggaaaaaaggggctgga

SEQ ID NO: 126657 - DNA, 559 bp, Homo sapiens
ttgagatagagtcttgctgtgttgcaggctggagtgcagtggcaccaactcggctctctgcaacctctgcctcccaggttcaagcgattctcctgcctcagcctcttgagtagtgggattacaggcataagccaccatgcccagcctgttgttacttgttatacctctttctgcagaggatttgaggcagattccaaaaatacttaacatataaaagattaaaagttgagagaattatagcaaagggaataattaagaaaataaaactattatagaatgaactataataaaactattatagaatgatcctgtataaaatatagcatctaaagcaggcatatgggcttatagttttaaaagatgagtcacaaacttgtctcaggatttcttagtagccaagcaaggagggcaacatgatcagttataagattcatattgtttggcctttgaaaacaaactaggtgttcaggaaatttctcccttgtatattataaaccagagatgtgtgatataatggaatatatccttacacaattgctccaatatcaaaacgataaaa

SEQ ID NO: 126658 - DNA, 352 bp, Homo sapiens
atggtcttgtgctgggacaaacttattcctctaacacccagccaagagtgcagtggagtgatcatagctcactacagccttgaactcctgggcacaaaccatccacctgtctcagcctcccaaagtactgggatttacaggtgtcagccaccacgcctgacccttttttctactctaaactctggatgaccacctcattgagcttttaaaaaaaaattgttgtcagagttaatgatgtctgttcatgggaagagacagtgtctggctcaggagataggcagagtctcattctacctggagctgctgctgtttctgattcaaggtacccagcatgcagtatgcattatgctaa

SEQ ID NO: 126659 - DNA, 433 bp, Homo sapiens
aggggtgtgagacaggtatggtggggagggcgaatcatttgcatgcaggaagatgagagtgagctgtgtgcctggaggaaggctccaaattggatgagggcagggagagcaaggactgggatggggtggggaaggttggcctgttacaggtttgaccaagtgccagtcagagggagaaaattcccttatcagtccaaggagaccctgcatagaccagaggaggggtatttgaagtcagaaggtggtgggagggggtcattcccaggaggggtgccccacactagccagagcggggaggcgtcccacactaatcagagggggatggtccccacactaaccagagggggaggtgccccacatgaatcagaggggggtggtccccacactaatcagagcggggaggtgccccacagtaatcagagggggatggtcc

SEQ ID NO: 126660 - DNA, 377 bp, Homo sapiens
aatagcagaatcagaatcagaatcctcagattttatcatcctgaggctcttggcatctaatagcaacatgcactgaagtccatgttatagtaagagctgaaaatcatcctcccactataacaggaacaaaagtgtggggaaagaggaagagagaaagcaatacttttcctgggatgaaagcctctacagcacaaggcctgattagtaaatggaaattctggatagtctctgaatagaatccttttccacctttcaaataatttacagcttaatgtccgctaaatttagtaacttctcccatttgtccatggcaaggagattcttggctggctttccatggtcattacagaccttctcatagatccctgaaatatgat

SEQ ID NO: 126661 - DNA, 476 bp, Homo sapiens
ggcccacctctgacgagtcaccacaatacatccaatccatcagcaaatcaggctagctctggcacaaaatcaatccagattacaaccacatctaaccacccaggtcaaaatcacaagcatctctcacctggattattacctccattcctaactaatctctccatctctagccctttctctatttattctgttctcaagagacagccatctgggtcttgctaaaatgttttgtcagacatgtcagtcttctgctcaaaaccctgcaaagtctcccatctcactcagagaaaaagctgagtccttacatcagcctgcagggccctatacaatgtactgggtcactgtatctcccactgctcactttcttgctcactcttctctggcccacagtcttctctattgttcctcaaacatatctggcctcttctcatatcaggagtctgtacttgctgttccctctgcctagaactctcatc

SEQ ID NO: 126662 - DNA, 624 bp, Homo sapiens
aagtgatctttccactggttgtcttagcagtttgggtttagttcctatttttatttggccatgactgatagagctgagtgaaggaagtataatacagccaacctcaaagactccatcatgaatacacttgtcaagtgagataaattttgcagaagtcttgctcactcccttacttggatgactcctgccagttcctttagtacttcgctgtgttatcctctctagaaaactcttcttgatatctcctccccaaagaatgtgctgtgggatgggatccccaggatacagattctgagatgaaactgtacatgaaggggttttattggaggaagtgctcttaggagcaacacctgcaaaacactgaagaaaaccaacagggcagagaaagaagttgaactgcagtgcagttgcgaaagcagtctccactaactcctggggctatgaaactgagatggcgcttcagagattccgaaatcagcagccgattgtgggctgctcccagggagggtgcataaacttaggtgagacagcttccttctgtagagcgcagaggaacacagctgtcagctgtcagcaagcaccacttccagcagctgcagcaagagtacctctctgctgaagggg

SEQ ID NO: 126663 - DNA, 660 bp, Homo sapiens
gagacagggtttagccatgttgcccaggctggtctcaaactcttaaattcaaatgatccacccacctagttttcccaaagtgctttaattacatgtgtgaggcaccgtggctggccaggtcaaatatttttcattgacgtttttcatattgctttttaaagtcatgttaaaatattcttaataatttttctaagtggaattaatcttgattataattttagttttttataaagggcgggttttgaaacaagtactgcatttttcttttcgggtttataaacatttgctgtggactttgtgcagttaactattttcattcctgaaacacatttcgaaatcaggaattgaagactaaatgtcttttcactgaagcttgagcagattttagaaaggggagttcttttttttttttttttttttggtagaaatgggggtcttgttatgttgcccaggctggcctccaacttctgggcttaaactgtcctcctgctttagcctctggtctggagagttctttatggcctctttgagaacttttactttacacatgattctatctagctttcttttctgatgtacatattggcagcaagtagaaaagcaatgttttcagaggcagatatattaacagcaatgagaaataacagtagcgtgatagaa

SEQ ID NO: 126664 - DNA, 548 bp, Homo sapiens
ttatttaaaaaaaaatttaagtaaaccctgttgtcattagctattaagaacattgattaagtccctggacttggataaacatatatccttgaacatatataatgaagaaatacagtggctctttattaaaaataatagttggataatataaactgaactatttatgcatttttatatacttataaatccttccaaatagttttaattctatccttttacatataaataacttaataagtgtgctgggaaaacacagatattcacagcaccactgtttttttttttttttttgagataataaattccatgagaaatctggggttcgaatatttggttaactttggctcctaatggaacaccactccaggccttctgtctgtctcccctttaccccgaaaatactaacacaaaaattttaagacaacaagtaaccatatataggtgtttgaatgattttctcatttttatctaatttcatttcataagtcccgagtaatttacctaccataggctactatactgataatataaatgaaaccgaacatttt

SEQ ID NO: 126665 - DNA, 772 bp, Homo sapiens
agcatttattaagcacctgctgtatgcaaggttcccatgttacggcagtgaatgaggcataattgttccctccatcagcgattgattcagtcatcaagcagttactgatcagattaagaatcaggcactagtgatacacattcatttttaaaattcattcaaggatttattgagtgcctactgtgtgttgggtgcactccagcctgggtaatagagccagactccatctcaaaacaaaacaaaacaaaaaaacccaccaaaaaccaagtactacaaactaaagggaagcaattaaggaaatgtatctttaagtatgtttactgcagccctgcttgtagcattggaaaattataaacataaacctcctccaagggggactgggccaatgaattatgacatatacactcaataaatatttatcatgcagatgttatgaaagtgagacccatctgtgttaacatggaacctgtccaagatgtactaaaggtgcaaaaccatggagagcttaattattccattttaggacaaacacaaaaatacatgtatatattcatgaaaaatttttaaatgtcgagaaatatgcaccgaactgttaaggggactcaactcacatatattacattcttataatgtttaattattattttttacaaagggtatattactattgtaggcttaacaatacattaaatattttaaaaataaaagagtcttctataaaaatacatatactgaatcatcgagcaaaacccagcactaatgtttgttgatc

SEQ ID NO: 126666 - DNA, 497 bp, Homo sapiens
gtgcttgttgtacttacacttttccggatatttgaaaatttgcattaaatttctttttttcttttaagggcagtaaaagtgactgcaaagcaaagcaaaccctccatgccttcctgctgccactaggaggaaatcctacattgcttggctgccccttctgggcccagtgtcccactgcagcccctttcctctctgcagatgatgagtccctgtcacgtggcttgtcactcccctggatgtgcagggcatctgctttgctctcactttccctgctgcaggcctccatgaggctctcaatctccccaagcttcaagactcacttcatcccccaggaggataccctctatctcacattcatctctctctcccacctccttgcagtcccagccagtcatttctcactttctcacagcctgtcagaagcaggccatctgctgacatgcatccatcctctggccctcaccatgaccctgataccctttcacctggtccctcag

SEQ ID NO: 126667 - DNA, 334 bp, Homo sapiens
tacagacctgcttttccacagctcaccacctactggggaaagcagacaattaactgataacatcactaaagtgtgacctgtgtcatctggaggggacacagagcaaactcaggtagacagctgggaggtggctgcaggggtccaggtgcatggggcggtgcctgagcatgaggaggcggcagtggggatcaggagggaacgggctgagcgtcctcaggaggcaggtgtcaagaggcacactgactgactggcctaggcaggctgagaggcaggcggattaaggatgtttcccaggtttctgcttgggcagccaggaagaagacagctgctcccc

SEQ ID NO: 126668 - DNA, 453 bp, Homo sapiens
cctctcaaagtgctgggattataggcgtgagctgccgtgcccatcctactagctctgccacttctatcctggttcggtattccatcttctcttgcccaggtttttgtaatagtctgctacctggtctcgctatctccactattgacactgaagaatttattctaatcacaacatctgacataatcctttgaaaatataaatctgatcatgcacaaaatccactgatgtgtttcgctcagaagaaaagctagagtccccacaaggctccagtcaagcctgctcctaggtacttgtttgactttcatctcctcctgttctcatttctcacagctacttaggccttttggccattcctcaaatttgccaggcactttgtacagctgttccatggtattcatgagggggttggttccagagcctcttaaagatacccaaatccgcagatgctcaagt

SEQ ID NO: 126669 - DNA, 625 bp, Homo sapiens
attcagctactagacatttataatggatatagtaatatcagtccagttactacaaggtcacaaaatcccatttcatcagactaatgattcacattatctttaaagatcatttatttatttagttttatacttacttttagaatgttttgacttaactcggtatgaaaagtgcctaaaacctacttcaagaccacggttaattttatactcttttaaggtgaaatataaattcccacttaccattgcaagaacgcatactaaaaataaacccacggtcgggcacagtggctcatgcctgtaatcccaacactttgggaggccaatgcaggcagatcatttgaggtcagaagttcgagaccagcctggccaacatggtgaaaccctgtctgtctctactaaaaatacaaaaattagccaggcatggcggcaggtgcctgtaatcccagctactcaggaggctgagacaggagaatcgcttgaacccgggaggcggaggttgcagtgagctgacatcacaccactgcactccagtctggctgacagatgatgagactccatctcaaaaaaaaaaaaaaagtatacccaaacttctagttagttcccagaccccacagtgaagatgtgc

SEQ ID NO: 126670 - DNA, 627 bp, Homo sapiens
gcaagctccgcctcctgggttcacaccattgtcttgcctcagcctcctgggtagctagggctacaggcgtatgccaccacgcctggctaattttttgtatttttagtagagatggggtttcaccatgttggccaggatggtctcgatctcctgacctcgtgatctgcctgcctcggcctcccaaagtgctgggattacaggtgtgagccaccgtgcctggcccctttttttcctatcttaaaaccacttactggctctgttacctgcatgatgtctaagtcaagaactgtgaaagatctggggttttctacttgcaggctaacaagtagccttccacagttgcatggatactggcagaaaccatgaggctcatgggtcagaaacgaatgacttcattattcacagcacagcaagcagcaagaatatctgtatgtttgtatcagttcctcctttacactgcatccaaaagaggtgatgcatatgggccatatggatatctgcacatctggtaggttgcattacaggacaggaatcccactcttggttaactcagatcttttatcttgggcagtaagcttgcctgccctttgcccctgagggaggtagatgaattgtgtagcttctgaa

SEQ ID NO: 126671 - DNA, 905 bp, Homo sapiens
gtttcccttccttggtaccaactatagttattttgttccagttagactgtagttagggcgataggtcattaggagagcctgagaagaatgggcagcagtctttgaagagttagtcaccccaacaatatactattgcttttaaaagagctgaggtggccgggcgcggtggctcacgactataatctcagcagtttgggaggccgaggcgggtggatcacgaggttaggagttcgagaccagcctgaccaacatggtgaaaccccatctctactaaaaatacaaaaaaaaaaaaaaaaaaaaaattttgggggggttgggctggaaaagtttttaaaacccatttggtgtgggggccgcgagggccccaagaatgggttaggtggaaacacgtgggtacaaacggttgtccacaggacaaaccacgggccaatgacaaaggtcgcggggctttcctcaccaataaaaaaaacgcccgggggggaaaccggcgcgttcatggaaccaactcccaaagggggagcgtgaagcgcatacacggggatctaccacacggggagttccaggcgagcggaattaaattaccccgcggagtatgggacaaaaaatcacagagaaaaaaagaagaggagaaaaaaaacaaaaaaagaaagaagagaaacgaagacgaagaaaacagaagaggagcagaggaagaggaaacaagccaggagaaggaagaaagagaggcacaaggataaaacagaacaacgtaaagacaaaagagagaaaggaaactcagacgaagacatcgagaagacgaggggaagaagagagaaaaagatgagagacagagcacgaggaggaggaagagaaagaaaagagaaaaaaaagagagagaagagagacaaaaaggaccacagaggaga

SEQ ID NO: 126672 - DNA, 602 bp, Homo sapiens
ccatgtgctgtgccatggactgtgattctggagggatagcagtgaatgaaaatcctgccctcatggaacttacatttgatttagggaaaccaggcaggcatgttttctttcaatgtgatgaacgctgtgtggagaagttacaggagcggttcaaatgtaaaacaggggacttgacctagtttaggggctgaagaaggcctccttgtaggagaatattgaagccaacctgcaagataaataatagctgtttgcagaatgtagggaagagctttccaggcagagagaacagcatgtgagaggcctagaggtaagtgcaggcctggggaactgggactagcttcagttatttggaacctagcatgtaatgcagagaatattgaaggataaggccagagagttaggtccaagtgagttcctaaggccttgaagccatgccaaggttctcatctctgtcagccagcactattgaaacaattctttaatgaggtaggtaacctttataaggcttccaacacaatgccaggcacaaaacagttgcctaagagttgctgttagtttctcttatcaacagcctcctgcagtgatctctccagtctcttctc

SEQ ID NO: 126673 - DNA, 212 bp, Homo sapiens
cagccactcagggccccgtgctgtgataaggctgacaacacagagctaagtcagaattttttgcaaccagcactattgaaacaattctttaatgaggtaggtaacctttataaggcttccaacacaatgccaggcacaaaacagttgcctaagagttgctgttagtttctcttatcaacagcctcctgcagtgatctctccagtctcttctc

SEQ ID NO: 126674 - DNA, 392 bp, Homo sapiens
cttgctgaaaataaatgccagtagaaacatctcgtactttggatagcttgaaaatttgaatcacaggccttttctcctctgtttactcaatatcaattgtttaaggaaagctagataacttaccttttcttgcccttcctccatgcagccaagggtgaatatttaagttttatttctatggatcattcttcattaactgtgctagaggccatcatttagaaggggagacatttccaggttcttaaagctgagtgtatttatatactatgtagtctacatttgtcataatatttccagagttattaaaaggtacaggaatcttttgtagatgttttctaatgtttctgaatgcagacctttattcactacctccatcttaggtgatggctttc

SEQ ID NO: 126675 - DNA, 1067 bp, Homo sapiens
tctgtaatcccagcactttgggaagcggaggcaggcagatcatttgaggtcaggaattcaagaccagcctggcctacatggtgaaatcctgtcttcattaaaaataccaaaaaatgcaccgggcgcggtgactcatgcctgtaatcacagcactatgggaggccgatgtaggtgaatcacctgaggtcaggagttcaagaccagcctgaccaatatggagaaaccctgtctctactaaaaatactaaaatttgctgggcgtggtggtgcatgcctgtaatcccagctgcttgggaggctgaggcatgagaattgcttgaagccgggaggcagaggttgcagtaagctgaggttgcgccactgcgctccagcctgggcgacagagtgagaccctgtctcaaaaaaaaataaataaataaaaaagtctttctcaaattatattctgatgatcagagaatgatctttctcaatttacagcctgatgatcactaatctcagtgagatagttcatttataaaatttagtggtttaatttcttatctttgacagtcatcttaaacagtaacatgttaaaggcttagagaagtgtctggcaaataaactgttttcacatttttacaacttaatatttcttaaatttattccatagaataaaactttaggaaatagcaacctatataagagtgcattcctctaacccctatgcacattagattggcagtaaattatatttgaatcacaggccttttctcctctgtttactcaatatcaattgtttaaggaaagctagataacttaccttttcttgcccttcctccatgcagccaagggtgaatatttaagttttatttctatggatcattcttcattaactgtgctagaggccatcatttagaaggggagacatttccaggttcttaaagctgagtgtatttatatactatgtagtctacatttgtcataatatttccagagttattaaaaggtacaggaatcttttgtagatgttttctaatgtttctgaatgcagacctttattcactacctccatcttaggtgatggctttc

SEQ ID NO: 126676 - DNA, 1134 bp, Homo sapiens
  misc_feature (45)..(45): n is a, c, g, or t
ttgctgttacatgtaggtatagtgtcccctcagagggcactgcanatctggaagagtgagtgaattgatatgttgatgggaatagtactggctttaagaggatgtaaccggggtttttaaaattcttgcaattcagcaaggcatggtggggcacgcttgtagtcccagttaagtccagaggctgaggcaggagaatcacttgaacctgggaggcgtaggtaacagtgagctgaattcactccagcctgggcaacaagagtgaaactctgtctaaaaagagaaagcaaataaaaataaataaataaaaattcaaaaatcagccaagcgtggtggtgcatgcctgtaatcccagctgcttgggaggctgaggcatgagaattgcttgaagccgggaggcagaggttgcagtaagctgaggttgcgccactgcgctccagcctgggcgacagagtgagaccctgtctcaaaaaaaaataaataaataaaaaagtctttctcaaattatattctgatgatcagagaatgatctttctcaatttacagcctgatgatcactaatctcagtgagatagttcatttataaaatttagtggtttaatttcttatctttgacagtcatcttaaacagtaacatgttaaaggcttagagaagtgtctggcaaataaactgttttcacatttttacaacttaatatttcttaaatttattccatagaataaaactttaggaaatagcaacctatataagagtgcattcctctaacccctatgcacattagattggcagtaaattatatttgaatcacaggccttttctcctctgtttactcaatatcaattgtttaaggaaagctagataacttaccttttcttgcccttcctccatgcagccaagggtgaatatttaagttttatttctatggatcattcttcattaactgtgctagaggccatcatttagaaggggagacatttccaggttcttaaagctgagtgtatttatatactatgtagtctacatttgtcataatatttccagagttattaaaaggtacaggaatcttttgtagatgttttctaatgtttctgaatgcagacctttattcactacctccatcttaggtgatggctttc

SEQ ID NO: 126677 - DNA, 1078 bp, Homo sapiens
ccgagatcgcagccactgcattccagcttgggcaacggagcaagactccatctccaaaaaaaaaaaaaacaaaaaacttagctgggcgtggtggcatgtacctgtaatcccagctacttgggaggctgaggcaggagaatcacttgaacctgggaggcgtaggtaacagtgagctgaattcactccagcctgggcaacaagagtgaaactctgtctaaaaagagaaagcaaataaaaataaataaataaaaattcaaaaatcagccaagcgtggtggtgcatgcctgtaatcccagctgcttgggaggctgaggcatgagaattgcttgaagccgggaggcagaggttgcagtaagctgaggttgcgccactgcgctccagcctgggcgacagagtgagaccctgtctcaaaaaaaaataaataaataaaaaagtctttctcaaattatattctgatgatcagagaatgatctttctcaatttacagcctgatgatcactaatctcagtgagatagttcatttataaaatttagtggtttaatttcttatctttgacagtcatcttaaacagtaacatgttaaaggcttagagaagtgtctggcaaataaactgttttcacatttttacaacttaatatttcttaaatttattccatagaataaaactttaggaaatagcaacctatataagagtgcattcctctaacccctatgcacattagattggcagtaaattatatttgaatcacaggccttttctcctctgtttactcaatatcaattgtttaaggaaagctagataacttaccttttcttgcccttcctccatgcagccaagggtgaatatttaagttttatttctatggatcattcttcattaactgtgctagaggccatcatttagaaggggagacatttccaggttcttaaagctgagtgtatttatatactatgtagtctacatttgtcataatatttccagagttattaaaaggtacaggaatcttttgtagatgttttctaatgtttctgaatgcagacctttattcactacctccatcttaggtgatggctttc

SEQ ID NO: 126678 - DNA, 473 bp, Homo sapiens
cagtagaatgtaatatttgttgggacagggactttcctttgttcaatcctagtttgtgggcctgtctccctgtgagtttttgccatagcagtccagccacacatgccagagcccaggaaatggatgatgaactttagtacattccagtttgagccttgtgaatattcaggtgagtggttccctatgatggtatgatttccttcagtttttccataatttttttttttttgagatggagttttgctctttgttgcccaggctagagtgcaatggcgtgatctcggctcactgcaacctctgcctcccaggttcaagcaattctcctgcctcagcctcccgagtagctaggattacaggtgtgcaccaccacgcctggctaattttgtattttcgtagagacgggttttctccatgtttgtcaggctagtctccaactcctgacctcaggtgatccgccctcttcagcctcccaa

SEQ ID NO: 126679 - DNA, 370 bp, Homo sapiens
tgccccctcgtcctgtatgcaataaatatcagtgcgcccagccattcggggccactaccggtctccgcctcttgatggtattggtcccccaggcccagctgttttctctttatctctttgtcttgtgtctttatttcttacaatctctcgtctccgcacatggggagaacacctgctaagccccgtagggctggacactacactcccccaacaccctgacattagatcaaggtgatgactctgtagggccctccccagcctctgtggtcaacatattagaagcttataggcctccctgaccccaggcactggtcccttatagtagcagctgttctagggatcagacccgaaacaaatgcaccgagctcac

SEQ ID NO: 126680 - DNA, 428 bp, Homo sapiens
accttcaccaccactactacctattttgaggctgccaccaccacactataacatattcctccccgctctaaggctctgaatttggacctcccacatgacaggactctaaataatgactaatccattaagtttctgctccatttccaaaatattcattcaaatttgaaatgcctggggcctcttgtgtagccatggctgggctaatttctgcatttgcattttaaacaccctgaatcaggattacacctgaagactttcaaataagtgcttagatggcacaataaagatattcaggttaaaaaaaaatctaatgagtctgttgttcctttgcaaggcctagtgataggaacctcttcttggaaatatttgttaagccattctcacttgtagtcactcttggtaccaaatctgttgaccgaaaaaaaaaa

SEQ ID NO: 126681 - DNA, 522 bp, Homo sapiens
tatgggcacaggattgggagtgggacaggccatgggtggttttggaaaaggcaacatttgagtgggaaaacaggtatgtatgttctcactttgggctgtggtttcaggcttgaggttggggcccttgccggggacctgccttcttctgcccagaattcccctgcctcctatctctattatttgtattatctatcaatcacaaagtatttaatgagttcttaccaggagccaggactgctttggaaagaaagtagaatgaggcatagaaatcatttcaagatatcttgctatgtaattgctcagaaaaaactaacatgcatgaactcgtcacaatgaaatgataaactgtacggttttgaaaacagctaccatataagttcatagatagaggaaagcagaatgagctggagagtccgagaagactgaagggaagggcagcagagtggcagagagaacagggtgtggggcaggcagctggctttgtgtcccagcggagtgacttcacaactgtgtcccttagtg

SEQ ID NO: 126682 - DNA, 2554 bp, Homo sapiens
  misc_feature (930)..(930): n is a, c, g, or t
  misc_feature (1489)..(1489): n is a, c, g, or t
  misc_feature (2060)..(2060): n is a, c, g, or t
agttcaatgcgagctgagcagacagggctgcaaggaaatctggcgcggttcaatacctcgtctagcctgggttccagtatctaattttttttttgttttaactgacaaactcatttctctactgggacaggatgctgtgctggctggaagttccatttctacagcaagaatcctatctggaaacacagaagttgtcctctagccacagcagctcgaacttttttgattgtcgttgctgctttctcccatcacccccatccccttttgacaaagatccaactgtaaaaagtcttacgtaacagttcaggactacttcggttcttttactgggtaagcactttcaattttttttttttaactaaaagccattttaaaattgaatctgttgaggggcttgactaaaatcttttaagtaatttgtgtaatggaatactgtcagtggattttttcgtctcatttctgcacgtgctcctttgttctcagaacagaagctttttatacacatcccataacgcagctggagagagttatgaagtcagttattataaggaacacaaaggttgctttccattctttgcctttagataattaatttttttgttttcttaaaatggagtatttaaagaaggaagaaattcacaagaaataaactgttggagaatttagaaaagtttgaagtttttaccaccttttctatctctagttttgtgtggccaaacacttgtgccgcctggggcggtgggggtagaggcaagcatagacagagaggaactaagccagacatggacaaaggcacgagccaaaaccagacagtcctggccgttcgataggccagcagtgggtgagacaggtcagccagctgcaggggcgggagcgggggggcgggtagggacatggatgtgtgaggtgctcatgcgtgcgatcgtgacnagattctgaaactgccagccattttcccagctccgctttgtgcaatctaaaggaatgcatcccctctgaagcagtcttgccagagcctagtgagggagagaagtatggtaaataccacaacatatggaatcagaaaataccgggaactggagtgggcaagggggaatgcagagggtgtggaaattttttagtgatctggaatgtgttgagtgacaggaagtgccccaagcttctcccccaccaactcttctcagtcgcgcctgcttttgtctaactcttgtaatctacacactactgcttacaaagctgtctgagtttaagacaaaaagaaacctaaaagtctccttacttcatagtacctgtgatatggaaggaatgtaaaagcatgaccctttaagcctatggacattttttcaggtatacaggagaaagataaaataattttccacagaaaaatgagaattatgaattatatagttcaggttccaaatctaatttttaaaagaattctgattctgctacactttacaaatgcttaggttggttcctaatttgaagnagacttgttttatttggttaatgcattgcatttgaacttgtttctattttctttgcataaatttggactttgggagaaaaatgcaaagtaataagtagaatgcacttgggggaaaaaaggaggatttttcccttcatgggttggaaagtattttaaagggttgttttcttgaaaaaacaagctctctcttactttctgcatctatgctataaagataactatgctataataaatgtaaggtagaaaactttaaagagaaaataacagtgttctaagtgaaaagctacttagcattttcccaaacttacacattatcaacagaaacactaaaaattaagagaaaagcagccaactaattaaatagctagccttattttgggggtatgggatagaaaattaagtgtgaataaaatgatacttgggaatgtttctccctcgtaccacaaaggatgttagtggtcagcctacgagttaatccttcctagcatggctctgagccttcatgccgagcagacgttattcacatgacgattcgaaaagtccattcatatatctcgctacctggatttgnatagaaaccagacagcaattctttagttccagccaccattcgccccactggacaatagcgatttgttagcacagagtcacaggctgtgggacacaaagcttggagctgcagaaagatgggggattcagagaacaggaaattacaggctcgatgcactcctggcagctctgagaatacaaaaaaaaaaaaaaaaaaaaaggcaacacagagatgccatgtttaagagctacttctagcttttttaaccacctccaatgtcataaaagctctattgttggagtacataaagtcacgagtcccatgtgctcgcttttctcactacagggaacttcattcaatgcccttggcacagtaagaaatatcaaaagcatccagagttgattagctgtacactctggtagaaaggagagcattttataaataaaatgtcaggaaaaaaatacgcttagtaacacaagtgacatgtaataaaattagtatctttttaaaattcc

SEQ ID NO: 126683 - DNA, 722 bp, Homo sapiens
  misc_feature (395)..(395): n is a, c, g, or t
  misc_feature (397)..(398): n is a, c, g, or t
  misc_feature (427)..(428): n is a, c, g, or t
  misc_feature (659)..(659): n is a, c, g, or t
  misc_feature (661)..(661): n is a, c, g, or t
agttcaatgcgagctgagcagacagggctgcaaggaaatctggcgcggttcaatacctcgtctagcctgggttccagtatctaattttttttttgttttaactgacaaactcatttctctactgggacaggatgctgtgctggctggaagttccatttctacagcaagaatcctatctggaaacacagaagttgtcctctagccacagcagctcgaacttttttgattgtcgttgctgctttctcccatcacccccatccccttttgacaaagatccaactgtaaaaagtcttacgtaacagttcaggactacttcggttcttttactgggtaagcactttcaattttttttttttaactaaaagccattttaaaattgaaaaaaaaaaaaccanannaaaaaaaaaaaaaaaaaaaaaaaaaaaannattgggggtgcgataggcctaggcccatttaaatcttaaccagctaatgcttgcgcccgggtcccttgtcgctcgcccaggcccacttatctttaaactgagcacaattaaagggccggggccatacatgagctcgtttggcaaaacccccgctttggggatcctatcgatttgcgggcgatgccttttcaccggggggcgtggaaaccacgggccgcccccatttatttngnaaaaatttcgcctccgtgagttgaacataaccccctattttgtaagaattccgtttagggg

SEQ ID NO: 126684 - DNA, 508 bp, Homo sapiens
agttcaatgcgagctgagcagacagggctgcaaggaaatctggcgcggttcaatacctcgtctagcctgggttccagtatctaattttttttttgttttaactgacaaactcatttctctactgggacaggatgctgtgctggctggaagttccatttctacagcaagaatcctatctggaaacacagaagttgtcctctagccacagcagctcgaacttttttgattgtcgttgctgctttctcccatcacccccatccccttttgacaaagatccaactgtaaaaagtcttacgtaacagttcaggactacttcggttcttttactggcagcctgggcaacatggtgaaaccctatctctaccaaaaaaatacaaaagttagccaggtgtggtggtgtatgcctgtaatcccacctacttgggaggctgaggtagagatcacctgagcttaggaggtcgaggatgcagtgagccatgatcgtgccactacactccagcctgggcaa

SEQ ID NO: 126685 - DNA, 253 bp, Homo sapiens
gtctttttttataagacaaattataaaggagaaaaaaggacagaaaaaccaagacaaattgagatcatagagtaagatgggagaaacaagcccagatttatcaataatccaggtaaatgtaaatggattaaactcacaaattcaaagacagaggctgtcatatctgacaaacgagacaaaccccaaattcaaaatctggctggacgctatcaccagagtaaagtgtaaaggcaagaaaaagtggaaagtaaag

SEQ ID NO: 126686 - DNA, 378 bp, Homo sapiens
ttaaacttcaaatggatccagcaagaatagaaaagatttaaagacaagccagaaaatagtcatttagtgtggtaatcaagcagaattattctaaaactgagcagtataaaaaacatttatgtcattcccagtttagtgactaaccaataattcacaaaaggaacctactaaaattggatattttccaaattttatggagttttttctgaacaatctgatagatggtggcttttattgttcatgctacattttggattcccaaggcagtgtgttagagattttatggaagggaagcagcaactaggggcatctgaattgctctgggaattacctaaatattttttacctgtcctcacctctttaatgagagtaatgata

SEQ ID NO: 126687 - DNA, 276 bp, Homo sapiens
aggttagggccaggtcgaggccccaaggaagaaagcacatctcacctgggggtcagccaactttctataaaaagccaaggagtaaatatttgaggtatgtgagccagacagtttctatcacaactccactgctgccactgtagtacaaacacagccattaacaatgggtgaatgaaaaagtacagcacgtgccagtgaaactttgtttatagaaaacaggtggtaggcggaatctgacccagcccatagtttgccaactcctgggtctaaccaaca

SEQ ID NO: 126688 - DNA, 216 bp, Homo sapiens
ggtgtttatcaatggcccaattcattctcaactatcccccttgtctgagccagcacagagatgggcattatgtcccagagctactaggaaaaaaacctccaagacatcgtcaccaattagagttcaaaggtacagaagccaaattgagacatatgagttgaaaaccagatgacatatttgaaattgaggatgtcccaggaaaatccagtgtgattc

SEQ ID NO: 126689 - DNA, 327 bp, Homo sapiens
agttctgttcctcgccctttcgctgctctgtatctttggggggttagcccgtgtaggctgtgtttatcaggcccatgtgtccattggtgttctgttggtttcagccaatgggaaggcagaaatgggagggggtctccacctcctctccctccccgcaattctagtttcccctgatgaccctgggttctggtttcaccatctcctcccttctggcctgcttgcctgagggtgctaatggcttcctgctgtagatgatctctagggtgcctcactgaccagtttgtcttctcagctcttccatcatctgtatgatcagttccctgaatt

SEQ ID NO: 126690 - DNA, 944 bp, Homo sapiens
gggcaaactgtattcattcaatccatgggcaaactgtattcactcataatttttgcagagaagccaccagcacaaaataaaatcaattacaacacaatttttttcaaaacgtgaacagatactattttataaaaaggttcataggatccccaaattagtattaactcggctcagatttatctaccctaagcacgtggggattcttcccagctcccacgctccttgccaccctaaatgctcaaggggagtcctattgtattagaaatgaacttgctaatcacgactttggacctgatccaagacatgcttttcaggcacagcactggtaaggagatgggtcccctccagaaaatgctgagaaatggtagcaaacaggattccctccttcggtctactcctcactgccttccctctgtgggagatgaagcattgctccccccatcccatgcacatttgattgctagcctgctggcacaaccctatgatccagtgtgtccagagagatccagatttctccctccgtacgttttctctctctggttggtcctgtctatagctacagatgagcaagaagcatccatggactgcccagggctttcgtttcccatacctctgctgtgtgagatctggagaacagaacacatccagtcagtagctcacaccccccatcacattctcaggcttcacatgtgaggaaaacagctggtcaaggaaggctgctgaattccatttataagccacttagcaagttatgaagctagaagggtcatttctgtagtcactgtgttattgttaccagcatatactgatcacctactggctctagaagtgagaatgatactttcagttcaaatcttagtgtcaggatttaatatcaaacaggaagaaactctacacctttgctgcttgtcttagccaagcaaatgagggtgtcagagaaactg

SEQ ID NO: 126691 - DNA, 378 bp, Homo sapiens
tactcagaggggccggccagtgtctgctcacctggacagatcatgcaacacaacagtttctcctggcaggaagagctggagtccaggacatttcaaaaggggctcttttctcctcctggctaattctgtttttctttttatttttttgagatggagtctcactctgttgcccaggctggagtgctgtggcccgatctcggctcactgcaacctccgcctcctatgttcaagtgattctcctgcctcagcctcctgagtaggtgggattacaggcacctgccaccacgcctggctaattttttgtattttcagtagagacggggttttgccatgttggtcaggctggtcttgaactcctgacctcaggtgatctgcccg

SEQ ID NO: 126692 - DNA, 392 bp, Homo sapiens
gttatcagagaatgtaaattaaaaccaaaatgaaagaccaccaccagaacagctgaaatgaaaaagactgttttccagcatatttacacagagtagaaaaataaagactctcaaaaatatagggcaaaagcaactttcataagctcctggtgagaatttaaatttctacaaccactctggaaaaccatcagcattatcttcttatgtgttaaaatggagcagtgattctactccaaagtacataccaacagaaatgcaggtacatgtacaccaaaaaaaagtacaataatgttgatggcaacataattcatagtagccaaaacctgtagacaacccaaatgtttaactacaatgtttacatttagaaagcatatttaagaggtaaaactatt

SEQ ID NO: 126693 - DNA, 311 bp, Homo sapiens
gacattcacttccaaccctgattccatcccgattccgacattcacttccaaccctgattccatcccgattccgacattcacttccaaccctgattccatcccgattccgacattcacttccaaccctgattccatcccgattctgacattcacttccaaccctgattccatcccgattccgactttcacttccaaccctgattccatcccgattccgacattcacttccaaccctcggcttgtcccaagagagggttggaagtgaatgtcggaatcggtatggaatcaggcttggacttccttgcctgtgt

SEQ ID NO: 126694 - DNA, 323 bp, Homo sapiens
gaagaataaatcataatccttctacccagagcagtcactgttaactttttagtttgtatctaaccttttatgtctgttatgtaccatttttaatggacatgaatttatgtcaacatttgtttataacatgattatcataagccagacactgagccatattgtgtttcgttagcatcatttttatacttacatattaatatatttttagtcaaatgatgtactagattctggagggagggtcacatgatatttatatggatttaatgtatttattacactttagtgtgttttctcttcctggttttcaaatgttttaaggtatt

SEQ ID NO: 126695 - DNA, 505 bp, Homo sapiens
gggaagaggtagacactcctaagtgctaagacaggagtaaacattctctaaaaactactgatatatcaatgaaccagcagtatcaaccactgagatattgaaaatacatttcctcccacagcatgtgaaagatcacatcggggattctttaggaaagagtacaattgagtacagaaggaaaaagaaggccgaggaaggctgaggaaggtgatgaaaaggataaaaggatatcgcttaactgattgattcaagatggcttatgaagacccagagtttcacaggcttggggcctgaaaacaggagggcagagcttattttggcatggcagacatgtgccatgtaaaaataaaaggaagagataactaaaaggaagagataacttttaatgttcacagatgatttcattttctcccttaaactatacatttgagtcacttttcaaaaatagcacttatattcaatgatacaaacattccaccattctctttttaagttgccttctgaa

SEQ ID NO: 126696 - DNA, 229 bp, Homo sapiens
tgtagtcgatctagaggtccctgcggtctcttcctggacacgtaaatccagtgggctggggtggcctactgagaagatgccatctgaacaaagaattgaaggaggcaaggagtgtgagcagtggggctatctgggagagagttccaggcagaggaggcagcaagtgtgaggctctagagggaagagagacgttctcatgtttcaatctgtgtttctggaggagagagag

SEQ ID NO: 126697 - DNA, 566 bp, Homo sapiens
cacgtggcagtgttggtttggtgcagaggagtggttatcgcctgtcggcagatcgtgcactcccagcaggatttgtgcccctgtgctacctatccgactcctctggacaattgcatttgcaacccttgtctataccatcgatctgccatgacttagcaaatatgtcttgtcttgttattgactgttctgtgtttacatgtgtgtcttatattcccttcacaattcaattgccctcttcctgagggtagggagtctctgttaactttacatgcctcctgcagtacctgacacatagtaggtctgttgtttgagaggccagtgcctgaggtggaatttgccttatgacttgcttctaggtcagtggttctcacttgcaccctctgtcaacattataccaggcttgggggtggggtacactctgtccagtgtttactagaaagttccagcagaggtttgaagcatgcccgccccttagcattacagggttgggcttgtggtgaaggcaatggcgggtgtcatttgcagaacccccctgggtgattccagggcatcccctagtggaaggc

SEQ ID NO: 126698 - DNA, 184 bp, Homo sapiens
taacccttagggcttctgcatacgcactaccttcagcctaaaatattcttatcattactccctcctcaattcttaggctttaacatcttctcatccttccatctttgtctcaaatatcatgtccttcactaggggtagcagtttatacctgtaattccagtgctttgggagatggtaagatcgc

SEQ ID NO: 126699 - DNA, 373 bp, Homo sapiens
tcttcgagtgccaaaagggaagtgctataaaacaaagacaaataaaaaatacctacactgatgacggtatatcaaagggacacaagagccaactgagcaggacatggtggttcatgcctgtaatcccagcgctttgggaggctaaggcgggtggatcacttgaggtcaggagttcgagaccagcctggccaatatggtgaaacccccatctctactaaaaatacaaaaattagctgggcgtggcggcacacacctgtaatcctagctactcaggaggctgaggcaagagaattgcttgaacccaggaggcagaggttgcagtgagccaagattgcgctgctgcacatgaacctgggcaacagagtgagacgcc

SEQ ID NO: 126700 - DNA, 246 bp, Homo sapiens
tgctgagatcatggacctgagccaccgcaccaggcctatacaactgttttgattttaaaaaaagatacaaagttttcagtgaacccaaagagaagagtaggtttacatgaaagcagggagatgagtgagctgcagaggtagcaggctgtggtcctggaatgggaccctggagtgtattatctgtctatggaatcacaaggtcttagatctgaagaggagtagctggaatctggtcccaccctgcca

SEQ ID NO: 126701 - DNA, 706 bp, Homo sapiens
aatgacaagatctcattcttttttatggctgaatagtaatccattgcagataagtgccacattttctttatccattcatctgtgaatggacacttaggttgcttccaaattttggctgttgtgaatagtgctgcaacaaacatgggagtgcaaatatattttctatatactgatttcctttcttttgagtatatacccagtagattgttaggtcatatggtaactctatttttacttttatgagaaacctccaaactcttctccatagtggttgtactaatttacattctcatcaacaacatatgagggtttccttttctctacctcctctccagcatttgttactgccctggtgttattttgcttcttaagtattagaactatacttagtgttatatgttctgtgattagaagtaaaactgcctttgctatatagtatgcatagaatattttaaagttattactagaagctgacacattgttgttttctattacaaacaataaaattagtttccatttattgagggcctgtttcatgttaactgctttacagatattccttatctcatttaattctcccaacaatcctacaagaaagctaatatcccattttatagatgaggaaattgaggcttacagagggcaagtaacttgcccaaagtcactcagtaccagcaaatggactttttcccctctccctgccccc

SEQ ID NO: 126702 - DNA, 311 bp, Homo sapiens
cctcatcttggtccctctcagcactttatctgtccactcgtctgacaatcatcctttcctaacaaagacaacattatgtacatcacagctcttttcctccaacaggaatctgattcattattgcatctacacagtgttttgaacatagtaagcattcaacaaattactgatctgttaagggatgaaaggatgagactttgtaccacagtcaggcagagtcagagaaaatgagagaagctgagtccttttgcaaagctcccaaatgcagccagggtggctaagacactgggaaaggaatattgcaacagcaa

SEQ ID NO: 126703 - DNA, 388 bp, Homo sapiens
tggcctgacattcaagacttaccatgatactcatttaacaaacatgtataaaaacctaagaaatcaaagatacaatgctggacccaggggaaaataaaaagatagactgcgtctcaaaacaatgtcccagctttacttcccattattcccaatacacattctcccaacaatttaagtagtttacatttccaaaatatctcctgtccaaaagtcacagactagtgggcctaagccaagaatttggctggaaaagtgttttgtttggcatagtgtttgaaaaaatatttgaatttgaatatgttttgagggaagggggaatatactctctaattatcctggtccatgtcacttcatctacaatgtctgcctagcccctaaagaaatctga

SEQ ID NO: 126704 - DNA, 426 bp, Homo sapiens
actgctgttctcctcctcgattacagttttgatgccatgtttcaaattttattgcatatgtagtccatgtttattttagaataatttgtaaaattcaggtatatagaaagaaaaaccaataaaaaaagttcccatagttctgtaatccagagacaactgtgtttctctgcaaaaacatataaatgcatgtgtacatacacagtatatataaaaaatggtattatataaaaacctggcctaaaggcagatttttaaaggtggaacataatgcaagtctgcctttcttaggatgatctaagttacatgttaataaagttcttggagatctagcatagaatgcattcagcactttgggaggccaaggcaggtggatcaattgaggccaagagttcaagaccagcctggccaacatggcgaaatcctctc

SEQ ID NO: 126705 - DNA, 511 bp, Homo sapiens
tcatctctttttttgcattgttttttatagtttgccaaaacagtcacagctgccatccatttgaccctttcagcagccccattcactgggtggtgaacagaatatgggtattgggggtcagccagatctgggtttgattcctaaatttccgacctcctagctgagaggtcttgggtagggacctcgtctacctcatcaggctcagggcctgcaccagcaagatggggaaaatcacatctcttcaaaggttcacatgagagttaagtgcataaatgcttcacatttaacagatgcttaatacacgggagttaccttcactgtcaacttgcagacaagaaaactgaggctgagggagggcaggcacctggattgagttaaaacaactaggagatggcagagccaacttggaccaggtcttttgtatctttgggatcaatgtctaaacgtttctttcctccctccttccttccctcctttcctacacactctgtgctcggcatgggtccccagg

SEQ ID NO: 126706 - DNA, 162 bp, Homo sapiens
tttgaattcttggtgcaaatgtctcttgttacatactgctcgttttcaagtatcatcttgttatgctacctatttttttgattcattacttctgatttactttttcctggtaaaactaataatggatctcattaaatttatgtataacattgaagaaagtgg

SEQ ID NO: 126707 - DNA, 464 bp, Homo sapiens
ctcctgacctcaagtgatctgcccacctcagcctcccaaagtgctgggattacaggcatgagctgtgacacccagcgtgtctaatttttgacagataaaatgatttcatgatccaacatttccttagcagtgagggatacaataaaataccaattctcagtgggcctttatacttcttttttttttttttttgagaggagtcttgctctgtcgcccaggcaggagtgcaacagtgcaatcttggctcactgcagcctccgcctgccaggttccagcgattctcctgcctcagcctcctgggtatgggtaactgggattacaggcacgtgccaccatgttcgactaatttttgtatttttagtagagatgggatttcaccatgttggctagcctggtctcaaactcctaacctcaagtgatccgtctgcctcagtctcccaaagtgctaggatgtgggtgtgagc

SEQ ID NO: 126708 - DNA, 156 bp, Homo sapiens
actaaattcctacaacattaatactggttctctaagaagccgggactttttcagtaagtactcttcagagataaatagaagaaaattgaaagatgagggtgctgagatatgtgaaggtagggctgggcacagtagctcatgcctataatcccagca

SEQ ID NO: 126709 - DNA, 655 bp, Homo sapiens
ggcttttgagcaaaggagtggaaaggtacggaaagaactggagggggctaagaagacacaggctgaatccactcatactgagaagatgctagagggcctcacaggacccttccatcctcacctttcccaccccacctcacaccccgagcagctctgcatcaatctttttaaaaaactgttgaataaagcaaaaagaaaaggaaaaaaggaaagccattagtctttatgctccttccaggattaaaattcaatttcttcaattagggtaggaatccttgtctatttctcactttgcatatatacctccccaagtataaacttcccatcttcattctgaaaagtaaatgtgcctcaaaccaattagtgaagtagaacaaaaccttcaaattctattttccacagagcatataatcctatatctacttaaatatacaaagcactactttcagtcatcattcttgctcaatcaataccatttatctattaataggatggctctcttatttgctctagcataaaactgaccccatagtagttatagaagttgaagagatacaacttaaaaagaatctacccttttaaatttaaccaatcccagttgtcctttataacaactgatacatggatattcaactagtgtatggcaaggcagtca

SEQ ID NO: 126710 - DNA, 300 bp, Homo sapiens
attaattactgtctagaagctgatgtgctccctgcttgttatctccaacccctagctctctcaggcacgtgtgtgtgtgtgtgtgtgtgtgtgagcgtatgtgtgtgtatgcctgctggacatccctgtttggatacctcatggacacttcaagcttgctacatccaaaattaagctcctggttccctgacgcaagcccctcccccaccacagcaaacctatttctgctaagtcttctctatctccataaatggcctactctgcttttccagttccatcaaccaaaaaccttagattcat

SEQ ID NO: 126711 - DNA, 330 bp, Homo sapiens
gtgtcagagctatttttgttttttaaaaaatattcttacaaacacccctcttcttgagcttaaccaccacatatcccttccataggaacaagatatggtatgtgtaactaagtcatctctagtgagtcactggatacaatttatatatcgaagtatccttagcatgtgtttgcttctgctttagttgaaatgttaagccttctataggtgttattcatatttatactcccacagcccagaagagtggctgatacataataggttaataataagggcttgatgggccaggcacagtgactcacatgcctgtagtcccagcttcttgggagg

SEQ ID NO: 126712 - DNA, 723 bp, Homo sapiens
gggggtaagaagctcatgccgcatcaagatatcttaactgtcagaggctatcagtggaggggagagtgacagctccagcctttctcactacttgctgatgtggaaaattatcatccagtaatggagggagattagccacgtattgtatttccatcgtcgggtgcatggcatgggaggatgatttatagaactggaaccctgaagctagtggaaaggtcacagaaagtggaatcattggcctcaacacagtggctagtgtctgagggaacctcctagagccacatgcatgccaggccatcctgagtgcttgagagagacatgggcacattaacacacatttaagtcccaacagggcacccagaatactaagataaatagacaccgtctctgtcctaaggggaattacagcctagttcaggagacagatgcaccaacagacaggtgacagtgatgaattgcagtcatgaaccaggggctggagaaacacagaagacagagagcagagtttggaagagggtgggagggactgcctgccccaagaaggattcatgaaggtgccatgtcagtcagggttggtggaccattgtaataagcagcccccaaatgaaatctcagttgcttagtacagtaaaggttacttttcaccccacggtggagtgtgagctggggatgggagggaggagagttccaccacaccggtcttcaggccccaaggctgcaccc

SEQ ID NO: 126713 - DNA, 423 bp, Homo sapiens
  misc_feature (7)..(7): n is a, c, g, or t
  misc_feature (171)..(171): n is a, c, g, or t
  misc_feature (213)..(213): n is a, c, g, or t
gagtatnccttagtcctcctcctccttggatggggaaggaagcggggggactgctccaggagagtgaggacggcgtggggatgatgggtgctggcaagggaatctgaaccgggtgtgctgggctcactgctgctcagctcactgctgacgctgagccagaggggcccaggnagctactggccccagccaccccagtactggctgggcgcgtgngcagttttgcttaaacaaataaacaaaacaaatacatacgtacacacatacacaggaacaaagtctgggaggacaatactaaaatattaatgagttaccagcctggccaacagggtgaagggtgaaaccccatctctactaaaaatacaaaaatcagccaggcatggtggtgggcacctgtaatcccagctactcgggaggctgaggcat

SEQ ID NO: 126714 - DNA, 546 bp, Homo sapiens
aaggatccccttcgacggtgttctggtgtgtgtcacctacaatgctgcaagttcctttaaagtctattcttattttttttctgagacagggctctcattcttggcactcaggctagagtgcagcggcgcaaacacagctcactgcagcctcaatctcccaggctcaggtgatccacccgcctcggcctcccaaagtgctggaattacaggcgtgagccaccgtgtccaggcaaaataataatacttttaagatctaagaatttattgctgaaaagatcattatatggtgagactacctagttagtaaagagaaggaacttcatgagggatggcaggggttgggctgtcacacggagatgaccagccagattagatggaaggtatcttagtggaaagatgtaagggtaagaaaaacgggcaatttaggcagggtatgttgataataggatcatgtgtttgtttagatggggaactgagttcctggacaggggaataatatgatgaaagcagtgtaatcacactaatatagggtggatttcagtgtgg

SEQ ID NO: 126715 - DNA, 756 bp, Homo sapiens
gaggcagggcacagtgtggctcacacctgtaatcccagcactttgggaggccgaggcaggaagatcacttgagtccaggagttggaggccagcctgggcaacataacaagacctatctctacagaaaatttttttaaattagctgggcatggtggcacatgtctgtagtctcagatactccagaggctgaggcaggaggatcgcttgaacctggaaggtcaagactgcaatgagccatgatcctatcactgcactgcaacctgggtgacacagtattatttattttgagatcctatctcaaaattaataacctaaataaataggtgggagagtggacactcttacatcaggtcagaggcttaatatccataatacagaaagattttcaaaactgacaaaggacaccccaacaaaaaaatgggcaaaagacaggcaattcttagaaaaacaaaatcaaatggcaaacaaaggcaagtcttaaaagaacaagttcaaatggcaaacaacattaaaattcacaactgggatcaagttccaatgagatatccctttacatccaacagactggcaaaaattaaagatcataaagccaacttctggcccagataaaaagaaaaagctgccatttattattgatggagaacacaggaagcatcagaagcctttttggaaagcaatctttcaacatttattacagttttttgtttttttaaaggttccctttcaccaagctatcccattctttgatatctatcc

SEQ ID NO: 126716 - DNA, 445 bp, Homo sapiens
ggagcacatgtggtaatttaatacattcacacaatttgtaaagatcaaatcaatgtacttgggatatgtatcaccttaaatatttgtcttttctttatgctagaaccaaattgttctcttctagctattttgaaatatacagtagattactgtaaactgtagtcaccctactgatctagctaacatgaggtctttaaaatgaacataataattgtaaggataaaatgagagcccagcacacggtatatgacagtccagtggatgtctcagaaaaacctcatgaaattcgggttaaaaaaaaaaaaaaagtcaaggattgaagttctgaccaagtctgctctacactgtgctaggagctgtttttgggcctcacaaagtgaagtattcttgataggttgtgtgcacatcccagttttcagaaagcaaatcctacctcactccactc

SEQ ID NO: 126717 - DNA, 468 bp, Homo sapiens
tctctttgagaaatggtcctgaaagccacccctgtgatctttacgaagaaaacttttccccataaattatgaatacatttttcctcacaagtcaaaaacatcctctttgatccaccatctgtctttactgaacaatattagaaatactgtaataaggccaggcacagtggctcaagcctgtaatctcagcactttgggaggctgaggcaggtggatcacctgaggtcaggagttcaaggccaacctgaccaacatggtgaaacctcatctctactaaaaatacaaaaattagccaggcatggtggcaggcacctgcagtcccagctatttgggaggctgaggcaggagaatcacttgaacccgggaggtgaaggttgcagtgaactgagatcgcacccttgtactcctgcctgagcaacaagagcaaaactctgtctcaaaaaaaaaaaaaatactataataaagaca

SEQ ID NO: 126718 - DNA, 140 bp, Homo sapiens
tggggagccaattaagaatgtgagccctgaagtcacaaagcctgcatttgaatcatagtttacccgtgtaacacctctgtttcctcatctgaacagtgaaggttcttggcctcagttgaagatgtgagcatttagtcagt

SEQ ID NO: 126719 - DNA, 758 bp, Homo sapiens
gaagattttaaaaatgtgtttgtttcttttaccctggagattctgagcaatcagtcttgggtttttcttctctaaactgtttatgcttatgaaggaaataatttaatcaacttgtgaaagtggatttttttccaaacattttcagctttgatggctaattcacatataagagcattgaagattgttttcggggctttgttctatgcagcctgtctatgctatttgttgtgttaggatacttttgttaagcagtgtgggctaacttaaaattaatttaaaatcaataactgttacctttgaaaaatctgcagttaattatgtggtttttggctacatttagaatttggtgtgattgaagcttgtcattttctctcataaatttagtgtccaaactctctgacccaaagcatagggccattctgagtcactgatggacatagtccaagataaatatagcagaaatgcattcctgggctctacatgtgtaaatgtgaggtataatgaaataatttctactggcttatcaatatatcttttagggtcattcctcactctcaatgcataacctacaacagtgttggaaatatgtttcatttcagtagttataggccttatataaatctctactggggaggattctgaggccatatccagccttagtaagacaaatgttttgattgattagcagtgtgttccacggatacagcaagagtcaggagtggtcctaccctggccatcatctctgtttgggctggaca

SEQ ID NO: 126720 - DNA, 316 bp, Homo sapiens
acaggaaatgcattgcatgtttccagttgcagcccttgccctctcttcactaaactgaaaatctggccatgccagcatgtggtggttcctaagacccaggcctctcctcctctctgctcctttgctagaagccctcttcttccccacttccaccacagcctcttctacaccacataaatatctgtatgggctcaaggcccaacccaaatgttaccttttctcttgaagctgtctccaacccttctaaaggaacatttgtgatctttcacattgcattgcacttttcctgtatttctattccacaagttgcagtgtg

SEQ ID NO: 126721 - DNA, 201 bp, Homo sapiens
ctctgagaaattaagtgacttatttaatgtcacagggctagggccagggcagtgataagaggaataactaagtcttttagaagaagaagaggtggacacaagagagaagctccccgctggaagctagaactccagaactgagagattccagagtgggaattactggcagcactaatgtgtctttaggaattgaaaaagcaa

SEQ ID NO: 126722 - DNA, 488 bp, Homo sapiens
aaggcagcgcacgtcgggggtgcttctgccaccctgccctgtggagtcggctcacagtaaatgctctaggcatgtttgtctttcctttgtgtcagtgagctgcataaccttgggcatttgtcagggaacctaatgcaggccctgcggtgtgagcttgggatcccctcagccctcaggcaagcaggcgtggctccagggaagtgacccaggcatggcatatatgtgccgacgaaatgcagactggagagcaggggccgccgcccatctgccaggttttccagagcaaacctgaatcaatcacaggccttttaatctcgccacccagagcgtgggggacacccctcagaagtacagggtttgggacctctgacagagggcagctgtctaaatatgcgaggaagcgtgcatggcgtgcgtctgggctgccttgccaaggtcaagttgtaaatctctttcccaagatctggccacacggtgcgttggcccat

SEQ ID NO: 126723 - DNA, 371 bp, Homo sapiens
aacaagacaacaactgaggggttcccgggtactgctagcggtcaccacttagacatcgggcaagcaggcgtggctccagggaagtgacccaggcatggcatatatgtgccgacgaaatgcagactggagagcaggggccgccgcccatctgccaggttttccagagcaaacctgaatcaatcacaggccttttaatctcgccacccagagcgtgggggacacccctcagaagtacagggtttgggacctctgacagagggcagctgtctaaatatgcgaggaagcgtgcatggcgtgcgtctgggctgccttgccaaggtcaagttgtaaatctctttcccaagatctggccacacggtgcgttggcccat

SEQ ID NO: 126724 - DNA, 630 bp, Homo sapiens
agcggggaacaatcactcgagcgggacgcagtggctattttggtattttagtagagatggggtttcaccatgttgtccaggctggtctcgaactcctgacctcgtgatccacccacctcggcctcccaaagcgctgggattacaggcttgagccaccacgcccagcctacaattagaatcttatgctttcttttacaacctcaaatggacagtgctcataaaattaaaaaatcatgctttcataaacattaaaacctgtcataaaattagtggcaattaataggctttcttagtctctctatataaataaccagtgaaccatttattttctccctgttgtgcaaagccaagtggtcaatgcagttgatttcagattgagcattttttaacaaaattattgaagcatacacagacttaatacttttggagaattatggagtatgaaaggaaaattttgaactctgcagtttttactgctagagagttctaagacattcaaagttatttttctttttaaccgatgaaagaatgtttatgtgcagaaaaagatgagatatttttgttgaagcaagtgattgtgcttcagactggaatccttttgaattcatgttgttttccctgtaaagagaa

SEQ ID NO: 126725 - DNA, 226 bp, Homo sapiens
taaaccaggggaggggaagagaaggaggagagagggagggtgaatgagtaggtgggggagaagaaatgaggaagggtgggaggcgaatgctacagccgtgaaagttaggggagactccatgtgctgggcatacaggaagtgcccagcccagctcaatactcaacacgcatcgtcccgcagtatcacccactgcagctccccgcggcagatgctgccatgagcttca

SEQ ID NO: 126726 - DNA, 356 bp, Homo sapiens
taaataaacaggtttgctgaaaatggtctccttgttttccccaataacctccacaatgtgttagaaattacctcacttcagcttctcagtacttactattttccacattttacagttgggaaatgactttcctgagatcacatcctaatcaactacagaatgaacactagactctggttcttttgattccaaatctttttatttacatatatttcatcaagaggtggcagaaggtaaaggagtatagaaaacgaagtgtgtgatatgcccggtgtggttgtaattccaacactttgggaggccaaggagggcatattgcttgagcccaggagttcaagctagcgagaccccatctc

SEQ ID NO: 126727 - DNA, 458 bp, Homo sapiens
ccctccactcacccaaggaggcatcttagagacccagatgcctgggggtctcctacctccccctccacctacccaaggaggcatcttagagacccagatgcctgggggtctcctacctccccctccacctacccactttctagggctctcttaagggggaaatctaaatctatctcgggataggaatcccactctcccgcaggcttaaggaggactcctgcctcattcaccccttttctccatctcactctgatttaaagcagcgcaggtcatatccaggcttagctggccaacagggagggaacgttcccatctcaggcctggtgagtgtctcctgtcctcccctcactcctacctccactgtttaaaaaatgattctatgatactcgttaaagcacgagcaggaacattttattcaggatcatcacaagagatatctaggcaagactgcaatggga

SEQ ID NO: 126728 - DNA, 810 bp, Homo sapiens
gggaacacaagccagcccataatagtggttatttgtatacattacatgtcttctcctctttcctttcccccattagattgtgaggtatttgaaggcagagccttatacagatgggcttattaagtcttaatataatgcccatacataataaatagtctctgaatatctgaagttaattttgattaaatcaacacttcaaaaatttagtgtagttattagacttttatggaaatgatctatagccacacatactacttaaaaaattactttatgaatttggcaaaatgctgccaagtcatttataaaacaacacatggccagaatactaggcttctctgcttttttttccccttcagacttaagtgatactcattgttcttttgcatacacatcttctctcattcttataaactcaaggtcgaaaaaaaggtcagggtggaacttaacatgtccacctcctaaatccgcacaggaatcttcattctctgcattcaactggcaaatgttaaataaagcttggatgtaacaagccaattcattcagctctctggggtagtaacatcaaaggctacatcaggaagccatgctactcagaattggatgttccttgggaatacttatgaagtgaacattggctaggcgaggaatgcagtaactgccattttgaaaacatatgaggcttaaagcatttctgccatccaccgtggtgtagattcctggatgctctatcaaatacatgtctaaatgtcagagcagagtctttgctgcatgctaaaaagaatgccttgtttagctacagcctccttagca

SEQ ID NO: 126729 - DNA, 155 bp, Homo sapiens
attatagacacaaaattaaacatatcaaacccacacatcagaattattttttaaaagttaatgtaatcatctgtttggagcatcattatggcttattcaaaagagaacacttacacatatactttttccattaatttaaacacatatagctcact

SEQ ID NO: 126730 - DNA, 839 bp, Homo sapiens
gtggcagcctttgtgcaaggttgtggtttttgcagagtcttttgtgatagttcctgttatcaggcatacgtgcatgaaagtccttccttcatggccttccttagctctgtttgtcagggttttgacacaagtgactccattttgattctgacaacttttgcagacgtatgatggtatctgattgtggtttgaatttgcatttctctaatgtaatgatgttgagaaagttttaaaggtttatttgccatctgtgtatcttatttggtgaaatgtgttttcaaatctgactatttttaatggttgtttgtatcttattttattgtttgtctcgtattactgggtttgagagttcattatatattttggataagagtcctttatcagacatataatttgtaaatattttctcccgatttctggcctttcattcttaacagtatctttcaaagagcagaaatttttgtcttcaatgaagtcaaattgtcaaattttccatttatggattgtgcgttgaatactatagctgtgaaaccttcacctagtataaggtcacaaagatattttcctagatttccttctagaagttttgtagttttaggttttacacttgagtctatgatcaattttgagttaattcttgaatatgacatgtggatcaaagcacttttttttgcatatggatatataattgtgtcagcgtcattcattaggaagaacattctttctcctctgaatttcttttgcacctttataaaaaatcaattgtccattcatatgtgggtctatttctagactatgctgttccattgatctatttgtctatgtttatactaataacc

SEQ ID NO: 126731 - DNA, 394 bp, Homo sapiens
ttaatgcaacagcttcccaactactctgtctgcttctactctggtcccctgcaatctcatctcaaaattgtattcatagtgctccttctaaagcaaaagcaaaatcataccactcatttaaaaccttccactgggttagcatttcagagtgaaagctaaagtccttacaattggctttagaaccccatacagtctcccacctattctcttacctgtctcattcctactggctttctcctcacttactgtgttgcttggccacactggcctttgtattattcctggaatatggcaggtatgctgctgcctgaaggcctttgcatgtgctaagtctggttcttcctctagatattctcaggtctcactctcttacctcctttaagtctttgctcag

SEQ ID NO: 126732 - DNA, 300 bp, Homo sapiens
aatgggcttttaaagatcatctttcagcagtgagaaggtagtgtgaacggaaaaaaaaaaacccaggaaattcaatatcagcatacatataacatttaagttaattcagcccagctggtcagcagaggttgctgttctcggtgtgttccaagaccacagatggcaagccagtcttgatggctttttaaaaaaaatatttgagacagggtcttgttctgtgactcaggctggagtgtggtggcgtgatcatggctcactgcagtctcaacctcccgggctcaagcaatcctcttacctcag

SEQ ID NO: 126733 - DNA, 650 bp, Homo sapiens
gaaccctggaggcggaggttgtggtgagatgagatcgtgccattgcactccagcctgggcaacaagagcgaaactccatctaaaaaaacaaaacaaaacaaaacaaaaaatacttttagaagaaaacttagaaagatatctttatgacttagagtaggtaaagatttcttaggatacaacaaatataataattaaaaattgataaattacactttctcaaaactaaaaacttctgctcatcaggctaaacatttaaagaaatgaacatacacgttacaaactgggagacaatatttgcaaaacatgtatctgaccaaagacttgtatcctgagtatataatatatatgtgcatgtgtttacacacacacacacacacacacacacacctgcctacaagtcaacaatgaaaagagaagctaattaaaaaaaatgggcaaaaggtggaaggtaaccaccttttgtcatcttttcagctgaaaattacaaaacactgaggaaagaaatcaaagatctaaataaatggaacaatatatcatgttcatgggttgaaagattcgtacggtaaagatgccagatttcccaaatcgattaataggtataatgcaatttctataaaaatctcagcaagtttttttgtagaagtagaaaa

SEQ ID NO: 126734 - DNA, 519 bp, Homo sapiens
taggcagctcttgtgcgggagacctgggcaccagccaagaagagacacaggagatgggagcgggaccctgccactgccaacatgatcctacagcaggaagggcctgctcaacaccatgcagcaggggccctgggctcggccaggggtcccccagccctccactgttctcctgtttcctgtgccccacagtggtggggtggagggagctggtggattgcttggccattgagcctccccttcgtgctgccctccaggagcttcacatccacctgtctggcaccaccccacattgggccattactaactcactctgtgacctgaggcaagtcacctctctctgggcctgggttccccaaaagtcaaagaaggcactaaaccagaggttgtccttacacctctgcatcctagagttctctgagagaatgagtggtaaatccccacctcttgggagtttcccagtgggtggggatcagggcagggggtgcagggacttcccatgacaaggggcacattcaggga

SEQ ID NO: 126735 - DNA, 186 bp, Homo sapiens
atttaaaagaagcttctcttgacttctcttaaaactaaggctcttgaaagtataaacattaaggttaaataacgctggcaagaatacaaggaaatgacattggtgtattgctaatggtactaggaaagtattctgcaagtatctactaaattaaaaatacagtagtgcccccttatccatgatgag

SEQ ID NO: 126736 - DNA, 141 bp, Homo sapiens
atggtcctcagctcatgtgtgaaatgtgcctccctcaaaccatgttaggacgttggcatattgcccatctgaaatgaaaaaaagtttttgttatataaatatgttggctgggtgtggtggcacatgcttgtaatcccagca

SEQ ID NO: 126737 - DNA, 518 bp, Homo sapiens
ccaccatgcctggctaattttttgtttcgtatttttagtacagacggggtttcaccgtgttagccaggatggtctcgatctcctgacctcgtggtccgcccgcctaggcctcccaaagtactgggattacaggcgtgagccaccgcgcccggctggaacattgtatcttttacctgctaacgtgcccgtatttttctgtgagtcactgatatgactgacagtgagtttggagtttcctgtctgcgtgccaagtgtctttcagtgagccagggacaaagatatgccacaccatagcagcctttattccaagcacacctcacaccaagctagggggcacttttatatttctgtttattttctgtttattttgtggaagtctcctatggccacatggctcgaaatgttacagtgtgtgacagtggtgggaaatgtgtaggttatcctcattcatacctggggttattgtgaattcttccttcactcactgcccctccctcctccccctgctccctcctatc

SEQ ID NO: 126738 - DNA, 611 bp, Homo sapiens
tggggagaaatcatggcctcacatgccagtagctgggtgcctttgggactttgtgggcgctgtctgtctgcctgctcacctcttaaagccccccaggtcctgctaattcgctgctgacgaaatcgaaagagcacagcatcgagaaagtgcaaagccaactcagaatggagaaaagttcaggaaatcatataactgataaggggacctgtttctaaatatctgaagaactcttacacctcggtattaaaaagacaaacaacctacataaagtgggcaaaagactggaaaagacacttctccaaaaaagatatacaaatgcacatgaaaagatgttcagcatcattagccctcagggaaatgcaaatgaaaaccacaatgagataccacttcacacccactaggatggctacaatgatatatttttttaaaagacagggaggatgtggagaaatcagaaccctcctacactgctgctgggattgtaaaatggtgcaggcaccgtggagaacagcctgggaattcttcaaaacgttaaacagtttctatatgacccagcaactccactcctagctatatatccaagagaaggaagaatgtatatccacacaaaa

SEQ ID NO: 126739 - DNA, 357 bp, Homo sapiens
cttaaagaatcagattgctccactgaacaatcttaacaccattaaaacagagaacaatagatactggatgcaatatgatgccacaggaagtaccaagcgctgtttatgaagtgtttttgccaaaaaaaaaacccaaacaaaaaaaaaggattctgaatctaatcaacgccatggacctaattagcagtttatagaaaattggaagacatctgaacaagttaatgacatcatgaggataagatataaccagaaaaacccagaatttaggaaattcaacaaaacaaatgcctcagtttcttcaacaaaaaaataacatttcaaaaacaggtcaaggaaaattgttacaaatttaaaaag

SEQ ID NO: 126740 - DNA, 1259 bp, Homo sapiens
cctcagcctgatgctgtctgagtatctgacctaaaggcttccaagacaaagatggtcccacagggctctcagcagcctggaagaatatcgttgttcagaccagattgaagattgtgttctgcccagagggagtttgttgggccctcatctctaccagatccaaggactgtttctcacagagactcagtaggatgtggaagaagaaggccgtggctccgttggctcagggaacatctgccttttcccctcctgccacctcccctggcagtggagggtgacctgtctctctccttggcacctcatcagagattcttctctcttggacaacaccctccatcctcggaacccttttctttccttatctcgggaaaccttccatattgtacctacttctcattctcttattactgccttcctccgccatcaaacagcatttacccctcctgttggccattctgtcagaacccctctttgaacctctgtagctggttcactccttccttcctgcttgtcccagggagaggatcgtggctaagttctcctgggcacgtgttctgttctacccttgaagagcagtgccaggcctgggtacagcatgagtggcagcctccctgccagctgatagccctagctttccactgtcaccagcggagggtaagggaacagtccagcagcttcagaggcctgacgtggctcatgctgcccgtggctctgcagatgtgtgattctttctgtgtgtgagagagacaccaaagcccacagtcaaattctcagtcactttcgtaaattacaaggaagatgggctgtatagaatcattgaagattataaaaatgttggtttttacctttaaagtaacttctttgtttatcctttccatgttaattgctactccctgagtttattcatcttttgtttatctatcaagcatgtgttcagtagctgttaggtaccaggcactgggattcagtggtgagcaggacagctgcagcctttgcttccgtgcacagctcacggcattgctcgaatgatgccacaggcatctgcttctctctgccgcttccgtttctatcttccatggggcttccctcccaggagagcgtgcctcatatgtgcttggctttcgttctttgctctgcctgctttgcatggtccaggctctgtagcctggcatttaattattctgttccagcttcccttccttggtgctttttcccctcctgccacctcccctggcaatggagggcgacctgtctcctcg

SEQ ID NO: 126741 - DNA, 274 bp, Homo sapiens
catttcacctgtttagacacttactggcatgcctgccgctgctggccaacttcataaccttactcttgctcacccagagggtgttacagtgcgttcctcactgtctgcctccattttcttgggtcttccagaatcgctgccagcaccagccagaacatgcccctcttccttggttgttctcctatattgaccaagtcacacccagcctcttgatagtcagggccctttcgatcttgtcccagatgactttttcaccccatgtcctacccctctc

SEQ ID NO: 126742 - DNA, 428 bp, Homo sapiens
gtgatttggaaggagctggctttggttacatatgtaaactgtatacaaccatttcttgcactcttaaaatgtgataggctttagtctctcaggtaaactttttgaaaacttaaaacagctgcaaaaaaaagtaagcccaaaatgtttgtttcaagtcatgaatagataatagttattttgagggcactaaaatagattctgctttgaaagtaatattcttagggtgtgtgtgtgtgtgtgtgtgtgtgtgtgtgtgtgtgtgtgtgtgtgaccacaaaaaaaataaaaaattttcaacagagttttgaccacctttttacagaactaggctaaattataaatgcattcaagtgacatcccatcttaaaaattacaatttttttgattgaacacaaaaaagaaacaatttctttttaataaagagttaa

SEQ ID NO: 126743 - DNA, 533 bp, Homo sapiens
aataacctccaaacaagggtcctcatttttagaaactttcgtactgggatgccttatctagctgctcctacagaacaagtcatttccctggatttgaagacaatgacacaagactaaggataatggggaaaaaatgcaatcaataagtagaagtcagaagtgtggcatagcacaaaagggatccttaattagaaattcaatggtctcagttccagacccaggtatcactgacttgttataagatcttaggaaacttaccatttaggcaggtacaggggctcatgccagggctttgggaggccaaggcaggcagatcacctgagatcaggagttcaagatcagcctgaccaacatggtgaaaccctgtctctactaaaaatacaaaaattagctaggtgtggtggtgcacacctataattccagctactcaggaggctctggggcaggagaatcacttgaacctgggaggtggaagttgcagtgagccgaaatggcaccaccgtactccagtctgggtgacacagcaagactcc

SEQ ID NO: 126744 - DNA, 178 bp, Homo sapiens
cgtagaaaaaagggatttttctcataaagcaccgagcatgaagccaacgtggaaaccatgattttgtaccaaaaatctgacatcctttaaaagaattaattgcctctcgagtagctgagacaaagactgtgtccaacagtgccaagctagttccagtaatttttttaattaaaaaaaa

SEQ ID NO: 126745 - DNA, 556 bp, Homo sapiens
cgtagaaaaaagggatttttctcataaagcaccgagcatgaagccaacgtggaaaccatgattttgtaccaaaaatctgacatcctttaaaagaattaattgcctctggaaatgagtgttttcatttttgcaagaacctatccccaggcagatggcctcctcaggtggaggtgaatttcaggcttcaggagggaacgtcgctgggcccagggagtgctgggtggagtcaggttaggaggccatgaacttggcatctcttccagtccagccacttgggaacctgtcagggccttgtactggccttacacagttttgtaccaggcctgggggccttcagacagacctgaattgcatggccaccatctgctacctacacatgtgaaatcagttctggtaattctgattttgccttttttttccttcggacatagggtcttgctatgttgccccggctgggctcgagcgaacctcctgcctcagcctctcgagtagctgagacaaagactgtgtccaacagtgccaagctagttccagtaatttttttaattaaaaaaaa

SEQ ID NO: 126746 - DNA, 474 bp, Homo sapiens
ggcgggcttggaggaggacagggacaccctcagatgtcagacgacaaggtggacagggtacaacgagaggtccatgcagaagcatggaagcttaaaaccaccagactggaagagggagctgcacccagaacacagaatgtgcagaagggaagaatggagagtgcgaaaccgtgccaggagatgcgggctctgctgtgtgaagccatcggattctggaacaaaatgacactttgatccaagatttagaaaaagcatcaccgtaacaatgtaaagactggcaagaaaaaaacctgacggcaggaagactaggagagaaacgattccttccccgcctggaaaagaggtagggacagacgaaaaagagggaaagggacaggccaagagatattctgggttcaagcagctggactgcgagctgccgccgtgttatgcccttcttttcgtagctctggatccctgaccacctggtgcagt

SEQ ID NO: 126747 - DNA, 513 bp, Homo sapiens
tggctctttggagcctcagttttccttcatgatggtggtggaaaagcactcaggacaaagtacttgatgttctcaagggtgagtgagttgtggagtatgaaccatgtggaccatgtgagatatgtggatggaaagagacccctgggcaagatgagacatacctgaattgaacagaaatggcaacaataatgatgttgaagaaagtaaacctaaattcatgcacagttcaggggttgagtaggggaattctcagtccatcccagagtctttttttctccctcaagtttaactttattctgactcttgcagactcttgtaagttctgggcttccttcctctgagatctgaagtggtctctgagctgctggctcctggaagctttacttttccctctaattacttctctctgaaatgtgtggttcttctgggttgtattcatccactggctatcaagactgaccctatccttctgtgaggctgagctacttcacctgttttagcctggcaccctaa

SEQ ID NO: 126748 - DNA, 479 bp, Homo sapiens
caactcttgtcctgctgaagtcaccaccagaccttccactccaccaccagtatctggtacattctcataacacagggtttcttgacttcagcactactggcatctggggccaggtaactcttggtgtggggccatcctatgcatggcaggatgttcagcagaatccctggcctctacccataagatgccaggagcacagcccctcaaccccaacctggctatgaccatcacaaaatgtctccagacattgccaaatgtcccttgagggtgaatttgatctacctccccctctgaaaaccactgtcataaacacctgatatcagattatgagatcagagaagaaataagcagagatcaaggaagatggcatcactagtaacctctctgacctgaagttcttaactacaaaattgcagatacctgagcctcaagatgttgtcatgatgatacctttaaagcaatgagctggaccccaaaaa

SEQ ID NO: 126749 - DNA, 480 bp, Homo sapiens
ctctgtccttgtgccaacatgttagttgcagtctatctgtgagcttcacagtcccattgactcttgtacagaaatcagcaagcagtggtcttcagtcaaactgggacctcaacaatcgactttggtcctgtcagggttcctttcccttactcttcttaagagcacccagagtcaccatgaaagaaccacaagtggaaaaggaatacgtgggctcagacgtgtgtccatccttgcatgacccttggctcctcatctgttcatgggtttaaaggtcatccttcctgccctgcctaccttattgagtattcacaacagaaaatgaatgtaggagattgaaaattgtataatgcactctaagttattattacctctcccaaattgtcagcatttcatccttgctatctagcagcagaatagtgtagggtaggagtttacaaactacagcccacaggccaaagccagcccaaggccagattttct

SEQ ID NO: 126750 - DNA, 741 bp, Homo sapiens
gcttcaaggcaaagaggaatgctgggactgggaagaggcaggacatggcatccctcagttcttggcattaccctcacaacctctgttaatcaggatgggtgaagttatgtagcagtaacaaataatgtcaaaatctcaatggctaaaacacagaattttctttcttacactgtacgtgcacgatgggggaaaggggttctgcccatcatagtcactcttggactataggtgttggagcagccaccaaccaggacattgccagccgctgtaccagagagaaaagcgagtcctcaagtggctagcattaacaaataaattcttagccagagagagacacacattacttcagctcacaactcactggcttgagctaaccagaagtcccagccacctacaaggaggccaggatgtgcagtcctaccttaggcccagtagacagagagccgcaggcattcagtgagtagcccacaaggaggctttcatctgctggggtcatgatggattcgtatcctccccctctagttgggaaactaaagcaccagttacagaaacctgaaatatatcgattttccattcatttaacaaatatttattaagcactgctgtgagtaaggccatgctggtggttgtagatacaatggtgaccagatacagtccttccttcaaagagctcccagtctaatggagaagagaacaaacctatacagtgtgacaagagcttcaacagggagaaacccagga

SEQ ID NO: 126751 - DNA, 389 bp, Homo sapiens
actgcttttatattataaattaattgttaaactagaataaatgccactgtgaccacatcaaactaaagagctaggtaaaaaggaaataggcacaagaacagctgctttacatcttcctattaaagttgacatctttacatgttccagggataactctgatctagaatcagatcttctttttataggaattccattgttcgtgaatcaactatgtagtagatgtcaccatgtacttggtattagcaataagccttagaaacctttgtactttctactctgttccctggctccaaaaataaagagtttgaaatgtagctgaacaccatggttcaggaatatatgtctaaaacaacattatcacttgaaatcatttaactagaagcattaaa

SEQ ID NO: 126752 - DNA, 273 bp, Homo sapiens
cttagctctctcttagacttggcactttagagtgacattgataaatgcttagcaaagtttctaaatctctgtgctttagtttactcacttgtcaaatggggcttttaacaggacttacctcctagggtggttcctcatgaatctcatgggaagattaagaatggtaatatacataaatcattacaacagtgcccgggcagagtaaatggtcatttttgtagtacaataattgtgtactgttttttttttttataaacctgttgacttctaaag

SEQ ID NO: 126753 - DNA, 791 bp, Homo sapiens
tgtagcctctgcctcctgggttcaagtgcttctcctgcctcagcctcccgagtagctgggactacaggtgcacgccaccacgcctgtagtcccagctgtattgtaaaaatacaaaattttagtatttttagtagagacagggtttcaccatgttggccaggatggtctcgatctcctgacctcgtgatctgcctgcctcggcctcccaaagtgccgggattacaggtgtgagccaccgcgccctgccaagaagagttcttttgcataccctttactcaggtcctctcatgttaacgttttacataactgtagaacatttatctaaagtaagatattagcccagaacaatactactaactgaagtataaaacttatttgaatttcaacagtttttttttcatttcttattttccttttgtgtgctctgtttataccatgatccatgatttttttaaaatcatgattgtcttttaaagatctgtgtgtctctgttttgagtttttcctgtttattttgaaaagtactgttggtcaagataattggtcaataatccatgttggttttaacaaaaagcattttaacattaaaaatattacagtataaaataacactctgtgctttaaattgaggttttatgtcattttagcagaattataatatttctgatatactcatgtttgacaagttgaaacagatttgtttcttaaaggaaggtttaatatacaaaaaaaggtaatcttaaacttacgaaaaagtaaattttacaatttgagcattactagatgtttagt

SEQ ID NO: 126754 - DNA, 602 bp, Homo sapiens
tgtagcctctgcctcctgggttcaagtgcttctcctgcctcagcctcccgagtagctgggactacaggtgcacgccaccacgcctgtagtcccagctgtattgtaaaaatacaaaattttagtatttttagtagagacagggtttcaccatgttggccaggatggtctcgatctcctgacctcgtgatctgcctgcctcggcctcccaaagtgccgggattacaggtgtgagccaccgcgccctgccaagaagagttcttttgcataccctttactcaggtcctctcatgttaacgttttacataactgtagaacatttatctaaagtaagatattagcccagaacaatactactaactgaagtataaaacttatttgaatttcaacagtttttttttcatttcttattttccttttgtgtgctctgtttataccatgatccatgatttttttaaaatcatgattgtcttttaaagatctgtgtgtctctgttttgagtttttcctgtttattttgaaaagtactgttggtcaagataattggtcaataatccatgttggttttaacaaaaagcattttaacattaaaaatattacagtata

SEQ ID NO: 126755 - DNA, 251 bp, Homo sapiens
tgcagcagggcctcatctgggctctgagagcgcaggaagccagagcctcctctaatgcggacagaactacagaacggctctggggaccgcagcagggactgggaaagagggtccaggcagaggagcctagaggagcctgcgcagccacagggcccaggcaaggctggagacactactagccagcactccactccccaccactccctacaacttgggggccccgttatcgcagccccaactgggactgggct

SEQ ID NO: 126756 - DNA, 326 bp, Homo sapiens
gttgctatgaactgagatcgtgccactgcactccagcctggatggcagggcgagattccatctcaaaaaaaataaaataaatgaaataaaatcaatccatggacataaaaattgtcagacccatggttaggttcatgaggcagcacaaccaggagcttatatttgccaacaacagccaggcccactggcaatctggtgtcatgaggggacttgttcagtgggactgttccaaggagctaagtaagtggttaacaaggtcttgctctgtcacccaggctgcagtgcaggggcacaaccataactgactgcatccttgaactcttggg

SEQ ID NO: 126757 - DNA, 266 bp, Homo sapiens
attttccatcaagtactgttactccaagccctgttaaaaattctcagccctgttaagaattcagctctgttaagttgcgtgagccaccgcgcctggccgattttaattatttttaatgtgcttgtttcctcctcatgtgaagtctctccctcctttctgttctgccccttcctttttccttacctgacctgggacagcttctgcagaaaggtatgatcactatagataatgctttggggaaaggctttctttttaagatgtcttag

SEQ ID NO: 126758 - DNA, 724 bp, Homo sapiens
gggttgctactggcatctcgtgggtagaagccagaaatgctgtgcgtcctaccatgcacaggacagccacgctccccaacaaacaactatcaggcccaaatgtcagtagtgccaagactgagaaaccccgacttagaaatagaaatcaatttaccgtgaattgtttttagtagaaaagatcccttagagtacaaaaaaatacaggttgatgcttgcagtaaatatcattgtagtgatctattggaaatggtatgagggtgtttccaaacaatgccaggcagtactttctaccaaagctgtgctgtgaggtatagcaaagtctattaaatggcaagtccagtgttagaagtttgttaattaattctcacccatgaaagcagctattaggatatcattgtttagatgtaaatgttcttcacccaaacgaacttcaccaaaatgttcttaagttgctatggcagtatatttgaggagttatgttttaatttgcttcaggggagaactggaagaccatggtatttcgtctgagatcatattctaaatcagggtttcccaacctcacactcttgacattttagactgaataattctttttggggggtggggagggtgtttcttttgtgcattctaggatacttaacagcatacctggtatctacccactagatgccagtggtacattccttctggactcccgattaattatcccaagtgggacaattta

SEQ ID NO: 126759 - DNA, 278 bp, Homo sapiens
gccaaatcacaacatgcagaccggtattaacccgggctaccttaacaaagcttcctccagcccagacagaagattatgtgtctcaaatagatgcgtcccccttctccccttctctgccggcacccccatccccaggggtgccccctctctcccctccttccacagaagcatctggagcctgcagggcgccctgctccgccctcatccctcccctgcaggccccgccccgcttccctacacagtcttcccacaggcagcctgggggccggggtgattct

SEQ ID NO: 126760 - DNA, 121 bp, Homo sapiens
agaggtgggctcaagtgatcctcccgcttcagcccctcagtggctggtactacagatgtgaaccaggtcatttaccagtgtcttttttttttttcttggcagcatccctccttagactcat

SEQ ID NO: 126761 - DNA, 709 bp, Homo sapiens
ttttggcagttataatcaaggaagagaaaatgaaagataatacatttagagtattaatgatgataaaagagacacaactctagattatatcaagcagatttttaaaattataaggcaaaactaggccgggcacagtggctcacacctgtaaccccagcactttgggaggccgaggtgggtggatcacttgaagtcaggagttcgagaccagcctgaccaacatagcaaaaccccatctctactaaaaatacaaaaattagcctgtcatggtggcgggcacctgtaatctaagctactggggagcctgaggcaggagaattgcttgaacccaggaggcagaggttgcggtgaaccaagatcacgccactgcactccagcctgggtgacagagtgagaacctgtctcaaaaataataaacataatatggtaaaactatacatgcacacatgcacaaacgtgtatattcattccagtacaagtaaaaatgtaggattgcatttttcccccaaaaggaatatgttttacaattaactcaccgtataacccaaatagattaacaaaaaatgtgtgtgtgtgtgtgtgtgtgtgaactccctgtttaaaaaatctgatacttataaaaactttaaggaatagataatcctaaagattttaccaattaattctgcaaggtaaaataatcctaataaaaattagatgaagatagttt

SEQ ID NO: 126762 - DNA, 650 bp, Homo sapiens
aaagctccacagaagtaagccattatgtgagttctaagccactttgaataaaccaacacaactcctttcaaaaaagcaccgggagaaggtcattcatgtgaataataaccattctttctctttaatcattaaaataaataaattcaaattacatctccagagagcacccatccccccatcaatttctgctcttgagtttaatagaaaaatggctcctgaaaaattctcctgtgaagtgaggctggtgtggaagacgccaacacagtgctctcattcagaacactctcgaatgcagactgaatcaggccctagacagagggctacgtgtgtgcctatgcgtgttggtcttggatgtgcgaactgtctaaccctgctctgagttttcctaggaaaaggaaaaatgtcctgaacctcgactcttccccaggctgaaaatctccaacattttccagcccggcttcaaacctgacagaaaaagacaaggggagacaggtattaagaaaacggagagctcgtttggatttttgcttcacttctgattctgtcccaaaaattacttttggaaaagaaaaggtaaaaagaggcaaaacaaaaacaaaagtaaaagagacatcgtgttctttccctgtgacccccccaaatccaaacct

SEQ ID NO: 126763 - DNA, 358 bp, Homo sapiens
agagagtaaggtgtggttgggacctacagcaaaacctggtgcaaaaagcaaatgacgctcaaacttcagtgtgcagcagtcatatcaggagcttgttaaaaattagacacctaacgctgagattctgagtcagctaaatctgggagatggcctagacatctgcatttgtaattagcacagcccaccccttacctctacgtaggcagtcttccaccttcagctttcagaaacacatagaacggtgacgatgcggttatctgtggaggagaaaaagctctcgctctctctcacacacacacacacacacacacacacaccaccatttcagcaggcacactaccccagcataacattcacc

SEQ ID NO: 126764 - DNA, 193 bp, Homo sapiens
ggtctgtgctgaggaggattagtaaaagaggaaggcacgcctctttgcagttgagacaagaggaaggcatctgtctcctgcccgtccctgggcaatggaatgtctcggtgttctgttaaaaaatgtgtctatctttggttgcacttaagatgttctatttatcactgattttgagcaattttattaggatgtg

SEQ ID NO: 126765 - DNA, 554 bp, Homo sapiens
gacatacaccagggccttttggggggttgggggtgaggggagtgaacttagaggataggtcaataggtgcagcaaaccaccttggcacacatattcctatgtaacaaacctgcactttctctacatgtatcacttttttttaagaagaaaaaaaaagtggggagggttacaagtcaagaatgtagctcctgaatggaagacagggcaaggatggtgtgatgtcacagtgaaggagcagcagggggacaacaatggaaaacaaaaatctggccaagatagtttgactggtgtatgccaaaggttttccccaccttttattgaaaaggaaattgtaaaagtgttgtttcttgaacagctaaataattatcataatcacataatgcatggcaatagttgctaagggtttggtcacttgcaactagtcctttcattacctttaaaaagtccgaggattaaagaacacttcctggctatgccatatggaggacttgatgaacctctctaatttgatgatcactcgaacccagattctggtgcttaccctgggaaaataa

SEQ ID NO: 126766 - DNA, 254 bp, Homo sapiens
gtcaaattaatgtagtatacaattttcttaataaacttttcctttcctaccctctttcgccccattttgaactttaaagaaaaatttgcctttttgctgcttcctaaacaatctatgactgctacaatagtcaatattttcccacttagtttgcttatggatgtgagggttaaatgttatgaacataatttagtgcttacaacatcagcaaatctggcttcttccttgagctgatacacagtgaggttaaggtc

SEQ ID NO: 126767 - DNA, 299 bp, Homo sapiens
agcagtaaggggtggctccagggctgtaccaacacagcagtaagggagggtccaaggctgaagggatcacttggtgactgggacgagtgacctaaacgtgtttagtcagacaggtgtgaagtggcctgttctgacctcagctagcagaacagctctgaccagcagcctctgttcccacatttgaaattcattcacagacggggacatagcacaggacacagaggagccccaggagccgagcttctgacacacccctttcatctccagagctagtgaggccatctgcacatgtgaactgg

SEQ ID NO: 126768 - DNA, 825 bp, Homo sapiens
cattttagcatggtttttttgttgttgctaaaaagccttaccagagagatttagcatgcttttagttctaaatttctaatatacaactgtttcagatcactgttagctaaatattaggtatactgtatcataatttcattatgttggagaaaacctcaattgctttaatatttggaatataggtatttcaaatgtttatttttgcttcacagtttgcagaactatggttagaattttaacattccatttggtgatcatggcctatctcccgtgtttcctatagctgtgattagaagttttattataattcttattgcttatatacaaataaatataaattaataatgtttacctttgcaggatgtaagttgtccaataaggcaagttcccacaggtaaaaagcaggtgcctttgaatcctgacctcaatcaaacaaaacccggaaatttcccgtcccttgcagtttccagtaatgaatttgaacctagtaacagccatatggtgaagtcttactcgttgctatttagagtgactcgtccaggaagaagagagtttaatggaatgattaatggagaaaccaatgaaaatattggtaatttttttttttactagattttatcactggagactaagatggtcattgaaaatgattgtaccagtgttccttcatgatagtcatggtgctgagtcttaaagcaaacagtgaattcacctccacctcaacattttgttgtgcaaattttcaaacataaaggacaatgagaagtattttatagtgaacacctatctacttacctcttagattcaacaatgaacattttatta

SEQ ID NO: 126769 - DNA, 422 bp, Homo sapiens
caaggggacctcatgaaaggtctctatgaggaggtgacacttcactcttagtaaaacttgaaatgtctcattttgcactctgaggctcccaacaggtccaaaggcaagggtggcataactttcatgaagaggggctctcttacctcagtcagcgctctgggacaaggacatgcctcgagtgactgcctcagtgagcaagtggccccatctgatgcaccctgttagtgacctggcagcagcagcaacaaagtcgaaagccagcagccccaggaagtacttggaccccctgctgggaggcctgtaggttggtgtggcctgcctgaagggcagcttggaaatacctgccaaaggcgtaaaatgcatatgccccctgacccagcaaatcccaccacgtggaatctactctataaaactccagcatg

SEQ ID NO: 126770 - DNA, 643 bp, Homo sapiens
catttagtataaaatataatttagaaggaacatttgttttacatatgtgttatagtatgttttgtaaatgctgtaccctttcctaaaaccccagactggcttcctggtgtttgcttcagtagttctatatgaatagcaaaatctaagggattaggtctggcaaccaaacacttctgcaaacaaaaggaaggtaaactgatcatttataatgataaattctcctttacctttgtgatttgagctattctgcagacaattcccaaaggatgtgatttacagttttcactctgagagatgttgcagtcttgctgactaacacccttttaattaaagatcactttccatttcttgcagctcttacatctaggctatttaaaatcattttatagtgtaaattcactttttgctactactaccattttattttcagaaaagttacacaatgtggtattacagaaacaaaataatctttgtagacagacataatttggttctttctctcccttcccccacctccccaaaaacaactcttttcttcaccttaatttttgtcattttcatgagaaattgatcttttgtatggactaaagataactaggtacctctgaagtaaatgaattatttctgtttaaaatatgctagc

SEQ ID NO: 126771 - DNA, 398 bp, Homo sapiens
ctcaaaataacagcctggctcctaacaggagggaagatgaagcagactgccgggagatctctgccagcaaactcttctcttcccactcatgttaggcccagtgttgtccctgaaacatctaacattactaatctctaatccagggctgtccctggaatgtgagccacatgtatcactacataggcaattttaaattatcttgtaggcacattaaaaatagataggtaaggctgggtgcagtggctcacacatgtaatcccagcactttcagaagctaaggtgggcagatcacttgaggtcaggagttcgagaccagcctggtcaacatggtgaaaccccgtctctactaaaaacacaaagattagccgggtgtggtggcacacgcctgtagtctcagc

SEQ ID NO: 126772 - DNA, 749 bp, Homo sapiens
agacaaagacataaccaaaaaagaaaactacaggccaatgtccttgatgaatatagttccaaaatcctcaacaaaatatgagcaaatatgatttaacaacacattaaaaagatcattcaccatgaaccagtgggattcatcctaggaatgcaagtgatgaatgcaacatgtgccaatcaataaacatgatgcattacgttaatagaagcaagaacaaaaatcatactctcatctcaatagatgctgaaagcattcaataaaattcaacattcctttacgattaaaacccttcaacaaaatgggtatagaagggaaatacctaaaaatgatacaaggctatatatgacaaacccatgatgaacattggactgaacagggtaaaaaacaaaagtctttcctcaaagatgaagaacaagacaaggatggccactttcatcagttttattcaatatgatactggaagccctggccagagcaattaaacaagagaaagaaagaaaaggcatacaaattgaaaaggaaggagtcagattggcttttaactcagataacaaaatgtaatacttagaaataccttccaccaaaaatactgttaaatatgataagcaaattcagtaaagttcaggatacaaaatgaacatccagaaatcagtaccatttatatacatcaacagcaaacaatctgaacaagaaatcagaaaagcaatcccatttgcaatagctacaaagaaaataaaatatttatgaac

SEQ ID NO: 126773 - DNA, 425 bp, Homo sapiens
aatggcagcaggagctggagcgaggagcagtgagaaatctgacttaggagaggtcctcatggggagaggatttcagggtgacttccttcagtcccttgggaagacttgcctgcacagcctagagccacgtatgcggaccttcttcatgacaggccacatgtaggacacgcaaacacctgtgcagccccctggctaactgggtgaggcagctcgaggctggaggtgagcaccccggggccaagggcaagagcatctcagcatacctgttactctggcctgggagaggaaggatgagacgcactcatgggtaccccttagtttatgtcttcttgtaaaactgtttctcagaactgctatacccctgacactgtttaagcttctgaagtattgaaatatgatgtaaataaatgcctacaaaaccaagt

SEQ ID NO: 126774 - DNA, 389 bp, Homo sapiens
cctggagagccttatggagtgcacctttcaggttggagatggtctgatctctctctgtccatgtacttgtgcgtatacattcccaaatatttatttcactaggtagcttctcttccaactcccgctacaggccttagggtttcttgggagattgctttctgcgcttatggggcagagatgtggggtggaagttggtgacaaggagacatctattccctaccaatattagggcacgtgaaccaaggcccatgtgtccctcacacgtggggatgagagaccttgccagtggctctggccaggcctgatgcggctcagacgtggccctttgctcccacagctagaggaaaatcctgtcaaaatgccttaacgatcttctaatatttccatgc

SEQ ID NO: 126775 - DNA, 235 bp, Homo sapiens
gccccaatccccgacaggcacacatcatcctagggcagggcccttccttgtgggaaccatccatgcccagctgagggcctggggaggacgagtgctgggtgggggagccctccctctctctgcacacccctgggagcccacttctgtgtatcatggcatacgtggcatgtgctgtggtctctgccatcagcatctaaacaggctcagcctctgctagcctcatgtacaaaccaca

SEQ ID NO: 126776 - DNA, 379 bp, Homo sapiens
gccaacacccggattgcagccttgtgagactctatgcagaggacccctcaactgggcctggattcctgactgacaaaaactgtgagatatttatattattttaagtcactaagtttgtgatcatttgttacgcagcagtactaatcaattgcactgccaccacaccacttctcagcttcactcactgccacctggccacaaagacctccatgtgctttctaaagtaagccaagaacagcacactccgtccttaggccttcacacttgctgttcccacttctggcatgttcttccttttcctagatatctgcagagctctgggcttcatttctttcatttcttctatgttccctcctcaaagagggcttccctaagctct

SEQ ID NO: 126777 - DNA, 584 bp, Homo sapiens
agccttgtgtctgactgaatagctataaattggggttcccatgatccgctccttgggttcgattaattttctagagtggctcacagaactcacagaaatacttacatttatccacttattataaaggatattacagagaatacagatgaacagctagatgaacagacaagatgcataacacaaggcgtggagaaggggcatggagttttcatgccttctccagctatgccacgctctgggaacctgcatgtgttaatgttatccagaagcccacaaaacagtcctttagaatttttatggaaacttgtttacttaggaatgattgattaaatcattggccattggtttatcgactcaaccttcagctcctctccccttcctagaggttggagtaggaccgaaagtttcaaccctctaattatgattacaaacagaaaggaatagtaccaacatcaaagaccaaaggtagataagtccatgaagatggggagaaaccagcgcaaaaagtctgaaaattccaaaaaccagaacacctcttctcctccaaaggatcacaactcctcaccagcaaggcaacaaaactg

SEQ ID NO: 126778 - DNA, 506 bp, Homo sapiens
caggagtatgtgacattagaacagggtgaggaaagaaggtcctcctcagacagaccctgccttgtggacaggacaggcacctcagggccaaatagctcccatggcctcagtcccaggagagcaaaagcgttcagagtttcaaaatgggctgccatgtgatccaagtgtgggttctcacttgagaagatgcattccacctacatcaaggacaagactggtactcctgggcacaaagccacctggcctgccttttccctctagctctccctcaagtatttctggctgctggccctgcagggggtggcaagtgagggggcagaaagaggagctattacagggctgtgattagctcttgggtcccctgagagctggggacatttgcaaataatgttacaaacgtataccctaggactccttggatcttgcctcctcacctccacaagaggagggctctgtggtgccaccagttgcattggcctttttttttttttttgagacggagtctc

SEQ ID NO: 126779 - DNA, 602 bp, Homo sapiens
gcacaccccacagtatggtattgtgtggggactctcagcttgatggatgctgatttttctggttctaaaaaatgttatttattgatctatctattttaatttacacctatgcagttatttatttactctggtgaatagagaacacattcttgacacggggaaggaatacactcctttaagcttctcctagcaccactgtgaaaacttctagactttttttcctcccaaatcctatgaacatgttagcgagttcctctctgccttctactcagaactcaaaatacagtttctctaatctgaaggtaggaccaaaccccatatataaaattaccagagtaatatttgtaaagacagtttcaaaagaagaaaaggcttaattgtaacttgtaaatgatggttcatgaaggaatgtagataatttataagactggtttgatttcgttggtagaaatattttcaacagcgtgtggctgaaaagttagaaaatttctatcagtcatgctttttagcaaagcatctttttactgcttttagagtcatgcacaagaaaacatgcagcttactagctataaaatactattgctccattttaactctctctt

SEQ ID NO: 126780 - DNA, 582 bp, Homo sapiens
aggttttctttctctggggctggtttttcaagagaagactcccttgtctttgcctgaggagtggagggtggtgtggtgtttgtctgctgccctcctgtgaggagcagcagaagtggggggcctgaagcttctgaggtttgccactcaggttctctcttcacttttttggggggtctcctttccccaccccttccccctctgaccctggtgttctcaagtctagacttctcttgtttaatgtatccagtgggggagggaaggggccgtaggtgtctagctgttgcacttgcagccttcagccagtccccccacatctgagttcccaccttcccctttcatgcaaggtgcctgccacctcctacgacctcctgagccttctgatatcctgggtgaagggaggttttcccctctgcagtcctcatgttgtggcatctttcagtctgtgaaatctgttcatacttttgccccctccttgccaaaactgtccctgttgtttgggttcttcgctgttttcattttcgggggttggaaggatgagctgtacaagccctcagtctttctgccatgtttaaccagaagccc

SEQ ID NO: 126781 - DNA, 133 bp, Homo sapiens
gggacactgctcgctcaggagggttctgtccgttatgaacgtgtgttagtgcagctgcctcggcagtcctctgtcatcttcctgcgagggtctgaattgaaactcacaagttaccagggtctgaggagcttgt

SEQ ID NO: 126782 - DNA, 318 bp, Homo sapiens
caggttgcagtgagccgagatcgcaatgggccactgaactccagcctgggacggagagcgagacactgtctcaaaaacaaaacaaaacaaaaagtgctggcaaggacatggagaaattggaagccttgtgtattgctagtgggaatataaaatagtgcagccactgtggaaaacagtatggtgcttccttaaaaaattaaacatagaattaccatgtgattcaggaaatccacttctgtgcatctacccaaaagaactgaaagcaaggacgtgagcaggtatttcttcacccatgttcaccgaagcattattcataat

SEQ ID NO: 126783 - DNA, 302 bp, Homo sapiens
cctctatctccactgtccatgtccaccatccatcaccaccctctatctccactgtccatgtccactgtccatcactaccctctatctccactgttcatcaccaccctctatctccactgtccatcaccaccctctatctccactgtccatcaccaccctctatctccactgtccatcaccaccctttatctccactgtccatgtccactgtccatcaccaccctctatctccactgtccatcactaccctctgtctccactatccatgtccactgtccatcaccaccctctatctccactgt

SEQ ID NO: 126784 - DNA, 501 bp, Homo sapiens
cttttggggtctttgctaggctttgggttaggctgctgaactccagttctgccaaacagtgatgcaggcaggattcagaagtcaaacctgaatgctttgggctgaagtttgctgtgaaacttccaggacaaagaccccaaacaatatgatcttttgaacaaactaagaaattcaaactgagtggtgttagatttttaaaatacacctgatttggaagttgatcccatagatggttatcacaaagtcatcccatcacaattttaacttcagtgcagtggcattttactagtttttgaggcagagtgaaaggaaagacaccatgtctgtattagaaaaaaagtaggtcttggccaggcgtggtggctcacgcctgtgatcccagccctttgggaggccgaggcagaagaattgcttgaacccaggaggcagaggttgcggtgagcaaagaacatgccatttcactccagcctgggcaacaagagtgaaactccgtctcaaaga

SEQ ID NO: 126785 - DNA, 379 bp, Homo sapiens
ctacataaatacgttggtaggtatgtgggtgtgtggttgagaaaactcaagcctgagcattctcttctggaaccagagacaagctcagaatctgctgggaataagcatggagatgaggaaaataagtctaaggagaaacaaagaggcttggaatggaccaggggcatgtgggaatacaaatggtacgtgcttttgttcagagttgctcagcagctctaggaggatttggtctggcatcgggtggggggtacattcagtcggaaagggagaacagcaaggacattaaggctatatggagatgcagatgaagtggtccaagggactaggctggatacaaaggtagaaaagctaaaaagagaagtcagagagcctgggatat

SEQ ID NO: 126786 - DNA, 642 bp, Homo sapiens
cttgaaaattgtatttgagttagcagttatatgtttttttgctgtgtgtttaaagaacacatgttgagtgttttctaacttcttatccaacaagcatggcccttgtgccaagctcataatgatagtcctatgggatttgaacccttcagcattgcgtaatcataacagctcatgtaaattagtatagtttttagagcacagattgaagtcagatcgaatttgattcaaatctcattttgtaacttttcttagaatgctaattaagcattcacattggctacctaacctgtttaagctttaccttctcattcataaaatgggaattaataataatgcctattcagagagacattgtaaggattaaaagagatcatctatacaaacttgtctctgtggtggctggtacataagcacttaataaatatctattacatgatattcattattctaaagatattcttactacccacagcatcttttgtacaaaatacagtttattgctatgatctgcagtataggctaatgtattctttaattaattgtcaacctgtatttaatgaatatctattccatctaagatccacatggagctagatttttgagtaattagggaaagaactggaaatggatcttatgaaaaag

SEQ ID NO: 126787 - DNA, 5973 bp, Homo sapiens
  misc_feature (4023)..(4023): n is a, c, g, or t
  misc_feature (4061)..(4061): n is a, c, g, or t
  misc_feature (4091)..(4092): n is a, c, g, or t
  misc_feature (4121)..(4121): n is a, c, g, or t
  misc_feature (4153)..(4153): n is a, c, g, or t
  misc_feature (4197)..(4197): n is a, c, g, or t
  misc_feature (4227)..(4227): n is a, c, g, or t
  misc_feature (4644)..(4644): n is a, c, g, or t
  misc_feature (4791)..(4791): n is a, c, g, or t
  misc_feature (5196)..(5196): n is a, c, g, or t
  misc_feature (5199)..(5199): n is a, c, g, or t
  misc_feature (5237)..(5237): n is a, c, g, or t
  misc_feature (5260)..(5260): n is a, c, g, or t
  misc_feature (5293)..(5293): n is a, c, g, or t
  misc_feature (5557)..(5557): n is a, c, g, or t
gagcgtcttttgccacgaacacctgcggcgtgccgaagttcctcttctctgccccggttccgggcggtccgctgggaggtggcgcccggagggacacccgtgcctggggtcggggccagtgctcttctcggagctccagaagttctgctgagaagcgcggcggcagcaagacgacttctccggagccgccgagctggagttagaggtggagctccgtggggccgggcccccggctgcggggcagcggctcctgcaggcggaggccccggcggagaatgagccggagccggaggtggtggtggtctcctggcagagcggtgggaccgggagcaagctgcggtggttcaccaccttgatgctgtgtgcctccttcctggggctgggattgagtgttgctatagtgggacccacgtttcaagatttggcaacaaacgtgaaccgaaatatcagtagtctgtctttcatttttgtgggtcgtgccttgggatatttgagtggctctgtgattggtggatttcttgtcgatgtcatgaattattttttacttttgggaatctcaatgtcggctaccaccgttggtctttatcttgttcctttttgcaagacagcaatattactcactgtcatgatgtctatcttcggtgtttcaattggcattctggatacaggtggtaacgtccttatcttggctatttggggggacaaaggagccccacatatgcaggccttacacttctcttttgccttgggtgcctttttggctccactgctagctaaactggctttgggtccgacagcgtctgctgaaaaccacacagagtctgacttccatcctgcactcaaccaatcatctgatgctgactcagaagctctgtttggagtacctaatgataagaatttactgtgggcttatgctgttatcggtacttacatgttcttagtttctgtcatttttttttgtctgtttttaaagaatagctcaaagcaagaaaaagcaagagcatctgctgagacatttcgaagagcaaaatatcacaacgcccttctttgtctcctttttctgttcttctttttttatgttggagctgaggtaacatatggctcttatgttttctcatttgcaaccacccatgctggcatgaaagaaagtgaagctgctgggttgaactccatcttctgggggacatttgcagcctgaggggctggcaatcttttttgctacctgtttacaggcctggaaccatgattgtgttgagcaacattggcagcctgacttcatctttatttctggtgctttttgacaagaacccaatttgtctctggatagcaacttcagtgtatggggcttcaatggcaaccacatttccgagtggtgtttcttggattgagcagtacacgaccatccatgggaaatctgcagcattttttgtaattggtgcttccctgggagaaatggctattcctgcagtcattggaattcttcaaggaaaataccctgatttgcctgtagttctgtatacctctttgggagcatcaatagctactggtattttatttcctgtgctatataaattagccacttcacctcttgatcgccagcgaaaagaagacagaaagagtgaggaccagaaagctctgctctctagctccgggctaaatgaatatgaggaagagaatgaagaggaggatgcagaaaaatggaatgaaatggattttgaaatgattgaaacgaatgatacaatgaggcattctataatagagacatctagaagtagtctgacggagcccacagctgaagtctataatcaatacccatcaaatgcactggtgtttgagtcttctccttttaatactggcagtgcccatgtgaagcacttgccagaaaccaggacaaaagggactaacgtttagagaagatggattactcactgacatctttgaataactgccacttctaaggacgccattcagagcagagcattagcagaatttcaccatgctttggggattaaaatttttaggtccatattatagcaaatgctaaaaatttttgaaatgttctgtaattcccagagtcttccataaataaccaaatggtctcatacacgtacaataggatcttgttataacgctatcatttgacatgtgactgattaggaaatattttatggtctccacccctcagagcacccaaagaaggcattgtttttgagaaggggggtattctcagaatgagaccatgtaggagttgaattgattggttgaacaaattatcaggtatcaatatttttccaggaaagttgaggagaatagtttcataaaagagaaatgggccgggtgcagtggctaaagcctgtaatcccagcactttgggaggccgagacgggcagatcacgaggtcaggagatcgagaccatcctggctaacacagtgaaaccctgtctctactaaaaatacaaaaaattagccaggcgtggtggcaggcacctgtagtcccagctacttgggaggctgaggcaggagaatggcgtgaacccgggaggtggagcttgcagtgagccgagatcatgccacaccgtactccagcctgggcgacatctagactccgtctcaaaaaagaaatggagaggtatttttattaattgctttaccttatctgtagggttggatcaaagaatgtaatgactcatttgatttctaatttcaatgaagagaacacagaacagggcccaaggggtcgggcttcaagccttgacttcttctagccctgcactctgtcacttaacgtaggccttgtttatctcgcctcctgatctgtgattctagaaatgaaaatgagatgatttccaaattgggaatctgtaagttttaaagtttgtgcaaaatgtctgctagaaattagtacaagtgacagcatgttcttcatttcaaatgagaagtgaaaccaaaatgataaatagctttaagaatgtgctaatgataaatgattacatgtcaatttaatgtacttaatgtttaataccttatttgaataattacctgaagaatatattttttagtactgcatttcattgattctaagttgcactttttacccccatactgttaacatatctgaaatcagaatgtgtcttacaatcagtgatcgtttaacattgtgacaaagtttaatggacagttttttcccatatgtatatataaaataatgtgttttacaatcagtggcttagattcagtgaaatacagtaattcattcaattatgatagtatctttacagacattttaaaaataagttatttttatatgctaatattctatgttcaagtggaatttggagacactatgttctaattttaagaactgtttcagtgttattagattagtagtagggctgtagatggggtctttcgaggtcctttgcctacctcagtaacagaggctgggtctgagccttgctcgagattagctcttcaccaggtctgtgtggtaatcatatcgtagttaccgtaggtcacgctgcaagtgtaatttacagtgaggcatagtcttttccagtgattggaatacttgtgtcaccgatccagggtttctctttcctgagtctgaaatacctgggaaaccagttagaaggtgactgggtagcctaggagtcaaggatcagaaagggtacttcatatatatatggcagaattggtgcaggtgatcctttgaaaaatgacaagaattgatgaaattttgtttacttcctccaattttttgctgaataacatctcctttctacctgattggagtaggcttgctttctcttacttaatttctataaatttgccattgttttgtctcaagtaaaatacagtgtctttcttgaccactgcccgcccattcaccttatatgcctgccacagtcttggttcatgtaataacctaacagctttggagatggcggtggagaagttaatggtaaaaaccttcttgctctttttatttttatttatttattaggggtgggggatggtgtctcnctctgtcactcaggctggagtgcaatgacgtgatctcngctcactgcaacctctgcctccctggttcnngcgattcttctgcctcggcctcctgagtngctgggattacaggcatgcgccaccatgcccngctaatttttgtgtttttagtagagagggggtttcatcatgttncctaggctgatctcaaactcctgatctcangtgatctgcccacctcagcctcccaaagtgttgagattacaggcatgagccactgtgcccagcccttttgctctttttatagtgtaaatttccctcagttagaacttggaaattacttctgcttcacttactgccttttctcaggttgttggaatctaggcagtagcagttacttggcagctaggaggcttgctagaataggaattccaccttcagcatttactgttacagggtagaagatgcagctcagggagagaaggatgatgataagaacatggcagaaaatctcaaaatctactctggaaaattcactatgtttccacacaccaacatgtgaatcgtcatgagatcatagggcattgttaaagttccatattggaaggaaaagacttagtacaattctaagaattagcattnatcctgctgatcagttcttagctaagtgtctgctgatacctaagtaaccaatatacccaagtgttctattgctgggtaacacagtaccacacattgaacaccttaaaacaatagacatttggtaatgtctgtacaggctgtactgangcggcctgtacagggccgcttcagtacaggaccttacctatgtagactgaggtacgtgtttcttgctgactgtcagctgggcaccactcagcttcgagaggcctcccacagttcttgccatgtggccttctcacagatgcctctcacaacatggcagtttcttcaaagcaagcaggagaatctctaaatgagtcttgtatgacattacgtcattatgggaataacatcccatcacctttgccatattctagcgtctagaagcaaggtatgagttccaacaaaactcaagggtagaggctagaacagggatgtgactcattgcggatcaccttagagcatgcctgccacactcgggtacctgcagaatagagattctcaaaagttctaaaaactgagctaagagcnggncatgatggctcacacctgtaatcccagctactcaggangctggggtggaagtatctcctgnggtcaggagtttgagaccagcctgggcaatatngtgagacctctgtctctaaaaaatttttaaaagagaccccttctctaaaaaacaggaaggctgggcgcggtggctcacacctgtaatcccagcactttgggaggccgaggtgggcggatcacaaggtcaggagatcaagaccatcctggctaacacggtgaaaccccatctctactaaaaatacaaaaaattagccgggcgggcgtggtggcgggtgcctgtagtcccagctactcgggaggctgaggcaggagaatggcgtgnacccaggaggcggagcttgcagtgagccgagatggtgccactgcactccagcctgggtgacagagcgagactgtctcaaaaaaaaaaaacaaaaatattcaactatgagctggggaaaaaagcttcagcggtcactgaaagtgcttacaggtacagctagtatggggatggaatatgccccattagccaggccaacagatctcatataggagaatctgttttatgtttgttggacagtgggtgagttatcgcagagttatgccttttttttctgtcactattttatgtcccttatcactgtgcctttaacctactgaaatgcagttgaggccgggtgcggtggctcacgccaagatggcgccactacactccagcctgggcaacagagggagactccatctcaaaaaaaaaaaaaa

SEQ ID NO: 126788 - DNA, 3849 bp, Homo sapiens
gagcgtcttttgccacgaacacctgcggcgtgccgaagttcctcttctctgccccggttccgggcggtccgctgggaggtggcgcccggagggacacccgtgcctggggtcggggccagtgctcttctcggagctccagaagttctgctgagaagcgcggcggcagcaagacgacttctccggagccgccgagctggagttagaggtggagctccgtggggccgggcccccggctgcggggcagcggctcctgcaggcggaggccccggcggagaatgagccggagccggaggtggtggtggtctcctggcagagcggtgggaccgggagcaagctgcggtggttcaccaccttgatgctgtgtgcctccttcctggggctgggattgagtgttgctatagtgggacccacgtttcaagatttggcaacaaacgtgaaccgaaatatcagtagtctgtctttcatttttgtgggtcgtgccttgggatatttgagtggctctgtgattggtggatttcttgtcgatgtcatgaattattttttacttttgggaatctcaatgtcggctaccaccgttggtctttatcttgttcctttttgcaagacagcaatattactcactgtcatgatgtctatcttcggtgtttcaattggcattctggatacaggtggtaacgtccttatcttggctatttggggggacaaaggagccccacatatgcaggccttacacttctcttttgccttgggtgcctttttggctccactgctagctaaactggctttgggtccgacagcgtctgctgaaaaccacacagagtctgacttccatcctgcactcaaccaatcatctgatgctgactcagaagctctgtttggagtacctaatgataagaatttactgtgggcttatgctgttatcggtacttacatgttcttagtttctgtcatttttttttgtctgtttttaaagaatagctcaaagcaagaaaaagcaagagcatctgctgagacatttcgaagagcaaaatatcacaacgcccttctttgtctcctttttctgttcttctttttttatgttggagctgaggtaacatatggctcttatgttttctcatttgcaaccacccatgctggcatgaaagaaagtgaagctgctgggttgaactccatcttctgggggacatttgcagcctgaggggctggcaatcttttttgctacctgtttacaggcctggaaccatgattgtgttgagcaacattggcagcctgacttcatctttatttctggtgctttttgacaagaacccaatttgtctctggatagcaacttcagtgtatggggcttcaatggcaaccacatttccgagtggtgtttcttggattgagcagtacacgaccatccatgggaaatctgcagcattttttgtaattggtgcttccctgggagaaatggctattcctgcagtcattggaattcttcaaggaaaataccctgatttgcctgtagttctgtatacctctttgggagcatcaatagctactggtattttatttcctgtgctatataaattagccacttcacctcttgatcgccagcgaaaagaagacagaaagagtgaggaccagaaagctctgctctctagctccgggctaaatgaatatgaggaagagaatgaagaggaggatgcagaaaaatggaatgaaatggattttgaaatgattgaaacgaatgatacaatgaggcattctataatagagacatctagaagtagtctgacggagcccacagctgaagtctataatcaatacccatcaaatgcactggtgtttgagtcttctccttttaatactggcagtgcccatgtgaagcacttgccagaaaccaggacaaaagggactaacgtttagagaagatggattactcactgacatctttgaataactgccacttctaaggacgccattcagagcagagcattagcagaatttcaccatgctttggggattaaaatttttaggtccatattatagcaaatgctaaaaatttttgaaatgttctgtaattcccagagtcttccataaataaccaaatggtctcatacacgtacaataggatcttgttataacgctatcatttgacatgtgactgattaggaaatattttatggtctccacccctcagagcacccaaagaaggcattgtttttgagaaggggggtattctcagaatgagaccatgtaggagttgaattgattggttgaacaaattatcaggtatcaatatttttccaggaaagttgaggagaatagtttcataaaagagaaatgggccgggtgcagtggctaaagcctgtaatcccagcactttgggaggccgagacgggcagatcacgaggtcaggagatcgagaccatcctggctaacacagtgaaaccctgtctctactaaaaatacaaaaaattagccaggcgtggtggcaggcacctgtagtcccagctacttgggaggctgaggcaggagaatggcgtgaacccgggaggtggagcttgcagtgagccgagatcatgccacaccgtactccagcctgggcgacatctagactccgtctcaaaaaagaaatggagaggtatttttattaattgctttaccttatctgtagggttggatcaaagaatgtaatgactcatttgatttctaatttcaatgaagagaacacagaacagggcccaaggggtcgggcttcaagccttgacttcttctagccctgcactctgtcacttaacgtaggccttgtttatctcgcctcctgatctgtgattctagaaatgaaaatgagatgatttccaaattgggaatctgtaagttttaaagtttgtgcaaaatgtctgctagaaattagtacaagtgacagcatgttcttcatttcaaatgagaagtgaaaccaaaatgataaatagctttaagaatgtgctaatgataaatgattacatgtcaatttaatgtacttaatgtttaataccttatttgaataattacctgaagaatatattttttagtactgcatttcattgattctaagttgcactttttacccccatactgttaacatatctgaaatcagaatgtgtcttacaatcagtgatcgtttaacattgtgacaaagtttaatggacagttttttcccatatgtatatataaaataatgtgttttacaatcagtggcttagattcagtgaaatacagtaattcattcaattatgatagtatctttacagacattttaaaaataagttatttttatatgctaatattctatgttcaagtggaatttggagacactatgttctaattttaagaactgtttcagtgttattagattagtagtagggctgtagatggggtctttcgaggtcctttgcctacctcagtaacagaggctgggtctgagccttgctcgagattagctcttcaccaggtctgtgtggtaatcatatcgtagttaccgtaggtcacgctgcaagtgtaatttacagtgaggcatagtcttttccagtgattggaatacttgtgtcaccgatccagggtttctctttcctgagtctgaaatacctgggaaaccagttagaaggtgactgggtagcctaggagtcaaggatcagaaagggtacttcatatatatatggcagaattggtgcaggtgatcctttgaaaaatgacaagaattgatgaaattttgtttacttcctccaattttttgctgaataacatctcctttctacctgattggagtaggcttgctttctcttacttaatttctataaatttgccattgttttgtctcaagta

SEQ ID NO: 126789 - DNA, 4359 bp, Homo sapiens
  misc_feature (2409)..(2409): n is a, c, g, or t
  misc_feature (2447)..(2447): n is a, c, g, or t
  misc_feature (2477)..(2478): n is a, c, g, or t
  misc_feature (2507)..(2507): n is a, c, g, or t
  misc_feature (2539)..(2539): n is a, c, g, or t
  misc_feature (2583)..(2583): n is a, c, g, or t
  misc_feature (2613)..(2613): n is a, c, g, or t
  misc_feature (3030)..(3030): n is a, c, g, or t
  misc_feature (3177)..(3177): n is a, c, g, or t
  misc_feature (3582)..(3582): n is a, c, g, or t
  misc_feature (3585)..(3585): n is a, c, g, or t
  misc_feature (3623)..(3623): n is a, c, g, or t
  misc_feature (3646)..(3646): n is a, c, g, or t
  misc_feature (3679)..(3679): n is a, c, g, or t
  misc_feature (3943)..(3943): n is a, c, g, or t
agtagacaggacacaagtagcgtggggcagacagaaagcttggggaggaagaggacctatttgacagaggaggatgcagaaaaatggaatgaaatggattttgaaatgattgaaacgaatgatacaatgaggcattctataatagagacatctagaagtagtctgacggagcccacagctgaagtctataatcaatacccatcaaatgcactggtgtttgagtcttctccttttaatactggcagtgcccatgtgaagcacttgccagaaaccaggacaaaagggactaacgtttagagaagatggattactcactgacatctttgaataactgccacttctaaggacgccattcagagcagagcattagcagaatttcaccatgctttggggattaaaatttttaggtccatattatagcaaatgctaaaaatttttgaaatgttctgtaattcccagagtcttccataaataaccaaatggtctcatacacgtacaataggatcttgttataacgctatcatttgacatgtgactgattaggaaatattttatggtctccacccctcagagcacccaaagaaggcattgtttttgagaaggggggtattctcagaatgagaccatgtaggagttgaattgattggttgaacaaattatcaggtatcaatatttttccaggaaagttgaggagaatagtttcataaaagagaaatgggccgggtgcagtggctaaagcctgtaatcccagcactttgggaggccgagacgggcagatcacgaggtcaggagatcgagaccatcctggctaacacagtgaaaccctgtctctactaaaaatacaaaaaattagccaggcgtggtggcaggcacctgtagtcccagctacttgggaggctgaggcaggagaatggcgtgaacccgggaggtggagcttgcagtgagccgagatcatgccacaccgtactccagcctgggcgacatctagactccgtctcaaaaaagaaatggagaggtatttttattaattgctttaccttatctgtagggttggatcaaagaatgtaatgactcatttgatttctaatttcaatgaagagaacacagaacagggcccaaggggtcgggcttcaagccttgacttcttctagccctgcactctgtcacttaacgtaggccttgtttatctcgcctcctgatctgtgattctagaaatgaaaatgagatgatttccaaattgggaatctgtaagttttaaagtttgtgcaaaatgtctgctagaaattagtacaagtgacagcatgttcttcatttcaaatgagaagtgaaaccaaaatgataaatagctttaagaatgtgctaatgataaatgattacatgtcaatttaatgtacttaatgtttaataccttatttgaataattacctgaagaatatattttttagtactgcatttcattgattctaagttgcactttttacccccatactgttaacatatctgaaatcagaatgtgtcttacaatcagtgatcgtttaacattgtgacaaagtttaatggacagttttttcccatatgtatatataaaataatgtgttttacaatcagtggcttagattcagtgaaatacagtaattcattcaattatgatagtatctttacagacattttaaaaataagttatttttatatgctaatattctatgttcaagtggaatttggagacactatgttctaattttaagaactgtttcagtgttattagattagtagtagggctgtagatggggtctttcgaggtcctttgcctacctcagtaacagaggctgggtctgagccttgctcgagattagctcttcaccaggtctgtgtggtaatcatatcgtagttaccgtaggtcacgctgcaagtgtaatttacagtgaggcatagtcttttccagtgattggaatacttgtgtcaccgatccagggtttctctttcctgagtctgaaatacctgggaaaccagttagaaggtgactgggtagcctaggagtcaaggatcagaaagggtacttcatatatatatggcagaattggtgcaggtgatcctttgaaaaatgacaagaattgatgaaattttgtttacttcctccaattttttgctgaataacatctcctttctacctgattggagtaggcttgctttctcttacttaatttctataaatttgccattgttttgtctcaagtaaaatacagtgtctttcttgaccactgcccgcccattcaccttatatgcctgccacagtcttggttcatgtaataacctaacagctttggagatggcggtggagaagttaatggtaaaaaccttcttgctctttttatttttatttatttattaggggtgggggatggtgtctcnctctgtcactcaggctggagtgcaatgacgtgatctcngctcactgcaacctctgcctccctggttcnngcgattcttctgcctcggcctcctgagtngctgggattacaggcatgcgccaccatgcccngctaatttttgtgtttttagtagagagggggtttcatcatgttncctaggctgatctcaaactcctgatctcangtgatctgcccacctcagcctcccaaagtgttgagattacaggcatgagccactgtgcccagcccttttgctctttttatagtgtaaatttccctcagttagaacttggaaattacttctgcttcacttactgccttttctcaggttgttggaatctaggcagtagcagttacttggcagctaggaggcttgctagaataggaattccaccttcagcatttactgttacagggtagaagatgcagctcagggagagaaggatgatgataagaacatggcagaaaatctcaaaatctactctggaaaattcactatgtttccacacaccaacatgtgaatcgtcatgagatcatagggcattgttaaagttccatattggaaggaaaagacttagtacaattctaagaattagcattnatcctgctgatcagttcttagctaagtgtctgctgatacctaagtaaccaatatacccaagtgttctattgctgggtaacacagtaccacacattgaacaccttaaaacaatagacatttggtaatgtctgtacaggctgtactgangcggcctgtacagggccgcttcagtacaggaccttacctatgtagactgaggtacgtgtttcttgctgactgtcagctgggcaccactcagcttcgagaggcctcccacagttcttgccatgtggccttctcacagatgcctctcacaacatggcagtttcttcaaagcaagcaggagaatctctaaatgagtcttgtatgacattacgtcattatgggaataacatcccatcacctttgccatattctagcgtctagaagcaaggtatgagttccaacaaaactcaagggtagaggctagaacagggatgtgactcattgcggatcaccttagagcatgcctgccacactcgggtacctgcagaatagagattctcaaaagttctaaaaactgagctaagagcnggncatgatggctcacacctgtaatcccagctactcaggangctggggtggaagtatctcctgnggtcaggagtttgagaccagcctgggcaatatngtgagacctctgtctctaaaaaatttttaaaagagaccccttctctaaaaaacaggaaggctgggcgcggtggctcacacctgtaatcccagcactttgggaggccgaggtgggcggatcacaaggtcaggagatcaagaccatcctggctaacacggtgaaaccccatctctactaaaaatacaaaaaattagccgggcgggcgtggtggcgggtgcctgtagtcccagctactcgggaggctgaggcaggagaatggcgtgnacccaggaggcggagcttgcagtgagccgagatggtgccactgcactccagcctgggtgacagagcgagactgtctcaaaaaaaaaaaacaaaaatattcaactatgagctggggaaaaaagcttcagcggtcactgaaagtgcttacaggtacagctagtatggggatggaatatgccccattagccaggccaacagatctcatataggagaatctgttttatgtttgttggacagtgggtgagttatcgcagagttatgccttttttttctgtcactattttatgtcccttatcactgtgcctttaacctactgaaatgcagttgaggccgggtgcggtggctcacgccaagatggcgccactacactccagcctgggcaacagagggagactccatctcaaaaaaaaaaaaaa

SEQ ID NO: 126790 - DNA, 340 bp, Homo sapiens
atggtgatgtgagagttaaatgagttaacaccgagaaaccttaaatgctatacaaatataagggatggcattgtaactctttagttaagttcttgccactcacttctgtgcaagagaagctgatgtaataaagtatttcctaggtcgggtgcagggcccacacctgtaatcctagcactttgggaagtcgaggcaggtggatcacctgaggtcaggtcacctgaggtgaggagttccagatcagcttcactaacatggtgaaaccccatctctactaaaaatacaaaaattagctgggcatggtgatgcatgcctgtagtcccagttactggggaggctg

SEQ ID NO: 126791 - DNA, 676 bp, Homo sapiens
ggctgcaccgcagcccccttaggccctgctgccagatcaggtgtggagacactgcagagctgtcactccgcatggtttcctgcaagtcagctatctcgttcccatctgtgttggtattctttcctagcttttttcactgcttgcctggcatgcatatatttatccgataagcctcaatttggctttaagacttgccttcccaggtagagactaaagatgaaatttctccatgcatgtatcttccttttaattgtgcttgtagttaatacttaattcttaaatttgagatgttactgttttaagatacactctatcatgcatgttagcatccgtttacatgttgtctatactattttgaggatcttaatgcattaagatccaccctgttgtgagttttgtttgctttatggtgtaaataagagaaaatgagattacttcagtatataaggacttttttcactttatgtttatcttacataattctttaagctaagagtttacactgttcatcagtttttactttttagaaggaacttattcagatagctttattattaatattcagatgtgccatcctgcaaagtcagggatggattacaaggtgtgatacttttagtccataaatggtttttctatagctagagcttgatcctttgtgctttgcaccattaattgg

SEQ ID NO: 126792 - DNA, 178 bp, Homo sapiens
cagcttgaaggtccaggccacttacagactctaagaagagtgctgtcagccccggccctgactcgctggccctcccagtatttattcagtacacattaaatgacaaaagtctcaagtaaacaccattagagggtaatcaacctggtcgccttcctccattcccctccccacagagcgt

SEQ ID NO: 126793 - DNA, 211 bp, Homo sapiens
gatgagctaggggaaatggtggagagactagaaagggggatcagagacagatgagtggcagagcaggatcctggctcttttggagccctctttaatcacaggtgtctctgtttggaatgtccaaattaacctcatggttcagatttctcttctgtggtctccctgatataccaagaggcgcctaccacaatctgtctgaaatgtttttttt

SEQ ID NO: 126794 - DNA, 437 bp, Homo sapiens
atggagtggtggcgcctggtccagacatgggtgggacagtgcttcagagctcactagccagaagctcctcagcggcagcccccaagaagggaggtctatgggtctggagagggttcaggaagcttccacggtaacaagcagcctgagggaccgtgtggtgttcccggccagacatcgagaagtgcccaaaaggttagagctccggctctggtgccggaagacgtggattctgctgcaccacctgctactgtgtgactccaggaaggaaccttgagcccctccgagcctcggcgtcctcgtgtgtaaaacagggatggtttccgtgacctcggcgggatgccggaggctcagagcggaccgtgagactgagaggctctgaacacgccacaggctttgcacatgtgagtacgtccacacgccagccatgttctcacctt

SEQ ID NO: 126795 - DNA, 486 bp, Homo sapiens
cctggagccctggaggaagctgatctgcagcaggctggtgacagaggcacaaccaaaccctgcagtgcccttcactgagaagccttaccttcttgataactggcaaaggagaagtatttgcagagcccatctctcatcactgagcaggcaaagaagggtagatttggagctgagaagcaataagttaataacttaaagaagataagacttctgtcttctgggctctcaatatccatgctttctgcttccattccctgcactagctcattaaaactttcaactctaaaattctagggttttgtattcttcacttaagtgtgaattgctgtgcttgagatcccaagtccacattaactggactttaaaaaatcatgactagacactgtagtcatgattgctgttgttgctttaatacaggtaggctcttgcctttggggagtgtatatggacagtcctggctgcctcatgacttccacaaaacatggt

SEQ ID NO: 126796 - DNA, 663 bp, Homo sapiens
tattaacatttaaatgtaacttatgtttagtggtattttctcaagtctgtgattcttttgtgtctgtgtattaggatttactagtagaatgtgctggaatatttttttcaaacattattgccacccatctcaaactagcattcatattttgagaaccttatttattaggaattaaaagtttacttgctaacatggttgagaggacatctcaaaaaaaatgtgacagaatgtgctccatcttcacgacaattagaaaaggtaaacagttaaattttcttgtttttcattggaacagtatttaatttgcacctacaagaattatatgaaatagacatgtcaaaatttgcagtggtagaaaggccatgtgagatctagttggtggaggcaattaaaaatgtttcaacatataaacaccggtaaattcttttcctcaactaaaaatatttggacattttagtgccatcaaccatgagtttgtgaaaatgatataatttaactttgcttagctgggcatgctggtgtgtacctgtaatctcagctacttgggaggctgaagcaggagaatcacttgaacccaggaggcagaggttgcagtgtgccaagattgtgccactccactccagcctgggtgacagtacgagactctgtctccaaaaaaaaaaa

SEQ ID NO: 126797 - DNA, 316 bp, Homo sapiens
tcctattctacctccatgtggatgcaatgttagctcccctaaacctcaacccacctttcattctccgggcaaactcattttcgtttaggtgctgcctcttttgcaaaagcattcctgaccccctaagcagatttagggccttttcctcctgtgtttctccttgtactttattataaatgatttcattttacagttgaatgtaggagtctgtctctatctttgcgttcttcttccctagtacaacataagctccctgagatcaggaactacgtatttccaccactggctccgtggttggcacatgggtagatgctca

SEQ ID NO: 126798 - DNA, 653 bp, Homo sapiens
gtagcggttcctgcctgtaatcccagcactttgggaggctgaggtgggacgatcagttgagcccaggagtttaagaccagcctggacaacatagtgagacccggtcttcacacaaaaataaatcagccatgcgtggtggcgtgcgtctgtagtcccagctattcaggaggctgaggaggtgggagaactgtttgagcccaggagtttgaggatgcagtaagccacagttgcgccactgcactgcagcctgggtgacagagtgagatcctgtctcaaaagaaaaaataaaataaaataaaataaaacataaaatagaagtaaaggaaacaatactgcctataatagaaactccttatattatttgtttttgactggctaaatgaaaaccaaagatacaagaaatgccttttaaaagtaataaattttaaaaggattaaacttaaaaaaagaagtgatgaatagtattactacagctaaacaaagaatgctatcagttaaaacttgatttattgttcaaaatgcagctagttgatagaaaatgtccaatatttcttcataataggtacctgaggcaggactccaatctgatcattctgacaattataactctcaagattaattaacagcttggcattctggcttccttaagagaa

SEQ ID NO: 126799 - DNA, 234 bp, Homo sapiens
acccctcatggaactgttccattcataaaaacctgcctggaaacccagggcagcgtctccctggctcagggtgagaatcgtcgcacacatgcagtccgcctcgggcctctgcagggccgtccctgaggccggggtgaccattcccctggcacatctggcagggccctcacccccgtccaggtgcccccgggtagcccttggcagtcacagggagacagtgaggtgcagtggtta

SEQ ID NO: 126800 - DNA, 218 bp, Homo sapiens
gtaggaggcagaggtgacgcatcagtaaagcagggagtgctggacctcagagcctcttctcagagacagggctaaccgccctcggggaaatgacctgttaaggcagcttggctgctggacgctgatgagcagtgaaataacaacagcatctgaaggggcggggcttgcctggggcccacaggagcatagcacaggacatacacttgaccaagtttaca

SEQ ID NO: 126801 - DNA, 185 bp, Homo sapiens
agatcattgtgtggatgagtaaagagtgaggaaaatgcctagaagcaagttctgaggaactctaaacacttaggggttgggtaatggaggagaagctagacaaggagaacaaagaggaactgtgggggaacagtagtgagtggtgagaggaaaactactagagtgaggtaggaagaagctaggag

SEQ ID NO: 126802 - DNA, 568 bp, Homo sapiens
cggtttcctcttggggctggagatgtcgtctgtgaggcacagacgtgaattgcctggtgtttaatgatgagctgtttacgggcttggatggtgggtataagggtgatcactttattaactttgaaatgtcgtggtggcaggtgcctgtaatctcagctactcaggaggctgaggcaggagaatggaggtggcagggaagttgacagaatagggcacattagactgacaaagtcataacaagtaacccaagttggtaccagaaagaccacatactctgaccataatgcagttgaacagtgaccaataagacaaaaatggtatcatggagtatatgaatcccaagtctaaattgaatgaggctcaaagaaggcttcacattgaaaatgagaccacgtgtatgtgagttataatgaacctgctatataccaacatttatgtggcagagctgggagtgtgcaaagagggatatccttcatcttgtagcatttttttttttagaaaggaaaaactggaaaatcatgaacatttacagtgtttcagtcctactgtgcgctcattgtgcctaagt

SEQ ID NO: 126803 - DNA, 535 bp, Homo sapiens
agagagccgggctttgggtcaggacaggctcctcagagaggctccagcctcctggggaagcggctggagtcagcacagtcccacactgcgtggttttgcctgcacctgggtttgtcagttgtttatggatgttgagctgagtggcactgtttggaattggagttgtcatgtactgttgtgggggtatctgtaggggtgttgtcagggcctctgaacagtgcatgtgtggctggctagggtacggacgtgtagctgtccagaacagtgttgtaaggcagtaggcagctcctggccgtttgggctgctatcagatgtcaggttgtactgggaccatccggtggtgttttcaggctgtgagtgaatcctggccatgttttgggtgcctcttcccttctatctttgtacagaggggggccccaggacacctggagggaggtctcctgtcttaatcagtccctccacaggtaagcaggcaggcagcctcaagccccctcactctcagtaattttaccacggtgcctaagtcaggaacagg

SEQ ID NO: 126804 - DNA, 667 bp, Homo sapiens
gaaatttaaaggaattgacggaagggaatactgaaaagagaaaagtgacaaataaggaaagtgggcggggcccaggctcaggctggtgggtctcccaagcgaagtcagattccacccgctctctggccgcctccgcccctcctacttccatttaatctgatgtcgacgttttatttgtgcctttttgcatatctttctcctactcccctcccctcccatctctggaggttattgataagtgctgctcaaacatttgttttctgcgtctttggagtagaagatgaagcgttaacacccccaacgcgcatacacacatcccaaatgcgcgcatacacatgtaccctaaaacttaaagtatagtaataaaaaaaaaagtcattgtggtccatacactgaaatatgattcagcccccaaaggaaataaagtactgatccatgctacatcatggaggaatccccaaaacatgatactgagtttaagaacccagacacaagaagtcacatactgtatgattccatttacatggaatgtggcaaatcagtaaatcataagaacaaaaaacaagttagtagttgccagggactgaggtggggtgtgggggatgatgagtgactggtagtgactagagagttttcttttggggtgacataaatgttttggaactag

SEQ ID NO: 126805 - DNA, 285 bp, Homo sapiens
gatgttatttggaggcagagccaacaggacttcaggaagggttggctgtagggtgtgagagagggttgtccagggcagttcttcagtttctggcttaagcacatgagcaaatggcatggccattttcagaagagggggatgctgggaaaagcagaccagggagagggaaatcaagggttctgggttgtctgtgttaggactgggactcctggggctggatagggctggaggtgccaagggaaacagttgtcagatataagcctagagttccagagagggggttgc

SEQ ID NO: 126806 - DNA, 797 bp, Homo sapiens
tacttcattcagatcactacctgcctgctcaaaagataaccattacagccaggcgtggtggctcacacctgtaatcccagcactttgggaggctgaggcaggtggatcacctgaaatcaggagtttgagaccagcctggccaacatggtgaaaccccatctctactaaacatggaaaaaaaaaaatttagccgggcgtggtggcgcacgcctgtaatcccagctactctggaggctgaggtgggagaactgcttgaacctgggaggcagaggctgtagtgagccgagattgtgccactgcactccagcctaggcgacacagcaagacctggtttcaaaaaaacaaacaaacaaacaaacaaaaaaactattactctgaatttttgccttttttaccttctgtagtttatttttttcttagccctgattcaattatatcaggcattgttaaaattgaattaaaatctgaacacagtgaaatgtacaaatattaagtatacaatttgatgagctttacaaatgtacatacctccatacatatctcaatagcgatagagtcatccaagaaaatttccttgtgctttcttattatagtcagtccatacacaccatagacaaaaacgtttcctgatttccattaccttaaatttattttgcccaattttagcctgtcacataaatgaaatcatgtagcatgcgtattctgggggagtctgacttctttcgcaatcaagatgtcatttcaaaatttcatccatgtttcctcataactcggaggcaccagctagctaattggga

SEQ ID NO: 126807 - DNA, 411 bp, Homo sapiens
actaaactctttgcatgctgaatagctatttatatattatataaataaataaatatatatattatatatcgctctctctcacaaatgcaggccacatgtcaaattcagctttgctttctacaaatgaatgaacttaataaaaataaacgttggagggggtatttggaaagacatctatttaaatttttattacatgtttgatattaaaaactaagaatggtttagataaaacatataaataatatatatatatatatatatatatataaacacacacacactacagataaggcttttttagaaaacacattagctaacaggtgatatggaacttcaagtgttttgttatatagcatggatgttttattttgcatatcggaacataaagccattttacaactgtgaagtgtg

SEQ ID NO: 126808 - DNA, 727 bp, Homo sapiens
ggtcaactggtgtccaaaagtattaagtggaaatttccagaaataaggaatttgttagttttaaattgtgtgcctttctatgtagtgtgaagaaatcacataccattccattttgtgctccctagagtgtatccttttgcccagcacgtccatgctgtatatactgcctgtctaccagtcacttagcggccatctaggctgttagatggactgtagcagcaacatagtgcttatggtcaaggaacagttatttcacttaataatggccccaaagtgtaagagcactgtgcctaatttacacattaaacttcctcataggtgtatatgcataggaaaaaacctcgtactgtataggtaggatttggtactatctgtagtttcagcagccactgggggtcttggaatatatgccctgttgttaagggggaaccactgtagtgtttggtccagcaaaggcactcagtgactgaatgaagtaatacattaatttaggaatagccctgaggttattatgtagtttggtaagaaaagggctgtgaaaccacttttgctcgaagacattgtgatgctatgtctccataatatgaacaagaacagcaatgtaatagcttccatttattgaacattatgatgctttgctcagtaggaatctacaagttgtttgtgatcattcataagcttataattttatcactttggtctgtgggaaaaatgtgcagtggtttat

SEQ ID NO: 126809 - DNA, 460 bp, Homo sapiens
gcacaggagagaagttagggactggggaatttgtcacagcccccaacacccgggacaggtagtgcagtaacacagagcatgcagctggtctgctggaccatgagttccatggaggcaggggctgtgtctccctagtgagttccacggaggcagcggctgggtctttctagagagttccatggaggcagcaactttctagtgagttccatgggggcagaggctgcatctttttagtgagttccacgggggcagaggctgcgactttccagtgagttccacggggtcagggacagcgtctttctagtgagtttcacggaggcaggggctgcgtctttctagtgagttccacggaggcaggggctgcgtctttctagtgagttccaagggggcaggggctgcgtctttctagtgagttccacgggggcaggggctgcgtctttctattgagttccatggaggc

SEQ ID NO: 126810 - DNA, 578 bp, Homo sapiens
ggagaaacccaacaaaaactagccaggtgagcaaggttaacctcaacagtgagaaatcatttgatagtatatattctctatacatacatatttatcacttgatatgataaaaatggcaccttacctctgttgtcttcctcctccaaacccataaccccagtctgatcatgagaaaaacatcagataaatcccagttcagggacatgttatataatacttgaccagtactcaaaactaataaggtaatcaaaaacaggaaaagaatgagaaactatcacagccgagaggagcctaaggcggagacatgtcaactaactgcagtgtggtttcctggatgagagcctggaacagaaagagggcgttaggcaaaaactaaggaaattagaagaaaatatggattttagttaatatatcagtaatagttcattaactataaaaacatgtaccataatatgtaagatataaataggagaaacggagtatggagtatataggaactctctgtactattttcattatttttctacagtctgatactgttctaaaaattaaagtttattataaaaaataatggtcca

SEQ ID NO: 126811 - DNA, 345 bp, Homo sapiens
ctaaaacatagaaagaataaggcaggcatggtcgcacatgcctataactagacagaggcaggagaatggcgtgaacccgggaggcggagcttgcagtgagccgagattgcgccactgcactccagcctgggcgacagaccaagactccgtctcaaaaaaaaaaaacaaaaaaccctgctaaagctaagtgaatttagcaaatcataaaatgtaatatcaagatacaaaaatgtaaatactttaaggacaaattgtttctaggtgttaaagaacagatcattacaactctaaaatcttatcaataaaataaaaagaaactataatactgccttgactatagatgaa

SEQ ID NO: 126812 - DNA, 161 bp, Homo sapiens
gcagtgaactaatacaagatataaaatctactcattgataatataatagggatgttttaaggctgaagaaaaaactcagaattgagaaacctgctatctagtagttctctgttttaccacatttgagttgcctttcagcctataattcatatcctacccac

SEQ ID NO: 126813 - DNA, 722 bp, Homo sapiens
cagtggtctttggacttgtgggctgctcaggtttagaatgatttggtgtcttagcttttccccagcattagccagaattgaacccactacattcaaccagcagctgccactcaacacctgtgctggccctctgccccctgcctgttgtggtcagggagatgtgttctttttcagaaacatctttgtgtttagcagctttagacattcagacaagatattgctagcctggctgctcttggtggattttctttttctctaaggacctgaagaggtcattaggttgaataagagccattactgacttttctggctaaggtactaatcaggatttgaggaggaatctgggtcttccagaaaatcataagtgtagactcctagatccttgagctgcctgtcactgattggctgcgtccttggacaaggccctgaccttctctgagccctaatgctctgtaaacccttcctctccatctgggatcacgaggtggaatgtaaaatgaatgttttttcagcttcgagttttcctatagaaacaagagtttgcactgagttgcaaatgactagtattcctaaaaataaataatcaaggctatgacttgaatagctagaaacagcctagaatagctttctgtttcacttgaggaagctttttacctctttcaaatgcaccaggacatttttgcagtctttattttaattaaagcccatttattttaaaacac

SEQ ID NO: 126814 - DNA, 525 bp, Homo sapiens
tattcccttggtaaatgtgtgtgcctgctttcatcaaactcttgttgttcagcttttgggaacaattaaatgagaatcatgtctaaaaatcagaaataactaataatcttgttacacaaatttttttcttctgtattttttagaaaggaaagctgtatttgctaagaaataatgaattgagcagctagcaatttcactttttactaggaggtagaaaataataaacattttatataagataaaataggaagactgattgcaatgggaatattttgatatgaagtggaaaataattgctccctccaagctcctcaggtttttacaccctggaccatgcatcaagattcagtgtaggggagagacattcctttcttttgtaaagtaggacaaggactatggtgaaagtgggggcagtggtagagtggagaatgtgcatgaatatgtcagctggctcccaaatggattggtttttagaatttttttttttttttttttttgagacggagcctcgctctgtcacccagg

SEQ ID NO: 126815 - DNA, 359 bp, Homo sapiens
ctcctgagcatgcacaaaactcatacatatataaaaatacatttttaatttcattttttaattgatacatattagggaacacattttgggagtacatatgataatctgatacattcatataatcatatccagagagagtctcactttgtcgcccaaactggagtgcagtggcgcaatctcggctcactgcaacctccacctcccaggttcaagcgattctcctgcctcagcctcctgagtagctgggattacaggcacgtgccaccatgcctggctaatttttgtattcttagtagagaccatgtttcaccatgttggccagactggtctcaaactcctgggctcaagcgatccttctg

SEQ ID NO: 126816 - DNA, 407 bp, Homo sapiens
gtgactctaccgatcctatcctacgagcgccacattatttctcatatcctacttttgtgaaggaagacaatacagaaactatcttaaggagttgttcgggacttttaaagctcttacaacactcaacagtagtgctcaagaaatgttagggaacacagtggtgatcaaacataaatgtctttacctagctgtctcctaaaacatgtaaaggaaggccgggtgtggtggctcacacctgtaatcccagcactttgggaggccgaggtgggcagatcacgaggtcaggagatcgagatcatcctggctaacacagtgaaaccccgtctctactaaaaaatacaaaaattagccgggcgtggtgacggttgcctgtagtcccagctactcgggaggctgaggcaggagaa

SEQ ID NO: 126817 - DNA, 579 bp, Homo sapiens
aagcgagacgggaacacaggagtgacacctggggcttcgcccagcatcagggggaggcccactgcgggctctgtggccccagggcctgagtgcgaatcccggcccccttgccgggaaatacttctaaatcctgaaattctatcttgtgggtgtttgttgtttttctgtgagcatttttggatagcttaaagcttacagaaaactgtaacaatactctattggacaaaacagaaaacacgatgcctttcaatgtgaaactgaaggagcagctgagaaagttcactgcctggcagaggagagggaaacatgaaggggcgagaagacgcagctgggggcgctgaaagctgaggggggaaaagcagaattaaacaggttcaccaaatggcacgccatgaagagacagcctggcgttaaaacacctgcacctccccatccgcttcctccctctctaagctcagcacctccagggacagggcacccccccatccacttcatgttcagaaaactcaaagagtcagaaaacgctttcttaggtaaaactgtcatcttccttttggaaacttctagttgttacttcag

SEQ ID NO: 126818 - DNA, 340 bp, Homo sapiens
caaagtatgtcactttgccaaaaccttctagtggctttccagagtagaagccaaggctcttcggtggcctgcaaggctctgcatgagctgacctcccatgatctctcctcctcttgtcctcatgtactctgccccaggtatcctgacattcttgctgtttgccaagcacaccaggcatgctcctgtcctggggtcatttgcactggcatccactttgccccagacaccacatggccaactctctcaccctcttacagtgttcacccaatgatgcctacccaactaccctacttaaaattgcagcctgtggctcctcccttgtccccagcattcctgacca

SEQ ID NO: 126819 - DNA, 314 bp, Homo sapiens
ctcctgcaaagtgggatatttagcagcatttttagtttctactcatgagacaccagtagcactccccaagttgtgacaaccaaaaatgtctccagatattgctaaatgcaaaattgccaggagctaagaatatacttcatttttactcattaaatcccaaatgcatcctatgaaatactgtttctgttatgatcctatttgttccaactttataaataactaaatgtggcttagaatgcattaagtgacctgtttgatttcacagtctactaaagacaggacttcaacagagcctacactctttgtcctaacac

SEQ ID NO: 126820 - DNA, 193 bp, Homo sapiens
cctgagaattttctcatgacgttaattattcatttttgtaagaagcctgcataaataaaagtacaagtaccgggtgtccagtgtggcatttcaggagcttggagaaagaggatagagaaggtgagagctgggggaaaattgagaggtggccagaaagagaggctttggtcatttccagagtcatggagttgca

SEQ ID NO: 126821 - DNA, 493 bp, Homo sapiens
tttctttttcatctttttaaaattgttatcaaattaggtatgggcagaaaatatatacaatgtttgaggaaataatttttaaaggtttcaaatctaacttatcttatttctcttgtgttgcctattctcttttagaagaaccaaaactgtggcaggcctgcgatggctgtggttgaggaaagaggccacacccacagccagcagaaccacactcagcagcagcctagccccacgtggaagaggcgtgaacactctcgggagaggtggatgtacgctaatggttctcagctccgacctctgtgattaacagaacatgctgattggttttatctgaacgtcacacaaaagggtttctatgtccaggaaagactctaaacactctggaccctgctggggcagatggtgaccgtgacccagtgataccactctccagtgggcagcctggtctgcagagggggagatccctggggcagccctacctcagcatgggtga

SEQ ID NO: 126822 - DNA, 363 bp, Homo sapiens
tcaacactggaggtcctgcggggtgggtggtgctggggaggccacacggggagggctgttccctgttcccttcccctcaggagacagctggcccgaggtgacacagcactggatgcgatttcagggccagagaccatggtgcccggggctgtggaccacgccagcccacagccactgcaagccccagaccggggctgtggataacgccagcccacggcagccacacgccccagaccaacacgagaagaacgcaggccgacaacatcttcatctatggtaggtgacccggttatcgttcctaagagagtccacggccacttctactgggttccctatactcttcccctgccccagctggtcccc

SEQ ID NO: 126823 - DNA, 632 bp, Homo sapiens
aggtgacacagcactggatgcgatttcagggccagagaccatggtgcccggggctgtggaccacgccagcccacagccactgcaagccccagaccggggctgtggataacgccagcccacggcagccacacgccccagaccaacacgagaagaacgcaggccgacaacatcttcatctatggagcctggcctgtcccccgtggctccacagcataccgcacatcaaaggcacgattctctccgaagccctcagtggcttcctagtatctgacagaagaaccaaaactgtggcaggcctgcgatggctgtggttgaggaaagaggccacacccacagccagcagaaccacactcagcagcagcctagccccacgtggaagaggcgtgaacactctcgggagaggtggatgtacgctaatggttctcagctccgacctctgtgattaacagaacatgctgattggttttatctgaacgtcacacaaaagggtttctatgtccaggaaagactctaaacactctggaccctgctggggcagatggtgaccgtgacccagtgataccactctccagtgggcagcctggtctgcagagggggagatccctggggcagccctacctcagcatgggtga

SEQ ID NO: 126824 - DNA, 589 bp, Homo sapiens
cactggaatttcctgctttcaacttattgttctggcaacctgtagtctgaaagacagcattgtcttcaggcatcacatgatatccatgagatctgatcatactacacaaattaccctgcactcaggaatctcctacatgatattgctggaataagtgtccatatgaactacagttttgctgatatgaattaattctgcatggtattatttaaaaataaaacatccttaggctgaatccaggttactttcaaattttggctttgagatttcattctgcatagtaatattttttatcatttaataaacattcaacattaacacattagtcctcaaatctaaaaggaaagtagtggaagcctcattttaaataattgaagcagcgaaaactaaaccttatgaaatctcatattgatgaatgtttcagcatgacttaaaaatatgattgtacaaagaatattatagaagcattaatgtaatcaaaagaaagaaaattatcataatcccattctccaaaaaataaaaattattttcatttttctgtgtcttttcatctgttacatacaaatacatattttacaatattgttata

SEQ ID NO: 126825 - DNA, 265 bp, Homo sapiens
gcctggcctcacaaccttttttcaatgagaaaaacattagccttcttttgttacacataagagagttctttctagttgaagagatgtttccctgagtctttctgatgaaaatgatcctcttgctacataaaatccttataggagcaataaaacctgccttcggaaccagctgtaaagcacttattgtccatcatcatctgctggtgaggaccttgctccccggcttgtgattctcaaaccccaacttaggcttgctcccggttaa

SEQ ID NO: 126826 - DNA, 352 bp, Homo sapiens
taagtaatgatatcagacaagtgaggtgtgccacgaataaatctacagtgggaccggcatgttttggattgagtgttgaggtaaggcttccctgaagagacatttgagatctgaatgataagaaagcaactttacaaagataagggggaaaggcctttacagataatgaaactgaggaacagacaggttagtaagatggctgagattacgcagtaagtaaacagaacccaggtctgatgaacaccgagaccaccctttctactaaactatgttctctctttattcagttctcctcaaatgcaacagtgaagataaaagaaaatgtggaccttcccctggcctcacagaaatg

SEQ ID NO: 126827 - DNA, 598 bp, Homo sapiens
caggtggaggtgggaaggcggtggggaggcagggttggggctctgagcaggggcagggccaggcagtcatcccagtctctgtatttgtggctgatttgctctgtagcagcagaacagagacactgtgcttaccatgggaaaaaggaagaagagggaacttaccttcttttctcttacattccactggtgagagttggccccttgggagttaacctctgctcacttcagaggaacatcagccagcacttttaggagctaccagggaagcaaaatgctacgctttgctttgtggtggttcttccaagtctggaaatggtagaaggagccagaacttcaaggtgggaagagacagccaagcaagattctgggtggagtaggcagcttctgaaatctgaaatggttcacagtggtccccacctcctgggtttttgttgttgttgttgagatggagtctcactctgttgtctcggctcactgcaacctccgcctcccagattcaatgaattctcctgcctcagccccctgagcagctgggattgcaggcatgtgtcaccgtgacaggctaattttcatatttttagtagagacggggtttcac

SEQ ID NO: 126828 - DNA, 455 bp, Homo sapiens
ctgagcctcggttctgtagaaactttaagactcaagagctggacagcagcttcgagtcctctggaccggccgcttcacattatggatcaaagcctgagacccagagagggcgctgcagcccctggtgagcgcacacctaggtctcagctctggagcccagcaatccccttcatacaccctagggccagaggccaaggggctaagggcaggctggatctatctgggagctccctccgaaaccctctggttccaacacaggactaagtccccttcctaggactaagctggtcagatgcagtaactgagtctggggtccgagcttcatggtcattgatggtgcccattactttcacataaccagcccaggggcccctcttctccccctcccctttatgtgacaccctaggtcctgatgtgacacagaggaggggaagaggcctccttggcttccatta

SEQ ID NO: 126829 - DNA, 578 bp, Homo sapiens
gtgccacccaactacacatgctggagccagggccggagccacagggggacctcagtgagcgggcccccgaaccacagctctgtggatcacctgaccaccccccaactctgaccctcggcctgtggtgcctttgaatctttaggatttaatcagagctagtaggcagtaagcctgaatgggctggttgtcttcccttctccagtgcgtggtcattggtgcatggccacacgtccgtttccactgtgggagcagggggagggtttacagtgtgcattttctaacaaaatgcacaaggtcctttctccccttcacccaaggagctctgggtctgagaactggttgaggagccatgaatttcttttatgatgattcaagttaggctggtattggtcggcctagggcttttccctttatccagatcaatgagacttccgaaggccgatcgtttgtgccagccctggggataccacagtcctttagtcaacactggcacccctgtgccaacgctggcacccctgtgagtcaggcaatttgagtacacatgagttgtgctgcccgccacctggcaccattggagt

SEQ ID NO: 126830 - DNA, 291 bp, Homo sapiens
gcaagactttgaggcgtttatagatacaaaccttcccctaacgcttccctccgcccctgctacccggtcagctccaagcccctgtcccggtggcccaggatcttctgctaagggtctcattccgtcccgcgctccagtcctggcttggcgtgcctccctcgccttttattgtaggtctggtctcccagggtagcggcctcatcgcattcccttcgcagcgcccctggatccagaaaccgcttttacctgtccgctccggtgcagccagcacgccgaatcccgtcgtacccg

SEQ ID NO: 126831 - DNA, 378 bp, Homo sapiens
cagggatgaggaggagacttttcactgtgcatccttcaataccttttggattctgagccatgtgaatgtgttacctctgaaaaatataaattaacaggctgggcacggtaatttattacgtgcctgtaatcctagtactttgggaggctgagataggcagattgcctgagctcagaagttcgagaccagcctgggcaagatggtgaaacccggtctctactaaaatacaaaaaattagctgggcgtggtggcaggcgcctgtaatcccagctactcaggaggctgaggcatgagaattgcttgaacccaggaggtggaggtggctgtgagccaagatcatgccactgcatgcagcctgggcaacaaagataaactgtc

SEQ ID NO: 126832 - DNA, 324 bp, Homo sapiens
agtattataactctagggaaatataaaaatgcaaatatatcagctgaatgcagtggttcatgcctataatcccagcaccttgggaggccaaggcaggaggttcacttgagcccaggaattcaagaccagcctgggcaacatagtgagacctcgtttctactaaaaataagaaaaattagctggatgtggtggtgcacacttgtggtcccagttactcaggaggcttaggcaggaggatggcttgaacctgggaggtcaaagctgcagtgagccatgactgtgccattgcattccaccctgggtaacagagtgagaccctgtctc

SEQ ID NO: 126833 - DNA, 213 bp, Homo sapiens
gtcttcacaccccgcctcagagatttcacctgccacactcagttcccaggtccctgtcactcccctgcttgcctccctccccttgtcaggagctaccccagtttctaccacccagcccctggcatccttctcacagtgaaacagacagggtggctgaaaatggaaggaagaagccctggcccacaatgcccagcccctctcccagctctgcca

SEQ ID NO: 126834 - DNA, 372 bp, Homo sapiens
tgtgcgtttatccaaaccctgtgcctctgcctctgtaaactcttctccctttaaacaagaagtcaatctaccagactaacacctcatatcaggctttctagcctatatgcatgttggtgtgtgtgtactttaagttataaaaaaaactattttccttattttggtgactgatttggagatctaaaaagacatctgagaactctgtactcacaacaggttctatccagcagtaatgagctaggcttcagcaactattattgtattcagtttgtcccattttatcagtcccaaagaatcacttcagaataacctggaaggaaactatttcagtatatatatgttttcctacaagtagttaagataaggaaggga

SEQ ID NO: 126835 - DNA, 186 bp, Homo sapiens
ggggagttgaggaatgactgctaatgggtttcttttagtgattatgaaaaagctctaaagttaattgtaatgatggttacacacctctgtcaatatactaaaagccattgaactgtactttaaatgggtgaatatgaattttatctcaataaagcagtgcaaaagcgttttggtgcacatgacttt

SEQ ID NO: 126836 - DNA, 525 bp, Homo sapiens
atgagtttatgaatagtagcactagagtggtgtgttttgatgagagaaagattgcagcgagggttccttttctttcttcactggatatcatcttaaacgataagccaaaaaagttgtaagccaataagctaccatttttctttttttttgagatggagtttcgctctttttgtccaaaaagaaaaaaaaaaaaaaaaggaagatatttactttgaaataaacaaaaataaattaaattaaaagtagtaggctatgtagcaggcattattctcaaaattaagaggtatagcacagacaagtatagaatgctcctgtttcatggagctttcattcatactgtcatagtgaaagacagtaaacatataaataattgataattttagatagtgatatgtgatctgaagaaaataagatggaataaaataacaagggactgaaaagtttggcaacaacattaaataaggttgtcaaggaaggcctctctgaagaggagacaatttagctgagccctgaatgatgaaccca

SEQ ID NO: 126837 - DNA, 435 bp, Homo sapiens
caggctgattatactggaactcttccattactgagagggcagaaattcattctcattagaattgacacatattctgggtataaatgccttttctattcataatgattctgccagaacctccacagactcatagaataccttgtccaccatcatggtattccacagagcactgcttctgctcaagaaactcatttcatggtaatgggaatacagcagtgaactcatgtctatagaatgcggatactgcatcatctagaagtggctcccctaacttaaaggcaaaattgcttactgaaaactcatttatgctgcctgtcttagtctgtttgagctccagtaagaaaatactatggactaggtggttataaacaagagaaatttacaatcacagctgggtgtgatggctcaagcctacaatcccaacactgggaggcc

SEQ ID NO: 126838 - DNA, 129 bp, Homo sapiens
ttcctgacctcaagtgatttgcccgccttggcctcccaaagtgctgggattacaggcgtgagcgactgtgcccggccaggttttacctaaacgtaacaaaaattgttaaacttaaggaattgctgacct

SEQ ID NO: 126839 - DNA, 657 bp, Homo sapiens
cagaattgcacttgtacccttcaaatttatacaaaaaaaaaaaaaaggacgaggaggatctctttaggacttttgggagaggggctcacaggggaaattgtgactgaaaacttctgactgattacttctcagttagaagcccatacattcttctgctgcctgattatcatgattccctaggatccctaaattccctactgatctaccccaacactaagtaagtcggtctttccttttgactcagagagagactgaaactaaaagttactgaaggaaaatggatgactacttggtcctggatggagatcatgagcctaagggctgcgctctttgggccatatcctgcttataggatttgcctctggtatggcatgagagacagaccatctgcagggtatctgagggtggtctgaatggagagcatggggggaataaacagatggatctttttatccagagaacacgaggttctcagtatgaacctgtagggcagtatagaatagtattgacagcaaagactttagagtgataaagagccctaacaagtctcttcatgtctctcagacttcaaggataatcacacagacccctcacaccttatttgaaacttttagggacagatattttggaattcagtttttttcagattatagaaaa

SEQ ID NO: 126840 - DNA, 336 bp, Homo sapiens
gagaatggtgccatcttgtggacatgagagagcagcgccgcacgtcccacaccccatgcaaaggaaaatataaacacgtctcttctcgttggtgcacttactagcagaccatgatttccattagctacaactactgaaccatttgttatctattaaaattgccctaagaattattagatcatgcatctgtcttctagctcatcttcttgtgtttgggaaatgagttcttttggtagacattcatgtattattccagaccacataccttgtaacaacagtggaagctgattcatgttcactttaaaaaacatgaagtctgcacaatttaaacactct

SEQ ID NO: 126841 - DNA, 664 bp, Homo sapiens
gaatccaccctggcacccactaccaccacctcattcacaacttccacaactatggaaccaccttcaaccactgcagcaactacaggaacaggtcagaccaccttcaccagctctacagccacattgcctggagccaccgcgcctggccaggagtcttctttcttaggccacatccataaaacaagcaagagactaacgtattagtttgtaagtagggtaaagtcaaatctcagacctaaccatttgcaagtggtaattttctattaattttttcttttatatatttttaagagatagagtctcactctggtgcccaggctggagtgcagtggcgcaatcactgcttactgcaacctcgaccttctgggctcaagtgatccaccatcatgcctggctaatttttttgcagagacaagttctctgaaaagctatgttgctcaggctggtcttgaactcctggcctcaagtgatcctcccactttggcctaccaaattgctaggattacaggagtgagccactgcacctggccaattttctgctttcatcattcattatacatttattggttgaaattctgctgtaaggaagaactttcccttctcctccatgaatgactgactgaatgaatgaatttgtatcagtatggattcaagaattctattt

SEQ ID NO: 126842 - DNA, 200 bp, Homo sapiens
aagccatgttcattcccacctcacagcctatctcaacagcgtcagcctccagtcctggtgactgatccctgcccacaactcccttctctgactccaacagaactatttctgcacctcgcactttgacagttaccattccctctcttggcgtctgatttcacatgctgacatccttctgtcccctctatgagggcagaagc

SEQ ID NO: 126843 - DNA, 231 bp, Homo sapiens
tatgttagaatcctatttagatagatggagccaattgagcgggccctgcagaaagccatattcagttagtgtaaatcttcctgctggtgttggagacagcaaggtcccctgggattctgtctggaaatcttattggattttcaagacttaagttaatatagagaccccccaagatagtatagggcctcatttctttgccttgaaagatgtttttagaggtctgtctcaaga

SEQ ID NO: 126844 - DNA, 631 bp, Homo sapiens
cgcagtgactcacgcctgtaatcccagcactttgtgaggctgaggcgagcggatcacaaggtcaggagatggagaccatcctggctaacacggtgaaaccctgtctctactaaaaatacaaaaaaattagctgggcatggtggcaggcacctgtagtcccagctacccgggaggctgaggcagaagaatggcatgatcctgagagacggagcttgcagtgagccgaaattgtgccactgcactccagtgtgggcaacagagcgagactccatctcaaaaaaaaaaaagcaaatgaccacagagacagtctcagagaggcaatgggagtcctgggagcaggttattaggaagcgtaaaggtctcagcttccatgcgtcgtgggatgggagactcgggagttatgtgcagtggagagacagaatctaataggctgtcactggttgatctttagagagaatacatagtctctaaatactttcctttatttactataaaagggaaaagagtaagtcaacaacagagaaagcttcagtctccacctaatcaaggggtcaaggtgaccatgaccttggatgggacaagccatggtcagcgccacctgtgattcagagatgagaatatgcattaccac

SEQ ID NO: 126845 - DNA, 367 bp, Homo sapiens
aaatgtccaggatcgggaaatttatagaaacagaaagtagattagtgattgctgggggtactggggtgtgacagctggagtatgaggtttcttttttctttaatgagatcaaaatcatataacataaaatttattattttacccattttaaaatatacagttcagtggtttttattacatttgaaatgttcaaccattactactatctcagaacatgagccgggtgtggtggcacgtgcctataatctcagctactcgggaggctgaggcaggagaatcgcttgaacctgggaggtggaggttgcagtgagccaagatcgtgccactgcactccagcctcctgggcaacagagcaagactccatctc

SEQ ID NO: 126846 - DNA, 266 bp, Homo sapiens
gatgagtctgtatacatacataaattaaaataaatgttgagatcctaagtaaaaaatagcttacactatagcataaactggcaataaaacctatcattttgtaatctctatctttatccataatggaaaataaacaaatctatgaccttaaccatttatatgacctcccacaatacgtttttgaagatcatcaaaagatgcaataagagacctttcttgcagagataagttgctaatcttaataagtgttcccagaaagagaatac

SEQ ID NO: 126847 - DNA, 227 bp, Homo sapiens
tgcaggtataaatgtggagagatgtcctatggagcccacctttgccaccctaaataaatatgtcaacatataggaaagtaaaactgagagaaaaagacatatttctgaaatggttatttgaacactagctctatcgtgcacaattcttttatgagaatgaacaaatttctctttaggcttaaaccaacttgagttagtttgctgtttcttgcatccccagattttat

SEQ ID NO: 126848 - DNA, 734 bp, Homo sapiens
caccagcacccagcatagaatggtcagggccccacacaacccagggagtggagggcaatgaccagcacttaatgtatgttttaaaacttccagtgttttgtgtgaggcaggcttttcaagagtagacttttcccagaggaagaaaaggcgagcttccagctacaacaaaccgtatcctaggaatctcgattcacacgaaacgacaatgaagaatggaaagtctggtgttttaaacaaatggacagatataaagtgagcatagctttagtcattacgcccagcctcctgaattgagacggacaagaataaacctgacttcccccacaaataaatctgcagacgtcacttattcattctcggatgttctattgctcacgatcttcgtcgagtggagagaagttaggctctcacgttaatccagttctaactcatgagtcaaactgagactgcaacaaaagaacgccccttttttcttttacatgattttccctttcccctgagtatacttcctgaaccaagaagaaaacaatcaacaggaggggagactggacttctccttcccgagggaaaaaggctgcatgggaaaaacacatcccagcgggaaggggtgctccaacggagctgagcgtgactcagagactgggggctggctctttggaaaggtcggctcccaaagagttccagagcagcctggttccacaacacgcttttaaaaagtgccctgtgaaaagtca

SEQ ID NO: 126849 - DNA, 599 bp, Homo sapiens
tgtggtggcgcacacctgtagtcccagctactcaggaggctgaggtgggagaatcgcctgaacctgggaggtgaaggttgcagtgagctgagatcacaccactgcactccagtctgggtgacaaagtgagaccctgtctcaaaacaaaaacaaacaaaaaaacccaatgaagtctttagttctttccctgtcttactatcaccactatttcagacattatttcatgtctgtgcattactgtaagtcttctggctgatccctttttctcaatccaaaacatcctgtctaatatcaccaaactaattttaaaagtaccatccttctggccaggcgcagtggctcacgtctgtaaacccagcactttgggaggccaaggtgggcagatcacaaagtcaggagttcgagatcagcctggccaatatggtgaaaccccatctctactaaaaatacaaaaattcaccgcgtgtggtggcgcacacctgtagtcccagctacttgggaggctgagacaggagaattgcttgaacccaggaggtggaggttgcagtgagctgagatcgagccactgcattcctgcctgggcgacagagcgagattct

SEQ ID NO: 126850 - DNA, 444 bp, Homo sapiens
gcgaaacagttttcaaaacagaaagatggaagtgacattatcaaattaagtgcacactgaaaacttttatgacaattgtatcgagggggtacatgtatttttcaatagatattgattggctgctatagtaaggatttttgctgggctctgagaatcattttctaagtttgaggatgctaactaaatcatacgtaagttgtatgtgataaatatggggcagaaataggtatgcactctaaaagtagtaatagcttctggtttaaagaagtgggagatcataacaagttggaatatctggaaatatttaagaaaatgctttagcatgaagtattattttgactatcatttcagagaatgaggatgaatagagaataagtgagtagggtagaaagggacaaggtaagagggccaagaggcagaattaaaattaagtcaggggaataa

SEQ ID NO: 126851 - DNA, 881 bp, Homo sapiens
ttaaaatatttaaaactttattttgaaataatttcaaaatcacagcagtttgaagggtacaacaaagaacattttgccacattttctctttcattcgttccctcctcttctccctcacccctgtttcttcctatcctctctgaaccatgaaccatttgaggattatttgtatacatcatgctcgtttatccgtaagatgttttagtgaacatttcccaagaacagggacagcctctcacatgcccatggtacagttctcaaattcaggaaatgtgtaatattctctgatcagcccaggagttgctaatttgtagttcctgtttcaaatttgccaactgtcccaataatgattttgaaagccgttgtttttctggtccaggatccaatccaggatcaagcgctgcctttagttgtcctctctgcagcctcctttcgtttggagcaggtcctcagcctttctgtctttcatgacattgatgtttgtgaagagtacagtccagtttctgttgtagaacgtccttgaagttggtcccggaatatttgtttaaagatggaaaccggtgaattgtaatctcacataaccgagcaagatctagtagtcataagcactttgtcagagcaaagcagacaaggcaaagtgttggaaatgtcatcggatcttcacagaaccttagccaagcagcctttcaatgcgagaaacaaaataacatggatttttatctagtaatgaagtcaacaccattgtccaccctgggttaacacattcacatctcaaagcgaatggggctgcagacactcatgttagagagccttggaatgtcctgcctttttacgtttaattaaaattaaataaaatatacaaaattcaaagaacaaaaatt

SEQ ID NO: 126852 - DNA, 1582 bp, Homo sapiens
ttaaaatatttaaaactttattttgaaataatttcaaaatcacagcagtttgaagggtacaacaaagaacattttgccacattttctctttcattcgttccctcctcttctccctcacccctgtttcttcctatcctctctgaaccatgaaccatttgaggattatttgtatacatcatgctcgtttatccgtaagatgttttagtgaacatttcccaagaacagggacagcctctcacatgcccatggtacagttctcaaattcaggaaatgtgtaatattctctgatcagcccaggagttgctaatttgtagttcctgtttcaaatttgccaactgtcccaataatgattttgaaagccgttgtttttctggtccaggatccaatccaggatcaagcgctgcctttagttgtcctctctgcagcctcctttcgtttggagcaggtcctcagcctttctgtctttcatgacattgatgtttgtgaagagtacagtccagtttctgttgtagaacgtccttgaagttggtcccggaatatttgtttaaagtgagttgggaaaccacattcacatgtcttttggttatgtgtgtatttgtcaaacagccagccttgtgctgcgtgctgtgatggggagcattactcaacagagcctggccctgaccttggggatgtagtttgggtttgtggggaaagcagctaccgccaggtgggctttacggacccctgtgtgtctcatgactagaggcactgacgcttggataaatacatactggatggatgcaggatgagtccgcattctagaagtgtgcagaggtacagaagtggccctgctccctgtccagcacccagtcatcagctttccctggcttcccgaggcaccctgacgttcacactccaaacacaaagtcttctctcaggaatctcgagtgagctgcagtctgggttctagccctgccctagcagggattctgctcagtgactgggctgctctcttcctgctttaggccaatgcgggggagaggagaccactgtgactctccccagtgcccttggagcgcagaatgaagtgaggggaggaggagggtcacgagccctggagcgctgggaagacaggctgtaggccgcaggccccgatcctgcctgggacgaggttcaacagaagtaggatggtttcatcatgacctggcaggaaaaccaccagacctggaattttgcttttacaactgtttaacttctgtttcatacaggatggaaaccggtgaattgtaatctcacataaccgagcaagatctagtagtcataagcactttgtcagagcaaagcagacaaggcaaagtgttggaaatgtcatcggatcttcacagaaccttagccaagcagcctttcaatgcgagaaacaaaataacatggatttttatctagtaatgaagtcaacaccattgtccaccctgggttaacacattcacatctcaaagcgaatggggctgcagacactcatgttagagagccttggaatgtcctgcctttttacgtttaattaaaattaaataaaatatacaaaattcaaagaacaaaaatt

SEQ ID NO: 126853 - DNA, 445 bp, Homo sapiens
acttgtgaatcctgtatgtgtgggtatgaatttggcctggaggatgagccctgtttaaagaaaatcaaataacgcttgcccagctggaaaaatccatgacttctgtgctaataattttttccacggatcaccccatttaatcctacggcagcagagtaaggcaggcaacgtccctatggaggaaacaagctcagagatgctgcctgatttattcaagctcacagtcatagggggcaaagtcggactgaaattcttacacacttgcaccttgctacagttttaacttttgggaaaatgctttggggtgcagagccgcaggttccattggaccagcgccccccaatcagtgctgtgcctctgagcagcttggcgtggggcacagcccccaggcgagtggccctggggtttctgcatcatctgacagaagtgccgcagcggctccagg

SEQ ID NO: 126854 - DNA, 256 bp, Homo sapiens
gactcctgatgcagagagcttacatctttgcattcttcctccttggtgtattagcctgagttgcctgtctccagctggatttagaagcttgactaaccctgtcaggggccaattttctttgaacatttatttgtatctttgagtaattgtattttctgtagcgggttttctgacttaatttaattgtatttctgtttctgcctgttgggctggctcttgcatgcaggagttaggatctcagctgctgtggtgccct

SEQ ID NO: 126855 - DNA, 202 bp, Homo sapiens
tataagcttaaacatttttaaaattggtctcagtaacatatattaagctgaagtggggaatagtctctgaacattagaaacattagaaagttatggcttgtttctaatatgcaagttagacagaaaatacaagctccataatcttatattgcggaagcaacatttgttttaagtcctggaatccacggcctccatttcctca

SEQ ID NO: 126856 - DNA, 385 bp, Homo sapiens
tatgggggatagccgagtaaaatacttgaattctaccaatatcaacatcttggttgtgatattacactacagttttaaaaaatattaccactggggtaactgataaaagtatgcaagatgtttatctgtactgtttcttataatgacatgcaaatcaacctacagttcaatcagtatttcaaaaaccccaaaaccagcaaggcacagtagctcacaactgtaatccagcactttgggaggccgaggtgggaggatcatttaagcctaggagtttgagaccagcctggacaacatggcgaaaccccgactctactaaaaatatgaaacttagcctgtagtcccagctactcaggagactgaggcaggagaattgcttgttccgctg

SEQ ID NO: 126857 - DNA, 349 bp, Homo sapiens
taggaactcctcttataggtcattttattttgttatttttttacttcttcatgttttagtctacctttcagaatatcttattttgatagtcaaggaaaatgttaagaaccaggtttaagagggactgtagaaagggcatttttatatttaaaaatgaggggatcaaggtaattataaaagacattattatttacttgctaattttattataaaattcactcattctactttgcaaatacttatatcctctaagcaaacaagaaaataaaaattccatatgctgacttttgaattcatatttgaaataactcttacttcttagggggaggagggaacagtgatagagttg

SEQ ID NO: 126858 - DNA, 408 bp, Homo sapiens
tttttgcattagactctccatgggctccatagactctcctgtaccttacgactaggcacaggagcgtttccccggtgaaatggagaagaggacacttggtcttttcaactttactaggagggctcctttcttcccagtccaaacatatgaagctcatttctgccacccttcctagaaaactggttcctgacagagacatgtggaaaggttactacatgaagagctgggactggaatacaggttttctatgttcacctggggatagcttttccatcatccctcctgagtctgtgaggtatcccagtttttaagccagaactttgaaaccagaagtaaatggttaagtttatctgtctatgcctatgtgtattctagccaaataaaccatgacacttaaaacaatttcaa

SEQ ID NO: 126859 - DNA, 414 bp, Homo sapiens
atgctgatgcacatgggggaaagcgcttcttatagagccatcagatctcaggaaaactcactatcaagagaacagcatggaggtaccgctccatgattcagttgcctcccactgctgtagtagttcatcacatgtgttattgtaacacatgtagttacagtaactacaattcaaggtgagatctgggtggggatatagccaaatcatatcacctatatatgagatgggttttttatatatatacatatcaatgataaagtttaatttataaattaggcaatgtaagagattaacaataagtaataagtaattattagaaaagcattattaagtaaaataagggttatctgaacataagcactgccataccacaacagcagatctgataattgagccgcctgactaatgggtgag

SEQ ID NO: 126860 - DNA, 482 bp, Homo sapiens
tcccacacagaaaacaagaaaaacaaattattcccaaattcatcttgcctcaagaagaaactgctgaaacgtccccaaggtgattttaaaaggcacctcttctctcaaattattcaggagcaaatttggttttaagaaacaactaacttctacagcccataagagatcaaatgtactaagtgaatatactgttacttaatttaagcaccagaaaatcccaaacatacaccaaactgaatgaggtacattctatagaacagcttggaacacaggacaggatttaccattccaaaaggaagagtccctcccagtcactgaacttctaacgcacacattccagagaaccaattgcaccacatacaataagaaaaacctttgaaactgggccaatgtaccaagcacagcttcagccagaacaaatgctcagcatttagacttgctaaccagcagcaaaaagcaacaggaaaaggcttacacttgga

SEQ ID NO: 126861 - DNA, 529 bp, Homo sapiens
cccagagtgctaggattataggcatgagccaccgcacccggcccgagtagagcttctgaatacaagggaccccatagttgtatgaggcaatacagattgagtatcccttctttgaaatgcttggggtcagaagtatttaggattttggtttaaaaaattttttaaaaaccatttgcattatacttacttgcttaatatacacctcaaattccaaaattcaaactccgaaatgctacaatgagcatttcctttaaacattggcattcaaaaagttttagattttgtagcgtttggtattcagattctcagatttgggatgctcaacctgtaatagcaacctaagataggaaaattggtttaattgtcaagtaaacatttaccctacttgacatttgttttagaggtcagtcactgcttcatgtgcttgttaaaggtaattactatgcatggtgtttttgtctataagtacatgtattatcttagactgtgatatactagtataaaaattgcatgcctgtttgctttgata

SEQ ID NO: 126862 - DNA, 528 bp, Homo sapiens
ctatgatcacaccactacactccagcctgggtgacagcataagaccctgttttaaaaagaaaaaaaaaaaaaaagttcaagatagcatggtttgattacaaaattttggtatgctgagatagtaatacttgctcaataaaaccagatgaattgattaactggaacaacctcatgcctctaaatacgtctccttcccatagcaatagaagaatttgcaggtaaatctagaaagggggaaaatcataaagggcccaacagaaatatcagaattgatacaaatagtttctgccattcttaaaatgaataagtgaagggagaatgccagttagtactggtcaatatactcaatatatagacacacacttttctgtgtctgatgaatgtcattactaaaattttaattagaatacaagcccccccaatgcatcccaaatagatttgtgtgctaatggggtcagaaggtgctagacaaagaataagcacagtagttttcaactgggggtgagtcttcccctactcccccagggt

SEQ ID NO: 126863 - DNA, 561 bp, Homo sapiens
accttactaattttacttcttctttttttttattaatagagacaggatctcactctgtcacccaggctggagtacaggggcacaatcacaacacactacaaaagccttaacttccggggctcaaggagtcctctcaccttagcccctcggatagctgggactacaggcacccgccaccacactgggctaatcgtttttttgtatttttagtagagacggggtttcaccgtgttggccaggatggtctcgatctcttgacctcgtgatccgcctgcctcggcctcccaaagtgctgggattataggcgtgagccactgcacccggccaaaaaattttaatctcatatatgaaagctagtctgcttagtatcttacaaagcagtgagagaaaaagatgtgctactgagtaataaaatgatcaaaggcaaagagtacctacagtcttttatttatataaagtcaaagaacaagcaaaattaagtcaaaaattgactgccatgaggcaaggcagttgattggaaaagagcatgagtaaactttctggagtgagaaatgttctgta

SEQ ID NO: 126864 - DNA, 662 bp, Homo sapiens
acttcctctcctcccacctcccttccttccttcctttctttctttcgcttttgagacgaggtcctactctgtcaccgaggctggagtgatgtgatcgcagctcactgcagcctcgacttcctgggatcaagcaatcctcctgcctcagcctcctgagtatgctgggattatatgcatgagccaccatgcccagctaatttttgtattttctgtagagatgaggtttttccatgttgcccaggcttctatctgtttttcacagcagctataccacttttcattttacattcccatcagaaattctctacatccttgccaattctcctcctcctctttcttctctttttcttcttctttctccttctttttttgataatagccatcctcttgggtatgaagtgaaaatccactgtgctttttatcttttaagggggaagtcaaggcctgagaaacactgatacgtgcctctgcattgcagagccccttgggcccaggctttctagccccatcctggcttccattctctgtcctaaacccctttgtctccagtccatcaagagagggcaggggcgaggtccactgactgttaggggccctgccttccctcctgtcacagcagcagagtggctgtgacctggcagaggtgttgggagggtggatgt

SEQ ID NO: 126865 - DNA, 583 bp, Homo sapiens
tagagatggggtttcaccatgttggccaggctggactcgaactcctgaccttgtgatccacccacctcagactcccaaagtgctgggattatatgcatgagccaccatgcccagctaatttttgtattttctgtagagatgaggtttttccatgttgcccaggcttctatctgtttttcacagcagctataccacttttcattttacattcccatcagaaattctctacatccttgccaattctcctcctcctctttcttctctttttcttcttctttctccttctttttttgataatagccatcctcttgggtatgaagtgaaaatccactgtgctttttatcttttaagggggaagtcaaggcctgagaaacactgatacgtgcctctgcattgcagagccccttgggcccaggctttctagccccatcctggcttccattctctgtcctaaacccctttgtctccagtccatcaagagagggcaggggcgaggtccactgactgttaggggccctgccttccctcctgtcacagcagcagagtggctgtgacctggcagaggtgttgggagggtggatgt

SEQ ID NO: 126866 - DNA, 339 bp, Homo sapiens
agagacagagaccagagtctgactggtaagaaattcttacctttttgctggcatgtcaggcttctgagttctttctccctgagtggccctagtggccctgcttaactgtatgcagacaaacacattgctgtgaattaagaatattcacaaatagtttacaaattttggaaaaattaggcagagagagaaatatgactcaaattctatttatgaaagtatgctcaacacacttaacatatcaggaagcttaactccaaaaagctagtttaagattaaaaagccggtgtgttccattaattcctgaaagcctgacaaaggtagcctaggaatttcagctaa

SEQ ID NO: 126867 - DNA, 596 bp, Homo sapiens
ttctccacttggatgcccacaagtatctcacatttaacacgtgtaaggtgcaagtccatgccctttcccaactccctcagtttctccccaggcagtataaatgctccatcatccatctagctgctcaagtggctgacgtaggagacaactttgatcttccctttccctcagcctccacatccagtccattagcaggtgctgttgatcccaggtccaaacagagccacaagctgcaggtttctgtgcaggtctctccgtctccattgccacacatcagtcatgtctccaacccctttcatgaagactgttgcaacagtcctgtttactgtcaccattagataccttcaatacaaccatcccacagttgccaaggggatcttgttaaaatgtaaatctggccaggcgcagtggctcacgcctgtaatcctagctctttaggaggccaaggtgggtggatcacgtcaagagatcaagaccatcctggccaacatggtgaaaccccatctctactaaaaatacaaaaattagctgggcgtggtggcacacgcctgtagtcccaactactagggaagctgaggcaggagaatctcttgaac

SEQ ID NO: 126868 - DNA, 334 bp, Homo sapiens
gtagctgggattacaggcgcccgcccctatgcctggctaattttcgtatttttagtagagccggggtttcaccatgttggtcaggttggtctcgaactcctgagctcgtgatctgcccgcttcggcccctcaaagtgctgggattacagtcatgagccactgcgcccagcccctaatttttcttaactgtaagagggagcagtccttaccttacaaggatgttacgaggatttaaaaaaaggcaaagaccacaatccacttcagaatcccttggggccacatgtgttttggtatttaaaattatttggatttcagaaaggcaatacagtgcata

SEQ ID NO: 126869 - DNA, 190 bp, Homo sapiens
ccaagcgccaccaaagcgggtgatccagatgcgctgtggctttgcgggcggtgtgggtcaccagagaaagaggaccaggcggagaaggcttaatccgggggatgagacacaggggagccgaccagaggagggggacccagaacggaaggagagtcaggctgggaaacaaggtaggagaagagggtctgtc

SEQ ID NO: 126870 - DNA, 102 bp, Homo sapiens
aggacccctgctgtgccagtactagcctttaagtttctaggtcaaggggaggtccaggatcccagaggagcagcccaagtggccaaggaaatttcagggagc

SEQ ID NO: 126871 - DNA, 670 bp, Homo sapiens
ttaccgaaatgcttaattaacagtttaccagcatcaagagtgtaggtgggcaagaaacttgtatcagaattcacttctgttcaagccaggaggtgagtgacattcataaatccgtcaaatacctggccttgcatccaaggactattcattttccttaagtgtttaagtggttctttgagaggatgtgttgactttatcaattcaggccacatcataattagctaatttaaagaaaaaacaggggtggtatctatatatgtttgtaccaaattgagttttaatataatcctggttctctgagggtgatatggctaataattaagttatccccattaggttatactttcggaagctgctgttgcctgctgcctattccattaaaaactaactttatcactaattttaacatgaaacagatccatttggagaaaaatccattatgaatgagacagagttggctgttgaataacattggtgtaggctcaagtctggaataaatgtgatatagatgggacgatattggacaaatgcaatttatttcattattcagcaacaaggtattccaaatgtctctgctaatgaatacatgaaaacagattacatataatgtgcacactgtgagtcgcatttgcagaattatttttgccacctctagcactatctgaaacca

SEQ ID NO: 126872 - DNA, 124 bp, Homo sapiens
cttaaaatactcctgagcctcagtgatgaaatcagaatgttaaattatggtggtttaaaagtccctctatgagatacatagaaagacaaattgtcctagacaccttagtaaattgtctgatcta

SEQ ID NO: 126873 - DNA, 532 bp, Homo sapiens
ctaatcctagaagaactccattggcctcccttgggccatgcactcccactgtcttgagcagctggcaggaaaataaatcaataaaaaccatgaattggtaccactataaattcatgcctccaattttaaccaggccctcaacatttcccaaaaaccgtgttttcctctaattaacttactttcccatgagacaatttgaaacattttctactgtattcaaatttcagacatccctttcttttctcttccttccagtaaatgactctgccttctaataaaagagaaaatgtaagacagtagaggaaaaaccacctcaagttctcaccactaaatctacaaaccccggtatataaagcacaattttctcctcctctcttacctgatgggaggaacagtgccactttcaatgctttagagctcatgtcctttcactttttcaggaacctgtccaatttactctctcttccacatcctcagcctcactctttttaccagcatctccctaccagcatgtaaacaatgtagatcctct

SEQ ID NO: 126874 - DNA, 413 bp, Homo sapiens
catccctgcagccgcccttcatccccagtggacctgctgttcttcaaagtgtacaggctgccagtgtggacctgcaaagatgcagtcagtactgctgggttgatctggggagcccctgggtttactgcctgcctggcatcccaggttcagactttcagactctggtagtcaacgtggagcattacccctcttccttcatctagcttcctcttcctgacacccacacacttggccattctacatttgaaatgtctgctgtcgttcttggagcctctgttttcctacctgtaaaatggggtgattggactaaatgcttcttgttgatctaagaccgttggcataaagaaatgaatatgaggcagggtgcggtggctcatgcctgtaattctaggactttgggaggccaaggcggg

SEQ ID NO: 126875 - DNA, 99 bp, Homo sapiens
gaagttttgcagtcctaactcattatctgtgggattagcgacacactgggaaggcaatagccaatacctacagaaggcagagggtaaattgagcttgca

SEQ ID NO: 126876 - DNA, 627 bp, Homo sapiens
tcctgggttcacagctgctaataacttgctttgggacctggaaaaagaatcatttctcttcccacgggttggctttcacagctggaatagaaagggtaattagactgttgtctggataaggcaggaaagaaaattggagccgtgctctccttagcccaataatctaaacacaaaatatgatattggctcaaatgatttgaaaaactcctccaaatttttattttgtgtgtatgttggagacttgattgaacagacaaagtggtcgtcaaagaaaaattgtcaaagcaaaacaaataaaaatgcctgtgaggggataaaacagtgaaaataattggccgagagaagttccaagttagtaagtttctcagagaaagcgagaagagaacgccaagttgtcttggctctgtaatattagttataatataaatttgactaaatttctataagatgttaaatatcactgaaacgtcttaatggagttaatgaggtgataagatagggtacaaaaatgccagctaggtcacacatgaaaagttcatcatcaaagtaggcaaaatataattatattcattctctagcctaggtaatcaattcattagaatcaggtgcctctgaacacaggtgcaa

SEQ ID NO: 126877 - DNA, 787 bp, Homo sapiens
catttcacacaggggcaggacagacccagtgtggagcttccgggtgcccagagtattatgtctcctagctatgatgtgtgacaacaccatggggtatcccccatcagtgacaagcaccaaacccagagtgtccagagatgttatggggtacaggtcacatagacatgactgagcccccatgtgcctaaccttagtctctagcccctccagagtcaagctgatgccacacggcccaaggtgccacactaagtcacatggtcagcatagatcctctctaggaggattttaaaagttgtttacatcctacattcattagggaagacctgggtgttcacctctgtatgactctgctcctttaggaaaccttccgtgacatatttcatgagagctattcatttctgccagcactctgtgctggaaaagcccatccagcctgcacatcccgcacatgtaccttggaacttaaaattttaaaaaaaagaaagcataagaaaaaaagaatgagaagtgaagtgggtgaataaggatgggggagaggtaggatttttgcagagggactagttggtgcaaagacaggcaagagaaacaaacagaaagggagtacttggaaatgggcagatgacacaacaatgggatgcttttctccagaaaataaaatggaaacctgaatttgacccctgtatagaccctaccatcatctaccaaatggcaccactgacatggtatagaatcatccaacagcttactgtttattctggaagaaatgagcatgacttctatttcccct

SEQ ID NO: 126878 - DNA, 1067 bp, Homo sapiens
  misc_feature (660)..(660): n is a, c, g, or t
  misc_feature (662)..(663): n is a, c, g, or t
acagttctaggcacctgaaacttcttcttttgcttgtagtaaatatggtgtctttctcaggactctgccctttgtttatttatatatctggtctggtttttgttttctagagatagttctctactctccatagtgtctgctttctcattgcctgagtttgtacatggcttgccatagcttctctaggcccaattttaggccatcagtagatttaaaaatttttttttctcttgacaccaattaccttagttgcaatttcccatttataattgcaacttgagcctacaaatttacaaatacaatgaggtaactttccactgtggttaaatattatagattattggctgctggtaaacccatgaattgcctgcctttggattagatattcagaccaggtccatttaacaattcagacatttttttaaacaatacttttttgagagtcttccatgtgccaggccctaatcaaagctcttgagatacattgatgaccaaaaagaagcattatccccattcttactccttataatctagggtccaggacaggggagatatgcactgtattaatgaaataatctgtactgaatgtaaaattccaaactgaagcattttatatgaaggaaacattctactaagaatggaagcccagaacgttccagntnnctacacatgctcctggaattttatgggaaaataaaaagtctgtcagaatggatcttttgagaagattccagaagtatgttggccaataagagaaaatgagcaagtggatgccagaagccatttcttccattgttgtgctcagtttgcagtgatactactgcagagcttgaaaggcaagtactggcttctcttcctcttgttcttccacccagaaaaaccatccttatcctcatattcctcctcccctccttctcctgcctcctccgtctcactgaatcaaggtgccaagggcaccaggaccatccatactcccagcctcaccagctacaaggcacaaaatggaagttcaagcaaagccaccccatccacagcaaaagaaaccttttaaaggtcaaatcctatta

SEQ ID NO: 126879 - DNA, 420 bp, Homo sapiens
agaaatgactcagcctgagcactcagatgcaacttccacgttttatggactgaaggtgctttcataacagctggtgatgatgagccagaggcgggctataaacagagcggtgatctggtcctgaacactcaggtctcagcccccacccacaagcagggcctctgaggctgtggcttctccacactggtgctgctttgtgctggcaaatagcacaggcccccaaaatgacctggaggctccttaactgaggaggcagatgagtgacagggccagacctgcagcctcaagggcctggctgtgccctccctagctcccttgggcctgggagccttccatgaacctgtggcctgggaccaagagcatggggggcctagtgatgtgcctggtggggagcggggagtgctgccagcaatgacagtc

SEQ ID NO: 126880 - DNA, 283 bp, Homo sapiens
ttttctaactttaaagggaggaaaagcaaaacaaaaacaagaaccttgatgatgaagcatctgtcatgacatacagagccagaaaaaagtgcaatgtttctctttgagaaccacagctatgagaggagtgtggcttctggggcagtgtaggagaggtacaatcctgaaacttcaaactctttcttcactgtcaaggctaaaataccatgggtgtgtgggcaggtgcatgctggtagatatatatcatttcctggagggcctgctatcactggaatatagagtt

SEQ ID NO: 126881 - DNA, 426 bp, Homo sapiens
ggcagctcaggtttgggggtatctgcacaaggatggctgaggtcaagggccactcgtgaagatcttgccactcaacgtggcccatggagcacagcatgggcatggtcacctgggtgcttgttaggaatgcaggctcccaggcccccagaacctactgaatgagagcctgcctgctggcaagacccccagggactggaacacatggcaaagccggggaagccctgcaccttggagtgtttcagagtcttctccagaatgtgaggggaacactggtgcacccgggatgagccagaggacccatagaggtgcgtcactcactggacacccttcaccatcatcatcatcccacgcagacatggtgcctcgttctgtgggtctggggaaggctgatgtctcagctcaggctgctgaaacaaacacaatcga

SEQ ID NO: 126882 - DNA, 537 bp, Homo sapiens
cactatgttgcccaggctggtctcaaactcctagcctcaagtgattctctctcgcctcagtgtgccaaagtgctaggattacaggtgtgagccacaacacttaaatgcactttttacttaatgatattttcaatttatcatgagtttactgggacataactccattgttaagtcaaggagcatctgtagttctccaactatgtcttgttggtagacatttaagacattaccaattttttgctactacaaacaattctgtggatgtcttcatgtgtacatgtgtagaagtttctccagatcaatggcttttgtatatttttttcttaccatggctcagacttagaaatatgctttagatcataaccccatacacataaaattgaaacaaatctcatgaagaaaaaacacttaatgatgctacatgcaattgcgccagttaccaatttattgcccctcaaaactaaactcacctttctttgccctggttagtaatacctgagttggggcctgtgatggttactattatgtgtcaacttg

SEQ ID NO: 126883 - DNA, 255 bp, Homo sapiens
cctagacatgtcctagtgctgagctgggcttggagccagtggacttgggggcacgctacctactgagacacaaatggaggtggctaagggagtgcttgtactaccccttccccaaccccagggaacgcagctcctgactccaaaagagacccttccttcctcttggggagaggagggagaagagtaaagaggactttgtcttgcattgaagtcctctttgatgagtggggattcctagctcccagaaaccatttt

SEQ ID NO: 126884 - DNA, 368 bp, Homo sapiens
ttttttttaaaaatatgtgatactggtgcttgacaaaatacagatttaactggagaactatagagctgtggctagagacctaagagggactttgaaaattaccaggcgatggccgggcgcagtggctcacacctgtaatcccagaactttgagaggccgaggtggatggatcacctgaggtcaggagttccagaccagcctgacaacatggagaaactccgtctctacaggcacatgcctgtaatcccagctacttggcaggctgaggcaggagaatcgtttgaacccaggaggcggaggttgcggtgagccgaggagatggcaccattgcactccagcctgggcaacaagagcgaaactcttgactc

SEQ ID NO: 126885 - DNA, 589 bp, Homo sapiens
ggcttcacttctttgcatggcaatgcctttctccctgttttcaggtttccacatcctgtgtaccatccattctttcagggagcatctactgaggacttataatatgtccaacactataaaaggtcaaggagatacaaagatgaataaggagtggaccttactctcaaaggaccaggaggctgagagacaaagaaaagatgatgattttgatgatggtgatgatgatgatgatgtgcagggaatatgcacaatgataatagatctatacagaatattaagagcagagagagggacacatagtctgtgttccaagtctcagcttaatacccctctgctttaagtttcttctaactcctctgtagtcaaaataaccttttcttgtctccttgagtttccttagcacaaatttactactttttttaatacataggtgcatacatatatatttatatctctctcctgttagacttctaattctggaaaaggatatacagattaaattagtagttttcaaccagaggcagttttctctcctacggaacatttgacaatatctcggagacaattttggttgtcataactgagaggg

SEQ ID NO: 126886 - DNA, 170 bp, Homo sapiens
ctatccatgtcaacaagtgcggtgctaagctttaaaaaattcaaagagaataagacccgaggccctcaggggtgcacaggtaaacaaacaagtaacagaacaggcaccatggctgaagcccatgctggacaccaaaacagggagtggacaaggccacatggggaagctag

SEQ ID NO: 126887 - DNA, 753 bp, Homo sapiens
gggcagaatttggaaacaggaatccaggctgacagatgaagttgtcctggattctatctcaatctggggaattcaaaaagtgggtcacacagagaccataaagaatcacacagtgcagccatatttgcaggcagcagtttgtcattgaggtagtggaagaaaagatggaatttacaattataaacagtctcatagccattttttacattgcttagaaagatgtaaaagctaaacaaactcacatacaaaaactcaggttaaagaaaaattcctgctcgcctgaaatatatccctgatctcttctttgtaagtgtttcagaaaaaaacttatttccttcaaaggtaagtaatttagaaggaaactagcacaaaagtaaaagcacaggcaataaaagcaaaaactggcaaatagggttagatcaaaatgaaaagtttctgtacaacaaaaaaacaacagagtgaagaaacaacctatagattagaagaaaatatgtgcaagccatacatctgataagggattaatatccaaaatatataagtaactgaaacaactctatagagagaaaacaaataattcaattttttaaaataggcaaatgacctgaacggacatttctcaaaagaagacaaacaaatggccaacaggtacatgaaaaatgctcaacatcattaacccttgaggaaatgcaagttaaaactacaatgagatatctcacacctgtctgtatggctattacaaaaaagacaaaagat

SEQ ID NO: 126888 - DNA, 267 bp, Homo sapiens
atcttggccaggctggtcttgaactcctgaccttgtgatccgcctgcctcggcctcccaaagtgctgggattacagacgtgagccaccgcacccagccaggactacccctctctttaaggacccttcccagaagtcacacacgatacttccaggtaaatcttagtcactctgtcacccctagctgctagagtggctggaaaatgtagcccttattttgggtggttatgtgaccagccaaaagtaagggatggtacgactcatgaaga

SEQ ID NO: 126889 - DNA, 119 bp, Homo sapiens
gggaggggactgaaagtactagtggggagaaattaaaggggattcaaacattttaccttatatactgattgtttgaaacttttacaacaaatatctattctaaagtatttacctgcctt

SEQ ID NO: 126890 - DNA, 208 bp, Homo sapiens
ggtctacatttttagctgtgtggctttaggccatttccttgacctctctgtgcctgggtttcctcatctgtaaaatggagaggatcatagcgtctatctcgtagggtggctgtgataatcaaatgacttaatagtaaagtgcttaggtcagtgcctgccacatgagtacttttaaatgtggctgttatttttgattcatcccacgaat

SEQ ID NO: 126891 - DNA, 436 bp, Homo sapiens
gctcatattccatggcatggatggaccgcactttgtggattcatttgtgtattaatggacagtgccgttgtttccggctttgggctgttgtgagtaatcctgctgtgaatgtggatgtgagggtgtccacccacatccctggatatgtccctggggcggaatcgccacatcgaccgtaattctcttatctcttggctgtttgattacagccatcccagtggatgtgagtggatctcaatgtggttttagcatgcatctccctaacaactagtgatgttgaacatcttttaatggcttattggccatttgtatatcaacttgagcaaaacagacatttcaagtcccttgcccatttctgaagtgggctgtttgtattttttgttgttgaattctaagagttctttatatattctgaatactactcccttatcagcta

SEQ ID NO: 126892 - DNA, 908 bp, Homo sapiens
accaacatttcctcaatacccactttctacaaccccagacccagtcagtcaccattctgctctctgcttctatgagttcaactctcctagagtccacatttaagtgagatcatgtagtttttgtgtttctgtgcctggcttatttcacttaacataatatcttcaaggtttatccatgtgattgcaaatggcaagactcccttttttaaggctgaatagcatccattcatctgttgatgaacacttaggttgaatccatatcttggttattgtgaacagtgctcaatgaacataggggtgcagatatcccaccaacatactttcctttgctggatcatatggtagatctgttttttgaggaaccttcatactgcttttcacactaacttacattcccagcaaccgtatataacagttcctttactttccacacttattcatctttttgataatagccatcctaataggtgtcaggtgatatcttattagagttttaatttgaatttccctgatgattaatgatgttgagcatgtttttttcatatacctgtttggtcatttatatgtgtttttttgagaaatatctattcaggttcttttgcactccagcctgggagacagagcgagactctgccaaaaaaaaacaaacaaaaccacacaaactttttgcgcgccgataggccctctaaaaagctttttaaacgccttggttaggggccgcgagccccacgagtgtgaacgacgacaccggcgcaagaagcgggtcaccaacagggaccacgtagcagaacaagacggcgagagatcccacacataaaactgtcccgggggacaccacgagtctgcgaaaacccagagggactcaaggcacaaggggacgtacaacgggctcaacgacataatgtagt

SEQ ID NO: 126893 - DNA, 565 bp, Homo sapiens
tctgtaaacttaacttgttaactaaaggggacaaatgcgagtggtttccaagtgaaaattacatagctccagggtgttacagaaaatctgttttaactaagtcatgtgttgaatcgtatcttcgtacctttctgtgctgtattttactcttaccgtacagtgcctcgcagtgattgaaatggatttgtatttgtcttcaatcgttgtgacctaaggaattatgctcagttgtataaccttgtccataatatctaagtaagatttcatgcgtaggactgctttctttgatagttgcaataaattacccaaaattttgattgttatagagttaggtttagtatagtcgtggtatccaagtagaatattggtgattctgaaaacaattatatatagaacttaagtctatgtaacagaattttattctttcataatatatcaattctatgtgaattgggtcttgttgctttgatatttatttacagttacagtacatgagttataatactgattattttctgtatgattttctcttactaagttcctctgtttgccacaagaagttttt

SEQ ID NO: 126894 - DNA, 684 bp, Homo sapiens
  misc_feature (667)..(667): n is a, c, g, or t
ataaacagaagaaattctcttattgtcttcaatttttatttaaaaacctattatacaggccaggcgcgatggctcatgcctgtaatcccaaagtgctggaattacaggtgtgagccaccgtgcctggcctgatttgagactttttaatgtattcacggtaggttagagtacaaggtgcatcattttagactgtcttagataaagaaattctgtattggataatatccttttccataaaatctgtcgttgctgctacacagtaagtcctcctcatcatcgtaggttcttggaaactgcgactttaagcaaaacaaggtacaacaaaaccaattttaccgtaggctaatggatataaacaagagttcaagttcatatgcatatttctggtcatagaaacatcaccaaactatcaaaaaaagaccaaaaacacttctaataataaaaacgaaatcacaaacaccacattgtgggggggcccccacggcacccggagaaaaaagttttgtagaacccatgtgtgggggccgggccccgaagttagctggcaagtgtcaaagaccgcttgcgagagacaccgggtccggaacaggcgggctttcaccataaaaggccggggaacggggtcggaaaaatcagggagttgggaggcaaggtcacaggatcaggncgaaagaccccggggga

SEQ ID NO: 126895 - DNA, 665 bp, Homo sapiens
  misc_feature (648)..(648): n is a, c, g, or t
cgggatttcaccatcttggccaggctggtcttgaactcctgaccttgtgatccacccgactcagcctcccaaagtgctggaattacaggtgtgagccaccgtgcctggcctgatttgagactttttaatgtattcacggtaggttagagtacaaggtgcatcattttagactgtcttagataaagaaattctgtattggataatatccttttccataaaatctgtcgttgctgctacacagtaagtcctcctcatcatcgtaggttcttggaaactgcgactttaagcaaaacaaggtacaacaaaaccaattttaccgtaggctaatggatataaacaagagttcaagttcatatgcatatttctggtcatagaaacatcaccaaactatcaaaaaaagaccaaaaacacttctaataataaaaacgaaatcacaaacaccacattgtgggggggcccccacggcacccggagaaaaaagttttgtagaacccatgtgtgggggccgggccccgaagttagctggcaagtgtcaaagaccgcttgcgagagacaccgggtccggaacaggcgggctttcaccataaaaggccggggaacggggtcggaaaaatcagggagttgggaggcaaggtcacaggatcaggncgaaagaccccggggga

SEQ ID NO: 126896 - DNA, 701 bp, Homo sapiens
cattggaaacgggctatggcagaaaagtcagagagggtgtgttaagaaagtacgcctgcatgtataaatcaaagtctgagtttgagtgacgcgtacacaaacagtggtggtttcggtggcaggttgagaactcgccattgtaaagtaagagagccattcccttagctggtgatttctccttgtgtgtttctgagcacttttattgcattcacacatctactagtttttgtacgaagagtgcctcagatcattacactgcggctgtataagagacctggtttggagggatttgaaggacacatggaatagtgaattcatgtccaaagaggcaccgggctttctgaaggaagtattcgtctgagcttttgatgatgggggcatgagagttggatatttgtgagttttctagtgaatgctagtgaactcagaccagggattgcagattcagatgtctgtaggccatggtaatcatgtatgtagataaagccagagaggtgagacactgttaagttcaaggcaaaacacacgtgtgtgtgtatgccagaatctgcatagagtagaacaatcttgtgaccttgtaacattgcattattccatgtaggttcttgcgcgtgagtgtgtatgtgtgtacgtgtgtgttgccttgaacttggcactatttcatctttccttttataaacaaagtatatgagagtttccaa

SEQ ID NO: 126897 - DNA, 392 bp, Homo sapiens
ggtattaatagcattttacaaatgaggaaacagactcagaaaagttgagtaactggctcaagtcacatagctagtagtagagctaagtttagattcctgtgtctatgtgattccataatatgtgtttttctaccatgtcatgctgccaccagcctctttgacctgcttactgtaggctgtggcagagaacttcatcctttcggagcctcagttttcccatctctaaaatgagggttattctgtatttcctcatgtggatgttatgaggatagtgaaaagaaatgtaaaagcaacatagtgagaccttaaaaatatgtgatagagctgggcatggtgactcatgcctgtagttcctagcactttgggttactgaggtgggtggatcactgtca

SEQ ID NO: 126898 - DNA, 302 bp, Homo sapiens
ctaatacaatattagagtaatgtaataactcactcacagtgggcatacacttaagttttcaagtattagaagcatcaaatatatcaactttggaaaaccaaatagttaaagggcattttcaatgaagaggaatcattgtgcaatttaaaaggcaggggcttcacttctctaagcttccatttcttcaacagtaaggataattatatgttgccctagtaatatggctcttggcagggcaaggactgggagcctgggaggccaggggagctctgatatgtagcatttcccatttctgcagtgta

SEQ ID NO: 126899 - DNA, 230 bp, Homo sapiens
tctcacgtgcacactagagtcagctcaaaggatcttctattccccgctgattccgccatgggaattctctcatataccttttagaagaggttccatgataaactgaggcacagggagatgatatgacttgcctgagtcacatagctattaagtggcagtagtaccattctgacgctagggtcttactatgaaacttctgtggcagtttgggtgaatgatgatgtaatctt

SEQ ID NO: 126900 - DNA, 518 bp, Homo sapiens
caaataaataaataaataaaagtgtataaatttgtttcatttctgcagttgcactagttacatttctagcactcggtagctctaccggctgccatactgaacaatctgcattggcagattaagaagtttcatcatcacagaaagttcaactgggcagtgctgtttcggaaggtcccttgggcactgggcctctgctgctcattagcggaccctttctttgttggctttttttcctttccctgcctccctctcttacccatgcttcctggcatctcctcccatgtaaaagttctgcacctacagcattgtcttaaggtaagaagaacctcagcgagtgcattgagtgatattggtgtgaggtgggggcagctggggtggctccaaggcacagtggccctgccagctgttcccacccaaaaccatcaccatgaaggagctgagggactgtgttcctgccgtcacctctccaaaagtgacaggtaaagggatgggcagagattgcacaggaaggtcaacaa

SEQ ID NO: 126901 - DNA, 386 bp, Homo sapiens
agcagcagcaacagaaggggccacaaagagaagcaggagccacatgaggggccctgatgtcactcaaacacagggtgccactcttgggtttaaagcaggggaatgagattgatgatagggattgtgtggaagatagagaggtggaggaaagatcataagttatcatgggagtcccagagcaagatgagggattgaaccaggacagcggtagaagggatgacagaagacaaaagagggacaaacagttaaaggaacaatttgtgggacttggtggctcccttggatgtgggcagtgaagggcaggggcctgttgggtttccagcttgggtgactggtatggctatcaactgtgacagaaaacagtggacatggcatttgtctatttg

SEQ ID NO: 126902 - DNA, 384 bp, Homo sapiens
ggtggctgggtgaggagttctgggatgatcacaaagactgtttaagacatcttctcaaactttaaggagcacacaaatcacctgggtattgtggcaaatgcagattctactgcagcagacctggagtctcatttctgacaagctcccagggggtaccaaggctctccatcctccaatcacactcactccgaacggcaatgatgaaggccatgacaaggagtttggattttattttaagtgaggcaggaaagaagctattgaagggcttttgaaaagtgagtaataggaacccagttatattttgggttttttgtttttgtttttgttttttgacacggagtctcactctgtctcccaggctggagtgcagtggcacgaccttgg

SEQ ID NO: 126903 - DNA, 719 bp, Homo sapiens
gattctttggaatagagtgttcagtcttctgcttgggaggcaaaagcgtctagctgccagttcggacaccttctgtttacactctttagaaggtaaatctcgaaactcctgcagggatggagggcaggcagtcacttagtggggaaaactgagagggaatttacagcttttcaaacatattttaccctagttcccctaattttagttcctggtccctcatcctcatttccagaagcaaccaatgctttttgaggattctttactcactactgtcttgggttcagttttctagatctactagattattgccactcatccatctacttctcagcttccaaaattttattcccattatattttttcctattcttcctaagtaggtgtatgattattttaacaaatgtttctttactgcaattttaataaggtttgagagagagtaaagttagatgcagatatacagtttgcctccttaacacagaagtttcattgatatttgattagtcagaaaatagcaacagtactcctgagaaaagtattaataatgtaaatctagatgagacattgtaatagtctttagaaagagagcattagtaaatgttgggactaaagcactgataattatagcatataagatgtaatacattggagtgaattaagtatgcatgtgtaaatattaagtgtaactacaaaagagtataaagtgaatgcataacttc

SEQ ID NO: 126904 - DNA, 615 bp, Homo sapiens
caatgatttacagttttcatgcatgctttttgcctccttggttaagtttattactaagcattttattctttttgatgctattgtatatggaattttttttatttcttttttgaattgttcattgttagtgtatagaaatgctaatttttgtgtgttgatttcgcatcttgcaacatcactgaatttgtttattaattctaacagctttttttggtggaatctttggaggtttctacatataaaataatgtcaatggagataattttacttcttcctttccagtttggatgacttttatttctttttgttgccaattgctctgactagaactttcagttctatgttgaatacaagtggtaaaagtggatatccttgtcttattcctgatttcagaggaaaagcttttagtttttagccattgagtctgataataggtgtggaattttttatatatgatctctattatgtcacactttaaaaaaatctatgaaagtatcaaaagatggataaatatttacgtatttatacataaatataaataaacatttatatcatttgggggaaaagaatcttaataaccaaagccaaaaattataagggaaagaaaaagatgat

SEQ ID NO: 126905 - DNA, 389 bp, Homo sapiens
tcggacctctccctactgtatcctaccagcagtggcttggcagcggggcaaggagggctcatgggtctccgtgtgcttctcaggccctgctggtaggatttgttcatcttgccatgacctttgcggtgcccctgggatgcattcccagttgtacttagtagaggaaaaggtgtttgagggtgtagggcccccaaagttcgaggaggcatgaaaggacggagctgggggatgggagggttgaaaaggacaacctcctccttcttctgagcctctaattccttttggctgcgcgtggaggctcgcacatgtaatcccagagttttgggaggcccaggtagaggatcacataaggccaggagtttgagaccagcctaggcaacatggtgaga

SEQ ID NO: 126906 - DNA, 420 bp, Homo sapiens
taatcgagctcggtcccgggttcctccctatgtcactcagagtaaaagctaaagcctaccaatggtcccaagaggtctcacagttcccctctgaccacaccttgtacaactctcttcctcattgatcccagctgcagtagtctctgctgtcctttaactcatcaaacatattgtcacctgcgggcctttgccagggtctatgtagctaatttcctcaccttctcccaagtgtgatgccaccttcttaatagggcctacctccctccaaacctggcactcctgattagtttatcctgtgttgactatcttttttttttttggggcatttacgacccttttttttttaaccttccttttttttaggacttttccccttctttccccctttgggattcccgttccacttgggcggggacccgg

SEQ ID NO: 126907 - DNA, 427 bp, Homo sapiens
ttgtttatgaaaattcaacattgtaattaaaagctatggaaaaatctggatttgagagcatagggaaggtctgaacctttgcctataatactttcagtaagaactttctttttctagatcaagatttgagaccctgccgggcgcggtggctcacgcctgtaatcccagcactttggaaggccaaggcgggcggatcacgaggtcaggagatcgagaccatcctggctaacacggtgaaaccccgtctctactaaaaatacaaaaaaattagccgggcatggtggcaggcgcctgtagtcccggctactcgggaggctgaggcgagagaatggcttgaatcggggaggcagagcttgcagtgagccgagattgcgccactgcactccagcctgggcaacaaacagcaagactccgtctcaaaaaaaaa

SEQ ID NO: 126908 - DNA, 688 bp, Homo sapiens
aacaaggcagaggatgaaggatgggtcttgggagggcaaacagaataacctacacacctccttattactatatggccagttcttgtttgtttacctggtacatagaaaatgtttaaagatatttgttgggtataagaatgaatagcatagacattaaatgtaattaatgtaagcaagattaggctgcatttcttattcttttaggaaattattttacttcaacaacttgtcttgttgctgaatatgattgtgagagtcttttagctatttatattaaatgtttcagaaaccacattttgaattcctgtgaagaacactaagaagtatagtaattggggatgcaattgtgagagagatcatattggtatgaaagaaaaaatgaggtggctcatttgaacatgtttgttgggtagataagtgaagaagatgagtcacaaattgtaattcatgacatgcagttacaacacgatgactcagcttatcactggcataggtattgggtggagtgtcagctggggcaaaacagtaggagatcatgtggctatggtattgattacgatggcgatgatgatgacaaagattgtgaggtgggctgaccatctctgtgttgtaaaacttatttaaaaaaagataagcttggtactcttaaaacaaagcatggagagactatcagaaagttttaatgaat

SEQ ID NO: 126909 - DNA, 607 bp, Homo sapiens
gatgagtaaatgggaccaatggacaccaacagtctcctcctaaatggatagcaagaaattgccaggtccagattccatgtggcactgagggcttccagaaggacaggactgtaagaaacttattaatagatgagttgtcagaagcctcagaaagcgagcgagggagggaagagtgagggaggctgagaggaaaaagagcagaaaagtaactaggaataaaaaacaaaaggggtccagtcctggggactcatggctgtaattccaacactcagagagactcaggagggagggtcacttgagctcatgagttgaagaccagcctgggcaacatagtgagactctgtctcatttaaaaaaaaaaaaaaaaaaaaaaaggagaaggtagtgaaaaagaatccatgtataaaatgacaaacagtagtacaaaatttagattttcttcaacatcttcccatatcttccccctttagaatacacacatttttgagtctctcccatctttaaaaaccctaccccttttgaacctgttgccttatttccagccaagctgttgaaagagaagccaggatctgcaggtctccacactttcccacctggccatggtgcc

SEQ ID NO: 126910 - DNA, 1178 bp, Homo sapiens
ggtgctgaaggaaaagggtagagacttttcaccatatactctttatatctcttgaactttgtgccatagttaaaaacaaatgaagaaataaaattcagattttagaaacctatcttatgggattatcatgaggattaaatgagtcatgtatataatctaatgcattgtctggcatgtagttaagtatataatacttactaaatatgatacttactagccgttgtttgtcccttcccctccagttccataattgctgtttggagggttcacaggatttattttcttcacctaggccaaggattgttaacctgaatggatcaatgaacctttgaaattgcaaattttgtataagcatatgcttattccagactttccagattctagagagaagagggtctgtgactttaatcagatttgctaaggaagggaaggtcccatggccctaaaaagttaaaacacactaacctaagctgttttgctattttatgtttctttccaccagaaaatactctgctgtcagatcgttttctctttacagctaggaagagactctggctgacttttattcctcataacttttatcttttctaaatatatcatgtctaggcaagtaatttaaactttctaggtctcaacttcttaactgtaaaaagaagtgattgatctggacaaattcaaaggttcccttcatcttgaaaatgttttgattctatctaggtttactctgtatgggctttaaaaattagaaatattgtcataaaccaagaaaaacccttatgctaagaataatctttaggtagagacctaaatcttgactgagggataaaattggaggtttgtatatacaaatataagaacttatgtcaggccgggcatggtggcttatgtctgtaatcccagcacttgggaaggctgaggcgagagaatcacctgaggtcagttcgagactagcctggccaacatggtgaaaccccatctctaccaaaaaaaaaaaaaaaaaaaacccacaaaaattagccaggcgtggtggcacatgcctgtaatcccagctactcaggaggctgagtgaggcaggagaattgcttgaacccgggaagcggaggttgtagtgagctgagatggcatcattgcattccagcctgggcaacaatgcaagactctgtttcaaaaaaaaaaaa

SEQ ID NO: 126911 - DNA, 322 bp, Homo sapiens
gttagccaggatggtctcaatcttctgacctcgtgatccacccgcctcggcttcccaaagtgctgggattacaagcatgtgccaccgcgcccggcctacccttttcattttatctgaattttacatgtctgaatataacttggttattatctgaatataactcagttatatttccaaaggcaggcactactatcatctgcaatctgcagatcatgaaactgagccgtaaagaggtgaaggaactgcccagagtcacacactttggaaacagcagaaacgggcttcaagcccaggcgatctgcccttagttactgtgtcacac

SEQ ID NO: 126912 - DNA, 682 bp, Homo sapiens
gatagaaaacgtttggcttctataataagaggatatgcttaggtcctaattcctttagagaaagttatccattaatactgataataaaggggggaaaggcataagccaaaggaattgttttaaagttagaaatgaaaagctaaatgccacatttcttgcttcacagtataaacttccacttcaaaataagcttcgtgtaagcaccttgaaaagggaaatacatggttaatcatcaaaacaagtatattatcatagtaaaaacagaactagaacaggcagtatcaaactccctcggagctaagaaaaacagaattagatatttaaaatcacaaggaaataaatttaggcattctgtagttttataaaagttgtcctacatgttagactgattaatatcctgtaagaatagatgagtgctatagtttgcaatattaacgaattagctggcgtcaggtgtttgaattttacaagttttaaagcttaccaagctatggtgatttgttggctaaagtcaatgatgacaaaaggtaatggccattctaaggttacacagattccaatctctgtatgtgcagcatgtatgtatatagatccacacctcttcaaatgcttaacaagaggaagtgccatgtgtcagcagaagtaatcatatacacaaaccaatttttataagccaattaaa

SEQ ID NO: 126913 - DNA, 302 bp, Homo sapiens
caccatgttggccaggctggtctcaaattcccagcctcaagtgatctgcctgccttggcctcccaaagtgctgagattacaggtgtgagccaccacacctggccaaatctgcagttcttgaaggagggcccagagcaccacagttaaatagaagtataatgtgggctacgtatatattttaaaatttttctagtagctgcattatttatttatttattttttttttgagacagagtctcgctttgtcgccgaggctggagtgcagtggcgtgagccaccgtgcctggctgtagctgcatttt

SEQ ID NO: 126914 - DNA, 265 bp, Homo sapiens
taagtgataagattgtgatttaaaataccttattcacagaagaggtgaagtacattttttagataaactgaattttcatactgcaaagctattggaaaagttaaattgagttataaaattttaaaggggagcacgtggccattgaaaatcaagccttgttttgccgtgtactgaatatggctttcttgaaaaatattttaaaatagagcacttccacacgcttcaaaacatggtcagttcttggtcatatgaagaattggaggat

SEQ ID NO: 126915 - DNA, 354 bp, Homo sapiens
tgggaggccgagacaggaggatcacttgaggccgggagtttgagaccagtctgggcaacatagcaagaccccatctctaaaaaaaaaaaacaaaaaacaaacaaaaaaaaggcttagctaatgctgagacagagagacactgttcctcccagtctgcaaggcttcagatgcagaaaataacatatacttaatccagtcagaaagccttcctggtagtggcaagactgaagcaggatatcgggggatttacacaaccccagcccaccagcctcaaaccggaagcccaaagcccagggaagctcctgagtgccacctccagcctccctgtgaggggctgacgccgataccaacctt

SEQ ID NO: 126916 - DNA, 495 bp, Homo sapiens
agattttcagaaatttaaaactcctaatgaagaaacacaaacctgcacgtctcacgccaccacttaaggcagcggctctcaagcaggggcgattctactgggaggagggatgctgatggcaccagagggtgggaagcagggatctgacgcttagcaccgcaggtgccaaggacggcctcctccccacaagggctccgggaggccacaccagagggtgggaggcaggggtgacgctcagcactgcaggcaccgaggacagcctcctcccaggaggaaaaaacaaagacgggaaaaaacaaaggctccccacaagggctccagggggccacaccagagggtgggaggcaggggtgacactcagcaccgcaggcaccgaggacggcctcccacaaaggctcctctgggccagagcatccgtagtgccaaggggaaaagcccggacacaaaggatccagtgttttcaacgttgctcagggtatctccacacagaaactc

SEQ ID NO: 126917 - DNA, 272 bp, Homo sapiens
gcaaagagcttggctaaactgtatccatgcccaagggctttgtggaaggctgaagttgagagtgatgaactagggtatctggcaggcagaagacatttctaagcagcaaaatgctgaggctgctgtgtggttgcttctaactgcttaagatgatctcacagagaaaagaaacagagtggaaacatttggaaaattctcagcctggccatgtggtagagaatgaaagagcattttcaggagatgaatccaagggcgtggataagccacttctt

SEQ ID NO: 126918 - DNA, 684 bp, Homo sapiens
gcttacaaaaacatattaaaaaacagaaatgcctggtttgtaaatacttccagaggaagttttggattcctcgtcttcagaacgttttagtctgtaacttttcagaattataatcctggaaggaagaaagaatacacttaggaaactccttctaagtttccttttaaattttctatacttctaatttttagagtaaggaagagtcaagttgatataatgagaatggaagtttgcaaagtagttgtcttcttagtggaaatacttaatatggaacctgtagagttgccttatattcgcattgcaattacaaattgaatatattaaatttaaaaagatttttgttcattgggcaatgattaccaaattaaatataatttatatttactttgaaaatagactttgttttagcttattttaagtatttttcttataatctttatcttttaaattatgtaaaactaaagaactggagacttaggagataatcagcagaagagatacagaattctaatagtgcttttcagtgaaattctagcagcattgtggttttataatgaaataaaagaacaaacctttaaaaacccagttttctactaactcgctctatattttttcaaactttaaaataagatttttttgtgtattgtacttgaaatctttaagttaaatctttttaaaatgacc

SEQ ID NO: 126919 - DNA, 425 bp, Homo sapiens
aggaggctgaggcaggagaatcgcttgaacctgggaggcaggggttgcagtgagcagagatcataccattgcactccagtctgggcaacagagcaagactctgtctcaaaaaataaataaataaatcacactaatgtaaagataatagtaataggggaacttgggatatatgggaactctgtgtactgtctttgcaagttttctgtaaatctaaaactattctaaaataaagcttatttttaaaaagtctattataagccaggtgtagtggctaatgcctacaatccaagcattttgggaggccaaagtaggaagatcacttgagcctaggattttgagaccagcctggccaacataggaagaccctttctctacaaaacaaaaaattagccaggcgtggtggtgcacacctgtgatcccagcta

SEQ ID NO: 126920 - DNA, 480 bp, Homo sapiens
gattgtgccactgtactccagcctggcgacagagtgagaccccatcttgaaaataaataaataaataaaaaataaatgttagcggaacaagtgaaattagggttggtaaaaacgagtgttgagctgtttctcacatcacacgcaaaaaattagcctgaagcgaatcataaacctaaaagtaaaagcggagactataatgtttgtacaactgtgctgtttgatatggtaaccactagccacatgtggctactgagcacttgaaatgtcctacatttagtgagaaaataatataaaaatctaagtaattaatatttaaaattgattacatgtttccatgtaacggcataatactcatcaatatataataacaatatataatacatgcaatagcttgaataaattttgaaaacatcttgagtcaaagaagccagatgcaaaagaatacatgctctgtagtttcacttatatgaagttcaagaa

SEQ ID NO: 126921 - DNA, 766 bp, Homo sapiens
ccagatctaatcatttaagaacatggaagtcgtaagaggaaacatcaggaaagtagagaaagatatttgagtagatttgatggatactggattttatgatattcaatactaacctctaagttgtattttttaatataaataataataaaaggaatgagaaacctcttctagaaaaaagaatgctttggataatatttatgcaaaattttccaaatcaaacaactgctgaaaagtattatgattttctgtaattgtaaacagtttacaatttgctcttttttgactttggcacattaccactatatatttttaatttaatcatcctgtctcctattctaagacctacttttatcattttataaaacatggcaaattttttggcacctgaagtccttacacatttttcatcttttcactgatgactttataaaatgtagaaaaatacagaagtaatgaagtgatttatttatttcaatatttaacccaacttattttaattttgttatttaagtctgtaacagtggatgagatctcctaaaaatagaatgaatatttgtcaggtatttacagatcactgctcctgtcctcaagaagtttaccaactagtagggaagactgacataaatgatttcaaatgaacatatttggtactatagttgggatgtggacaggtagtgtggaaacttaaggagaggcacctagctcccctctgggctgctgtgagtcaatagagaaaattgtgcaggtgttggcaagccaaataaga

SEQ ID NO: 126922 - DNA, 517 bp, Homo sapiens
aaaccaggctgccactgaatgagccaggtgattcctcggctgttggagctggaagggccagacaagctttcctggtctagcctgggcatttgaggaatccggaagctgaaacccagagaggtggagtgactcaccccagggctcagatcccatgaggtgcttagccaaagccagcagcccccctggcaacctcttaactcatcttcttggtttgtttttttctctataacagcaccccaaatgaactttagtgcctgtcatttagagtagaatgctgtctagcttaaaaccctccacagcttcctgtctcactcaggagacagtcttcactgtgaggcctgcggccatggccacccccatgcccacacccacttctccaggtcccctttgaacccacctccccctgtgcattgggctcttgctactccgccttgcccctctctgtctctagaacacgcctgcaggccctgcctctgggcctttgaccctgcccccctctctgcccagtgtgctctcg

SEQ ID NO: 126923 - DNA, 951 bp, Homo sapiens
ttgtgccactgcactccagcctagttgacagagtgagaccctgtctcaaaaaataaaaatatcctaactttagtttgtgttccttgctgttctcttgtccttagatatacctcactaaagcagtactgttggcactgtgcgcaaaagtgaaataactgtttttactgtggttattttgccactttggttattaatattattagttttccatttatttttattcagtttattgttttcagtttatccaatttataaagggcttttttccctttataaattacagggagaaaatgagaacccctgtgcatggctggtgggaatgtgaaatggtgtagccactatggaaaacagtatggcagttcctcagacattaaacacagagttagcatgtgatctgcagttccacctctgcgtatatacccaaaagaactcaaagcagggacacgaacagatatttgcatacctgtgttcacagcagcattattcaccatggggaaaagggggaagcaacccaaatgttcattgacagatgaatagataagcaacgtgagatgtctatataacagaatattatttaacctcaaaaaggaaggaaattctgacccatgctacaaaatggatgaacctgaggactttatgctaagtaaaagaagccagatgcaaaaagacaaacactagaatttcactcataggaggtaccagtcaagttcacagaaagtagaatggtggttattggggggtgtggggtatgaattctggggaatgaatcgtggggttagtgtttaatgggaacaatctcagtctgggaaggtagaaaaagtcctggggatggatggtggtgctgataacacaacagtgtgaatatatttaatgctgctgaactgtacacttaaaaatggttaagatggtaaatgtcatgtatattttaccacaataaaaaacatgaaaaac

SEQ ID NO: 126924 - DNA, 886 bp, Homo sapiens
tcactccatggtcccacacccctcattcactggcatacaaccagcaatcttcctgtccctacctccccacacatgtgtacacacataaggagcaatggcaaaggagaaagggaaagagttaatgttctagactttccacattcacaactcacatccccccatatacagatgctccactttagaatggggatgccggacatcccccatccctctctgtcgtatcactgagacgcctaccacacagtattatattaaatgtccctccccatccttccacaagtgcattcagtgttttcaaatgaagccttcactggtgcattccatgtagattccatttctggccttctgcatctccctggtactcaaagaattctccctgtcataatgcccctggcattctataatgtgtcaaccctggaccagctttttatgtaacccagagctcctcaggaaggactgttcctctacttgtccatccccctcccctggctctcttactggaagttgtgcctgtcttaatgtcctgcattactccatgatacagagacaccttcgtgcacaggggccactacctacataggctctgtcactgacccgatcatctctctgtcatcactaatatcgccaatgctgtctacatcactacccctgcctctttagcctgatacccttgtacatgtccccagtgacggcgtgaacatacaggccatctctggatggctatatctcactgcctgttcccactacccctccatagccaccaacctcaatgctatcacttctctctcacacagattacctattagccctcatggatttcagcaaccctgcctcctcttcacaaagctgtacgacagcctgcttggccatgacttaactgccccta

SEQ ID NO: 126925 - DNA, 209 bp, Homo sapiens
ttttggtaatttgctctaacagccacaggaaagtaacatacatgcctacctgggtccagttgtgtcctgtgactcctgctttcctgggacaggcaggctgctccgtgcctcctggccatcctactgggtgctggacgctgtaggctgctccatgcctgttggccattccctttggtgctggacagcactcacattgtgaaatccactgg

SEQ ID NO: 126926 - DNA, 580 bp, Homo sapiens
ttcctttctgattttgccgtcgtctcatttggttcaaaacatcaaactgcagcatatatggagttgtaaagggtccattaatatagatgttctagtcaccagctaatgcagatggaaagggaaatacagggccacagaaggagattgaaaagcaccggcctaagcaactttggaaaatggacacacccatattcacaccaccacaaccgaagaatagagtgttcctatcacccggaaaagttccttcattctcttttgcagccaatcaccctcattcaacccctggctctcagcaaccactgatctaatttgagttgccatagattattttgcttattttggaatttcatctcagggaaccatactgtgtgcattctttcatgtctggcttcttttgattagcttagtttgtttttttgtttgtttgtttagactcatccaagagtagtggctaatcttatattttatttatttttatcactgagtaatatctccttatatgaatatattaataagtcaacatttaataatgcattcactttttgatgggtgtttaaattgtttccaatgtggggcaatt

SEQ ID NO: 126927 - DNA, 129 bp, Homo sapiens
gcaccttacccatacgaatgcattcaatcctcacaacaacccagtgagttagggaatattatccccattttacaaaatagtaaaatgaggcagagagagagcttaggaactagtgaaaagtcacacagc

SEQ ID NO: 126928 - DNA, 474 bp, Homo sapiens
tggagggcttgggggactatgaagagtacctttaataaaaggtctatctaggagtccagtaatactgcagatactgcagtgtgtgtgtgtgtgtgtgtgtgtgtgtgtgtgtgtgtgtctgtgtgtgtgtgctctaagagcaaactgtagctgcttggtgggttgggctggagctggaacctggaccacggcactcccctcattctccatctgtgtcattttcgtcctttttcttgccaatggcttagtttaagcccctgcagcctgaaggctttaggtgagacttctgagaaagcttttttccagtaaggcccaagcttgagcagagacacaaaagggcacccagtggagctgcttgtgagggtgtggctggagctcagctcatttctgcctgagactagggaatggccaagttgggagcatcaataccctccctcgcttcaccagcccagactcgcccatggttcacagaca

SEQ ID NO: 126929 - DNA, 479 bp, Homo sapiens
aacgcttaaaacatcacttaatctgctaatacactttaatatacttaaagagtatcatgaaaacaaatttcagctgtatgtaactgtaagtaataagaaaaaaaaatttaaaatgccaatcatcgttatgaattaccctggaatttaacccaaattctctagttattccataacagtctggaattttgaaaagcagagagtcttttttgtttttaatatgaattctaatgtgacttttatcaagttctttaatgtttttgagccttggtttaatcttctgtgtatctacatagtacacagcatacatacagtacataggcactataataggttttaggtgaggtagtgcatgtaaaacattttgaaaagctgcttatacaccgtaaatgtatacttaacattggtgaatagtagcttttttttttttttttttagctaccattaactcttaatttttcttgagacggagtctcgctctg

SEQ ID NO: 126930 - DNA, 671 bp, Homo sapiens
ggatattttgtttcatttttctaattcctttttctctttgtatttccatcttggaaatttatattggcatatcttcaagctcactgattctttccttggctaggtccagtctattgatgtgcccatcaaaggaattctttatttctcttatggtgtttctgatttctagcatttccttttgattttttttcttagagtgtccatctgcctgcttgcttcacctatccatttttgcatattgtccactttttccattagagcccttagcatattaacagtagttaatctaaagtcctgatctgataatttcaaaatatctgccatatctaagtcaggttctgatgctcactctgtcccttcaaactgtgttttattttttagtatgccttgtaatttttttgtttaaagctagacatgatgcaatggataaaagtaacttggtactggttccagtggtaggcttctgctccagtaagctgtgattttctgtatttgcttatagctccaatttttggagtagcagtttgccctgtgacctcaatgccttgatagacctaagaagagttgtttagtttcagcttgttcagattttttcttattgtgaggacagaggcaacaacttccaagctccttctgtgttggactaagagttcttacttatttgttatttg

SEQ ID NO: 126931 - DNA, 529 bp, Homo sapiens
gctcaagtggtcctccttcctcggcctcccaaagtgtcgggattataggcttgagccatcacacctggccaaaaatgtatattcttgggtcccactcagatctgttaaataagaatctttagtggtgctcaggaaatgtttgcataaatgctgaattaataaaaagcctcggaaaataggatttgcaaatgacagaactttttgttatatgtattcacataaagctaaaaagtgtttagtgtttaaaagctaggcacaaagggggataaataataaacatatacttggtagaaatttatacttgagggtaaatctttaactgcaaactttttattcagcttgttaatgacaagattttttaaaagttaacagctcattaagatcatatagtaacctaataagtttttctactggtttttattcatacaagcacttttagccaaagatttgaatgttggaaatattcgactttatttttcagagttcatgagtcattcacaaacatttattaaataccttctatttgcca

SEQ ID NO: 126932 - DNA, 391 bp, Homo sapiens
tctggaaccagactgcctggctctgagagttcagcaccctcagctcctagctgtgctgccttttgtaagtcactcaacttctctgtgccttagttctcttctttgtaaaacagggaaataatactacctacctcacagtgaaaatgacatgactttttgatgaacgcaacccagagaagtgcccagcacagagttaactgtctgcgttagcctttatcattagctatagttttattatatttcatttcccctttatgcctcatcctcaattccattccctttcttctcaaaatcgcccattgtgctttgaatccatgtccatacttgtcctctaacgtatgtaaatatatagtgtttgttgttttgtgaatgctttcaaaagattttttag

SEQ ID NO: 126933 - DNA, 897 bp, Homo sapiens
gtcatctacttaccgtggctatgaatttgtctattctagacgtttcatcagtgtgtgtgatgcataatgttatgtgtcattagcacttaactaacccaacacttggttgggccacagcgtccagacatttggttaaacattattattgtggatgtttctgtgaaggtattttttggatgagattaacatttcaattagtagacttggagtaaagcgaattcatctccacagtgcagatgagcctcgtccgatcagttcacagcttgagagaaaaagactggtctccccagaaggacgtctgcagctcttcccagcgtccccagcctgtccacctgccccagtcaatcatggccttgccctcctccacagtcacgtgagcccattccttaagacaaatctcccagactgaatttatttacaatagatatgagaaactactgtacggttacaacggagagtcaatttatattcagttgtgtgtgtgtgtagtgagatcgagtcttgtctgtgcccaggctagatgtgcagctgcacaaatctcggttttacctgaacctcgcctccgggttccaagcgattcttaattgtctcagctcccgagtactgggaccaaaggccgcatgcaataaaacgtgataattgagtattcaaaaagcggatgcgtccaccgggtcagcagttggccgacatctgaactcgtgattgggcactggctcccaaagtgtgggattacagggggccacactggcccggcaattcatttaacaaacttcaccctgcagaggcggggcgccacaggcgcgaacaattggcacgcagatccggaaagggtggctcggtaacaaagagacaacgcaaggtctgctagctggcggaacccacacgccaaggggagta

SEQ ID NO: 126934 - DNA, 875 bp, Homo sapiens
gagccaagatcgcaccactgccctccagcctgggcaatagagcaagactccatctcacaaaataaaaagccaaaaaaagctctcgacagttctgttccccgcctgaggtgtttgtctcaggatcccggcctggctgtgggccacagatggcaaaaaccaaggtccgtctattactgggcatccagggtttcataatctctacgacctccatgcctggaactccacacattgcgcatgccccagaaacgcttgcccaacggaccccaatccaccatttctgaatgcatttttcatgacttgctgaatgtgtcttgttaatccaattagattgtaaactccgggagtgcagggacaacgttgaccttcctattactcccctcacccccgcccagctctggtctgggcacacagtgaccctcaagggtagcacaaagacttgaggcaagaaaaacacctgtagaaggaaaaggctggatactgggagcgcctctgtctgctttgctgccatcctcttcttcaacaacaaaggacacgctaattctatgcagcaaaagtttccaaacacgttagcctaagaatttcgagtcatgcaaaaaataaattcccagagtcacagggttaaaaaaaatcagattccagggccccatccttgttgttcctgagtcagactccccagtcaaactgccagagaacctcttctttgaacaaacacttcaggcaactttcccaggataaagcaagtttcagaaactctcacacagcttcttaggtatctcagatatggctcttgccctccagatgtttacaaatgaaaacaagaaatctggttccaacaagcaaaagcccagagagacctcaaacacaaagatgcaaat

SEQ ID NO: 126935 - DNA, 288 bp, Homo sapiens
ttcgagaccagcctggtcaacatagtgaaaccccatctctattttgtataaaaatataaagtaattaaaacttaaaaaaggaggaatgaaaattatgtttactcaactatgaaaaaaatgctcaggaggaaggaactagatcacaatactaatatgttgacttggttacaacgatggggatattgtggctggaccatatttgttttcctttttctacgaataagcatgtaagataaatttctgggctgggtgcagtggctcacacctgtaatcccagcactttgggag

SEQ ID NO: 126936 - DNA, 277 bp, Homo sapiens
ctcctgggttcaagggattctctggcctcagcctcctgagtagctgggattacaggtacacgcaaccacgcctggctaatttttgtattttttaatagagatgtggtttcaccatgttggccaggctggtcttgaatgcctgatctcaggtagtccacctaccttggcctcccaaagtgctgagattacaggcgtgagccactgtgcccagcccatctaacattttttttcagaattaattggaaaaagacacctagttttgttgttgttgttgctg

SEQ ID NO: 126937 - DNA, 457 bp, Homo sapiens
cagtaacttagtggcccagggttgcctgagaagggctttggactccttagatgagaggtaaagcctgaatcccaaattgcactgtgcgatattagactctgaagatttagcaagaggcgtgtttgggtgaatgattatcttttgtcttttctagtgaatcattttcatgtgtcatcaaccatgtttcttacctggtagatatgaaactgcacctttctgtagaaaatctatttaatgattagccagggggccaagggataattgaaaatcatccagttggcatcgggactccagggttttagtttcaactctgctgccaactaattcagtgttacttgggtaaacgactaccctttctcaggtcttagtttccatgtctgtgaaaaacaaatatttgccgtaaaaacagtgatgtctaaactgtgtttaaaatgggcccaaattttcttcaacgtgc

SEQ ID NO: 126938 - DNA, 274 bp, Homo sapiens
tggaaagccagataactattactctgtatgatagtgcagggaacgttctgtgtgtggttgtgttatgttgacattccatccagtgtgccactccgtataattccgtctgacgtgccactccatataattgggatgctgtctgttcacttagctgatagaggtgggattcagagactgtggtgtctgtgatgctgtgatcctagacatggtaagtgcgtaatacctctagatgctgatagattaagctatgattgaatttatagtttccagaatg

SEQ ID NO: 126939 - DNA, 369 bp, Homo sapiens
ttcacccatttagtttctgccagtctctgaaagcatttgcctctggccatagagaatgattttggataagaccaccagcacagggcagaaatgtgcagagtgtatacagtggggaccaaagtaaaagagatgccagaggtaatggagaacaaagggcatagatgccacaataggatcagaatggtgccgaaaggtggcaatggggagggagagatgctccaagggtcaaatttcagagattacatctggataaaagcatggaaactgcagattgaaaagttgtttgcagtctttgatagagcaatggaagcaatgatgagcgatcaactcattttaaggaaagaggaggtgttgagatgccgaagtgag

SEQ ID NO: 126940 - DNA, 190 bp, Homo sapiens
agtctagaatttgccccaaatcagaagtatacctctgaattatctgtatgtgtcctggattccttggggtcagatttttaaagttactttataaccattttgtccatttgatgccattgtttatcatcttttgagaaaaaagttctgtcatacccttctctccacaaaaaagagactgagagggagatca

SEQ ID NO: 126941 - DNA, 350 bp, Homo sapiens
taagatgttgacaggaaggaaggaaagggtgaaagaaagacagagagggaggaggagagaagacagagagacccacaggacacaagagacagacacacagggaatcacagagagagacagtctaggccaaagctccctggagatcccacagcgtggggacaaaagcctgtggtcccggctgcctagaggcacagtatgagtgaatgcagttagacatcaggaagaccttccagagagtgaaggatggacacagacaccttctaaccatctaataatggggcaggggataaagttctgagtggggaattaacaatcctgagtctttttcccaacgtctctgcttacccggt

SEQ ID NO: 126942 - DNA, 503 bp, Homo sapiens
cctcccaaagtgctgggattacaggcgtgagccacggtgcccagtcttgttttgttttttgagatagggccttgctctgtcgttcaggctggagtgcagtggtgcaatctcgggtcactgcaacctccgcctcctgggttcaagcgagtctgtcacctcagccccccgagtagctgagattacaggcacccaccagcaggcctggctaatttttgtatttttagtagagatggggtttcaccacgttagccaggctggtctcaactcctggcttcaagtgatctgcccgtcttggcctcccaaagtgctaggattacaggtataagccaccgtacccggcctaaggaaaggtgtaggtctttctacacctgacttgcctatgcctaccttttcttacatcatttctcctgcctagaatgcctcctgttcaaaaccattaatccatacccctgccactcttttcaaaacaaattcaaaattcatctcttgttaggcttctttgt

SEQ ID NO: 126943 - DNA, 265 bp, Homo sapiens
ccagaagggccctgagcatggcacgtgccctctggaagctctccgtcctttcatctgtggcgaaggcatagctgatcccacacgctgcccacttgctcctgcgaagcctcctaccctggagccgctcaggcccagcccacagccactctcaccactgcggtgatcccagggactgggaacaggtctctttctgtaacaccagggcttagtgctttggtgctactcttacttctttatttgacttaattaattccaactctccagc

SEQ ID NO: 126944 - DNA, 297 bp, Homo sapiens
actttgaaaaaatgagaaatcctcgagaaatcagctctttatgaagtttagaataagaccatcctatcctttaggtctgtttcaaagcagatgttagttttgatgctaaatatatcaactccttttactgaacaccatcaacaacaaagccactgctcacagcccgcttctcagactttccagtacttcctaagtgccttcacttttcctccgtagagaagaacagacattggtgatgacctgacattcagaacgtggccacacaagccacggtcagccgtgggttgaccgttgctt

SEQ ID NO: 126945 - DNA, 112 bp, Homo sapiens
aaggtatcctaatcaacattgctgtcgacaatgtgtgaggatacttgttcacagcaatcagccacactaagtattatatattatctacagccatttttcctttttaggtaat

SEQ ID NO: 126946 - DNA, 635 bp, Homo sapiens
  misc_feature (613)..(613): n is a, c, g, or t
  misc_feature (635)..(635): n is a, c, g, or t
gatctagaggatcccgctgccgctactactactgttaacctgctgaggcagctgtcactgaacaatcccggtgctcccctcacttcatcctttattgtctgagtgaacgggaagctatttgggccttccgagataacataggtgtttggttctcagatctcgtgtaagaaattcattttaacacacgctgagtctgctgacaccctttctctgctcatcattttagcagctctacctcatttactgtaggccatcattcctcgccaagtattggatttttttcttttcagagagacaggggtctcattatattgcctaggctagtttccaactcctgggctcaagcagtcctcccatctcagcttcctgagtagctgggaccacagatgtgtgccaccacgcccagctaatttttatttttgtagagactgggtctcactatgttgcccaggctggtctcgggctcctgggctcaggcgatccttctgcatcagcctcccagagtgctgggattataggcatgagccactgtgcacagcccactagggtgtcttgagccacagagaactgtggcattgactaataaaccttggtgttcttaacaaaaactttnagccacaggatagggtttgatn

SEQ ID NO: 126947 - DNA, 397 bp, Homo sapiens
ctactcctttgagctctccagacccacatatctaactattcactcaaattggaaactgaggtgtcaccatgcatacctccttttccatcaattctcacaatccactgagtactcaatcttctaatattctgctaatatctatttactctattcccaaagatcacctttaggaatctccagatattttaaatgtttttttggaggacaggagcatagcttcttacagattcccaaaggagtccattatccctaaaaagtcaagaaccattgctaatctttcccctccaattcctcctccaccctgtcagaatggtccatctaaaatgcaagtgtgaattcgacattgccctgcttaaaatcctttaacggccttcagaatagagaatgagctccctag

SEQ ID NO: 126948 - DNA, 460 bp, Homo sapiens
cagggctgggggaatcacactacttgatttcaaaaagctataaatttactaggacagtgtggtattggtgtaaagacagagatacagattagtgaaacagaagacagtccaggaattgatcatgtatgtaagttaattcatttcaacaaatgtgtcaaggtaatttaatagggaaaggaaggacagtcttttcaataaatggtgcttgaaaaatatgcaaaatgaaacaaaacaaaattaaaggaacctagacttttaccttacactacatataaaacttaactcaaagcagatcacatacctaaatacatgggctaaaactataaaacttctcaaagcaaacaggagaaaatcttcatgaccttaaattagacaaggatttcctagacagaatgcaaaaagcatgaaccataaaattaaaaactggtaaaatggatttcatcccactgtggaactttta

SEQ ID NO: 126949 - DNA, 409 bp, Homo sapiens
atatgtaagattgttatttatttgtaattttcattctgtttctcttggtttggattctcatcctatgcaactatggctctttgcagttataatcaatatgcagctagtgcataattgaaaatttccgggctgggcacagtggcttattcctacaatcccagcactgtgggaggctgaggagggcggatcacctgaggtcaggacttcaagagcagcctgaccaacatggagaaaccccgtctctactaaaaatacaaaattagccaggcatggtggagcacgcctgtaatccttgctactcaggaggctgaggcaggagaatcgcttgaacctaggaggctgaggttgcagtgagccaagttcgtaccactgcactccagcctgggcaacaagagcgaaactccgtctc

SEQ ID NO: 126950 - DNA, 319 bp, Homo sapiens
ctgtcaccaaaggtatgtttttacttttcacatgagctcttgccctttgtagtacaataatttaggaaacttttctgcaaaaccattgattctccagctgtagtttctctacactcttacaatgagacatggtaagttagcagaagatggtttgggtctaaagccgtgaaattcacaaaggcatgtagtgagtggcatgcattataatcatcgacctctcactttgactctatctggctttctgagaatgacatctcgcctgtccctggggcttatccatcagcatttcttgcattgtgatcttttattattttgaaat

SEQ ID NO: 126951 - DNA, 181 bp, Homo sapiens
cttggactcacagtgcagcctaggacttcactgactgttataaactgatagcatcccccttccaaagaagaccttcctagtcctgtaagcactgatcctaagctgcttttccaatgctactttgccattgggtgaagcaaaatgtcagataagcttactagcaaatgtgcctctgagcaca

SEQ ID NO: 126952 - DNA, 305 bp, Homo sapiens
tctgctcaaagctggggatctccagatgaagatgatgtggtcagtggagaaaggccagtcaactaacacaagttttagacttccagtttggaaatactgtgacgggatactctgacagaccctcctgctaccacaggaataaagaacacgaattaagaacatacacgcaaacaaaacgctttgaaaagctggttctacctatgcaggtggtaagggggaagccagggcctcctcaggggcagatgccaacagcggcggtggggtgaggagcagcccgggcgtaagcaagcgggaccacaccgaag

SEQ ID NO: 126953 - DNA, 537 bp, Homo sapiens
caattatctaagcttccactttaaaaagctagagaaagaaaagcaaagtatgcccaaaataagtagaacacttttttaatattttacctgaagtgatatacatttagaaaaaaatagtacgttgaaggacgaaaataataaaaatatggcaaaaatcaataaatagaaaacaagcagtaaagtcaataaaactaagagctggatcttttcaaagatgaataaaattgataaacccaagtgaaacaaataaagaaaaagagagagaaaacacaaataccaacattgtcagtgaaagaaggggatatcattaacacaacttaccaaaactaaaacaaaagagataaaaaatctaatagcccaatatctattaaagaagcagaatacattatcaaaataacttatcataaagaaaactccaggctcacattgttttattaatgaaatctatcaagcatttaaagaagaaatagtgctaatcttacccaaacactttgaaaaatagtaaaggagggaatatgttatatggaccagcataag

SEQ ID NO: 126954 - DNA, 375 bp, Homo sapiens
cctcttctcttgaaggccagtgtttgttaattagtgagtgttgaattgctccccgggtttagtaggcatcttgtggttaatggagacagatggtcttcccttgatagatgcttctggaaagttaacattccagcagtgacggttacattcctgtcaggcaggacttcaggaagagaggaactccgcaccgtttgatcaggattcccaggtgtgactttgcaggtgaagaaatttgattttatcaattcatttagggtggatggagattgtgagactgagtaaagctatccaagccaagcaagcttacatgagattcaattctccagtgtattagttggcagtggaagatgtgctgtagccagctgtagacttatt

SEQ ID NO: 126955 - DNA, 212 bp, Homo sapiens
tacagtacctccctgggtagagtcttatacagctgagcagataccagttgctactggcctcccctggcagtagtataacagcacaaaaattcaattgaccattaaactggtaggtcaataaaagttgaatgtaggaataaatgatgacattagcttaggctgagtgcagtggctcacccctgtaatcccaacattttgggaggtcaagggga

SEQ ID NO: 126956 - DNA, 987 bp, Homo sapiens
ggaagacggtggcgatcaaaagggcagacatgctgaagtatgtcatcaaaaggtacaggagcttcctccctgagattttcaagaaagcctctgacctccccgagttagtctttgggttctatctgaaggaacttgatccagcagagcactcctatgtcttgatcagaaaaatcgatcctgccctggtttggggcctgacaggcgaccagggcacaccaaagacccggctcctgatgattactctggactcgatcttcatgcaggccagctgtgtccccgaggaggtggtctgggaggtgttgagggtgttggaggcacatttcgtctaaaaagcatttcgtctttggggagtccatgaagctcatcaccaaagctagtgtgcagcaggagtatctggtgcacaaataggtgtcccacagcaatcccacgctctaggtattcttgtgggggctctcaaaggaaacaagacagatggaagtcccggagtttgtggccaaagtgaatgacacccaccccagttcctttccgtggcagtaaatgaggcattgagagaagaggaggagataccccgtgcccgagatggcagctgccgttggtgacgtgacaagtgccagtgttagtgccagttccagttccagggcctatgccatggctgaagcaagcatcagcaccagcaccaatgcaagtgccagttgccagtgccagggctagagccatggctggagcaagtatcagtacctgggacagtgccagtgtggttgcaatctcaggctagtgtcagggactcctcctgccagcagtgaaggctggggctgagtcttcactttgttttgctgtgggtagtcaaaagggccccacagcagtgggtgctggggtcctgacttttcaagagtcgaggggtagagtggggttagggagaacctgccgcccatggtatctgtgttccagttctatttgtctttctcagtgatttagctttcaatttgc

SEQ ID NO: 126957 - DNA, 825 bp, Homo sapiens
ggaagacggtggcgatcaaaagggcagacatgctgaagtatgtcatcaaaaggtacaggagcttcctccctgagattttcaagaaagcctctgacctccccgagttagtctttgggttctatctgaaggaacttgatccagcagagcactcctatgtcttgatcagaaaaatcgatcctgccctggtttggggcctgacaggcgaccagggcacaccaaagacccggctcctgatgattactctggactcgatcttcatgcaggccagctgtgtccccgaggaggtggtctgggaggtgttgagggtgttggaggcacatttcgtctaaaaagcatttcgtctttggggagtccatgaagctcatcaccaaagctagtgtgcagcaggagtatctggtgcacaaataggtgtcccacagcaatcccacgctctaggtattcttgtgggggctctcaaaggaaacaagacagatggaagtcccggagtttgtggccaaagtgaatgacacccaccccagttcctttccgtggcatcgataaacaccggtgtttatcgatgccactcccaaggtccggggagtggctatcggaggtagtatcaggctaggacgtgttcttcatagataagtggaggagaaatgctgtaagaattcacctgatgagtattcaaaaaacaaggtggcatcgtatagggagggacatgtggatgggtatggcaggttgttaccgtagaggtcgttctgtccattgatctagggatggtaagagtggtatggatggtgagtgtttagtaaggtaacgtcgtgactcatatagagagagatg

SEQ ID NO: 126958 - DNA, 1080 bp, Homo sapiens
ttccacctcggcctcccaaaatccagggattacaggcatgagccaccatccctggcctgaaataaataaataatgcataaatgtcatttttaaatttatgatgacaaattctaaagagaaaagtaaaaggaaagcaggaatagaatgtattgaggggaaggggttgagtgttcacagatggcttcatacagaaggtgacatttgagtaagggcttgaaagaagtgaaggagtgagccatacacatatatgagaagagcattctaggcatagtgaatcacagtgtacatgtcctgagacagaagcttgcctgaggaatggtgagggtgggtccttattttgtggtgctttatggaagtgcttttcaaacttcaatgtgcacatgaattaccttgggggtttctattaaaatttagactctaatttcataggtctggggtagggcctaattctaataagctcccaggtgctgctgctgctgctggtctttgtaggacttcagcatttacactgagcaaaataggaagtctttggagcgtttgggcagggtgacatgatctgatttatattttgacattttcatttctttggctgctgagtagatagtggtggattgggcaaggacaaaagcagaaatactagtttggagcctattactgtaatcaaggtgagagaaaatgtggtttgtgctagagagtagcagtgactgtggtaacatgatctgattctggatatatttttcaagtagagtcagcaggttttgctgatagattggatatgtgctgtgaaagaaaggaaagagttaaggtttttgtattgagtttctggaagaatgcagttgtcatttattgagatggagaagactgaaagaaagagaaacaagtttgcaggagaagtaacagaagctcagttttagacataaattaaacatgcctattaagacttagagatgttggccaggcgcagtggctcacgcctgtaatcccagtgctttgggaggccgaggcgggcagatcacctgaggtcaggagttcaagaccagcctggcgaatgtcgtgaaaccccatctctactaaaaaaaa

SEQ ID NO: 126959 - DNA, 624 bp, Homo sapiens
atattaaaaaattaagtcaacaatatacacaaatggtaatgcacaaagaccaagtggagtttatgctgggaaagcaaggtgtattgaagtaatacaacatccccaatttaaagagcaaaagcatacaaacacttcacaaaataaagtaaataaatggccaacttgaactaactgacatttagagaacacatcattggtaaacagaaaaatacacactatttttaagtgcacatgaaatatatactgagatcaattatgttataaaacaagtctcaataaattaaaaatattcaaaccattcaatatatgttttctaaatacaattactaacttagaaatcagtagatatatacctggaaaatcttccaatatttgaaatccaactaatgcacttctaaataaaatcaagaaatcaacaaaaaatgaaaataaaagtagaaagtattttgatttaaaatgtgaaccaaagctaaagcattgcttagaataagctgatatcaataaacacatataaaaggaaaaaaatcaatttcataggttttctttcaccttaataaactagaaattgagtaaattaaaagcaaagtaaacattagaaagtaataaagatgggaaattattaaa

SEQ ID NO: 126960 - DNA, 209 bp, Homo sapiens
atgacatggacacagggagacaacacggaatgagtggagacggatggcatgaaatcaatactggcacaccagaacatggctttgcttggccacatgtgatctttacccctgatcgtgagtgtggctgaggtcctctcctgcccacacacgcacgagtactccccggcatctgccacagacaggccacgaatctgcagctcacacctggt

SEQ ID NO: 126961 - DNA, 254 bp, Homo sapiens
cagagtagtgtagtaaaaagatcttcaggtttgaagttagacatatttttcaaacccagttctggtatattccgagataagagtatgtaatttacaggtattatgatgattgaaagaagtagctagcaatattcctagcacatggcaggcgatgggaatgagaggatggttgtgtcctttggcctgaccctccactgtcttgccaaggcttgaggtccttataattctacagtgtagagtcactcgcgtgctgc

SEQ ID NO: 126962 - DNA, 183 bp, Homo sapiens
ttttcaccctttgtatttgctctgatctagtccttatatccagaatgcccttcctgccatctgcagctactgaactcctacctctccagaaagcccagttcagatgctccctcctccacacagtcttgccagattgctcctccagagtcctccccacttctgaatctgttggccatcttgact

SEQ ID NO: 126963 - DNA, 270 bp, Homo sapiens
gcccctctttatcattaatgcaggggtcatctgaagacatagcaggctgagtttggagtgggatggatggagcgggagacataagaccaagctgtggtggctggaggctggatgaggggcacagtgatgacaggcaaggccacctcctaccacccggtgaaaggtgaaggctgggcctcctgttctcaggaggtagctgccaagcggggacccgagtctgccggccttctgagcaaggagctcaccgctgctgagaccctcaatccaagc

SEQ ID NO: 126964 - DNA, 250 bp, Homo sapiens
gaaaaatagcccttttctaccccagaaaagtttttcatcttccttaacaagaggcaataactgagtcaagaccatcaaaacttgcagctcttgccctaccccgcatcaaattgcagcatattgagagatgataaatatgtaaaacatgaagccagagaggcaaagacgtcagctcaacattttactgttactttcagatagcatcaaaacttggcacatgatgttgtggacagaaccgcaggctatattt

SEQ ID NO: 126965 - DNA, 485 bp, Homo sapiens
tatacaatgagagaaaatacttacaaatcatatatctgataaagggtctagtattgagatcatacaaaaactcttccaactctagaataaaaagcaaattttaaaacgggcaatggatttgaataggcatttctcagaagaaaatatacagatagccagttacacatgaaaagatgctcaacatcattgtcattaaggaaatgcagggctgggtggggtggctcatacctttaatcccagcagtttggaaagttaataccggaggatagtttgaggccaggagttcaagaccaacctgggcaacatacggagaccccctatctctacaaagaagaattttaaaaatgtagccaggcacggtggtatgatcatgccacagcctgggcaacatagtgagaccctgtctctttaaaaagcaaacaaaaaaaggaaatgtgtatcctaaccacaatgagatattacttcacgctcattaggaaggatgg

SEQ ID NO: 126966 - DNA, 281 bp, Homo sapiens
cagaaagaaatgcaagggagttgtctaggttactagaaaagccaatgtcttcctgagaaggagggagggggagagagagagaaaagaaaggaagaaaagaaagaaagcccagatttacatctttctagaatgggttcaaccatgctctgccctgagaacagacgcagaaattaaaattgtgtcctgtagtccctgcctgtgacagtcctttcagtttataactggattcacacaggtttacacagcacatcttctgaatgacagaaatctaaggtgaatat

SEQ ID NO: 126967 - DNA, 202 bp, Homo sapiens
gggatgacatcacacaccacaactcacacgagaggatggcagccatcagaccccacccacgctgagctaaccgctgagtcaagcagagcccccgctcctctacttcagtatcatcaacggcctttgggatcctatgtattttattttacgtatttaaagcaaattgtaaggctgggtccacagacttcaccaggctgccaca

SEQ ID NO: 126968 - DNA, 628 bp, Homo sapiens
tgtggtggctcacatctgtaatcccagtactttgggaggctgaggcgagtggattgcctgagctcaggagttcaagaccagcctgggcaacaaggtgaaaccccgtctctactaaaatacaaaatatatatacatattagctgggcggggtggcacgtgcctatagtcccagctactcaggaggctgaggcaagaggatcacttgagcccaagagattgaggctgcagtgaactgtgactgtgccactacaccccagcctaggcgattgagactctgtctccaaaaagaatttaaatttaaaagtcactgattttaaaataaattattcaataggttcacagggcttattctggatagagtcaacaggatgttctggctgaaaaagtgaaattgaaacagagtagaaagtgaggagctagctatgtaaaattctaaggagagcattctagagcatgggcaaaggcatcagacgggtcttggttaaagaatggagaggtgtgtcacaggcagcccaaaggagagagtgatgggcgataagatgacagatttcttgattagcatctgaaaccggtccaaatctatctaaaattagcccttctttaggttgtttttaaagaatccctaaaa

SEQ ID NO: 126969 - DNA, 736 bp, Homo sapiens
  misc_feature (656)..(656): n is a, c, g, or t
aaggtctctcagtacggggaatcttggttgcggtggcatcggttcttctccttattttgacccacactggcatgccacctgaagtcccgataacagcctgatttctcactaaacactccatcgaaccatttcattatttgtctctcctattttcagcactttccttttgctttcacaaagcttaagggagaatcagctatgacagagaaattccttttcctttatctttccctccttcccatgcccctactctcacaggcacagtggaatgaaaattcccttgtcagtttttccaaaataattgcttcgggaaaccatctaagcaactgttggatctgccacaacttcatcaccaggtcctcatcttaccaatatattttggtaagaaatttttctttaaacctaacatttggttcaggaatccctgaaggccaacataaatctgttccgctccaggtttcgcttgctaactcagcgcaccaagtcccctgcctggatctcactccacctttcaatcaaagctctaaaacttctttctatttctacaactgctcttctctaaaccaaacctgttgtccatgccctgaaggacactgtgacatagggggaaggggctgagaggcagaggtgaggcaatgcttttgggtgtgcatggnctcttgtgactgtgtcgtgtgactggggggtatccggggggctgctgtggtctgctgcctcaagtctgagggttatgaga

SEQ ID NO: 126970 - DNA, 424 bp, Homo sapiens
ttgtatttttagtagagacggggtttcaccatgttggtcaagctggtctcgaactactgacctcaagtgatacacctgtctcagcccccaaagtgctgggattacaggcgtgagccatcgcacgcggctgctcacttagtttaggtactttccactgtttatgtcttaaaactaacgatgacatctggactttggactagaaacgtcaagctgatgaagtcgtttgttcttgtgtgcttctgtgatgatccatggaggagcttaagtctaaagattgccattttgctatagctttcaggaagagaaaataaaaagtaaaatacaaattgaagcatgttctcagtttacagtcataattctagctgagcattagcggacagaatgttaatactttggaatccaccaaggccatttctgcatctgc

SEQ ID NO: 126971 - DNA, 521 bp, Homo sapiens
tcgtagaggaagagtcttgcgatgttgtcaaggctggtatgaactcctggcctcaagccatcctcttgccttggtctcacaaaatgctaggattataggtatgaaccacagtgcctggccaattctaggtttttatgatcaagtacattaaatatcacctcgtttgttttgatcctttttactagtctgttgaaaactttttgaatcctgacaaagcaaataggggagtaccttcttaaattttatgccataagcatctcacaaaagtcctggcctaaccttctttctttaccatttaatttttccagaactaaaagattcatgatgccaagtttgtaaatactgttttaattatcaactcatgttggtaatgactaatgataacagctgtctttaaaatacagtcttctatttctcatatgttattatgaggaaggtgttagcctcattttacagataaggaaaatgaggcttagaaagattaagtaacttcatttatattttcatttgttcaataatat

SEQ ID NO: 126972 - DNA, 661 bp, Homo sapiens
ggggaaaggcaggagctagattcatggctccatactggaacgatattgagctattgaagggtttaaaagagggatagcatcatcagttttgtgtctagaaagtttgctttatgtttatatagatgtatggaagagaattgacggtggtgaactaaaggtgggaaaatcagcaaagactcttggggtggttgaagaaaagaacgacagaagtcactcgggatagtaatagttggtatggagactagagaatggatgtgaaagatgctcaggatgttgaattgactacaaaggtcaccacttagaagtggagagtaagagagggtaggcttgggaaggctcttgggattctgatgttggccgtgcagtagaggatgggcttggtgtgtaggagatgctttcacttttcacttctttctccacctttaccctggtaaaaggtagctcccactgttcttgttctaaagggttttgtggtcctctctgcttccctttattgcagcacctgacctgtggtataataaccgcctgtgtacttgttctttcctgcacttgtaagctctttgaggattagctgtggtcagtgctggccacaaagaggcaagctaaactgtggatggattgaatgaataaggaccaagactgggatagagaagcagatttt

SEQ ID NO: 126973 - DNA, 372 bp, Homo sapiens
ctcttggaatgtattgcctagtggacaatatagacaaacaattgtcagttccattgtattgtacatatctttcagatgcattctggagagtaccaggattctccagaagtgccttggaggtcagtgcacagctaccaaggaggctgaacacgtgtagcttcagcttctccaccccttcttcaacagaatagctccacatgtattatcacacttcttcttcacatatgtgtgttcatcataagagttttacttgagaaaatgtattttgcaatttaagtgtgaagttctaaagagtgtgatatgcgctttaatggaggaaatgcacttgagagataggaactggaggaactggtttcaagaagcaggaactgg

SEQ ID NO: 126974 - DNA, 167 bp, Homo sapiens
cagaatgtatttaacctgtgtacaactgataagctttcggttcacagtcttttgcaagtataatgatgcaatgaataaccttgtacacaaaccattttgcacacacaagagtaaaggaaaccttttaagcaaaatgtatctaccagcccagtgcagtggctcctgtc

SEQ ID NO: 126975 - DNA, 318 bp, Homo sapiens
tgaatgttgattaagcatactcccaggctttgaaattctgaaagcagtgtcagaataatggatgttgagcaaatgtcaagcatttgttaatttctctgttatttggagtttatctaccatgatcaatcaaataaactagtgcttctctcttgtggcatgtgtcattgatatggtgattaggtggctagagagaccttctgctttttttccaggtaacagattataaacgagtagacagagcttttcagttaaagatttgtttatggcttggtttagtagaaatttgtatattaactgaatactttggtggcagtgtga

SEQ ID NO: 126976 - DNA, 373 bp, Homo sapiens
actgggaagaaaggcatcgttctcaaactaaaaaacaagtttgattaaatcttgtgatacttctaggcctaagtaactctgccatgggcttgcagattttttagacttttcttgttgatttagacacagcattgtctaacctactgacttaggaatcctttccatatgttaataggatttgactcaagagctaaaaggaaagcaaatagaaatgggtgtgagagataaagatgagagacgaggacagaacacaaaggagcaccttccctacctgcaaaaaacagatgagcacaggtggtctgaatgagggcagagaacctatagggggcagggaagcaaacttccaaagtctggagagctgctgagtgaccag

SEQ ID NO: 126977 - DNA, 226 bp, Homo sapiens
tgatccgcccgcctctcctgccgaagtgctgggattacaggcgtgagtcaccgcgcccggccaacaagtggatttttaaaggaaaaaagaggcagttgctaaattcctcgccaacaatttacattaaaatacataagcgatttattggcttgttctttgtatcacaaattccacaaatttagaaacgtgattgtaatgagtgaagcaggtattcagggactacatg

SEQ ID NO: 126978 - DNA, 536 bp, Homo sapiens
gtaaatggaactgttttcatgatttccttttcagattgttcattgttagtgtatggaaatgtaagtcatttttctgtgttgattttttttatcctgctagtttgctgaattcatttattaattttaagtctttttgtgtgtgtgtgtgtgaaaactttagaattatctacatataatatcacctgggatcagaaataatttcacttcttcctttccaatttggccagggcaattaggcaggagaaggaaataaagggtattcaactaggaaaagaggaagtcaaattgtccctttttgcagatgacatgattgtatatctagaaaaccccaatgtctcagcccaaaatctccttaagctgataagcaacttcagcaaagtctcaggatacaaaatcaatgtacaaaaatcacaagcattcttatacaccaataacagacagagagccaaatcatgagtgaactcccattcacaactttattctctttgaagagaataaaatatctaggaatccaacttacaagggacgtgaaggac

SEQ ID NO: 126979 - DNA, 193 bp, Homo sapiens
tgcggcaacctggcaacgtccttaaatgaccccctccacactctgccaggccctgggtgtctccaccagcatacaggctgtgtagaaagcagctctcctagtgaccagggtcactgctgcagtttcagtgtttctccacaaaatatggccctcgaagaggctgctcagcttacagaaacctggcaggtggcct

SEQ ID NO: 126980 - DNA, 390 bp, Homo sapiens
aaatggggtgctgctataacaaacacctaaaaatgcagaaatgggcaatgggcagaggctaaaagaattttgagaagcataatagaaaaagtctaggtggtcttgacatactgttaatagaaatacgatgttaatgtctctcccagtgtgggctcagaacgaagtgagaagcatggtagatgacacattatcaccttagaaaatatgtgaattatcatgaacatactattgctagacgcatggagcttaaatttgctgctgatgaggacttggatgggaagaaaggtgaaacatgttatcaaaaactagaggaaggggatccttgctatatacaggcagaaagcttagctgaattaagtccagcagttacgtggaaagcagaccttgtaa

SEQ ID NO: 126981 - DNA, 413 bp, Homo sapiens
  misc_feature (1)..(1): n is a, c, g, or t
nagttgcagtagcgcgatcttgactcaccgcaacctccgcctcccgggttcaagcaattctcctgcctcggcctcccaaagtgctgggattacaggtgtgagcaactgcacctggcctagcacatttttagcagaaaaatgagccccatattccttagctgtcacctcctaatcctccacagatttacctagtctgcgcatttcacaaaaatggatcatgtgtaatacatggtcctttgtaactggtttcgttcacatagcatgtttgcaggctcattcatattgtagcctgtatcagtacttgatttttgttcattgttaaatggtatcccattgtatggatgtaccacatcttgtttatccatttgtcattgatggacatttgggctgtttctacttttggctactatgaa

SEQ ID NO: 126982 - DNA, 353 bp, Homo sapiens
ctgacaccccattaggctcagcaaattacctgggctgtactgctgcaaagcttcacagacagcccccattacttcagtcaagcccagatttcttcctcatctgttacctatctcggcgtaattctcgtaaaagcacacgtgctttccctgccaatcgtgtccgactgatctctcaaaccccagcaccttctacaaaacaacaactcttttccttcctaggcatggttagcgtggtcggaattcttacacaagagccaggaccacaccctgtagcctttctgtccaaacaacttgaccttactgttttagcctagccctcatgtctgcgtgcagcagctgctgctgctttaata

SEQ ID NO: 126983 - DNA, 694 bp, Homo sapiens
cgtggtggctcacacctgtaatcctagcactttgggaggccaaggtaggaggatcccttgagcccaggagttggagaccagcctgggcaacacagggagactgtgtctctaaaaaataaaaaatttttaaaaacaccaatatttctatttccacctaaaaatttaagatgcacactctcattgaacaaaacctataatctaaacaatttgagattagtttttgttcactactgtatcccagcatgaaacctaacacataacatctcgaaaacctaatgacaataagaaagcacaaaacttgcatatatacaggctgagtatccctaatctgaaaatccaaaatgctctaaaatgcaaaactctttgagagccgatatgatgctaaaaggaaatgctcattggaacatttcatattttggatttttggattaggaatactgaactagttaagtatatcacaaatattccaaaaccagaaaagaatctgaaatctgaaacacttctggtcccaagcatttcagataagggatacttgacctgtactatgtctgcaattaaatggttatgtgtgaatgtggacaaacattaggaagcaaatgtacacaaatgtaaatagctgatatatagttggtcagttattttcttgggttggagaaggatctctacatcccaccccaccccaaatttctttaac

SEQ ID NO: 126984 - DNA, 217 bp, Homo sapiens
aacatgttaaacatttcagacctcaaattggtgctacatactgtctgccaaccctacatagtttctcttgtaagcgctctcccacactgcatcacaccatcttgtttcttttctctcttcctactgtcaccaccttattattccctggccattgttttctttcctctcgaccatggcaatgctggtattcttctctctggtgtctccttccatgtaa

SEQ ID NO: 126985 - DNA, 179 bp, Homo sapiens
aagttctttctcttttgccatctgcagccctgggtatgcagcaggtgcggatcatacatcccatcccaaacagcttactatatgtgtctgcgcttcagcttacagaggattttagcaattcacagtgagcactgaggtctggttttatgaagaaaactgagctagctaaatgccgtgat

SEQ ID NO: 126986 - DNA, 712 bp, Homo sapiens
actgctggctcacacctgtaatcccagtactttgggaggccaaggtgggaggattgcttgaagccaggagttgaagaccaacctgggcaacatgatgagacccccatctctaccaaaataaattttttttaattagccaggcatagtcaggcattagccagctactcaggaggctaaggtgggaggatcacttgagttcaggagcttgaggctacagcgagctggagtacagtggcaaatgtagttcgctgtaaaaataaatggccaggcacagtggctcacgcatgtaatcccagcactttgggaggccgaggccggcagattacgaggtcaggagatggagaccatcctggctaacacggtgaaaccccgtctctactaaaaatacaaaaaaattagccaggcgtggtggcatgcacctgtaatcacagctgctcgggaggctgagacaggagaatcgcttgaacccgggaggtggaagttgcagtgagctgagagcatgccactgcactccagcctgggaaacagagcaagactccatctcaaaaaactatttagactagaatgtagtaaaagtgtgttcagagactagtttggacacagcactccacaggaatttatcttataaaatacttgatacaggttcaagtataatcactattaacatttttgacaagattttaaaaaatcaaataacccacttatctattag

SEQ ID NO: 126987 - DNA, 398 bp, Homo sapiens
ggtcaagtttggtgtcgaaattcaacaggtaccttcataacagaacctcttagaaaagcttctaatatgacaatgatatcatacgaggggggactggtacttccctcactctgatacacatacacacacatatgtgttaccatcctgagtaacccaggttgggactgcaatgctgggggaacatgtctagcacagagcctgacacttaggagatgaggacagaaggtggctactgcagtctaatgagatcagagcagctgtcttagtatctgatgctttaagtgctccctagatcaaaatacgtgaacacaaagcatctgggggactggggataaaggcaggagagtgcgaaagaatgaaatgttgctctgtcagttcagatcaggagcctgcttcag

SEQ ID NO: 126988 - DNA, 561 bp, Homo sapiens
aaagaggcgggttctaacagacaggcttcaaagataccaagaggcaacgacgtgagagcaactcctgtgtgtgtccccggggacaatctgatgaagaaagcaaatctagccccttatccaaaaggggaaccatggcatgaaataaatctccctggaagcccacagtgcaaactggctgctctctctgatgcatcaacaattccaggaagcagtgagggtggaggttactacccccatcttacagatgggaatgcgggtccagagaggatcgttgcccagctccgaaatcaacacccacagctgattttcatcatatcccagaagcatgctgcaaggagtgtgaatgaaacaccaagtatacagtaagaggaagtgagctgagcttgcaagtgggtggagaagaaacgcactccccaggcagcctcagggcctcagaagccctgcttccacctcccctagcagaccaagcctgggtggggctgggctcagggattcccatgttttcagcacttcatacctgaacccaacctggaagcaaatgctgctccaagacagttatag

SEQ ID NO: 126989 - DNA, 717 bp, Homo sapiens
gcagctatgtgaatgtgagtatcattctagaagtgtgtgtggcacttgctgcagccctgtgtggctgtcctggcactttgttcccggtgtcagggcctctggtgtgtgattgtcgcagcacgtgtggggcagtgtgtgtgggcattcccagcctgacacatggcttgcataaagattgcataaggttataggaaagtgtctctgtcttttacaccgtattgccagtactaatcagtccaaagtttgagaaaatagtaaaagaataacatacatggttgaaatcaagcatttaaaaacattcagtaactttttgaaagaagactctgcttttctgattaaataaataaaagtcttattaatgatttttagtataactatagttcatgtgtgtgttggggggagagtctcgtttaccttcccaaaacaggttggattttaaaatgcaacttttgcaaagtaagtaagtttcagcacaagggcatgttttcatctctgcactttgtcatctgtgtcagtaagcagttaagtggcacagacctgcctggaccccctttggcaggttgttaggatgaattagtgaagtcgtcggtttaaagagcttagggtggtgcctggacagagtgagtgtctaatgattgctaaagtaattttcttagttttactatggaatcataataacccacatagaagactgatattaagagcacagaagaaata

SEQ ID NO: 126990 - DNA, 643 bp, Homo sapiens
cgcagtggctcacgcctgtaatcccagcactttgggaagccaaggcgggtggatcacgaggtcaggagatcgagaccatctggctaacaaggtgaaaccccatctctactaaagaaaaatacaaaaaattagccgggtgtggtggcaggtgcctgtagtcccagctactcaggaggatgaggcaggagaatggcacgaacctgggaggtggagcttgcagtgagccgagattgcaccactgcactccagcctgggcaagagtgtgatactctgtctcaaaaaagaataaaataaaataaaaaagaaatctaaaacataataataaaaaaaataacactatggaaaacaggcagatgtgaaaaagaaccaatcagaacttctagaaatgaaaaatgaaactataaaattaaagactcaatggatgggctaaacagcagacagacacagtggaagagagatttagtgaagtggaagaggagcaaaggaagctatccagaagacacctcagaagataaagagagaggaaatagaaattatgagaaggaaaccagaaggtgctcctgtatctaatggggactccaggggaaaagaggtaggaaagggagccaacagtcagaaagaatggccaaggatggtcttgaat

SEQ ID NO: 126991 - DNA, 170 bp, Homo sapiens
agggagtaagtcagcacaaacaatgaggaaacatttgctgcctttctgatttcttcctagaattaacaggcttacagctgcatttctaggtcagcatttcatatgcctgaagagtatgaggatagtttgaaaaatcagaaggaagatgagagagggctttgcctcttttt

SEQ ID NO: 126992 - DNA, 682 bp, Homo sapiens
cctgtggtatataagtcctgggtctcgggcgtaatggcatgggtatccaccatcttggtttctgttccttgaactcaatggcttctgttcgaagtccctattaaatgtttctttcttaaatactgtatttgtcagcttcttccttcagcatcccaacttcctcagactttggggtacttttgcacagacctagccaccgcaaaacactgtcatagatgcagcaatccactttcacaaaaccccatggacaatgcagagggggagaacagggactgattaaagaaagggacagaaatggcatcactatccaagactgaaaaacaggctgaatggattatcactctgacccaactgcacatttctaatgtcttcatgttttcaattactccatgaattcccttatctgatgctgattatgcacaggactgtgtaagagttaaacaacacctgacactggtgactcacacctgtaatccgagcatcttgggaggctgaagcaggtggataatctgaggtcaggagttcgagaccagcctggccaacacggagaaactccatctccactaaaaatacaaaattacggccaggtgcagtggctcacacctgcaatcccagcacctgggaggccgaggcaggtggatcacctgagatcagaggtctgaaaccagcctgtcaacatggt

SEQ ID NO: 126993 - DNA, 578 bp, Homo sapiens
cagggagggggaaaattgtgcatagggaaacaaggataaaaattccactgaattaccttaagaatctacatagaccataattgtgtaaggccctgcctgcctttgaactgttatatgagatataaattaactctagctttagtcatagtacagtaccttagcctttatcttaattaatacaatgatgtacctacaagccaaattaagaaatagaacatggtcaataccttaaaaacttcatacgtgttctccaattgcatcccctttgtctccaactaagaaaccaaactgaaatttgctattcattgtaggtgtacctagttgattcatatcacaaaataatatgttgtttaatattgcatgtttttgaacaaaaactgactgttttgtgttgattaatatggaaatccttgaaagagaataatttcttaattgtttaatgtttttcccaaagattgtgaaacagcctgattgaaaggtattattgtgctaaacatattaaaaataaaatgcattttctgctttgacattctatcagcttatttaagtaagaattcaccattctcttctgcatctct

SEQ ID NO: 126994 - DNA, 479 bp, Homo sapiens
aggcgcggtggctcacgcctgtaatcccagcactttgggaggccgagggcctgcgtgtccggatgcagtgttcttagggccaaaggtggctgtgtaggaggagtgagaacaggtggaatgtggacacttagggtacgaggccaagagtggagcattgttgtaggattgtggaccacagcagggagtgtgagtgcacggatggggatcacgaggaccctctgattcgtaggattgtggacgacagccgggatgtgggtgcatggatgggatcatgaggaccctctgatttgggtgttagctgtgtggttgctacactctagatcgtgctatgtgatgtttctttggcacctcaggcccccttgttgaggttcagtgatatctgatggagaggaaagggtgttggggtgtttgtgataagtcgctggatagggaagagagggaggcatctagggaccactgtctttaggagtttaatgagg

SEQ ID NO: 126995 - DNA, 847 bp, Homo sapiens
caccttagagttggccctgctgtgtgccaggcactgtgggcaggaggatagaaaggaggatgaagtggatcccagctctcaggcagctggccctctgttgaaagagatgttaaaagcattcactaccctcttcactgccctgagagtgaagagtaacctccaggcactcattcacccatagtcttcctgtacctgtccccagggatcagaccacaagcctctgccatcatctcccagtctcattctccatccacccgttttattgccttccagtgtcgagttgtaacatctacagacaaatataatgcaggaatgttttatttgagcttcattgaaacagaagtttatttaatttatttatttatttatttatttattcattcattcattggagatggaatttcgctcttgttgcccaggctggagtgcaatggcgtgatcttggctcactgtaacctccacctctcgggttcaagcaattctcctgcctcagcctcccaagtagctgggattacaggtgtctgccaccacacctggctcttcttcttcttcttttttttttgtattattagtagagacggggtttccccgttttggccaggctgccctcgaactccagacctcaggtgatctaccagccttggcctcccgaagtgctgggattacaggtgtaatccactgcacctggccaaaacagaagttaatgaaaaatggatcctgaggtagtttggtctttatcctgctacacctctgtcttccaattttactctctctggttggaccacttcctccactaagtgtcttccaaatccagcagttggtctctgagacctgtatgtgtgtgtct

SEQ ID NO: 126996 - DNA, 283 bp, Homo sapiens
tgccatgagcatccttgttcacacatttttaggtacttgagtgagtgtctgtggaataattttgggaagtgaaatctgtggtcagaggtttgtgagttttacatgctacattttcagaagttgagaaatagcagtaggctgaaggcaagtcgccatgcctggaattcatgaacactagttgaaagaactggcgtgagttagtcatgacaggagagatggggaagggagttgcaggtaggagggccatcttcaaattctcaaagtatagtcactccaaaccaaa

SEQ ID NO: 126997 - DNA, 510 bp, Homo sapiens
tgtgtgtccctatatccccagaactgagcccacagcactttgctgggcagttgaacgtcgcagagtccagtgaagcaactaaaagcacatctgaatgtgccccacggccacgttcaaatcccagccctgcatttattagctacacaaccctgggcaagtctcataaccctccatgcctcagtttcctcatctgtaaaatgggataataatagtgatagcaacaggagacagacaagttcctagacagacagggatgggtccccagtgaaacctgaccttcaagccaaggatacttttagagcctgagcacctaactgccagttctggatagagtccacgaccggagtgagaatttccatccccgtcttacccactctctttcaactggttccttctgaatgatgccctttatccaatcgaacggtgctttttccaagcccatccatggacctatcagcatgcactcccccattcaaagcccataaaaaccctggacttaccctcacagat

SEQ ID NO: 126998 - DNA, 272 bp, Homo sapiens
caagaacccaggtaattcaaatacatatgaaaggctgagaatcacgggcctggaacctgggttctaaacttgaatgcacactggagtttgctgagggacttaacaaaaacctggtgcctgagtccaaccccagagattctgaatgaattggtggtgaatggggcctgagtggggggatttttaaaaagcaccccaggtgaatccactgtgctgctaaggtcggaacctattcaaaagcctaggttctcatccttggtggcacagtggaatct

SEQ ID NO: 126999 - DNA, 459 bp, Homo sapiens
gataaaattctggactattttcaataatttggaagattaatgagagaaaaggtaaaatgtactgtaaatgaactgacatttgttcagtggattatggctaatgaataatgcttagtggctaacagaggatgtattctgaaaagaaatagaatttgttttaaggaaaaattgtgggaggaagcaataattatatttctcaagacagaaaaaggaaactcaaaaatgctttccatattgaataaaagcatatcttattatgcaaaagtaataacagtactagctgataattattaagtgcttaccacataccaagtactcactgctctaagcactttatgtattaaatcatttgatactcacaacaaccaggtagggtattattaacctcattttacagatgaagaaactgaggcacagaatgcttaaatgaatatgaataaggttatgtaatcagtaggt

SEQ ID NO: 127000 - DNA, 454 bp, Homo sapiens
tactttaaacatctttgttcagaggcggttttgttttattagataaaacccaccttgtagtttattcataagggttaaataatttgcgcaaatgaaaatgcctgaaccctgtagcagagacatgctgggtactgctcagtgtgactaagtgttcttctctttcttccttcatagactttttagcactttctccagagtaatactgagctcaatgttttgcatggagaatgcagctagaaggtatagccatactatttactttggtccccaagtagaggccactgttccttcaattttagcagaattcattttgctctgattgtagctcttttcaaactgatgacttctcctttttaatgactcaaactagatcctgttgagacattttataatgcgttagtaccagtttgttttggtgcaaaaagattttgtttttgagagtacaacctgccgg

SEQ ID NO: 127001 - DNA, 180 bp, Homo sapiens
gtagcagtttggacaggcaccatgaaggacatctgttgtatagtgttagcaaagaatgccagtttacatgcttaccagtagtgaatgagaagaatatgtgtttctgcaccttcatcaatagtagatattatttttcttgttggctcaatttctgtcagtgaatgaagagaagaaaaaaaa

SEQ ID NO: 127002 - DNA, 414 bp, Homo sapiens
cctattcaaattactgctatggtttctgtctcctgactggaccctaactgataaactaataaagttgagaaacctcaaactgtcctatcatctatactatatgacccagcaagtccacccttcaatacacagccatcaggaatggatacatgtgcattaaccaagacatgtacaagaatgttcacagtagcaatattcacaacagcaaaaaaactgaaaataacctaagtgtcaatcaatagtagaatggataaactgtggtatgctcatacaatagaatactatcagcaatgagcatgaacaacaaccaaagtaactacatggatgacactcacaaataaacattgagtgaaagaagacaagcacatagtttgatttcatttgtacgaagatcaaagagaggcaaaaataatg

SEQ ID NO: 127003 - DNA, 389 bp, Homo sapiens
ttatttttccccacccttccaccattgtttccaatatctctactattaacccaatgccctcactactgaaaatggcaactgagacactaggtaaaagaggttggtgctcaacaaattatcttttaactttctagtttgaagtacttttaaatatagaaaaattgcaagcatcatataagaattcttatataccatttgctcagattcaccaattgttattattttgccctatttgctttatacttttctatataattataattattttgttctgaaacacttgtggttgaataagccatacccctttccccctctccttttcgtcaaccttttattgtgaaaatattcaaatacagagaaaagttaaaagaattgcacattgaacaccc

SEQ ID NO: 127004 - DNA, 174 bp, Homo sapiens
tatacgtatacttttttgtatctgttttctttcagtgaagattctgtctgtattatttactcatgttgggtgtagttgtttttttcatcgtcgtataatactccattgtgtgaatgtatcagtatatcctttattatttattgtagataagcctttgggttttcagttttttac

SEQ ID NO: 127005 - DNA, 691 bp, Homo sapiens
ggcacagtcaaactaaagcatagtttcttgtacatgccagaatgcccaatcccttcactgggacaggacttgttaactaagttaattgccacagtaacctttgctttgggaaaattgaggtgccaccagaacaagcttgtgcactcccaaatgccctttatgaccacagagcagaaaaacacaccatcaatattatggagaacatcttaaagcagataagcccagatgcttgggctgatgggaggctgggaagggctaagactgcttgtgttaaggccattcttgcattgctataaagaaatacctgagactaggtatttataaagaaatgagctttaatgggctcagtgttctgcaggttgtacaggaagcatagtgctggcatttgctcagcttctggggaggcctcagggagcttttactcatgatggaaggcaaagcaggagcaggcacatcatatggcaaaagcaggagcaagagagagatggaggagagagggtgccacacaattttaaacaaccagatcttgtgagaacccacaaatctcatgtccttctcatactgtgaaatacaataatctcatcccaatagtcctccaaagtcttaacacattccagcattaatgaaactgcctttgcaaaattataactgaagaaattatgacagtgaaagaaatcagacctaaccaacc

SEQ ID NO: 127006 - DNA, 342 bp, Homo sapiens
atttcccctaccacaaggttgtacaaacattccctcaattaattttcttgggagtttacttttttgtatttttaaatatgtaaatgtctttgaaaatggatacactgcccaacgcctttcctactactgtgctctggacatgccaccctcacacagctgggcaatatggccagcctggtggagtgaaataggaattcaactttcattttgttccagatggatagccaaacatggttgattgaactggaaatctaagttcctaaataccctcaaacctctttctgaattctgttgtgttagtaagatttcttttttttttttttttttttgagacggagtttc

SEQ ID NO: 127007 - DNA, 232 bp, Homo sapiens
gagaaagagactttctcctaagtctaaaccaggaggctagactttctgatccctaaggtctcatcctaggcctgaccatctgttctactagagaacacttgggtgtaggttaaaactgggcaacaggttaaaatccattttctcacgttcaaagggcagaggtctctcagctgcaaatcggataaattctgagacaagatattatgggctgtgtactcgctggagcaaatgc

SEQ ID NO: 127008 - DNA, 755 bp, Homo sapiens
ggattggtccttaatttatcttaatgaattgagtcctgttgatcagctttttataaaatgaacaaaaatcagcaaaacttggctaagttttggctaagccttttgacgattttaactacttttagccaacttcaaactaataatactgtataacaaaccgaagcctagagtaaggaacatcatcgtggtagattttgttttaaacaccatgtggactttagtttggaaaaagagatctgagacttctctttttccttaattgctcaccaggattttcaaatgtgattcttttgctccttctttctgtttcctggagatccccaacctttctttccatactgctggcaaccagtgttctcctgttctaatcattcagctgctggtgtcgtagtgtcctgaaattcagtgtttccatgtgccttacaattatgaggtactctagttctatgaggttcctcataattgtaaggcacatggaaaagcagatgaggtgctgactcaagaagtgaataccttggggcctctgaaccccaggcctgcctgactacctcaggggctgaaggatcaataccttcagtgttgatgagtgaaactgggatctttttttttcttttagctttagaaaaaggcctttgacgggcggatcacgaggtcaagagattgggaccatcctagccaacatggtgaaaccccgtctctactaaaaatacaaaaattagctgggtgtgatggcacacgccttagtcccagatact

SEQ ID NO: 127009 - DNA, 463 bp, Homo sapiens
tggcttggaggtggggtttcaccagggacctgccctatctgtctaggcatttggctgcctcctatcattatcaatatgtggtcacaaacatttattgaaataaagcctgatttgtggtttgaggcatctttcagcatttcctaaaaagaataagcttgcctaaaatctgaactacatgaagtggttagtttattgttgtttttcacactttcaatctagtagtggttagattaatggaaattaaggattctcgcttactgaatctgactggatggggagataaagaatgttatccatgggtaaaagaaattacagggttcttcttactttgaacattcatcttcaagaaatagcctcatttgctttaggcttttgccttaaatatttaggagaaaaacacacacgtggcatgcccatgcacacacacacattcactcacacgcactcacatgcacacactgtt

SEQ ID NO: 127010 - DNA, 758 bp, Homo sapiens
gcagaagaggaagagagaagctacctgaaagaatatgacctttagaaggagagtttaaacacttcctaaataaactaattcagatattggatcaaactgagtttttaacccactttgatgctgaaataattgggtttcactgtgagtgggagtacagaagaaagccagatgtgatgtaggccaattaaagacattacattttttttgacatatcccaggtcaaaattagactttctaggtgttttttaatctaggtagtataatctagaattatacttacctaggtgatcggtgaatgtgggaagctaggaggtgatgtgacttctgtcttttgtagtctctacgataaaatagtttggggattttaatttcatttggctttctcatgggtagtttccactcttgtcttttccttttctttttttttcattctgagctctcagactcttcacagatattcctaattctctacaactgtaggagtatagagatgacattttgcatcgcaggatgtcttatactattaaaatgtctcttatttccaagcaaagtagattcagaaattcccagtgtttcaactgtttcaaggagtggggacatgtgttattctgactgaattttgattcaacaaatctttaaggacctatgtgttagccactgggccgaatacttcccagatggtctcatctcaatataacagccccgtgacgaccttattagccacctgaatttcagataaagaacttgagaggtgaatg

SEQ ID NO: 127011 - DNA, 255 bp, Homo sapiens
cggtacctgcattgtgtatggcatttttcaaataacaataggctatgctgctattggcatgaaagttaaaagaaaaatgccatacacacttcaagatacacccacgttctaattcctggaacctataaatgtgaccttatttgaggattaaaaatgtgcaaatgcaattaagttaatgatcttaagagatcatcctagatcttccaggtggataaattcgatcacaagtgtccttgtaagagaactagagggaga

SEQ ID NO: 127012 - DNA, 153 bp, Homo sapiens
aacttggctccctggtctggcacagctgagagtgcccttgaatggggtggctgcatcacaacccgacatgctgggcgtcagttccagtggacaggaatggcaggatcagctggtgatttgtgagagtggttgtcaataatttctgtgatggaa

SEQ ID NO: 127013 - DNA, 300 bp, Homo sapiens
agtgcctcctggtaatgtatgcccagtgggaaaagttaatggaagtctgtagtaaccataaacagagtgaaatatccagggttcagaactctcagaaatcaaggtttggatcacttcaccaggtaaagaactctggacaactgagcaacatggatgtggcggtggaggcagacagaacactatataacgtacatacctcccccaacattcaaaactactgttcacaatggaattgcctgcccctgagaaaaagtggtaactcaggcaatcccaggacacggtatcatggcacatacctat

SEQ ID NO: 127014 - DNA, 160 bp, Homo sapiens
tttcatcaccccaaaaagtcactccctatttctctacaatcccacctagccctaggcaaccactcatctttctctctatataggtttgcctatttggacatttcatatagatggaatcatatgatatgtggtctttaataactggcttctttcacttagc

SEQ ID NO: 127015 - DNA, 307 bp, Homo sapiens
tagctgactctagaggatacacagctgctaactcaggggcgagctgctaactcaggggcgagctgctaactcaggggcagctgcagcatggagccaggagacctgccacccaggtggctggaacgcagctgatacagtttggatatttaaccctgcccaaatctcaagttgaaatctaattcccaatgttggaggtggggcctggcaggaggtgtctgggtctcagggcgggtccctcgtggcttggtgctgtccttgcaatagtgagtgagttctccggagctctggttaagtgcgtggcagctcc

SEQ ID NO: 127016 - DNA, 422 bp, Homo sapiens
gggctatgatattgtggtacactgagagcacatgtcactacaaaaaacaaaaaccaaaacaaaaaaacacctcccccagaatacttctataataattcttcagttaaagatgaattaacagttagttacctccaagaccatcaacataatagaaacagttattatgcaaagctttatttgaaccatgttaatgtcttcctatagttagattgaattcagcttcagtatggtttagattgaagaaaagtcattttggtcaacaagactaaagagagagttaaaatttaggttggcgaggtctggtagtgaatacctagaaagcagagaacataaagagattgcaaagggtcctcaaatcaattccagtatcttacttattttagtttatcttttaaaaaaagttctggccctgtggaaataaa

SEQ ID NO: 127017 - DNA, 402 bp, Homo sapiens
ctcaggagacttattttggtcttcggccaccacagggcatttccttccaacctaattcaagctaaaacgatcttcagagataagaatttaaacaggttcagccgggtgcggtggctcatgcctgtaatcccagtactttgggaggccgaggcgggcggatcacgaggtcaggagatcgagaccatcctggctaacatggtgaaaccctgtctctactgaaaatacaaaaaactagcagggtgtggtggcgggtgcctgtagtcccagctactcaggaggctgaggcaggagaatggcgtgaacccgggaggtggagcttgcagtgagccgagatggtgccactgcactccagcctgggtgacagagtgagactctgtctcaaaaaaaaaaaaaaaaaaaaaa

SEQ ID NO: 127018 - DNA, 500 bp, Homo sapiens
cccccgtcggcacccaccccagcttttcacttttcattctgaagcattaatacccatttaatgggtgggtactaggggtaatacttggatgcgattatgataacatggaactttttgtagccacattattaataatatataatttcataattagcctcagggatggtgaaagtaaatttggtttttcagaaaccttgcctttttgatgacatttatcactattctacaatacagtgaaatttttcctgtttaaacaatccacggccgggcacagtggctcatgcctgtgatcccagaactttggctgactgtggcaggaagatcgcttgagcgtaggagtttgagactagcctggacaacatagggagacccccatctctacaaaaaaaataaaaaattagctaggtgtggtgatgcacacctatagtcccagctactcagaaggctgaggcaggaggattgctggagcccaggagggtggagctgtgatctgtgatcat

SEQ ID NO: 127019 - DNA, 155 bp, Homo sapiens
gacagggccaggaaaaaaaggaatgggatagctatttcttccctcttcttctgcagtggaaaacagtatgagcacattaacttgggtacagagtaaaattaaccaacagccccaatggctgctttttcccactccctcaaagcccaggccataag

SEQ ID NO: 127020 - DNA, 786 bp, Homo sapiens
gatcaaatcatagcagttctttgggagtggtgctttttggagagttctaaacccattttgtcccccaatctctagtgactgctggatttcatagctgccatgcttgttgtaatgcttttggttctcaagctaccacaaaggtaaggagatgggtgtggctattggataaattaaaatgccacagagcttgctgtttctttgagattcagcagtttttattgattaaatgctccttagttgttgcaagcatttggctgatttctagagttctgaaaaagttgattttgacaaatttgccagtgttcttagtgctttaatggaggaatggagttttagaaatctctgttattctggcagtgtttctcttcatttgtcatgctttatttttctttctttccttttaactaatagattttattttttagagcagctttgggtttacagaaaaattgagcaaaaatagagttctcatatgctttctcaccttccattagatacagtttctcctatgattaacatcttgcatgattgtattataattgatgagtcaatattgatattttattattaactaaaattcatagtttatattagggttcactctgttttgtatatcctatgggccttgacaaatgtataatgccataccattacagtatcatacagaatagtttcactacccttcaaattctgtgtgttccacttattcatccctcccttcttttcctgaactcctggtaaatactgatctttttgctgtttctacagttttgccttttccagaat

SEQ ID NO: 127021 - DNA, 704 bp, Homo sapiens
gtatacctcacttctttgagtgacagcaccccagagatccccttctccactctcactctttgtagttaaggtgaggttggattctctcctctctgcacccctcaacccccctacccccagcactaaggacccaggctcagccaatcagaatatctctcatgcccatcatgggctctaggatgggagcatgatggaagagtggccattgaggatcagttccaagacttttgtgagaaatgcgggggaagagaccctctcttttcctatagggattgctcactgtgcaaatatgccagcctggaacagctggggcctccatgtgcacagtggagaatcagagaatcaggtcaccccacaggaaagcaggaccataatggggtactaggcagagacctagcctcctggccatgcacctctgagctgtgtggactgattcttttttgcttaagcatgcttttgttttcatttcatttatttatttattttcagacacagtcttgctctgttgtccaggctggactgcagtggtgtgatttcaatctcagctcactgcaacctctgcctccccggttcaagtgagtcttctgcctcagcctcctgagtagctgaaactacaggcatgtgccaccacgccaggctaatttttgtatttttagtagagatagggtttcaccatattggccaggctggtcttgaactcctga

SEQ ID NO: 127022 - DNA, 459 bp, Homo sapiens
tccatgcaagacccaacggcactaagatttttgcctgtcttttccactggaagtttcatagttttagattttacatttgtctctgtctggccatccttacacagccacaatactgtattgtttactatagcatgatggtaagtcagttaagtaatatgagtcttccagcttcattctttttcaaaattgctttggtttttctacacgttttttctgtgaactttagaatcagcttgtcagtgtctacaagccctctgggattttgactggaattgcattgaatgtatgaaacaatctggaggacagctgacattttaacaatactgagtcttctgattcacacacccataggtcagtgatgggagcaaggctcaggctaaagcagattcagggtgtctttctgtgtggaacgtttaggaaaagtatgtttgcatgccactgtctcctgaccaaaccctt

SEQ ID NO: 127023 - DNA, 398 bp, Homo sapiens
acacatttctcaaaatctgtctccaccattgagtgatggataattctttgtgtgtgtgggcagggggagggtatgtatttctctgtataagggccctgcactgccctattggatttaaataaataatccttctcacaatgttagacataaacgtcaagtactatgcttgggaccaggcttatagagacaaataagagaaatgtaatttcaattacatatgtctaactttgttctagaagggattagagttgatggttttaaaataacttataaaggataaggactataatagatgtatatgtggagaggtctagctgcatagaacatgtatcttttattcagcatagagatctgaataccattacaaataccaataattaggaggacatggggaggaa

SEQ ID NO: 127024 - DNA, 646 bp, Homo sapiens
tcagttttcccttctataaactgcctatacattctttgtccaatagtgggtttggagtgtttcattgtcatggatttacaggagttgtttatatgttgtggacacaaattctttttcctaaatttctacccagtccatagttgttttttctattgtgtcttttgtcaaacagaggtttataagaccattttaatcaatcagatttgtccttttttcccttttgttacttgggctttttgcattttatttaaaagcactttctctagctatatattttaaagagattctcttgtgttttatttcaaaagttagaaagttttgattttcatataggtcatcaatctattttgaaagtgtgtgtagggggtattatatggcgatctaattttatcttttgatggagacagccagttgtcttaccactgtttattgcattattcattacctatctgccacttccatgacttgcattgtcacttctttcatatgtcaaggttttgtgaatataggggtttctgtggctctctattttgtaccattatcatacagctttgatagcttccaactaacaagactagatttctagtagagtgaatgtctgtgcctttttcttcctctttctcttctcttcttcagtgtcatcatc

SEQ ID NO: 127025 - DNA, 590 bp, Homo sapiens
  misc_feature (86)..(86): n is a, c, g, or t
aggtggtcctggtctccctggagctccaactggacccatctgtcccacatgcccagggcgcccgggaggtccctggaaaccgaccnatccaggctctccaggttcaccccgatatctgtcgcgctcctctttaggcagtgcataaggctcaccttttttcccttttgttacttgggctttttgcattttatttaaaagcactttctctagctatatattttaaagagattctcttgtgttttatttcaaaagttagaaagttttgattttcatataggtcatcaatctattttgaaagtgtgtgtagggggtattatatggcgatctaattttatcttttgatggagacagccagttgtcttaccactgtttattgcattattcattacctatctgccacttccatgacttgcattgtcacttctttcatatgtcaaggttttgtgaatataggggtttctgtggctctctattttgtaccattatcatacagctttgatagcttccaactaacaagactagatttctagtagagtgaatgtctgtgcctttttcttcctctttctcttctcttcttcagtgtcatcatc

SEQ ID NO: 127026 - DNA, 575 bp, Homo sapiens
tgagctgagatcgcaccactgtactctagcctgggtgacagtgagacccagtctcaaaagcaaaacaaaacaccccacaaagtatataattcagacttaacatcctgactcttgtttttactccaaggcaatgaagcaatgatgtggacgatgcgtgtcctaatccggagcgcctcccaggctaggaatccaagccaggttatggcttaaatggagaccgatggagctgctagctgagatcgcccacattggcctctgcagactcccttgttttccctaatgtgtgtcaacacatctattaaggggaaaggactgctcggtatcaatgatttccacttggaaatgtcaccatgacaactgaggaggtgctggaagcaggcactttgttaattctgtcttaacccatcccaggcaacttcaaaactttttctctggagagaaataggcttatttaggaaaggcgtctctcattgatcctcagctacatccactgaagtgaataatttacttctttggcaggtttagaaaattagatgcatacaatctaatatcccttctttgtacattttcatgtg

SEQ ID NO: 127027 - DNA, 356 bp, Homo sapiens
tcttgatcccttgctacctaaggtcttactgtggagcatactcataccatctacaactgggggaaaaaaaataacaaaatcccaaagcaaaacacttgaaaatagacttaacttatattattagcattatttttgcttagttttgttttcttaaaaaacaaattggatctttatattctttttactctaccccctaatctccccatacagctacatgaagaaattggaaaaatagaaaatacgtaaagcttttatgacacagcagagaaagttgatttgtaacagcctaaagccaagggagtgccacctttctctggagctagtccagctgctttagaaccagagccttcatactg

SEQ ID NO: 127028 - DNA, 429 bp, Homo sapiens
aatgactactctgctgggtgtggtggctcacgcctgctatctcagtactttgggaggccgaggcgggcagatcaccttaggtcaggagttcgagactaggctggccaacatggtgaaaccccgtctctattaaaaatacaaaaaattagccaggtgtggtggcacgcgcctgtgatcccaggtactcaggaggctgaggcgggaaaatcacttgaacctgggaggcggaggttgcagtgagccgagattgtgccactgtactccagcctggcaacagagactccgtctcaaacaatatacacacatgactactcattttcccccaaaacatttcctcctcttttatttcttctcttagtgatccacctagtttcccaagccagaaacctgggaggcatcacacatttctactctctccattatataaaa

SEQ ID NO: 127029 - DNA, 323 bp, Homo sapiens
aaaggaaagaatgggtgtgagggcgaagaaacaggaaatgggagaaactcttggattcctgtaaatggagattatctatgaagatgttcactgtggcattgtttacagcagcaaaaatctagaagcaatctagaagaccatcaacagaatgcataaataaatatgccacggcttcttcatacaatggatctcatatacagaaagtaagcaaactaaaaaggcaagttgcacaagaaggcccaagtaatgatactatttatatgaaactttacaatctaggaaacatggccactctgcagacaccggcgccgtcgggaaacctg

SEQ ID NO: 127030 - DNA, 667 bp, Homo sapiens
agacacaaaagatcacatatcatatgattccatttatatgaaatatccaggacagggaaatgtatagagaagaaaaagtagatcagtggttgcctagggttggtgctgattgggaggtgggggatgacaggaaatgagaagttaaagctgcatggttcaatatttttttgcggggtgaggtaaatattctataattgattgccacattggttacacaactctttgagtatatttaaaaaacactgatatttagaatactttaaatgaatgaattatgtgatttgtgaattatatcataatttagctgtttaaaaaattctaattactagaaccagaaatcaaagtcatgtttaacaactcactattatgaggccttgattttgaaagctaccaattttagaattgaatctactctgaaactgttcagagtagattctacttgtttgattaatacttgttgcatctccttcggcatgaaatgaaacctttaaaattcagttgtaaaataaaaaaaaatcagtgaggttgtccaacctctgtctcacagcacatcatttaaatttagccatctgttgttgttcttcatcagtctctcctctttttttgaacaacttcctttgtaatcacaaatttgagagggggaaggtaacccttttcttcattctca

SEQ ID NO: 127031 - DNA, 599 bp, Homo sapiens
atctctacatccatccatccatccatctatgtatccatccatccatctattcatctatctctccatccatccatccagccagccagccagccagctggacagccaggcagccagacagcctgtcagtttattggtcatatagttgatgctaatgccatgtgtctaaaatttttagtaagggagtctgatttattattatcattattattttcaatttgcttttcagctattgactgaggttgcggcaattgaccagactaccctgtgggctgataaaacctgaaacttgtctatttggttgagattaccatttgtctgtccctcagtggctggtctttacatgtcaagaggatggtaaaaactgccataagggactgaacacagtgcctcacgcctgtaatcccagcactgtgagaggctgaggtgggaggatagcttgagccaggagtttgagaccagcctgggcaacgtagtaagagccagtctctaaaaaaatttttaaaaattagctgggtgtggtggcatgcatttgtagtctcagctgctccaggaggctgaggcaggaagactgcatgagcccaggagtttgaggctgtggt

SEQ ID NO: 127032 - DNA, 780 bp, Homo sapiens
cattctatttagtcactctaagttaaaagtccacaattttcctcaatacagagacaaaatagtgttgtctttaaagctccagcctggtagaaagccgaaagaagtcgtgaggtacattcagtttactttttctttcctttatttttttaaacctaaaggaagatggttgtaatgttttatactaccgaagagtgaaaggatatgcagtaaacatgtttattgctgtcttttttgtaaactggattgctcatttatgagatcctgacctatttcttgagatcttctgtgtgctgtttgttgaaatgaatttttacatggctaaaacgcttaagaaaaaaagctaaaattgagtgtattgagagagtatctgctggttcaccacacttcagatgttgtgtcagcaacaatactttctctcaccctgttctcacacaggcaatcacaccatcacgggaaactccaaggttgggaatatacctgaaaagtggaaagaattcgggaagaatactgctgcacagatatgagactgaacaaaatgacttttaatagcccttcaaaatctcagactcttggtctagataatacgaactcctagataccatttggcaacgtttatttaaaaaaattcagttgataacattttgtgtatatacatcttctagataattattttaattcttcacctcaccttgtcaaatgtattctaacttaagtttgatatttcatctgaatttccttccctgcacaaaaattcagatgcggatatgaattgttttgccc

SEQ ID NO: 127033 - DNA, 255 bp, Homo sapiens
gaaaggaagagatgttgatggtttgaatacctgaggatgtttagataatgattgtggtcagaatgcatccagaattctaatttgtgtcctgatgtgaatgtgaccatgtttgtttgtttgtttgtttttgttttccctttggcttgtgttctgggatttgatctctcgttagagactcttactagttctttgagttgtgtatttctttctatatcatatcggtgctcttatttcctatttttcagtagagaattt

SEQ ID NO: 127034 - DNA, 145 bp, Homo sapiens
agtgctgggattacaagcatgagccaccacgcctggcccagatacttcatagacatgaagtctggggatgtttcctccttgctaaaatgaggttaacttagacaacacttcagtgatattattataagggagtgtgtatgtgtgt

SEQ ID NO: 127035 - DNA, 353 bp, Homo sapiens
gtagctgggattacaggtgtccgccaccacacccgggtaattttcgtatttttagtagaggtgggggggtttcaccatgttggtcaggctggtctgtaactcctgacctcacgtgatctgcctgcctcggcctcccaaagtgctggaattaacaggcgtgagccgctgcattccggcctcctttacatttttatccgttacctttaccgttgtcatagaagcaagggtgtcaggcctcaggtatgcagtatagtctgtggacccatcagcataagtgtcacctgggagctcattagaactatcaggattcatcccagtcttactgacccagaatcttattttaataagatccc

SEQ ID NO: 127036 - DNA, 463 bp, Homo sapiens
ccaccgcaggaggcacttgaaggcatgcaaagctccacctctccacctacctcctagggccctgggtggcactcctctgctcctttcctttcttcttctgttaccgtatcaggtaaggccactttctactcttagttgaaatttacagttggtagccatggggaaccattagagtctctggtctttgattccctgggagagggtgggtctgacagtggccttcccacctgtgtgatgaggacagctgatttctgtctcctttgttctcagcctcacatggggtcacagggaaaaggaaaacacataaaagatccccagggctcagatttggggttgcactgtttttagtccagagccagctgtccttggcatccgtcaggcagaggggtgaggtgattgctggtgtttgtgacactacaggttgagtgtccctttgatatttgcttggggaccctttccagaa

SEQ ID NO: 127037 - DNA, 692 bp, Homo sapiens
ttcagttcacaggcacaactgactcttctattgggatgattaactatattgtgcataagtgagagtcagctgggggaaaagcagagcatcttgttcagactttttgaggggagaacgtattgttaacacctctaccctccacacatttagtgctgatccccaaaagcaagagtgtcacaaagaaagttttaaaaggataccaagattctcttaaaggagcttatcaggtttactcaattctaagaaaagattctggcacacatctttgattacgaaattaattttagctaaaggtctcccattacactcagctccttatgcagcttccacactgcaactgctgccaatctcaaactccaggtggggcagtcagggggctgctaggtcagtgggaagcatgggaagtgacacaagtacagagttcaagaaacagacttcaataacttgctacaaagcagagttgtgtgaacagtcttgcacagtgattttttgctcactgtgtgatatgaatctattattttattgtttggcaaaacctttatctggtaataataattttcagttttttgttgcccacttttgctttcaaaagtgttccaacttgcatgttatatggttaccctatttatgaaggaatcagaacacctccctgcactggtcaatcagcctgaaactctcctgccggtctctta

SEQ ID NO: 127038 - DNA, 227 bp, Homo sapiens
ggtagagtttcaaaaatatgtattgagaacctactatgtgtcacactctaaggatacagtggttatccctaacaaggtccctaaccctcaagaagcttacatggtagtgcgggagaaaagacactaagcaagtaaacaaatacgtttcagggagcaccaatgtttctgaaaaagcagagtaatgggataaagggtgactgaagtgctggagtattttagatagcatg

SEQ ID NO: 127039 - DNA, 620 bp, Homo sapiens
ctgtctgtgcggccagaacacgccgtcagaactcgcggaaccagctctctccccaaaccccacactgcccggccccaagagacccaagcggaagcgggaagcagcggcgcttgttcattctggtgtcaatacgctgcaggcgctccggtttctccaagatcagcacagaagatctcaccgatcccacacaaggctgctaagtgatccagagggtggcgcagtgtggaactctatctttacccatgtttaataaagactaacaagttaaaaaaatacggctgggcgcagtggctcacacctgtaatcccagcactttgggaggccgaggtgggtggatcacccaaggtccggagtttaagacaagcttggccaaccatggccgacatggtgagaccctgtctctactaaaaatacaaaaattagccgggcgtggtggcaggcacttgtaatcccagctactcaggaggctgaggcaggagaatagcttgaacccgggaggtggaggttgcagtgagccaagattgtgccaccgcactccagcgtgggtgacaaaatgagactgtgcctcaaaaataaataaataaagaagaataaaagaagatgtcttgctgagactgcct

SEQ ID NO: 127040 - DNA, 380 bp, Homo sapiens
cccttaaaaccatccagacttccccatctcccattcctctaagaaggagtgtatataagcatctgtaccccattgggatatggggcagtcatccctgcattctcccccttgcacactaataaatttatatgccatttctcctcttaatctgccttttgtgagttaattttcaacaaacttttagagagcaaaggggatgttttcccttggcccctacaatggactcaactacactgccttattacgggctgaaatgtgatatgaatggtatatattatcttcaaacaaaaggtttgagatgtgactgcttttgagtttcttctttcttccttttcatcaagtttgccttttcagtctttttttttgagacggagtcctgc

SEQ ID NO: 127041 - DNA, 186 bp, Homo sapiens
ttccttctcacactacagcacaaacagtaatgggagtgactaccctcttctggatttcctggctgacatatgggttctttcagtactttcactgtaaattttttatgttgtattccctattgtcctttttttgtacaaactcagagatttcagaagatgctgtgctcttcacgtgtcctctgagat

SEQ ID NO: 127042 - DNA, 565 bp, Homo sapiens
ggtcatagctgactcttgaggataaaactgcgtcagcgagagagggtttattaggagaatcagctcatgcaattatgaaggctgagaagtctcatgacaggcactctgcaagctggagaccctggatgatagcagcatggctcggttcaagtccaaaagcctcagaaccaggcaacctgatggtgtaattcgtagtctaagatctaaggcctgaggactgaggtgaccaccactagtattagatcctggagtcccaaagccaaagagcctggagttatgatgtacaagaacaggagaaggagaaggtcccagctcaaagagagagaggaagaaaaaaatgcttttccctccttttttgttctatccaggccccgaactaatcggatagtgcctatcaaactgagggtggatctttttcattaagttcattgactcacatgcctgtctgctctggaaacactctcacagacccacccagaagtaatgctttgccagttctctaagtattcctcaatccaatcaagtggacatctaaaattaatcatcacatgccctgatgaagggg

SEQ ID NO: 127043 - DNA, 362 bp, Homo sapiens
cttaaaaaaaaaatatggaccaggagtggtggctcacacctataatcccagcactttgggaccctgaggtgggtggattacttgagcccaggagtttgagaccagcctgggcaacatggtaaaaacccgtctctaccaaaaatacaaaaattagccaggcaggtgtggtggtatatgcctatagtcccagctacttgggaggctgaggtaggaggatggtttgagcccaggaggtggaggttgcagcgagctgagatcgtgctactgcactccagcatgcagatgacatgacagagccagatgccatctcaaacaaacaaacaaacaaacaaacaaacccccataactcagttccagtaaat

SEQ ID NO: 127044 - DNA, 295 bp, Homo sapiens
ttgagccatgtggtatcagctcagccttctcagagacaggagcctgagatctgccatgtgggtggtcgactatgtcaatgtgatggagccccagtaaaatctctgtaccccagggcttgactgaacttctctggttgacaataccctatgtgtattgtcacatgtttttgccagaaaagtaaagttgtccatactccctggggagaggacaactagaagctccacaaggaaatgttcttggaccctgccccatgtccctttacccttggctgattttaacctgcaacacttccct

SEQ ID NO: 127045 - DNA, 519 bp, Homo sapiens
ataggtttcttgatttagttaagaaccttatttttagcatcacaaaatttgtattattcctgcaaaatcaaatcatttcatctcctatgttgagctttttacaatttacagtagcatttacaataatatgagacgttttacctgtgacaaaataaacttccacaagctttattttgatcccatgagataaatgaaaaaaaatattatttgaattaattgattttctgtttaaaacacctggtaatactaacataaaactggaataatttaactcttggtgaagtttttttcttctgctaatgaagctaatacattaaagtcatcgtttcacttttcatatatgcacaaaaaaacctgagttcaaaaataagcaaaatcaatttggaacaacagacatttcatccaaaagaaatgtctcctagagtgctatgttagtaaaccttctgcagctgcgtatgttaaatcatcttccttaacatagtcttgcatcattattaacatttgaagtagttgctgttg

SEQ ID NO: 127046 - DNA, 514 bp, Homo sapiens
aagacaaggaagagagctgtccctggctcggctcctgccctgagtgactgttgactcacagttctctctccaaggggacatgggcctgtcctaatgctgccttaggggcttggctccagctggccctggggtctgcaggtcaccacctgcctctgtgcctggctttgaatttcctaacatccagagtgccctgggagtacagtgtccagcccgttgtgtgcagtaaacgtggtgttcataaccgggagctgggcagaagaggaacgacagagtccccctgcggaccctgggggctctgtatcctgaagttcaagcctagctcaccctgctgtgggcccagccctgcctgcactgacagatggcaccagcagggggcgcagcgctccgccgccacagttctctgtccccacctcagtgcagtcagccctggaccccccaccacttgccccccatagcacacagagccacgggccttcccagcccccacccctggcccttggtcactctcacctgc

SEQ ID NO: 127047 - DNA, 318 bp, Homo sapiens
ctgagcacagaggctgctctgctggtgggggtggggtcacttctctcagccccagactgtcagctctcaggattatccacctcggctcctggttgcagcaactgctgtggcagtatgtggagcgagcacctctggctcccaacttctcctgactgagctggccactcgcttccttctcctctgtgcctcaggcgcttgctgagacttctctgttggactctagtgctctctcctggatgttctattcgaggtgtgcttatctcttcataattttgggtcttctttctggagagggtgagtgtccaatgtctctagtca

SEQ ID NO: 127048 - DNA, 126 bp, Homo sapiens
cctcccatactctcgtcagtcatgccgcctctgttttacaggcgaagaaactgaggcctgcagcagtacagccaggactcaagcaaaggctgctggactctggacacttaagctatcaaccaccag

SEQ ID NO: 127049 - DNA, 263 bp, Homo sapiens
ggattacaggtgtgagccaccgcacccagcccacttccctgttgattctgtctctctggaagaaccctcactaataaactttacttgaccttcaaaataataatgctcaaaagacaccctcatttggggtgccagagtctggcatttgttctctaccagtgcctggtagcaaatctgaagctgtgtaatgcttaaatggagaatagtcattttcagaggagggtatatctttgctctaaaccccttggagtctgtgctgtgac

SEQ ID NO: 127050 - DNA, 713 bp, Homo sapiens
gagagaaaaggcacatctttgtcaggaagttaccaggaatgaaagaagaaagggtgaataaaaatacataacaatttgaagtgcagttagaagagagatgacagtcactggaattggagaattatgtcctagagtctagaaagttgtcactgtagattgtgaagttgtgacagtgaagatggacaggtagagatgatactgtgagcccagtgctgaaaccatctaggaaggtgtctgtaagtgaacaaatggaccttatgaagataggtcatgtcctatggtctggtaatggtgttggggcagcagagcccctaccaaattccttatgctaaagtgttgggattacaggcatgagccaccacgcccagccccgtttgcttttttatgaaaagaatcactaccaatattttaacatgttacttgggacatatttcagcagctaggataacacataataggggaatcactgggaaattttatcatcttacctatacatgcgataaaaatctattaaagtcagctctatatcttggagcagaccttgggggaaaattagtgcagagctgggatttgaaggatggtgggaattggacacatttgagcattttctcagtggttcttgcatttcttcctaatttatcaggcctcctgatgtgagaaaagtaactacttaatgagagatccaaaataaagaagcagccatctgggtagtt

SEQ ID NO: 127051 - DNA, 133 bp, Homo sapiens
ctgctacttcctttagaaattattttgttgaagtaaaggactctggttctctaaaacagagatcaaataaagggagacattgctaaaaggatacatttgggggctttccctagaggggaactccctttctgga

SEQ ID NO: 127052 - DNA, 432 bp, Homo sapiens
gcttcccaagtagctgggactacaggcatgcaccaccatgcctggctaatttttgtatttttagtagagatggggtttcactatgttggccaagctggtctcgaactcctgacctcaggcgatctgccctcctgggcctcccaaagtgctgggattacaggcataagccaccttgcctggcccacactgaatataaaatgaatagatgagtaccccaaaagcttcgcccagacctagctggcagagtagggtaaaagaatagttgactgtgtgcactggggcggcatcagccttactgtccacagcagggatggagacagcagtgctcctggcagccagcagctcctgcgggtggaaggtggtaaagcagtaaagtgaagaaggcggaccctgaagccagactgcctgggttcaaatcctggccccaccact

SEQ ID NO: 127053 - DNA, 545 bp, Homo sapiens
cctgcttcaccatggattcacacctgcacgtcacttatgcatcaaagtcttcactgaccccaaaatacgactctctagattctcttcctgctcctttgggcctcttccttggtggtctcagcctcctcagtgttgccccagggtgagccttgttatcacggtcccttgcccatggtgtcctggtgcacgcccaccctctcctgccgttgacatgccaacaaatcccaaagctcccttgtcagctcagcatcgaccgaggtccagcccagagagctactccctcctggatgtcccacataggctaatatagcaacccccaacatccccagcactttctttatctgtcctgacccacctgcaagttttcccctccaggcttgaaccaggcatggataaaggtgtttaggctgttgctcaagactctgagaaatccgccatcttgctaaatacagagaaagccaccctgcttggccctgagccagagtcctcatccctgagataaactccataccctgacccctcatggcagacatgcctgggtggga

SEQ ID NO: 127054 - DNA, 397 bp, Homo sapiens
agaaaagtaaaggaggtgcaattatagcacacagatttaaaaaacaaagcaaaataaaacatttaatgttagtaagatgatagtatagtataatagttcaaagcaaggatattaaacccagactgcctgggttcaaattaatccccactttactagctgtgtggccttgggcaagctatttaacctttctgtgcctttgttcttcttctgtaaaatgaagatgatagaacagcacctacttcagagatgtgaggctaaaatgaattcatacatgtaaagcatatagcactcagtgcctggcacataggaagtgctggatgtgtttgctgttcctgcagtgatatggttaaatcatagctccaaaggcagaagtatgctaatttcagtcagtgtgcag

SEQ ID NO: 127055 - DNA, 657 bp, Homo sapiens
acctgattagaacgttgtttttccaaacagcatctttttctcatcggtcactgtatcactctgatcactgccccttgaatcttcttcctcaccctttatttcacccagatgagccagggtttaccgtatgtgggacttcaggtcatggcacaaaatggttctcaacccttttgttgagcaccggtttgctggtgctctttttagacacaaaccctggaataaacgtgccctttccctcaaagggaccccactgtggattcctatccactttgttatcctttttactcttagatctctgcctcaccactttcccaggcagcctctgctttttcatcttactgttctcattttcgcctggtgcgttcgtcagcggctttttatgttaaacttcgcagatgagccacgcctgaagttattcctgtccttctttctctccggtgtattgttgttgacaggtttttatctgttgttttgaattttctgtgacctttggggtgggcagagaaaaaaaaggacaaatgtccaccatcggccggtctgaacgccacatttaatgtgttctttttgagtgttctaacccttccttcttcctgcacacatttaataacagagaaccaaaaaaagcctagttgccttcattcatgaatatttgggaca

SEQ ID NO: 127056 - DNA, 299 bp, Homo sapiens
ttttgtaaaagaacattttgtaaaggacacatgtaagaacatgtgtcctggagaacttgtattcagattcaaccagttaaaactaaactaaattgtttgtagaagtagccctctacaaacttcaatatcaacaaagcaatttaggtgttttgttacattgaatcagtgacactataatgttacttcacaatactgctacgccatgactatcatatgacagcgatataaaagaaagactttttttaacttgtcaatttactttttaaaacatgttttttgcattggtttcatattttacc

SEQ ID NO: 127057 - DNA, 461 bp, Homo sapiens
ggccctaacctcctgggctcaagcgatcctcccactcagcctcctgagtagctgggactacaggcatgagccaccaagcctggctaatttttaaattttttgtagagatgaggtcccacagtgtttcccaggtttttcttgagctcctgggctcaagcaatcctcacctcagcttccgaaagttgtgtacgtattttcatggtgatcgcattgttcttttggctgcctagaaatgcccttttgagatggatttaatacagaggaggaaactagggatccgaaagtttaagtaacttgctcatggtcatagattagtaagtgaaggagccgttattcaaacttgaatctgtctgtttccaaagcccgggctcttgccatgtaatcacatttgctccttgggctgccgacgtgaaacctacttcctttcagtggcctgcctgtgctagctgctatattgcctt

SEQ ID NO: 127058 - DNA, 455 bp, Homo sapiens
aattaagagcctgtatatagaactttgtccatgagcatattttccttgacccatggagtgttttacagaaattcaattccattttttaaaatcatgtatttaaaatgaaaatacagattaacagcttctcttgaaaaactggtagatctgatagctttgaggccacattcccaaacagcaatggtggctggagccaaatggccagcatgaaacaggcattctcctcctctccacagtccccaagactgtcttcctcaccttgagcttatgccggttaccctctatcgtcccacttgccctctttttttcttacagtagaaaaatatttcctcttatcccaaggcctgcttttactcattgccattgtttgccaggcccctgcaggcacttaagtttgtgagtccgctgcagaatgatggagtcaagagaggagctgaaaacacagacctctggct

SEQ ID NO: 127059 - DNA, 692 bp, Homo sapiens
gggtacaatagttatttattgttgcataacagattaccacaaatttagtagtttaaaacaacatacatttttattatggcatgggtttccatgggtcaggaatcggcatagcctagatgggtcttctgtttcagggtctctcacaggaggtagtcaaggtgtcagccagggctggtgtctcatcttagcgcttggctggggaataatctgtttccaaactaacttggttggtgacagaattctcttcttgaagggatgttgaattgaagggcttggtttctcactggctgatggctggaggttgctctgaattcctttccatgtagcttcttcaacatcacaaagctgagaaaggaatagcaagtctcctaggaagatggaaatcacaattttttataatcatggagtggcatcctatcacattttccatagtccgttagttagaagcaaatcaccaggccagtccatactcaggaggaagagattacacaaaggcatgaacaccaggaggctggagtaattggtggccattttacaagtctgtctaccacagacttctttagaaaaaacaatcctaaaatttgtatggcaggcaccacaaaagaccttgagtagccaaagcaatcctgagcaaaaagagcaaagctggaggcagtacacttcttgacttgaaagtatacaaaactattgta

SEQ ID NO: 127060 - DNA, 768 bp, Homo sapiens
gtagtcctcagctaggggtgattcctctttcacaaaccccgagggtatttggcaatatctggagacatgttgactgtcatgactggagggatgttactggcatcttttggggagaggcaggcgttgttgccacacatcctacagcacacaggagcacccccacaataaatccaaccccaaatgccaatggggctgctgctgagaaaccctgctgtagataatggggagtttttgtaaagcctcaatgagctccatttcattccatttttagatttttttggaaatctgaatgtacacaaggaaattattggttaggattgtgaaaaagtaaaaggactaaactgacatttaaaaaattctttgtgaattagatacttgggacattagcctgaggattttaaattaatagttatagtttagcatataagagcagcagctttgagtaggttatttagcctttcttataggaactgaagatgcattttaaatatgaatatgaatagtatctgcttgttcttaggtttgattgttttttcctcaatttccagaatttcacaaagaaaaaaataatatatacacatacacacacatacacacacacacacacacacacacacacacacacacacacccctatatattttttaacagaatagaaataccttaagtatacccatttgggcaactattcccattaacttatcattagaaacattgatgttaatactttccattaataagctggaagtcaaaatgtaccataataaa

SEQ ID NO: 127061 - DNA, 698 bp, Homo sapiens
cagaacaattgtttttttgtaaggtagcatgagcaatatcaaggaaacaagtgggctggtctcaaactcatgacctcaggtgatccacccaggtcggcctcccaaaatgctgggattacaggtgcgagccaccacgcctggcctaatcccctttctttatgtacaaatctcaaacataatatactatttactgttaatatgtctgtgacattgctcataagattatctggcatagaatgtttttgccctattgttttgcctgggaattattgccaggggtgcatatagctcagtaactcaaatcagggcccagtaccacttcatagctgtgtcactttgtgaattgtgtatttagctcctccatccctcctgagaattatggataataatagtatgtgccagttaatgttggtatgaaccaatcgatgagacagtcaaagtaaaacatctgggacatagtcctgaaacattattagcttaaaatggttgagtgaataagtacgggccttgacagctcagctcaggtgtggcattccatttcactttgcctgattttcttccagccctcctcccctttccccagatcccacatcagaactaatgttaccctgtctttccctgaaatgtttttcatacagagagtttagtatacttaccattgatctacttttcttttagttagttggggattatttcag

SEQ ID NO: 127062 - DNA, 355 bp, Homo sapiens
ctccctgtgtccagcctccactcccacccctgcagttcctgctgcccgacccgctgcctacctcatccttcatcccggacggttcctgtaaccacccctcccaactccctagtctcaggatccctgccccctctgggcccttattgaccctactcttcagccagtggtgtcccccttggtccccctactcctggggaccagcccagaagccaccagtggcccccctggctgtctcctcctggtgtgccccgagtcgtggccttagttgagtcccatgtccacgagccgcgagcttagtagtagggaagggcttgtcccaggccctccacagttccggggctgagtatccttccct

SEQ ID NO: 127063 - DNA, 246 bp, Homo sapiens
tgtcatcaccatcatcatcactatcattaccatcaccatcaccaccattatcactgtcatcatcacctttctccatcaccatcatcatcatcatcattatcatcctcatccccatcatcatcaccatcaccaccgtcattgctgtcatcatcaccattcaccatcaatgtcgtcatcaccatcatcatcactatcatcattatcaccatcatcaccatcaccatcatcattactgtcatcatcacc

SEQ ID NO: 127064 - DNA, 571 bp, Homo sapiens
atctcaagtgtcactttccacggggggataactaccccagtgacaccctcctccagatttggttagcttctcccattccagcctagtttagatggaatcatattaagttgctggcattaatttattatgacctacaaaaccatcaatagtgtacagttctcacaactcccttgtacattgcagccctcatcaaaattgttatgaagtaattgatttgaataatgattaatatctgactccctgatggtttataatctttgtggaagtagacaacatatctatcttgtctactgctatttagcacatactaaataccacctagtaaatatttgtttaatgttacttatttaactgcagagatatactttttacattttctacatttaagatgcacacggaatatgcgatgttgtggagaaaagagctatttgccaaatggttacttgttactttatttttctaaggctttgggcataaaatgccattatggaattactattttattacaatggtatctgtagtactttggccctaatgttcttttttggttatgatgctgcactatgcctgt

SEQ ID NO: 127065 - DNA, 130 bp, Homo sapiens
tcgtttttctctagcttctttgtaactggtaaagacaccatctttagagccttaactggagatcgtattatagtctcattcttttttctccccagttttcaagtcattacttgtaaaaggcttttataag

SEQ ID NO: 127066 - DNA, 530 bp, Homo sapiens
ctgcacagccatgcgcacacatatgcacacaaatgagtatatgtaaaactggtgaaatggaaataagctttgtggtttgtacttaatgtcagtttcttggttttgaaattatactgtaactatgcaagatgtgacctttgcataacatcttgaaaccaggtgatgggtcctcaggggcctccctgattttgttttttaatgcaatttcttatgaatctgtgattatttcaaaatgtttaaaaaaaagtagataagttggaacatggcagcacaagtgagagagattagagaatcacttgcttttttttttctaagacaaaaatctctatcttactcagcattgtgctgaaagccatctttatttatttgtttattcttttcctgacacaggatgtcactgtgtcacccaggctggagtgcagtagtgcagtcttggctcactgcaacttccactccctaggcttcagtgatcctcccacctcagcctcccaagtagctgggaccacaggtgcacaccaccatgcctgact

SEQ ID NO: 127067 - DNA, 697 bp, Homo sapiens
gctgtgattacaggatctttaccgactagcccgacaggcctctttttcctctctggttgtctgtctgcttctctggctgtttgcccaccactctctctctagccatctgtctccccgcctgcctgtctctatcacttttttagcctgcatctctcggtttgtctaccttccaggccctgccacggctccccatcttggtttgcctcttctcttgcccttctgcttgttccttctcttatttgtgcctgttaagttcctccttttcccttgcctccctttagatctctcttgcctgtctaccctgtttgctgctatcccaccgtttcaggcttttctctctttagtcttcatacttaccagctttttcttcctttgcttcttctctgccaacttccatcaatgaggatagtctctctcccctaaacctctcagtaacccctttgcctcaaagtcttatctaacttcttgccacatcccctaccctgccttctctcacgtttgcctttatttcagttatctctttttctgtctttctggttcctcagacagtctgcctgtctcagtctttttgccattttcccagtctctcgctgccttcctgcctttttgctgtctgcttggcaggctcttgctgtccacgtctcttcttgcttttctctcttcttttgtttctttttccagttaacttctaaatagg

SEQ ID NO: 127068 - DNA, 462 bp, Homo sapiens
  misc_feature (35)..(35): n is a, c, g, or t
  misc_feature (49)..(49): n is a, c, g, or t
  misc_feature (56)..(56): n is a, c, g, or t
  misc_feature (63)..(64): n is a, c, g, or t
  misc_feature (66)..(67): n is a, c, g, or t
  misc_feature (74)..(74): n is a, c, g, or t
  misc_feature (76)..(76): n is a, c, g, or t
  misc_feature (91)..(92): n is a, c, g, or t
  misc_feature (96)..(97): n is a, c, g, or t
  misc_feature (100)..(100): n is a, c, g, or t
  misc_feature (109)..(109): n is a, c, g, or t
ggagttcaagaccagactggacaacatagcgagancccatctctacaanaaatacngaatttnntnngtatttntngcagagatggggtcnnggtnngtngcccaaaantataggtggtgacacgcacctgtagtcccaaagtgctgggattacaggcgtgagccaccatgcccggccaactttacaatcttaaaagtttgtttgattaattataacttggtgaagatgtaaatggtgcatattacatctattaacatatctcaaacccaaagaattggtgaaatagggtattaattccatgatgatgataatggctaatacaaagggttttctgtatgccatacctttgttaaattctttacacaatgaataatcttcaccacaaccctataaggtgggttttgttgtatctctggcaattatattgttgtatctctgtgtattagtccctgtggaaaagt

SEQ ID NO: 127069 - DNA, 951 bp, Homo sapiens
aattctagtcagccaagtaaccctccctcggcacccccacctaaacatctgtagtcagccttgggtgttattcatggaaagtccactgcatgcgggtcagcactgctgtccatcggctcaccctgaccccttctggcaggtgtggatgagagtagagcagagctcatggggatgagttaccccaaacctattaagcctccctatccggggcactagtcagacactccagttttacactctttcctagaaaaacaaaacccaaccttgtgccctctgggttctctaatttagcagctactatctgtctgtttttggagtgacaccctgtgcagtttaggatttcagaagctgtcctgcatagaggcagaagggaaaacagcaggtatcttgttaacattctctatggggcaaggcagatgtgcccaagctggaggaaacctgcacaccctccaggctagttatccaaggcttgggaggtttccctcggccttctcctaaggccttggcaggaccctgccaccctaaaatcaactgctgattgcctttttagatttaaatgattaagctctgcttatgggaatcttcttctcttttattttgttaagaaacaaacaacaacaacaaaacccacaccaattcttagcaaaggggaatatcgaattcagattttgaaaaaataagtcatcatgcttcctaaaataagacagcttctccctctaactgctctctctgctctggtattctatctaatcataaacccagctttattattcatttcaactcctgccaaagacatgaggtcggagtcagaggaactccccttaccaccgccaccatcatcatggccagcatcctcgtaagtttatagaaagatgccagagaacctttcctatccatctgcagccctgcttggcccttgcctcagtgaatttaccactatcataatcacag

SEQ ID NO: 127070 - DNA, 433 bp, Homo sapiens
atatgtcaggttattgggtaatgtttaaaaagttgtggaatgaaagagactctttgtcattcaccactaccatcttgtttgtgaaaatacttatgaaaacctttcatcaatttcaaaatatcttcacagaattcatttgaatttacaacctggccagggtttttggatgtttgatagtcgctggttggttaaaatggatgaatgagatccggcattcagtaataataataaaagctattatttgttgttctactgtggttagagactgtgtggagtacagtgcatgcacatatatcatatagctctccctatttgaggagttgagaaaactgatgctcagaaaggtgaaagtttgacatactcaggtcacatacctaatctgtggcacaaactcaaattctgatttgttgggttcagtccaaacacttaagcc

SEQ ID NO: 127071 - DNA, 504 bp, Homo sapiens
aaagatgagggtgttctggtgagacagcttcactttctcaatcggttgaaagcaaccattcacctggtacttcccactcttctgagtaaggctaacccaatgctggtaaacagctatgtttatttttgtttttgtttttacacacaactcacacttctctgaatagccatgtttaaaagcttaactgaagagctattacaaatacaaacccataaagtaatcaggaataagtcatcaatctttccaatatggtatttgggagaaaatatacttaggattacccctgggtttagagattacctttaagccattcagagaagactgtggctctgattaagatccattctcttgtcccctcctttggctgccattttccaatgcaatgataaggtctgacagctggtagaggcagacatctgatgaatgcaaagacttttatttgtccagatgacagaagaatgtgaagaaactggtcatttgaaatctagctccatcatgctctcc

SEQ ID NO: 127072 - DNA, 526 bp, Homo sapiens
gtaacagagtgacaccctgtctccaaaaacaaaaaaagaaaacaaaaataaggagagaggaacacaagtactaaataaacctatagaccaaacagaagatcatgttacttgagccaagctcacgttgttcatctgactataggaggttgctgttctttcttaaaataatttggaaaaaaaaaaaaaaaaaaaaaaaaaaaccttggcgcggcgcgcgcgcccggggccctcgggaaaaggttttaaagaaccatcgcggtggggcgcgcgcggggccccagaagggaaagggagacaggggcaaagagcgcgggtcccaagagggaaaccggggcccgggaacaaggggccggggaatcttctccccaaattaaaaagagcgccggggggcaacacgggagcgcgttcggaaacaaactcccaagaggtggcgagttcggaggcgccaataaggggaactcatacaaaccggggagccaaaggagaacctggaataccaaataagcccggaccgcgggggagcgag

SEQ ID NO: 127073 - DNA, 473 bp, Homo sapiens
ggattacaggcatgagccatcgcatctggcccttggtacagcattttggattctatgagagcgtccttatttaaaccttaaatccagttgagtgacagaccatataatcctttaacaagggggctgctgaaagctgtacatgcagtcctttgttactgtactctttgggacaagtgccacagccatccccacttgtaagggttttgttataaactcccaccaatgcctgggagtgagctattctctatcttgtgtattggtgtcattcagtctcccaaactagaaacgtgggccttaccctgaattgtgacatttcctcacagcatacagccttagaaattgtctttgaagtctgaccctcttctacctccttactgcctgtgccctggcctggcttttcctctcttctcttagatgattgcagtccctcctaatagatatccctacctcttgtctccattgactttgttctc

SEQ ID NO: 127074 - DNA, 247 bp, Homo sapiens
ctaggggttggggggtagggagaaaaagaaggaagagagttaccaaaagtaaacataagacaaaaccctagtggtatagatggaagactatgttccagtaaaccagagagctggttcctccctcgactctgcacagccactgaaagtttaaagattgcaaaagtggtgtggggcaaggaggtagagtcaatcaatgaaactgtgaaaactgtttaagtagcactgctcaaggagaccaggagagaag

SEQ ID NO: 127075 - DNA, 655 bp, Homo sapiens
tgctgggattaaaggcatgagccactgcacccgacccaaccatttttaattatacacttcagtgtctttaagggcattcacatggttgtgcagccatcaccgccatccacctccagaagttcttctccaactgaagctctgcactcattaaacaactccccttcctcccaacctttggcaaccatcatcctgctttctgtctctgaatttgcctactctgcattcctaatgtaagtgaaatcatacatcatgtgtccttctgtgactggtttattttacttagcatgtctttatgcatgtgccaggatttcctttttaaggccaaatgatagttccttgtctctataccacattttgtgtatccagttatcagatagcatttggattgtttctacctctttgcttttgtgaatatcactgttgtgaacatgggtctactgtataaatatctgctcggattcctgccttcaattcttttgggtatatacccagaagtgagattgctagatcctatggtaattctatgtttattttttgaggaaccattatgctgttttccacagtggctacaccgttttatattcccactggcagtgcaaaagtgtttcaactcctctgcagcctcaccaacacttattttctgtttttttttttt

SEQ ID NO: 127076 - DNA, 984 bp, Homo sapiens
ggcggtgcggagactgaggttagaaggcacaggtggcgagatgagccgggtaccagcgttcctgagcgcggcgaggtggaggaacacctccgcagctccagcctcctcatcccgcctctagagacggccctggccaacttctccagcggtcccgaaggaggggtcatgcagcccgtgcgcaccgtggtgccggtgaccaagcacaggggctacctgggggtcatgcccgcctacagtgctgcagaggatgcactgaccaccaagttggtcaccttctacgaggaccgcggcatcacctcggtcgtcccttcccaccaggctactgtgctactctttgagcccagcaatggcaccctgctggcggtcatggatggaaatgtcataactgcaaagagaacagctgcagtttctgccattgccaccaagtttctgaaacctcccagcagtgaagtgctgtgcatccttggggctggggtccaggcctacagccattatgagatcttcacagagcagttctcctttaaggaggtgaggatatggaaccggcaccaaagaaaatgcagagaagtttggcagacacagtgcaaggagaggtacgggtctgttcttcggtccaggaggctgtggcaggtgcagatgtgatcatcacagtcaccctggcaacagagcccattttgtttggtgaatgggtgaagccaggggctcacatcaatgctgtggagccagcagacctgactggagagaactggatgatgagctcatgaaagaagctgtgctgtacgtggattcccaggaggctgccctgaaggagtctggagatgtcctgctgtccgagatctttgctgagctgggagaagtgattaagggagtgaaaccagcccactgtgagaagaccaccgtgtacaagtctttgggaatggcagtggaagacacagttgcagccaaactcatctatgattcctggtcatctggtaaataaaaaca

SEQ ID NO: 127077 - DNA, 922 bp, Homo sapiens
gtgagatatacctttcaccttctgccgtgattgtggggcctcctcagccacgtggaactagacggccctggccaacttctccagcggtcccgaaggaggggtcatgcagcccgtgcgcaccgtggtgccggtgaccaagcacaggggctacctgggggtcatgcccgcctacagtgctgcagaggatgcactgaccaccaagttggtcaccttctacgaggaccgcggcatcacctcggtcgtcccttcccaccaggctactgtgctactctttgagcccagcaatggcaccctgctggcggtcatggatggaaatgtcataactgcaaagagaacagctgcagtttctgccattgccaccaagtttctgaaacctcccagcagtgaagtgctgtgcatccttggggctggggtccaggcctacagccattatgagatcttcacagagcagttctcctttaaggaggtgaggatatggaaccggcaccaaagaaaatgcagagaagtttggcagacacagtgcaaggagaggtacgggtctgttcttcggtccaggaggctgtggcaggtgcagatgtgatcatcacagtcaccctggcaacagagcccattttgtttggtgaatgggtgaagccaggggctcacatcaatgctgtggagccagcagacctgactggagagaactggatgatgagctcatgaaagaagctgtgctgtacgtggattcccaggaggctgccctgaaggagtctggagatgtcctgctgtccgagatctttgctgagctgggagaagtgattaagggagtgaaaccagcccactgtgagaagaccaccgtgtacaagtctttgggaatggcagtggaagacacagttgcagccaaactcatctatgattcctggtcatctggtaaataaaaaca

SEQ ID NO: 127078 - DNA, 120 bp, Homo sapiens
tgattacaatggattcactaggccaggtcaagtcaatctctttgttttaagtcatctgtttagcaaccttaattccatgtgcaattttaatatctccttgccatgttacctaacatattt

SEQ ID NO: 127079 - DNA, 206 bp, Homo sapiens
ggttattgggctgtgctgagaattaagtgggataacacgtggcagcctttttgaaacagctttgccatcctgcagggcttcataactccccagctgggtccagccttgacatttacatagaactgtcttatccataaaattgcacctggttcccacaacagccctctggggaggtattcctttctccattatgcaaataatgagat

SEQ ID NO: 127080 - DNA, 784 bp, Homo sapiens
ggtttcaccatgttggccagactggtctcgagctcctgacctcaagtgatctgcccgcctcagcctcccaaaatgctgggatcacaggcatgagccaccgcgcccagcctcggcccagcaattcttcttgaagctgtcagtcatcctttgcctcattgaaaatgtcgatttttggctcactctgcctgttttaaggaccttggaaaagtgacaatctcacattgaccaaaactttccatttgctcataagctttaaggacttcttacacgtagtcttgtgtccttgtggtcaaggatgtaggtccctgcttataagccccacctcatgttctcatcactgttgacatcatggctttagctgaagtgtctctttctgttattagttactcataaatgtcgtttattaacaggaggaaggttattcttagaattatttctgatgaggtatttgtatgtgtatagtttaagtcaggggattgtctgtaatccaacgcagtctgaaatagtttttggaggttggcatagtttcatttcaccctgtccaatttgttcagagaagcctggaatttttacatgttagtaaaagaaagaaaatctgcctgatttaaaaattagtggcttttaacaattgtatctatgatatgaaaaggagagatttgttgcaacaaaagactttctattaataaagtatttgagtattttctgtgtagccatgtgggtgtgtacacgataggtaaatgtaaaatatgatccttgcttttaaagaacttgcttatttgggaaa

SEQ ID NO: 127081 - DNA, 554 bp, Homo sapiens
tatcttgactacctttccccagtagcaaacttgaacatataaggatattcttctaggtggctctcttcaatcaggccccaaatgaccagatgtcaaataagccaacataaacttgacagtgatcctggctttgaatgccaaggtcaacacagcattcacccgtgttacatccccattaaactctcttcagttacagtacccaggcagaatttgtgttagacagagtgaaagttgtctgcattgcttaaaacctttcatacttttcattgataatttttcagtctttctactacacaatgttagtacgattgttaagttagaattagatgaaagttattatgtgcaaacttactgtgtggtctaaaatggccaatctcacttctcaaaagaagacatacacatggccaacaaacaggaagaaaatgcttatcattagagaaatgcagatcaaaaccacaatgagataccatctcataccagtcagaatggctattattaaaaagtcaaaaaataacatgctggtgaggttgtggagaaaaaggaacacttataca

SEQ ID NO: 127082 - DNA, 212 bp, Homo sapiens
ggtgggagtttccttttggggtgatggcactgtgaatgtattaaatgtcactaatggtaaatcttatgtctattttaccaaaataaaaaatagatatacataaactttaccacaccaattctattaggatgttattctaatgctgaaatcatgaatgtgacaaagatgttataaaaccggggttgattatgtaagtatcattgctgttatag

SEQ ID NO: 127083 - DNA, 520 bp, Homo sapiens
ggccttgaagccacctcagattcttcaaagagctgaccagctagaacatgaacttagaactactgccctcccaatcacctatttacgctttaaccttcactttctacgattaacagatatttactttacttaatctacttgttagtgtgtataatatctatacatgttgatggcaccaacttgagtatattaaaacacccccttcatctcccttactgatatcagcctcattgaggctcttcttacctctctcttcaatctctgtccaaacaccttccacggggcgtcaacatctccaagttgtcccatcccaacctatcctatgacctgctccaatattctccttccctaaactcccttgcattctgcagcttccatactcaaaacctttaagatctcttgaatgtttctacgataatctccggtcctcttagccagacactcagggccctccacaacctgatgacaacttcatagctccaatccagtccaaccaatccagctccaacccaaccttgtg

SEQ ID NO: 127084 - DNA, 470 bp, Homo sapiens
aaagaaggaaggaaggaggacagacataccttcagcagctacagggaagatgaggcgggctggaaccactcactactgcccttcagaacagtatatggaagcacacgttcattggacaccagcaccattgtggtgacaccggatggtgggcctctcactatccacagttcctggtggttttgggggctgccaaaggcactattaatcatcactccgccccgagctccatcatttcaataacatactgagccaatgtgctcaagatctgcacagagctcctggagcgagccagtcctctccacttagcccttgggtgcctgtttatttcactgagccttctgccctgtgaatgagggcttcctgccaggtatcagccttggcggccaacaggtgggtaatagcacacagggtcatgcagccctttcttcccagagaggtactcatccaaccagtggtttttgatgagaaag

SEQ ID NO: 127085 - DNA, 142 bp, Homo sapiens
ttggtgtcctggtttatttttcagatagcaagtctgtcaaagagaagacacctctggctatgctaagcacatccaacaatgaatgaggatgtgaggtagaccagaccctggaatggttgtgactctctaaggtattgtctga

SEQ ID NO: 127086 - DNA, 297 bp, Homo sapiens
aaagtgaccgtgtagttgaagtgaaagcacatatattaaagccctgcagtggttcaactccatcttaggtttggagaacatggagtcctttgcccccagccacagaagtggtcaaaaggaatgaaggggaagggtggagcacttggcatagccctctgcagaaagcaacgaatttgaaggcagcaaataagtatccatatggatgggggaatgaagagcttcctgtccaaatatccacagtggagttaacagcgggtttggctgactagaggaaagcaggcctcagcccctggtgat

SEQ ID NO: 127087 - DNA, 180 bp, Homo sapiens
agaggggactttttgagggtggtctgagagccgtatcattatttgaaataataccaaccaacatggaatgaaaggcagggtgctaaactgaaaccaaccttaagaagtgggtgatgtttttatcccttcataactgacgagtagacagaggcttggagagttaagtgatttgtttaaggt

SEQ ID NO: 127088 - DNA, 233 bp, Homo sapiens
taaaataattcaacaaaatactttataaccactaaattgtaccataatatattctgtggggctactagtggatgctatttatttattaaaagagcttccatcaatgagcatcactgataactcttttgatgtcataatataggctgccagccactggcagaagctaaaatggaaccaaggattgatcactaagtttctatcagcacttcagactttattcttttccctcatgg

SEQ ID NO: 127089 - DNA, 680 bp, Homo sapiens
gatcttgccgttagtgtgattggaccaataactcagtgtcttcaacatatcatacttatgatgtaccaaacccgcaagagattaaagtatacaaaccagaatgccatgtgatttataatttttctttctatgttaataagtgagattggcttgtagggttttttttgttgttggccaattttgataccagagttttgtataaaatttatgaattttctcctaccctattgccttgtcctcttctccccctctactttttacatttctagttttatcatattgtgtaatccattgtatagtcacatgtaatcaaatgtgccctgtgcatttccgctttggagaatttattgatgttctctgtagccacgtatattatcatttttgtaaatgtcctacagacagtagaaaaggagtattatttgtagagtatataggtattgcattaaattagctttattgatagctgtctaaacctatagattcttgtcctttgcctacttgatttattaagaattaaagagggatacttatatttcctgctacaattacagttctgttactgttgccttattttctaacattgtactctgacacataaaagttcacagagtaaacttcattgtgaattataggtttcatcagttaacaataaactttcatcctgatttttacagatgaaa

SEQ ID NO: 127090 - DNA, 603 bp, Homo sapiens
ggagctgaacccaggagtttgagactagcctgggcattagagcaagctcctgcctccaaaaaaaacacctcttcagtaattaagagagacaacagatggaaataaagatttttaaaaagacaaaagagccagactatcttcaaacaaaaaaaaaaaaaaaaaaaaaaaaattttttggggcgggtcttgggccttagaaaaaggtttttaaacccatttttttggggcgcgccggggccccaataaggtgtagggagacttttgggcataaaggttgggtcccaaaagaagaaaaccggtggatgtggataaggggttgggttttcccacccaattaaaaaaaccgccgggggggaaacacggagggcgtttggaaacaaaatccccgacggggggatttcccggggggacaaaagaagggctctacacaaaggggggttcacagcgaaacgtccgatattctaaaattacggcccgccggggagaaaaaacaccaacggcacataaaaacaaacagcccaccagcaaacaccaagtcaagacaacagatcagagaaacaacgacataaggacgacgaaagaacaaactaaaacataaagaga

SEQ ID NO: 127091 - DNA, 330 bp, Homo sapiens
acacatttgtatatggctggctaggaatggtgactactcaagctgagctagcaagggatagagaatgagagagagagagagagagagagagagagagacagagggagaggagagattggaagatggggacagatgggaggagagctcagagccagggttcacccaccgcccccaggcttcttcagatagtcaccaccaccccggccatcagtggagatttcccggaaaacagtgagcatggagtgccggactctgtcagccagagctgggacgtcatctggtgtcagcccttccgtgggcactgggggcagcacccgcacctgagggtac

SEQ ID NO: 127092 - DNA, 410 bp, Homo sapiens
aagcaagtttattaaattctagcaggacactgttttgccaagtttctcagattgaaactgttctctctttgttaaacagtgaaattatcatgtgttagagcagtgttacagacatgcctttgggaatctaaagagaactagaaagagaatcacattcacattacaaaagtcagtgttattttattcattcagttactaaatacccagcaagtggttgagtggagtggatagttcttaggactacaaaggcaaaattaaatataatcctgtttccttgtagagctcatgatctagcagagaagactgacaaggaacaagtaaataaattttaaaaaatcaacttcagtttgtgggaagaaaagaaagcaaagtatgtgcatagagaggagtatattttgagtaggtgtgtg

SEQ ID NO: 127093 - DNA, 723 bp, Homo sapiens
cattttttttaagttaatactatttacaagtgccatacataaatagttattgactgtgcaatacagtggagcctcatttatgtcattcttgacatctatgtgaaagatcttgagactgaaatcttgctatacaataagattattttcatttttcagtgatcaaccctcttgaatgagagtccagcctgttttctagcaatgaagtcttctctgtaatagatccagttacttttagtaaatctggaggagggagaaatctcaattgactgaagaaagttttctaggtctcttgctttcagtagggccaatagtgaggagttaagctctgcttgaaacgtctccataggacacaatttccctgtgaactttgtatcttctctgcataacaaggtggtgttcttggtttaagagttcgtgcttttatctgtagatacattctttcctctaccgcatttccctggctgccctgctgcagaagaatttgctacagagaatttattctaaatgtatttcatgatacctagtttggccctgacattgctatacgcattactatttttacttataggttctttgttcagggtcattgggtttccagtagtccttgaaatggtttagaagctatatgttatttctgcttttcaaacttaaatggtgagaaatattctaaagtacttaggaaacgtgatattgacttccttggaaaacacaaacaagtactca

SEQ ID NO: 127094 - DNA, 319 bp, Homo sapiens
tctgtctcaaaaaacaaaaagaatttcaattgtatccaagtccaatggtaagcttccaagggcataagaagtaagcagtgtgctttgggttgtgttttaagagggtcactgtggccttcctacgaggaaaggatgggaggagggcagatcagaaataggaagcccgttcagagacgttgtagcggtcagaggcagacagcccggtctgagggtggcatcgctagagttggagagagatgatggatgggttaaaatatattttagagctagactcagtgtgaccaggcttcagtgcctgaacaggcttcagttgctgacc

SEQ ID NO: 127095 - DNA, 3609 bp, Homo sapiens
  misc_feature (796)..(796): n is a, c, g, or t
  misc_feature (1620)..(1620): n is a, c, g, or t
  misc_feature (1852)..(1852): n is a, c, g, or t
  misc_feature (2093)..(2093): n is a, c, g, or t
  misc_feature (2512)..(2512): n is a, c, g, or t
  misc_feature (2579)..(2579): n is a, c, g, or t
  misc_feature (2776)..(2776): n is a, c, g, or t
  misc_feature (3044)..(3044): n is a, c, g, or t
  misc_feature (3067)..(3067): n is a, c, g, or t
gggtgcattttgtaacagtcctgttcattatgactgttactccttcattgctatctaaagagcgtgtaggtaggtaaggtcatatggattgggcagaagtggcagtaggagtgggcagtaaggatagaaggaacgtatctcagtgagtgtgcaagttaagtacttggcataatgtaatagtgcctttcatatcctaaggtcaaactgtgggtatctttaaactgtctagaccacacgtgcatacaaatcctcccctggggatctcctgaaatgcacattctgatttgggagctcagggagggggtctgagagactgcatttctaaccagctctcagggtcacttggagtagcaagcacctccaaaactgctggaacctggaacaactgcagggagacctgatctgcccattagaccacatctccctgagggtctgggatgcatgtgtctttgtgcctcctgtaccaagagcagtgcctgctaggaagtggatgctcaaaatgatcttttcaactgaactgaagaggctgctgtcccagagtccgtttacgttagtggccttgggacggcaggggtgtggcgacccagtcatagcctgtacacttatttcggcccagcttggttatcgctttacagccgtctgcagataggatgtgtgaatttggcagcagaggcggggcttctggcaccggcaaggagtgatagctgagggcttggcagtgaggacaaggacagaacacccatggaagagagggaagaactcagtaactactgccatcagggataattagccgagnggcaagcagccctcctcatttcaagaggtctgtgttgtacacccacatgcaactctgtgcctcagtttcctcatttgaaaaatggagaaacttacagttcccctcttgtaggttatattaaggattgaagcttttagcgccttgccaggcttagcacgagagggcaataaacatgagttgcaattaggattggtgtgtaaagggttaagccccagccttcagggaggtttctccgagaagaaaaatcccattcctgaggttgcacataaatgtgttggtattttgccgctaaaggagtaggtgtaaattaacatgcaaagtgattcctccagaaggctgggggtggtgaaatgggcgaaggagaggttgctacttgttcgtcatcctcaggaaattcttaatggaagaggcagatgtcaggagctttctaattaatgggcagatgaggtgggagatgaacctgtcttgggggtgtgcctcaggggcaggcatggcgctgccagagctagcactggggtgaagttccagggacccttgcccgtaagaccttaaaccagaatgccacttagaggggacagcgcatgcttggctgtatgctgtagtgtttaagcctctttgcagctgacttatatttggttctttaaaagtcttagaagtggctggctaaaggtaacggggtgctgaagcatggctcccacacatctctgtcaccccaaaggtgctgggcacgagtattcagggaaaccttggctgtgtctgacctatgtttacttcagagctttatgcctagcacgggggtttgcacagggacattgaaagtaagnaagaagagagcaaagtagatgggtctctcggaaggctttgaaggggtcccaagcttctgtattttctgcaaacgcctgtgaaaactcccagaacattccttgatcaaaatggttttcttgtaccttctcacagggagagaagcgagggtgggggcagggtcgggatgtcatgggaatggaacgttcttaagctcagttgtatgtgatttttatttttctctgttgcctggtncattaattcataaactcccttagaaggctaaacagttcattagaaatatcctatttctgttaaatagcatagaaacatgtcatttacatttttctttaaaactcagaacttgagatcacttctgtaaaatgtgagccaaggctggctcttctccgggaggctctggcggtggtgggaatgtggggttcaggggatagagggcacttgcagtttaccctgtgactttgggtagcttttgaanttttgagccgtgtgtgtattgccttgttgaaaatcccatcatggcattgcttctttggggaaatctgatttcgtttgtatggtacctcttgcaggaatgtagagggtagcttttaatcaccttcttaacactgttcagtctctagaaactggcatattattcatttgcctcagcaggcgttaagattaacaacatattccatgggtgaaacttcgcagttgggcccaggaatagtctctctgctttatagcactcatcaccttgctggagagggaaaatcaatcaggtaaggagacatgtcttgattgtttagtgaagcagccacgtgaggaaattaagacttgtttccaggtgtgaaaaaggcctatgaaggaggaggctctgccagccattgaaagtgtgttctccgcatgtgtttntgtattgtctgggcatgaagaggggtaacatggaatagatctcaaaacggggaggcagttatgaagncactgagaaataaatgtagaaaagcagagaggaagcacggtgtaggaatcctggactcttaacagagcttgaagtaccttggagcctgagaacccagacatgtcccctcctgcctggcctcgggagtcctcctggggacttatcacacttgctgcatggcagttcctggatgcactggcccctcagcagtcacggcntggagttagagagaccttcaccccacaggctcagccatggactcatgtgatcctgggcaagaggcaggttctccaggccacattttttgccttgggggtctgaagagcttgcactaagatgctaccctctgtgaggtttccagccctaaacaggaagtcagggacattccatgattatggatccgccaaagagctctgagcagtttggtgaccatgctgtgaaagtggatgttgagtgggaacaaccacgatcagatctagtaggaanaatgggtctggtaggaggacgangacagagacctctagtagagaagtgttactttgcctgtgttagcccagaaacatggagcagggcaccggttcgaccagaaggagcagaatggctcttgtaaaaataaaaagcacttggtaccagcatgcttgtggtccaccaggtttgtgccccatcagaggaatactccggaggaacttgggccgttcagaatagtgtatttccagtgcagctctggaaagagtgagcagtcgtggaccaaacatttcatggtctgatgaaaagctagtggatgctggccaggtgcagtggcactttggaaggctgaggcgggtggatcacctgaggtcaggagtttgagactagcctggccaatatggcaaaaccctgtctctaataaaaatataaaaaaattagccaggcatggtggtgtgtgcctgtagtcccagctactcgggaggctgaggcaagagaatcgcttgaactcaggaggcggaggttgcagtgaaccaagattgcaacactgcattccagtctgggcaacagagtgagactccatctc

SEQ ID NO: 127096 - DNA, 573 bp, Homo sapiens
caacacaggatgtggaaaagagacactatttgaagagactatgaaagggaattgtctatgattgttcaaaagccaatcttcagattcagaaatcccagtgaatcctatgcaggagaaataaaaagaaatctatacctagaaatatgagactgaaaacgaagaacaacgtggacaaacagtctttgcctttcagagggaaaaagacagaatatctgcaaagaaatgatcattagcttaagagctactttctcaatcatttgaatgttttaaatgcattcatttcagatttttcttctaaatagcaattctatttgtttcctacactaaaaataaataaataaaacaaaaatcatttcatggctgaatctttattttcacttaagcaaatactcaggaagacagctgcaggtggaagctatgactatgctgagctctcagcgggggctaaggcaggcagggccctggccgatggcagatcatccctcaggcgtccctgtactccacttttcctgagcgccgggagagctgcacacaccaccccacgagtaggcccctaaaacagagccaagtcac

SEQ ID NO: 127097 - DNA, 441 bp, Homo sapiens
gagaaggatcttcagttatacccacgtatacaaaatagcatatgtctggattaaagatacatctggaaatttatcctacagatattctcacacatgtagaatattcactacagcattatacattcatatgtagaatgcattacattcacatgtagaaggatattcactacagcattgtatcatggtgataaacaaatagcacaaggtaggagcaatctaaatgtccgttggcagggaactggttaaataaatattggtatatctataaaatagaacaatgtgcagaagttaaaaagagtgaggcaactctgtatatggatagtgaaagtcttcaagataatgttgagggggaaaactggatgcagaactacatgtatgatatgctaccatctgtgtagaaaaagaaacaataaccccccccccacacacacacatacatgc

SEQ ID NO: 127098 - DNA, 401 bp, Homo sapiens
cactggcccagtgctcacctcctgtgtggcctggggatggggactggggatccctatcttaaaagataaaagcagagccctgattattctaattggattcatcaccacagtcaagtgaatgttatagaaacaccaggttcaaaatcaaaatctagaaattaaaggaagaccaggtacggtggctcatgcctgtaatcccagcactctgggaggttgaggtgggcagatcacctgaggtcaggagtttgaggccagcctggccaacatggtgaaaccccatctctactaaaaatacaaaaataaactgggcatggtggcgggcgcctgtaatctcagctacttgggaggctgaggagggagaatcacttgaacctgggaggcggaggttgcagtgagctgag

SEQ ID NO: 127099 - DNA, 202 bp, Homo sapiens
agctcggttctcccttttggggtctttgctatagaatgtttaacatcattcccccccaaagttgtaacaaccaaaaatgtcttcagacattgccaaatgttccaggaagtggggaggattgcccgcagttgagagttgctgccttagggttagttttgccttactactatggcaagatctttctgtgtactctacccaaaag

SEQ ID NO: 127100 - DNA, 304 bp, Homo sapiens
tggggttggggggggggcaagaagggaatgctctttctttttttaatagacaaggtctcgctctgtcacccaggctggagtgcagtggcgagatcgtagtgcactgcaacctcaaacagggaatgcgctttctatgcgccctcagcccagagtgttgagtggtgccccttccctggcctccccctggccacactgtggtgagtgcggacagcagggagggctgagggccgccttcctggcctccgcagggttgtataccggaccgtgtaccgtcaggtggtgaagacggaccaccgccagcgcc

SEQ ID NO: 127101 - DNA, 422 bp, Homo sapiens
ctgtatgcaacaggtggttctccttttgtggctctattctctgggctctgcccacgtctctccccaaccagaaagcagagtgccttgtcagttcttgagggtttttttttttcttccctagtccttaatcctagtgtaacagcatctcagcttctaaacgttatcgccttagcaacttggagttgtacagcaagaaagccttgccttgtttccttttttgatggtaggtctgagaaactccatcaataatgaatggcaggttaggctctgctgcgatcctggccttggaggaaagaccagaaaacaggcaatgacggtcacaaccgggccagcctcttactgggcacttggagttcacagcaatggtttagggatggatgctcaagctaatgttacagaatttctgtgcaggaccatgtgtc

SEQ ID NO: 127102 - DNA, 433 bp, Homo sapiens
tttgtggggttgggggaggagggagggatagcattaggagatatacctaatgtaaatgacgagttaatgggtgcagcacaccaacatggcacatgtatacatatgtaacaaacctgtaccttgtgcacatgtaccctaaaacttagagtataataataaaaaaaagaaagcaaaagaatcaaaaaagatatacaaacagtaatcaaaagaaagaaagaatagcaatattaaaatgagataaagtaaacttcaaagtaaagaaaattaacaaagacagaaagagacattatgtaaggccaaagagtttaatccaagaagacatagcagttctaaatgtgtacataccaaaaaacagagctacaaacttccagttgaagcaaaaaccagtagaactgaaaagagagaaaggcaaatccgcaattgtttttaggga

SEQ ID NO: 127103 - DNA, 452 bp, Homo sapiens
cttgaaatctggctagtgcaagacaaggtgtgctgttactgtaagtgtaaaacatacactgaagtgcaaaggcttagtacaaagaatgtaaaatacagtatctcactaataatttttatatgatgtcttaataatatttttatatattgagtcaaatattattaaaattgatttttcctgtttctttttactttttaatgtagctactagaaaatctaaaattacatgggtggctcatatgatattactaaaaacacaaaaattagccaggcatggtggtggatgcctgtaatcccagctactctggaggctgaggcaggagaattgccttaaccaggagacggaggtttcagtgaatgaagatcgtgccattgtattccagcctcggcaacacagcaggactgtgattttctttggagactcctagattttctgtggttttgaactgaatt

SEQ ID NO: 127104 - DNA, 413 bp, Homo sapiens
gcacagaagctgggaagacagtggtcagggagggcctctcagaggaggtaaaaagtgagaagaaatgtcaagaaaatcagcaagcaggccatacagatctctagggaaaaagcactttaggcaccaggaaagctgaatgctaaggcccggagacatgaaagtgtatatagccttttcaggaaaccacacatggtacattatggtacagcataaattgtagtggagtggcaaaagaagggttagtcaagagtgtaaaagtcagcacttagggctctatatgcctgccgtgtagaggaggttccattttatacatcagacaatagaacctgggaaaatatcttgagaatgggtttggaggagggggttatgttaaaatgtcattcttgccataacgtgagactagataggaaaga

SEQ ID NO: 127105 - DNA, 685 bp, Homo sapiens
gatgatactccggtggcttttggcctccctagtgtctgttggggaatccatggtcactggagtcattattttcctgtgttaatatgtcacatttctcttaactactctcctgaatttttttagtgtttggttttcaagttttattatgatatgtatgagggtggttttcttttaatttaacctgtttgggtttcattgagcttttgataattttcccataagttcctgaaaccttcctctttttcatctttttttctctctatcattcatattatataatctttattaatcagtcttcaaatgaatgaccctcctctgtgatcaccattccactattgttttattttaatttcagacattgtattgtttagttttaaattttctaattttttaaaaaatagtttttctgggctgtgaactttcatctttccatacttgaaatattaaagggctttacctcatggagtacagttataatagctgctttaaagtttctttctgccagtcccaacatctgtgtcatcccggagctgacatctattgattgcctttttctttgaaaattggttctatttcctgattctttgtatgtagagtaattttttattgtttccttggcattttattctatttatttatttatttatttatttatttatttatttattctatttatttatttaga

SEQ ID NO: 127106 - DNA, 468 bp, Homo sapiens
ttgagatagatagtactgttaatcctatttcacagactaggaaactaggcaaggtctcacaaacagaaatgtaacagagctggtgttcgaatccaagctatcctcatccagacccacagctcttaaacctcatgctacagggtctcaacaaaatgaactaccaccacagccaccatgcactgcatgcttgctatgtgccaagggctttatgtgtctcacctctgagcttcagaacaatcttctttttttttggagatgaagtctcgctctgtcacccaggctagagtgcagtggtgcgatcttggctcactgcaatctctgcctccccaggttgaagcgattctcctgccttagcctcctgagtagctgggactacaggcgcacgccactatgcccagctaattttttgtattttagtagagattgggtttccctgtgttgcccaggctagtctcgaactcctgagct

SEQ ID NO: 127107 - DNA, 488 bp, Homo sapiens
tagatgaaggattggggttgggggaggaaagggagaggcaagttcaagtttgtcacggtcaggtttctggcatccttgggtcagagagggaaagagagagcagtacccagacatggagaagaggagaggcttgagcacctattgtgtgcagcgccatgctgggccgtgtcataggtgccatctcactttagccttcatcacaacactgtgaaagcttgcggaggtgagccctgagcgaaagtcatgctgtcaggatttgaacacaggcttttctgatgaagagtccctgaagccagagctgagatggctttccacagctgctttgtcccctggaccagagggagggatggcctcacagcaggagagatctggccttgggaacatttgagccctgcctctctgtgccccccaactcctctgttgccccagtcctggcttcttcataccaataaagagccccagagcctcaaagctggcatatttgcata

SEQ ID NO: 127108 - DNA, 442 bp, Homo sapiens
aacaaaggattcagaagacatccaatttggatgctgctcttcctcaaatctcttgcccatagtttcaaagccctctctatttctttacatatgacgaagcgaatctgttttatattctatatcctatagttatgatacctgaagtctttaggggtctgattctgataaccattgattctgctggttcccatgcatatgtggcttggttttcttatttttttgtcttgatttttattttattttactatatgcatggaattcagcatgctcctttatttgagagttaattggggcctgggttgaagttgaattcatttagaatttgtttttttttttttttttttttgcttctaggggcactaccaactgttaccatttttaaaataaaattctccacttgagaattgtaggaaatacaacataaatttgggctccaaatcca

SEQ ID NO: 127109 - DNA, 158 bp, Homo sapiens
gataatctggctcctccctgggcatcatccatgaaagcctactcccctccattagcctacagccctgcctctgacttcaaaccctaagcctgagggccatgaatactagaaaaaaatctcaacgtcagttatcaattgagtaccctttctagtatctc

SEQ ID NO: 127110 - DNA, 279 bp, Homo sapiens
tgagatacgtgaggggtggaataacgatagtgtatgaagacaggaggactctggctgataagagattggaaagaattgactgtgatctgcttgccaaaagcactaacatgactttgggatgcactaagagagctttagtacccagaacaatggggctcataggccccagactctgtgagagtcaaaccctgtgaggagtgtgtggcccattttgagagggacagagacaaactgtagagtccagaggtagaaatcaggatggtgagaagagcccatgac

SEQ ID NO: 127111 - DNA, 322 bp, Homo sapiens
tgagcccgggaggcagacagccttgattgtgccactgcacttcagcatgggtgacagagaaagaccctgtctcaaaaaaaaaaatgaaaaacaagacaaggcctaccctagggctgtgcttcagaccccatcaggcagttgccatgcaaaatgcctcaagagtcacagctctgtcaaacagttgtgcgcatgttcctgccaccatagcatcccttgggagtttggttctgttcatgcaaaatgagtgggagtttggttctgaacatggagcgctaaggggatctcgaaaaggacaccttacagcacgagaactcaaacagga

SEQ ID NO: 127112 - DNA, 372 bp, Homo sapiens
tgtcctgccagccctaaccctgacagaggccacgcagtgccagagcccatggctgtagtggccgcttcctcttgcaccagaagcagcagcagccagtgggtcccattcttcagtgtggtctgggaagtcctctctggaactccagccactcccaaggctagaagttacgttttctacacacccttccatcccctccctccttgggctcatgtctgaccttgaatctggacaggggctccgtcaaaggctgagagcagccacagttgagggaatgaggacaggacaccaagtgcaaagaggggctgggagaaggactcacctcatagacgggggcatcgggtccttcaaactggaggcctggaggacacaggg

SEQ ID NO: 127113 - DNA, 480 bp, Homo sapiens
gttatactcattttactgcttaggaaattcagagccagaaaaggcaagatattttctcaatatttcagtgtttaataaatgagagaacccagaaccaaagctagaaataataacagtgaatctctgagtaagcacagtaacatttcttccatgaatcttggtgtgttttacttttttatttgcaaatgttctcctgggggaggtaatggtactgtcaaatatttttgctaacagaagatgtggaatgagaagagacaagtgacacataggtcaccatcatcagatgctccaaataggtctatatgtgtgttacagtagaaaaaaggagctctaactacaaactggcttccagatcagtcacattttcctgtgttccacatagtttcagttgttatgatgaagcaccttacccacgagcagaaataagcatggaggaaggcaaattggtaattgacatgttaaaagttgttaaaaatgcca

SEQ ID NO: 127114 - DNA, 223 bp, Homo sapiens
tctggccctcatggaccatatgtgtttggtagatattagaccaatatttgggaagaagtcttgcagatactttctctcattagacattctaccctctgattctgagtttgactactctatgtacctgatatcagtggattccagagtgaatcagagtgtagaatagtagtttccaggagctgggatcaggggaattgggtgttgttccgtgggtgtgcggttt

SEQ ID NO: 127115 - DNA, 497 bp, Homo sapiens
aatgaatgcaaatgggaaaagtataactctctggcaaaaactgaagagccattgatttgtctttagtatcaaggccaatgtgccccttgaatccttctacctcagctcttcaccctagtttgtggtctcagctatgggcatgaccgtcatcgcctctatcgcctgctcgtagctccctgcctgggattccatctcttgccttctgttaagcttctgcctcagagactgtccaatctcactgctgactctgctgccctggacttctgctgggatgctcccatagtacccagggctgcatgtgggtggttcattactttctgatttgattacacaaacacacttccctaattatgcaaatatacgtattaaactttactgcagtaacagaagattcatcctcctaagtataggaagtataaagctataataccttcccttttccctactgtcctcttaagaggttaccagcgttcccagcttgctcagagcctcaggac

SEQ ID NO: 127116 - DNA, 366 bp, Homo sapiens
tgtaaacaaacctcagagaggtattgtcaaaggctaagtctctcctgcattggtagagagagactggattttgttgttgttgctaataattttgattcaagttttaacagctctcaggcctgtaaggtctgcagtgagaaaggaagtgagcaggaacgtcagaatggagggatgtgtgaagtgactgttatttattatccaaagcaagatactttgagaatgaaagaggcactatgaagaattacacaaggacaatagacattaaaacagtccagggaaaccaggacatagggtcgccttaagagtacaagggtctgggaaggaagggatggggaaagtgggttctcagactgaaaagaggtccag

SEQ ID NO: 127117 - DNA, 493 bp, Homo sapiens
tttgtttccagtgtcaagcgaaagctgtagccatgggagctgtggcgttggtcaaaggagcaaagccactgctaaaccacagtccagcagggatgaaggtgtgaggaggtggaggccaagtggttcagttagatggtgagggcattttagggagatagcactacaaaaacaaaaatacagaggtgtgggagaaaaccatgtcacattgctggaattggagtgtaggatgaagtagaagtcagatcatgaagggcctagtatatcacgccaaggcatttggaccatatcctatataaccaataagagcctgtgccccataaatgactaaaatactctgttgctaattaagtccctgtgtttgtcttgtgggttgggttggcggagccgggagaggggggaggttgagagatcattttgagtagtttgtgtctgtttcccagcttaagacttttctgaaccaaggctgctaatacaaatcacatatgttatggag

SEQ ID NO: 127118 - DNA, 821 bp, Homo sapiens
taaataatttgtttataatgactctttataataagatatgcttgtgattctctgctgtattttatatttcaatttccataggttaacaatctgaaattctagtagtctactagtatggtaaacagtattttttctggctttaggaataaagaaatcgggacaaattaaagttaaatagcttgtctagaacttcaagcatattgatagggtagccagaaatagatcttaaattttaagtccctcagttcagctgtgtacactatttctaagccctcagcatccatgcatgcagttaattctacattttctaatggctgtagaagaaaattatcatagttaaatataagcctcaaatattttggaaacttcacttcagtcactgatttcaatctcctctccatcaactcttttactagaactcctaacaagtggaaaatttaactgattttaattttactacagttaaccctccaagagctaatagcaaaatggaaggaaggcatgcattgagttagcagggaatttccttctttcctgggttgtaagtttctttataaaataaaggatgggtgttcaatgtaatcattcagtggtagatatgtaaacttagccaagcatattttaatcatattcttatgtttttactaacataatgtacttaaaatgtcataaaacttagggatagaattagtgttgtcactctgaagtttcagattgaaataaaataaatcttataaaagatgccaaataaaactatcttttaaaagcctataaaattaaattaaaataagaaataattattaaatctttttttttttttt

SEQ ID NO: 127119 - DNA, 370 bp, Homo sapiens
tggtatatggaggacgctgagctctaggcagccatgccatcaggattctgttgacattggggaattaaagtgacaattcttaagaacagacgtgaaataacagcttggacagagcatgttctcttctacagaataacacagcaactcccttattcagaagtgtcatgatttttctcctatgcagaaaaattgtatcacagtgaagaaaggcatgcccaacacttcaaatgctggccacaaggtgccagtgggggtgacagtgaccatctgaaggctggacacacaccagtggcactccagtggtgaggaggctcaggagggcctcatgggttccagcaggggccaggggcactctggatacccccggctg

SEQ ID NO: 127120 - DNA, 107 bp, Homo sapiens
caaatttggccttagttctgtctttggtagaggatcagaagcatcaaatgagagggactgtaaagaactgaacaagtcaatagggggatgtccgcataactttctcc

SEQ ID NO: 127121 - DNA, 430 bp, Homo sapiens
ggatccatagagcttatctagccccttgtctgtgagcagatggctatgaacagaagtcattgtaaaaccacaaaattaccagaattactgataaatcttttaaaatatagatgccttaccctcaacattcaagtttctgcttcaaaatgtgggtgtggccttttcatcaatgatactttgccaaacctaccaaatgtcctggggggtagccaaagctgacaaactgtagtataaaatacctctaacagctggtgttaactagggctaggtttattttcttctgaactccaggaaaactagttaattttaagcaactttcaatttatacaccaatgatttattgagtgcttcctgtgtgctagccaccaagccgtcaggtaaaaaccaataacacatgaatacttccttccagaaactcacaattcacatt

SEQ ID NO: 127122 - DNA, 473 bp, Homo sapiens
cctctgttctccccggtaggtttaaagattctttagagcaaagatacagaattttcatcttcccttttccagcccttgtgcagtacctggcacataaaagccattcagccaatgtttgttaaattcagctaaactgagcaggaaacgtctcccttgtgtgtggctgtgcctttttgccattcagagagaggcagtacaatcatggtgatttgaggacacttaaaaatggaaagggctccacatcgaaggcctcttgaatatagtgaaaatgaatatcaaaatcaatatgccgttcagtttagggatatgaataaatgatttcaaatgaattcaattttcctctcaacattaagtggtgaaggaaaataaattattggataatgtatttgaagtaatagctctcttctaactgttcctacaatttgttgttacttgtctttggacctctgtgtgtcatgtgatactgtgtgtca

SEQ ID NO: 127123 - DNA, 197 bp, Homo sapiens
tatcaattagcgtgtggtaaaattagtttccatatacatcatcaatgtttaatgaggactttagcatattgttgatctgcagatggctaatctgaggatgtgagatatagagagatacagacagccaactgaatttggttatatttcttctcgaagcaaaagtgctacgctggaatggaatgggggtaccgagctcg

SEQ ID NO: 127124 - DNA, 225 bp, Homo sapiens
cctactgacacatctccagttgtctcaaaaatgtgttttccattgtggtttgtctgaaacatgatccaaaagtcagacccacctctcacctttccctaacctgccggagcccatgtttctttccagccaggcttggagaccaccacacgggatttgcttcttggggcctccctctaaccagctatgcaggatgccctctttcctgtcaatacaagctgctcaaag

SEQ ID NO: 127125 - DNA, 228 bp, Homo sapiens
cactccagggacaacaccaatggacccatctcataaaggtcccctctgccccctctcttccttccctccaccttccccactctcttaatcctcatgcatgtctgcaccatgttgcctagtgtctagacatgtatgaatgaacaagctccctaaagacaaggggcacactcacccctctttatttaccccacagacagcaggagcttgcctagggtaggtccccaggaa

SEQ ID NO: 127126 - DNA, 330 bp, Homo sapiens
aaagcacagagagatgaaacagcctaccaagggtgccacaggtcatatgtgatggagtcggggaatcaaacccaggccagggagtgtcatcatccctcacatctggatttctgctacagtcacctcatactactctatcttatttccagtcaactcccagcagccagggtgaactgtatgtacaatggatcatgtcctccactgctcagagccttccagcagttctcacctcactcacagccttccagcagctctcacctcactcataaaagccagaggctcatgtggcccacaggcccacgtggtcgagccctgctccttctctacccc

SEQ ID NO: 127127 - DNA, 151 bp, Homo sapiens
atgagcgcccaagtgttggatttgagaggaagcaggaaattgagagttgcaagatgccagtgagagggaggagcgtggggatgttgaggaacagataggcagcccaagaggtcaccataagggaagtagtggaggggaagctggacagtgg

SEQ ID NO: 127128 - DNA, 509 bp, Homo sapiens
ccctcactattggctccttatgtcacattatcaaataaattacttatatgcaagattttgtcttgatctccgcttgcaggaaaagggtaggcctaagttattgaagcatgaaaattattctatcaatgttagttattatttgggtatgttgtcaatataaattaaaatcttgaaactaataatggaagccatatattgaggatggcagagaaacaaggagtctgggtttccaacaatcacagaaacattatatcaaccctggactgtatatgtttacatgaaagagaaacaaacatctcattttatatgccaccatcattttgagttttctgtcactcttgactgaccttcatcccaactgatgcatcccttcttttcccagggtgtgtgtgtattaagttctacacaattttatcactggtgtagattcatgtatcccgcaccacagtcaagattctgaataagtccagcaccacaggcagtgttgccacagccaaccgtggactagt

SEQ ID NO: 127129 - DNA, 357 bp, Homo sapiens
tggtggatggttggtgaggggatatgacagtggaccagcgctgttggctgcaaccctggcccaagccagcctgaggacggcctggatgagcgggactccagctgtcctttactggcccccagggaccctccccatcctgagtggacatggccagagccaccatgggcagaggcagggctgggtccaacctcgtgctgcccgggaggaccaggctggcctcctccctcctccctcagccgtccgcagctgctgggtccaggtggtgccatcccctcttttttcaggaaagctcatctgaggggagtccagctcaagccctcatctccgcctgtggcctcacgcacaccacacacagcc

SEQ ID NO: 127130 - DNA, 368 bp, Homo sapiens
gcgatattataacatataggtcttgtgtcctttgagactgtaaactgtttaatacgtatgactggttatttcacatccgaaccacattaaaaaagattcggagatatgactgctattacactaaggaaacaagtggaattttctgaccaaaactcattcatgggtcttccgataaacaatctttacataaaactgacgcgataacaactaaacaaagaatatgtgacaaagaccatgtagcctgcaaagcctgaaatatttactatctggctctttgcccactcctacatttatacgaccgatatctagagttagtattttccgggattgtaggaggataagagtgaaatgacagagactctagatct

SEQ ID NO: 127131 - DNA, 129 bp, Homo sapiens
caagcaatccacctgcctcaaccacccaaagtgctggaattacaggcatgagccactgcaccggcctattttctaactaactttttaaatgacgttggacaagtatctttacctttcttgttcctggtg

SEQ ID NO: 127132 - DNA, 703 bp, Homo sapiens
gggcattccctgaccctttgtgcttcctgagtgaggcgatgccccaccttgcttcggctcaccctccctgggctgcatccactgcctaaccagtcccagtgagatgagctgggaatctcacttagaaatgcagaagtcacccaccttctgcactgatctcgctgggagctgcagacctgtgctgttcctattcggccatcttgccagccacctgtgttactagaattttatagtgcagtatttgtcaaaccaaatgataatcatagtatttaattaagtttatatcttatcttcatcttgtaagctcttctagggcagggattgtgtcatatttttaagcccttactgcagagccctagtatgtggtaaatggacatttaataagatttgtagttgaggatgaacaaaattactttctacttttccttcctttctggccattttttctcctttttctttccaaaaaagcgtagatgtgaacattcaaattctagtagcaatctgattaaccaaagtattttaatttatatttttataagctccctggattatatttagtttctccccgactccttataaataatgataaaagccaaagagtgggaagggtgctattgaaaggcgaacataaaatattgacaccaatttcataattctacataaaaatcagctttattgctttatagtcacactttgaataatt

SEQ ID NO: 127133 - DNA, 542 bp, Homo sapiens
taactgtgatgatctgaacttaaaggtaaatggacagtatgtttgccaaggtaagatataattttcatatgagggactaattaaaaatttttaaaagactcattataagttcattttgttcttgttgactgcttcagcaagtaaaacagcatcacttcctaatgtgactacatcgacttattaaagattcaatatttggtggaaggtagaaaaacttactgtatatagaatactttatgcttgtccttttaattaagaagcacaaaatgtgtcatttaggtaagatactaaagtagaaatgatctcgtaatactagctcctcaaaagtattattttctcagaggtatatgaaatcggtgaattcacctccaccgaaattcattaaatcacatgggatttaaacgctaaaatataaaacaaaccatttcaatgactcgattattacttaattttttttgataagaaaacaattgaagtatcaaaaccctgtggctggcagagttgtttttgtttggggaaaagttgagaaaaagaatgacaaa

SEQ ID NO: 127134 - DNA, 119 bp, Homo sapiens
cactctagcctgggcaacagaatgagactctgtctcaaaaccaaatagaaacaaaaagaattccatgaagggaattaggaccactttttaattcagtgtctgcacactatctcctgacc

SEQ ID NO: 127135 - DNA, 500 bp, Homo sapiens
aacttctgggctttggagctctcagagggggtgtccaagagacaagtctgcttccttccggctccgtcttggaacattttaatgactgtcagtcaccaatccaacccatccccagtggcctaccaggcaccacattgggatgagactcatgctacccttccccaggccagccaaggagcaatccacgctgtcccccatccctggctggctgtcttatggtgcttcagcccctccgcccagctcctgtgccctcatgagcctggggctttctgtataaaagatgcaatgatatctgttccccactagccatccccacaatgaacaacttcccaggcaatagcaaatggctccattccaaaagggcttgtttttttggtaaatcaaataagagaccccactcaagacctttgaaagtccccgtcaatgaaaaaaatccagaagggtcaaaagagaaaggcagcttttaatccagtttcacagcaaaaccaggctcttggctg

SEQ ID NO: 127136 - DNA, 532 bp, Homo sapiens
cccctggagagagatagtcttctctgtctgtgtcctcgagtggcactctgacagtgctatttctgaccctggcattcaagtcttctgaagccgttacattcgctgatggctacttagagcccagtaaaggtcagaaccatcagactgaaccagaccatgaaacagcgctgctcctgtgggggcgagggctggggtgtggaagcgatgtctgcgggcctcggcctggcagccccgcccctgggctccctgggctttctatcttatgcttctccctccctcctgtcttctgtcctcagttcctcactcaccctggcctgtttcggggagtggttatgggttggaagtcatgggtgttagtgtgaaaataccctcactcaaaaagtgacagaactgaaaacgtggtagatggtattgtccctgcagttcttgtcagtggggtcctggaatgatgttatcccggcaagtggaggaggggcccagtgaccggggccctggctctttgaattgtcccacaaagaggctttccaggttc

SEQ ID NO: 127137 - DNA, 615 bp, Homo sapiens
agccacatcacctcaagtaattaattgtgggatactttcaaatagcacctactcatatctgttaatacctattgtggttataaagttaattacacaatttgggtcatttttgtcatacctaactaaatcatacttgaagggctggggaaaaagcagctggagcacatagcaccagctccaaacatttttccacaagcccaacttctataaccctaaaaccagatttacctggtaactgctgcgtcgacctgctgtgactcaaagactagttttatctaccactatccctcaccaatcagagcttgttagctcccaaaagctttgtttactgtgccaatgagttttgtttcaaaacaatatgtaatgtttctctttctaacaaaaatgccaaccttctctttgttctttggacttagcctagaccaaccctgtttacgccttgaattgcaattccgtgattaccaaataagatgtttaatatagagatttatctccacatattattttgactttgacactattcaccttgtgcagaacacattttgaaaaaaaaatagcatagggaaaaggccttcattccctgaaacataatttttccaaatatgacccagtaat

SEQ ID NO: 127138 - DNA, 329 bp, Homo sapiens
agcagggcaccttgggatcagaatggtgcttccagaaggtgagtggaggtgagcttgggtcaagggagtgcaggaacatatggggaaacccattaggaagcaaatgacactctgcagatgagaagtagtattgacccagacaatggatccaagaggatgaacatgggagagattttggaactagaatacagagcaactagtaattactcactataaagagagagaaggggagatggcaagatgttgctaagagagagaaaggaagaagagagaggtttagaaaaggagcaggtcggctgggtacggtggctcactcctgtaatcccagc

SEQ ID NO: 127139 - DNA, 395 bp, Homo sapiens
attgcagtgagccaagatcgtgccactgcactccagcctgagcaacaagagcgaaactccgtctcaaaataaaacaaaaaattaattgtcttagtactattatctattttataaccttaggcacacctgtattctaaattatgaacttttccctgttgagcatttgccctacttaagtttttccctagaattatacatcttttttacggtgactattatgttcaccaaaaacaagggagtcgggggtgggggggaatgccacaagagcagtaatgccacagataaagcagagaagcaaaaataataataataacattcacatctgtggtcccaaagcaacaagactcctatcattagaaaactaattcaagccttaaaaattaacagaatgagaa

SEQ ID NO: 127140 - DNA, 187 bp, Homo sapiens
ttgcaagctgggaacttcttaaagccaaaccagtggcagttcagtttcaaagcagataggtaagtggtccatggcagaaggaaagccgacttacattcaaacacctgaacacaagagacgtcctagactaacatccaaactcatgtacctctaaaaacccccctttcccgcttgctcagacgaaacc

SEQ ID NO: 127141 - DNA, 865 bp, Homo sapiens
cattagcttctaaacagatcttttaatcagtattttattcagtttccaagacttccacaatattatatagtttttacttcatatccaaccactcctccctataaacccaggtctttgcctatttaaatgggtgttatgtccctgcctttgaactcaaattactcatttttcaaatctcagctccaataaaattccagcctaaaaacttgtcataatatccccactaacttcaggcaggtttgtgcctccatgattattaccatcagtgttcttgttaagtcataatttacttgtctttttatctagcaggatgtgaacatctttatgagagaatttttgtctcatatgttttgtagttttttacattcttgtatgctcactattaggtagtactgtacttggtacatagttagaattttgctgtattaatattactacaaagtaacatttgtttcatctgttttaatcatttttatattatcgaaaagaaaatattatttagtcttcctagcaaacgagttttctagtttcaactaatttttactttacaggaagaggcaaaaagtagcttcctgtttttaaaattattgattattctgcttgcttttattttcagcaattgggccaacagtgaaataacactggcagttccaatgtatgtattatatttgctctgaatgagaattggttttaattattatagatgatttcccattctcataactcttattgagcaataatgcaatattttatatataaattttttcattgaagactggtaagagaagttatgtaaagctcaaataaggaagaaaatgcaatttatgtaactctcttcagtttctagtttttctagagaagataa

SEQ ID NO: 127142 - DNA, 451 bp, Homo sapiens
gcggtgatctagaggatccctgggctcaataatcctgaggcagcagaaactgcagaagaaaaatagtcaagtcaaccatgggttagaatgcgaaattgcggaaccttcacacaaggatgcaggaaagtcaagaaatcgacccccatccaacaggaaatagacactgaatagaaacgcctgattctttaatctgttccctttctacacagtccattgcattcctaatgccttcagttccttccctaaacagattagaatctatggtgctttatttccataattctcaaacttttaggtctcaagacccctttgtaatcttaattgatgactccaaacaatttttgatgttgtgggctatctttaattaatacttagtgtgttaggaataaagactgaggtagggcacggtgactcacgcctataatcccagcagtttgggaggcccaggctg

SEQ ID NO: 127143 - DNA, 304 bp, Homo sapiens
ctatcaggactcttgtgccttgggacggaggaaaagccacagacgcacggaaggaggaaacaggccacagacacacagacggaggaaacgccacagacgcacggacggagtaaacaggccacagacgcacggagggaggaaacgtcatagacacatggacggaggaaacaggccacagacgcatggacggaggaaacaccacagacacacggacgaaagaaacaccaccgacgcagggacggaagaaacaccacagatgcacggatggaggaaacgcgccacagaggcacgcacggagaaaaca

SEQ ID NO: 127144 - DNA, 599 bp, Homo sapiens
gagtgctttgctaataattttatgttttctacatagaccttagaaacgtttttgtaaaggggagataaataatggtaaggtaagggatcagctcaagatggaagagaatggggcagagaggcttttggtgatagtgtaggaggaatgaggaggaatttgcatgaaggaggaagaggatttgcctgaaggccatggcatgggaaggaaatggagaacatagatataagacatcataagtgctgataatagacttgggggtttcttgatttctgtttggagtaattggtagaaggtgaagctgttacctaagagacagtagaaaagaaagagccggctctggaaggaagttaacaaattcgattttagacttattaagtttgaggtattagcactggtctaatgtagatgtccatttagatccactggaaattttgtctagagctcaggagttgcctgggttcagaatagaaatctgggaacataagcctgaagatatttttaaagccatgaaagtaagcgagccctctcttaaggagggagtttagcgtgaaaaaaggaccaaacagagaactgcctacagagaggttggacaaaagtcc

SEQ ID NO: 127145 - DNA, 308 bp, Homo sapiens
cagcagtggggtaaagtaaggataggctcagacactttcatttattcagcaaatgctcatcaagggcttactgcttgccaagcagtgtgctggcttgctagctgctggagatatgatgataagcagaactaaaccaaaccaaacaaaacaaaaaaacagtttttaaaaagaactgagagattgagagatacggatggtcaggcaagatatcgttgtacatgggatggaagagcttcattcagtgggctttgtgtgtttctcagcaagataattaccattgtataaagagaagacacagaaaatacaga

SEQ ID NO: 127146 - DNA, 347 bp, Homo sapiens
ctctacatatgccaagttgcctctgccacaatcattcttcctaaattttagcctgtcccctttatgttctttaggacttagctggagtgcctttactgatgtaagctggactaggtactcatcctttgtaatttcatagtactttattcccccagttcccatcgcattatcaagctatgtaagaaaaaaaagcaatgtgctgctcactagtgtctagcaaaaaacttgatatttagtaggcactgggtagttgaatgaatgaacaggagcctgcatagtccaaggaattatttgcctgtggcattaagcaaccaaccttcctggatcctagtccatgctgtgggatt

SEQ ID NO: 127147 - DNA, 355 bp, Homo sapiens
ctctctgggttaggggctggagttcatgtggggacatccagcagacaattggaagtctgggtctggagttcaagagcaaggccagagctagaacacgagccacagacttgagggtctttggcacagaggtgatagttgcagctgaagaagtggatgaggtggctcagagtgagaagaaaaatcagaaagccaaaggcagcaccttcagggaagtgtatatttcaggatcaagagaggaaaaagaatgcttggaaatgagacctgtaggagtggtcaggaagggaggagaagaacccggagagggtggtgctgccaaagccagggagaaaggggcttccccagagagccggaattc

SEQ ID NO: 127148 - DNA, 606 bp, Homo sapiens
tcacctgaggggaatgtccacccggaggtttgactttggacgtctggctcaaatcagggtttctgaaagtattttctttgtagacattattagcagctattatttttgttctctaaattgaatgtgtgactcaagctgcaggataattcaaagaacatgaacacaatcaaacatgaggtgcttttaattcctaacgcacatttctatttttagaaaagagagtggacttgcaggaatagccggggtcatcgagccacataacagtatgttcaacactattgaatgaccatatgagaacaaaaatgtgaatcacttcccatagatgtgggagtgaaggcgagcaagaccaaagtgactgacagtgtggaaagcaataacacacatcacagcatcatgaggaaagaatgtgcactagtttcagcctaatcaagcatttcatgaaaatggtagaaaactcagtaggcttctcagttcagttcactgtttttctgcttttcaaagataagatcaaactgattccaccttgtttcttttacatctgtttagcttgggttaccctgctaaaagtgttcttctatcaaagaagaaaaatcatcctctctctcc

SEQ ID NO: 127149 - DNA, 509 bp, Homo sapiens
cgcctgccaccacatccggctaatttttgtacttttactagagacggggtttcaccatgttggccaggctggtctgtaactcctgacctgaggtgatccatccgccttggcctcctaaagtgctgggattacaggcgtgagccactgcgcccggcctaactttacatttagaaaatgaaattgcgcaagtgtaactattaaaatgtttatcgtatctacctaaataaactatgtagtctgttttcatgaaaaacgacagcaactttgttttttaggaatatcagataaggaacccaaaacagtattgctcacatcctgtgaactttctggatcgctgatgttgctgctgctgctcagtcccatctttgaggccaccctgcattcaaatccctgtgccaaattgcccagggaacccggtcctggtgccctggtagcccaaaagggctacttgccttctccttccacttacccagacccctgcctcccttacccttctgctaggaacatgt

SEQ ID NO: 127150 - DNA, 737 bp, Homo sapiens
cacatatatatgttccgaagtgtagtataccataatggtgacttgcacacgtgagcactaaaagtttagagctgaatgaagttgatccttttttccagatttgctccaacagactttaaaattcttatcagagtataaataactgactagagcagtaatgatgtgcaatatttattttcttaaaacatgtacacactaccaaaagagaaaaacacactaccctttgtcacacatgctaatgaaaagcttagttgattttcactctccttcatttcctctaaaatctctctggcttaggactctgtcagctgaaaaacaaacatgtggctaccacatttggggacaatacagtgtttgcaagccctgcgggagataatctagccacacattgtgttccctgttcaataacaaaactattattcacaaaattggagaaaccatagttcctttccactcaaatctgagatgataatgatgatgacaataataataataagccacggctacatcaagatacaaacagctttttttgctttgataagatccacagctgatttcacttttgaccatgagattttcttctcgtgaacaattctgcagtatgtgccataagagaagggaaggaatgttgctaattctttttttgagtttctagcccatcaatatcaaatctttaaatggcaatgtctggcccattggccaagaaatgaaagttgttgtaatgctatgttcctggt

SEQ ID NO: 127151 - DNA, 339 bp, Homo sapiens
ccagagtggtgtgtgttgccgagggccagttacctccaagttgcaaaacagggtgccagtgagggaccccagcatgaaggagctagcctccagtgcccccagcaagggtctgaggagagagatgttggggctcagggcagctgaggatgacagggtcagcaaagggtgagtgcaggctcaaacagaggttagaggttggggcaggggtcagaagtcagggtcggagtcaggggccctgtgcccccattcaagcctgtgccatttgtgctggcggagttgggggaacccctggatgtccacccacggagacagaaaggtaaagggcaggggatacacaca

SEQ ID NO: 127152 - DNA, 353 bp, Homo sapiens
cgtccgactatcaactgtgaactcaaatgtcacccacacaggtgccttggagaaatgggaggtgagacatgaatttagagggagatttaatcgggtgggaatctgaaataatgacctgtcatgggttggaaattgaaatgacctcccaggatatgaggcgagcaagatgaagtcagatgcaaaggctggagagatcagctgcagtgtgcagcacaaggaaggggacaactccgtagagtatcattccatagacaggttaatactcagggtgaaaaaataccatttggacaaagagcaaaagaaccaccattcataagcacataacatgagcccagaactgagctagccttcgt

SEQ ID NO: 127153 - DNA, 341 bp, Homo sapiens
ctgagtcgctttgcttgaatgtgttggggcaggaggacccaggggaagggtgtgtcggcaacaaggtttacagataataaaaattgacactcacagtggcccgggtgtgcgaaggagatccctctgaggcaaatcagcatgattatctattaattaaccttgaaatagaaatattctcaagcactgaaaccttttcagatgaactgcagtgaaatcaggcaccctattaccataataacattttaaactcgataatgtatttaacatttgtctaatgtaagtgcctataagtgctgtaatgtaccagttgtgatgataagatcaaacaacagtctttaaat

SEQ ID NO: 127154 - DNA, 365 bp, Homo sapiens
tttcttatcttaaacccatttccttagtgtcctggaaagcaggttaatccatcagattcactaggggttaagtgtgataatcactaatcagctttccctgctaagtaaaatacatgcatttcaatgcacactcttatcatatcgggagggaaggagtcagtgatgctgtgatttggcatgttaatttaaggagagaagggaggtcaggagagctgggtggtgacctgatcaaatatctccatacgtatttcacctaggatggctctaggtcctaaaaagagtaaaaggtgaaaacactaagtgatattcaaaacaaaagaaaaagatgaaaaataagaaccttggttaaagagcagtcgaaataa

SEQ ID NO: 127155 - DNA, 437 bp, Homo sapiens
gggcaacatagcgagactccatctctacaacattttttaaaaatgaactaggtgtggtggcatgtgcctatagtcctagctacttaaaaagctgaggtgggaggactgcttgatcctgagagttagaggctacagtaagccatgatcacaccgctgcactccagcctgggcaatggagcaagaccttgtctcaaaagaaaaaggaacagttttagcaattttttacatcttaagaacattacattggtgtaaagtcctagaatgaaaactttcttagcttcctccgggcttgtaacctgaagtcataactaaagggtattaccagaaaagcatagatactaaattaattcctactcattggttagcccaagtatcaagatcctgagagcaggggccacagaatagaagtacatcagtaaacttgagacttagcagca

SEQ ID NO: 127156 - DNA, 311 bp, Homo sapiens
atttcccctcccctgttttttcaatatataattatgtcataattacaggttagatcagtattaagtgtgcatatgttgacaatcatagaatactgctcacaagtaagccatgtagcaaactgactacactagagtctggattttagagtcagacttccaggttcaaatctgggttgtggtatttgttcaagtcatttaacatctctgtaccttactttcctcatcagtaaaatagtcctaatgaaattgcctaccttatagggttgttatgaggatttagagacaatacaagcgtggtatttagaatagtg

SEQ ID NO: 127157 - DNA, 495 bp, Homo sapiens
ttctaggctattcagctaggccttttgtggccaggttcctgttctctcacttcctgggttctttccttacctcaatccagtgttgcaaaatcccaccataggtgctcacttaagctgagcccttcattctcactgaaggttgaggacactcagaataggacttccaccaatacggatactgccttggataagcccaaatgctcatcagggatttgggcaactctgtcactgagcttcaaacaaaagatgctctcacgtgtgtttctagtaggctgcaccttgcctcagtgcaccctcaagcgatgttttctgtaaccccactcacaggattttgcatttatttctgctactctcatttgtgagcctgttgtctcagccagttgagttgtattttgtatcctaattatttcatctggtcctatctttccaaagcatgttacaacaatgattgtaggtatagccctgaagatttttagctggaactcagattagcat

SEQ ID NO: 127158 - DNA, 406 bp, Homo sapiens
tacatttacacacatttggagatctagggcaatgaaaaacacagcagttgggaagagtagcggacatctcttaatgtgcaaaatggctaccacactgaaacaaaatgtagattttaatgatgataaggattgaaacagtggatatatgttattatataaaaatgattttatttttccctgattgactttaaatgtcccttaattaatatagcagtctacaaagcctaccttatagaattattcactataacatagcacaaattactatgttgagtgaatatagacttattattccaaatgccagaatgaaatcaaatgagatattaggatacacaacatatacttggctatacctatctatggcatagatagtccttccctagataagaaacagtgagatgagaag

SEQ ID NO: 127159 - DNA, 722 bp, Homo sapiens
gcctaagaagtcagacagcttctgctgttattacgggaaaaggagaaggctgcccaacgtatttcagggagatttactaggatctcttgggaactgcagtagaaatcactacgaaatattttgaggatagaggaaacaggacaacagcgtttactaggttttattctgaagaaagccaaagaaggtggaatggagttcatcttgagaaagcggtagaagattgagaagctaagaaaagacttacacagcagcaaaaagaagaagagactggagtagtgggcagagttttcagttagcaagagagcaccatccaattgttatgctggtcagcagcaaggaacattaatgaaggagatgaagaatgaccagggtcagtttttgttcatccaggtttgagcagggtgttgcttatgatgctccatgcagttttgcctcccacaatctctctctgatctttgcctcctgatctgctcaagtactgcagcagcaatgcattctctactgaaggctgtcacgtttacttttcactgtgcctagaatgctcttaccctcaagcctccctccttcacttgattcaggttgctgctagaagctcccttatcagagagacctttagtgaccattctgtctgaaggaggcagacactcttcccttattccgcttttcttcatagcactcattatcacctcacacatggttgtttaatgtttccccaattttct

SEQ ID NO: 127160 - DNA, 389 bp, Homo sapiens
tttacaggcttctacggctgtagctgacagccaccttgaaaaatttagcaagggtaaatggctttgcccctgaagagtatctagaagtgcaaatcaactcttctctagaacacattactgatttgaatggcttgaaatgatatcactactttaaagtcataagattttaatactggaaaagaccttagaggtctctgtctagcgaaagacctgtgtgtatgtagaagacatcagaacacaatctaaactcctttacaatgatgtgttttcaaggccacatctgagctggcttgtgccctcttcgacgccatcaactactactctcctcttgctcatttggcttaagctactctggccatcttaatgttgccagaacaagccacggtcta

SEQ ID NO: 127161 - DNA, 646 bp, Homo sapiens
cgggggctcaggggctgagcacaggtaaaccttcagctctggggtctgggggtcgagtgcagcagccttcaaacccaggcggggctgagggaggcttggtctccgtgtccagtcgccggacaccctcctggtcctgcaaggagccagcctggtccaagctggagcagggcagaggctgacagccggctcagcccaaggctgccggtgcgtgcatatgcgtgtgtgctcgcgtaagccctgtgtgtggtgctcaccgcccggggcgaggactgccggggtcaaggtgccgtgactggccaggagtcctggtctgactggacccagcaccgacccacagcgcctggtcaccctcacggctcctctgccctcccctctaccacagaccaggaccggcagtgcctgcctcatagggctggggtgaagataaatgatttttttaagtgaactaaattaggcccacacgtgaaaataagggtaagctgctttttaaaaggaattattagccaggcacgatggttcactcctgtaattccaacactttgggaggcctagacaggaggatcgcttaaggccagcagttcaggaccagcctggtcaacatggtgagccccgtcgtgcacaggtccacgctcgacttcgtatatag

SEQ ID NO: 127162 - DNA, 810 bp, Homo sapiens
gctgtgtgggcctctgaggagctcccagcctcccaggagccgctgcagctgtggctctgcggccctgccgggggggcttagggaccagcgggaggcgggggctcaggggctgagcacaggtaaaccttcagctctggggtctgggggtcgagtgcagcagccttcaaacccaggcggggctgagggaggcttggtctccgtgtccagtcgccggacaccctcctggtcctgcaaggagccagcctggtccaagctggagcagggcagaggctgacagccggctcagcccaaggctgccggtgcgtgcatatgcgtgtgtgctcgcgtaagccctgtgtgtggtgctcaccgcccggggcgaggactgccggggtcaaggtgccgtgactggccaggagtcctggtctgactggacccagcaccgacccacagcgcctggtcaccctcacggctcctctgccctcccctctaccacagaccaggaccggcagtgcctgcctcatagggctggggtgaagataaatgatttttttaagtgaactaaattaggcccacacgtgaaaataagggtaagctgctttttaaaaggaattattagccaggcacgatggttcactcctgtaattccaacactttgggaggcctagacaggaggatcgcttaaggccagcagttcaggaccagcctggtcaacatggtgagacgccccccaccttttctttttttttttttgaggcggagtcttgctctgtcacccaggccggaatgcagtggtgtgatctcggctcactggaagctctgcctcctggg

SEQ ID NO: 127163 - DNA, 335 bp, Homo sapiens
gagtgaatgagtggatggatagatgggtaggtgggtggatgggtgggtgagtagatgaatgaatgaataaataggtggactaaacacgccctcacacacttccacggaccttcttcccaatcccagcataaaccatgcccttcaagcagcccatgttctgctccccaaacacactgtacactcttccctcagtgcctttgcggggatgattctaacctttctaaaagtacttctgccctcttctctgcctaattccactcatgaccagggctcataataagctcatgcaaaagccctctcttcactccaaccaaagagtatcccccttttccagg

SEQ ID NO: 127164 - DNA, 865 bp, Homo sapiens
gtaatttaccatattaaaagcctaaagaaaaaatacacatgatcatatccattgatacagaaaaaaaaattgacaaaattcaacatccattcatgagaaaaacctcttcacaagctatggacagaagggaactttctcaacattaaaattaatagtgaaagacgaaatactttccccctaagtttgagaacaagcaagggatatacactcttacgggtcctattcaacattgtaaggcagtgtgcggtggctcacacctatattcaggtgctttgagagactgaggcaggaggactgcttgagcccaggagtttgaaaccagcctgggcaacatagcaagaccctgtctctacaaaaaatttaaaaatattagctggacgtggtggtgcactcctatagtcccagctactctgagaggctgaggttgaggattgcttgagcccaggagtttgaggctgcagtgagctataatcaggccactgcacttcagcctggacaacagagcgagaccctgtctctaaaaacaaacaaacaaacaaacattgtaatggaagtcctagttagtgcaataaggcaagaaaaagaaataaagaaatacagattggacaggaagaaataaatttctctctatttgcagatgacatgattgctaaaaactccaaaactctgtgagctagccaggtgccatggcatgtgaggtggagccaggaggatcacttgagcccaggagatcaacactgcagtgcactatgattgtgcctgtgaattttagagctgagatttccctgttgcacaggctagagcaacatagagagaccccatctctaaaaaacaaacaaaaaaactaaccaatgagtttaccaag

SEQ ID NO: 127165 - DNA, 420 bp, Homo sapiens
aaagtatactatttgtacagtgctctaggcatcacagacaaggttacttatatccagcggtagatgaacagagttttgctaccctacatccctcctgtctgacctgaattgtgaggggatcttgacatgcctttggccactttgtaccaggcacacaggatggaaggctctaccttaaagtgtcatttttctgcatgctattgaggaaagacctgaacctagattcactaaaattatgttgtctaaacgcctgatacctgtcagcatattttctcccagaacttacaaccatcacattattccttgcccctactatagcttagacaggcatttctgttatttcagcttccctagaacacttgatataaatctaggcacttcaaaattagaaagataacagaatacagtaaatgtatttta

SEQ ID NO: 127166 - DNA, 604 bp, Homo sapiens
ttgagacagagtctcactcagtcgcccaggctggagtgccgtggctcgatctcagctaactgcaagctccgcctcctgggttcacgccattttcctgcctcagcgtcccgagtagctgggactacgggcgcctgccaccatgcccagctaagttttttgtattttttttagaagagatggggtttcaccgtgttagccaggatggtcgccatctcctgacctcatgatccgccctcctcggcctctcaaagtgctgggattacaggcgctatctctgttttcttatctctagtgcggagactgtacttgaacttgccttacatccttattgggccatctgaggttcacacaagataacagctatacacgggccttgaaaaatgttaaggacacacactttggggatggggttggcttcatgatcatatttgttaaaagtgcagtagttttggtaaaaagaccaagaagaaaaacagggaaccatgccttaattgtatgtgggaaatccccgtcttattttattgaggaaaactgcagtctttagtcacttatataaaataacagtcatttagttagtcatgaaggtgaggtgattttccagggt

SEQ ID NO: 127167 - DNA, 480 bp, Homo sapiens
taggggggaaaagattgcacctgccctcaaggagttggccacggcaaaactgatgccactatttaataactataacaaaattagaagaggaacaaaatcctatctttcataaaatccaattatgagatttttttggggccaactatgggtgttcctcatgacagtggtttccttggctgggtgtgaaaaatcacttccgatttttaaaaactttttattggctgggtgtagtaactcacgcttgtaatcccagcactttgagaggccaaggtggtgggaaacattgaagccaggagttcaagatcagccctggcaacatagtgagatgtctgtctctatttaaaaaaacaaacaaacaggccgggcacagtggctcacgcctgtaatccgagcactttcggaggccgaggcgggcggatcacgaggtcaggagatcgagaccatcctggctaacatggtgaaaccccgtctctactaaaa

SEQ ID NO: 127168 - DNA, 516 bp, Homo sapiens
agaagaatgctccaggtgcatttcaagatagctactttccccatccacttgcagaaagcacaagaagactattctcagatcttcactatagaacgtagtagggctcctggagataaaattcatgaaaatgtgagggctcctctaaaactgccctcttctggagtttttactatcaagcttgtccacaccatgcctccagcaatttttcaattacagtttgtttttctaccctgatactggctccagtggtaatttctgctcctgagcttctgcttcagtaagctgtggttctctttagctgcctatgtgctcaatttagggaatcgtggttttccctgtgacctcagctctctgattcatctgagaagagttgctgatttttcatttcttcttctttcctcattatgaggatgggaatgataaattccaaatgctttacatgctggagtagacacagaagtatcagttgccttaacatacaagttcttgttttttccatttccatctgttttcacc

SEQ ID NO: 127169 - DNA, 242 bp, Homo sapiens
acctactttccacaggggaaatggaaaaaacaagacctgttatgtaaggcaactgatactcctgtgacctcagctctctgattcatctgagaagagttgctgatttttcatttcttcttctttcctcattatgaggatgggaatgataaattccaaatgctttacatgctggagtagacacagaagtatcagttgccttaacatacaagttcttgttttttccatttccatctgttttcacc

SEQ ID NO: 127170 - DNA, 378 bp, Homo sapiens
gccagaaaagcgccaggtcaaatcagtggttgaagaaattcagaaacagaaaatctgtgggagcttaactttgcagcatcacatgctagaacctgttcagcggattccccggtatgagatgctccttaaggactatctaaggaaattgcctcctgattccctggactggaatgatgctaaaaaatcacttgaaattatatctacagcagcaagccattctaatagtgcaataaggaaaatggagaacctaaagaaactcttagagatttatgaaatgttgggagaagaagaagacattgtaaacccttcaaatgaactaataaaagaaggacagatcctcaaactagctgctcggaacacttcagcacaagaacgcta

SEQ ID NO: 127171 - DNA, 374 bp, Homo sapiens
cctcagaggcttagaacccttttaagtttcaggcaaacacagtacagggtgtgggatctgtttctgacactcttgagagctacttgaagacgggctccatctgtgcctcttgaaacaaagacactcgataaaggcacactgaacaaacagtgatgcaaaattgcaaagttcctaggaataacagtagctaacttttcctatgaaagcagtgtgggccgcacctgtgcctaggactttacatgtgtatctcatttcatctcttaaatccccgatacgaggtaggttcagttatgatgatcccagttttacaagagaaggaaccatgtgcacagaggcacatatgttgcttatagcctcgtggccatgagcagcag

SEQ ID NO: 127172 - DNA, 204 bp, Homo sapiens
cctcagaggcttagaacccttttaagtttcaggcaaacacagtacagggtgtgggatctgtttctgacactcttgagagctacttgaagacgggctccatctgtgcctcttgaaacaaagacactcgataaaggcacactgaacaaacagtgatgcaaaattgcaaagttcctaggcacaggtgcggcccacactgggtaccga

SEQ ID NO: 127173 - DNA, 139 bp, Homo sapiens
ctttaagtctcttgaaggtgattctactgagctgggattaagaacacactgccttaatcctttcatcatcaacaaaattaaatactgttactattaacagaaggaaaaaaaagctgtttaaagagagtgagaaagtgtt

SEQ ID NO: 127174 - DNA, 651 bp, Homo sapiens
gaatgtgtgtgtgtgtgtgtgtgtgtgtgcatgagccaattgtggatgtctggagttacctcagagtctgctgtgcttctgtttccaggcatcttggagagtcatctcattcttgctgccacaaaatattcctcattcctccaatgcctcattgtgtggagggtttttaacactgaagctgatgtttgagaaaatacctgactgcttctctagagacaacatatactgacaacgcaacacaacctctcatgacccggaatgacggcaatccttttgtgggcacgcacgaaatgagaatgactctccaaagatgccccgggacaaacagaagcatggacacattcacatgaggggagacttggcggcaagcactgacacacaaaccggggctgcaccgaccctcaccgcaagcaatggcgcgcggaactccacgcgcgggagccccccaaaggcacggaaacagcgagccaccgacaagcagaagaaaccctccggactgggacggcccgcacgaaaccagacgaacaagagggagagcagagcaggccacaagcacgagaaacacaagaagcgaggaaggaagagtactcgcgagcacaaactgcagggcaagcacacatagccgggcgacgcatgaagagcaacatgggc

SEQ ID NO: 127175 - DNA, 314 bp, Homo sapiens
ggtgccacccactcccatgactcacctgtcagggcaaggggtacccaggccccaggagggcagctggggaaactgaggcttgcaggttgagccccagtggccctttggtgagggcatccacccagggagccagcaggggtccagggagggacggtggcctggggaagcaccacactcggacgcaggtgtgtggggcaggaatcctgaagagcgccacccacccacgttcgtgggaaagaggccaaccggggtggcggggggtcctgaggttttgctcccctccccgggtcagcaggggcctaccggagggagtg

SEQ ID NO: 127176 - DNA, 870 bp, Homo sapiens
  misc_feature (651)..(651): n is a, c, g, or t
  misc_feature (687)..(687): n is a, c, g, or t
  misc_feature (699)..(699): n is a, c, g, or t
  misc_feature (712)..(712): n is a, c, g, or t
  misc_feature (724)..(725): n is a, c, g, or t
  misc_feature (733)..(733): n is a, c, g, or t
  misc_feature (743)..(743): n is a, c, g, or t
  misc_feature (746)..(747): n is a, c, g, or t
  misc_feature (752)..(752): n is a, c, g, or t
  misc_feature (766)..(766): n is a, c, g, or t
cgcagtggctcacacctgtaatcccagcactttgggaggctgaggcgggcggatcacgaggtcaggagtttgagaccagcctggccaacatggtgaaaccctgtctccactaaaaatacaaaaattagtcaggtgtggtggcacgcacctgtagtcccagctgcttgggaggctgaggcagaactgtttgaacctaggagatggagattgcagtgagttataggatacagtgataactattatgaatggtagaaaaacagtaattactaaatattacatttgagggtcatttaataaacatctccatatattaatgctgagttttgaatgagcaatgttctgaattcacttcttttataaatgttatacaaaaagctgacagtattgttaagctcacctgaaatttttaccaggtaaatgaatacttggaatgtgtaatcaaatgtccatttgagagcagattgtgaaacagaagcaacgttcaaacttcaagacagctggtctattttattaaggacccaaataaaaatcagaggaataagctatatgctatgtaaactggatatcccacttttcaactagcagtaaaatggcttaatgaaaactctgtaggcttgtttttttctggcctcaagtcttttaagtgtgtancccggattttcaaaggaaacttgagagaaaaaccanaagaaacaaagncaatattgactgntatgtgtcctgnnacagttcntgagttggtngcnnagtgnaaattacttggganaaatcccaagtaagcttcgggttgcgccattctgtaagcattgaagaatttttctaaaaaaaaaccaggagagaaaatttggggggcaggctcaagaaatttaa

SEQ ID NO: 127177 - DNA, 159 bp, Homo sapiens
tattcctcaacactcctgctccaaagtcaccaagaggtacacaactctgtggaggacacactgactaaaaagcagggggacaaaccacagagttgtgtaccccaaagtgctgggattaccggcgtgagccaccatggccagctgcacaaaccaacatca

SEQ ID NO: 127178 - DNA, 579 bp, Homo sapiens
gcgggggcgggtgcaggctcagtccgggtaatcccagcacttgggaggccgaggggggcggatcacaagatcaagagatcaagaccatcctggccaacatggcgaaaccccatctctactaaaaacacaaaacttcgctgggcgtggtggcatgcgcctgtagtcccagctactcgggaggctgagagactgggattataggtgtgagccactgtgctgggctcccctcctttcatttttagaagaatggaggaaacattttcttcattccccctcccccaggccacacattctgcatcttcctgccagaatatttcaaaacatccatcagtgaggtgtgagatgagctttaaattcatcaggcattaaatcatgacctaccacttgttactgaaattctcttcctcacttccatttgtcctggaattcagtgttgtctgggaagccctacgactggctaagcatgaatagtgctatgtgccactgagcaggcttaggcgttagctttaattcacttccagaactacaaaggaaactgtagagcaaggggctgggcctggagtggttgcttggtccctt

SEQ ID NO: 127179 - DNA, 592 bp, Homo sapiens
ctctctttagaggaatactgtgtcaaacttttgtcccttttatcaggttacaacagtttaaaagtagattgtgctcttggcctaaacatattgacaatgacccttaacaatatttgaattatagtgtggttttcaggtaaacatcttagtacactgtttctttttatgtatggacctcacttctttacctatttacatatctctagggaaagattaatgcgtgagttgggaaaaaaaatagatattttgctttgaaattgctctattctttcttccaagatgccatctaggaatgcacgattttgaactttgtaggcacattttcattttaaaggaaaaggaaaaatgacttgaaaaaatgtgttggcaaaacctgaaaagaaagctctacaaaaaaagaactctagcccgaaaagagaacaggaagaaatgattactgatgatttcaattttcagtaaattacaaagcatacgtaatagacttcgaagagagatgattccaatggcatacttcatgccgccttcacagataagtgtgtaaatgaaagggaaatgaattgtttcagcctggaaaatctgtaccattttggtg

SEQ ID NO: 127180 - DNA, 943 bp, Homo sapiens
  misc_feature (7)..(7): n is a, c, g, or t
  misc_feature (32)..(32): n is a, c, g, or t
aaacaangggacatctacatatcttccatcgngatccaaccagtggctagcatttgcccaccttttgcagtttctttctctttcccataagtactttcttctctgaatcatttgaaagcaaatgaaaacagtagcctaaagtgtcagtttcaaccagaaaataacagctctgatttctcatggctcacactcttctgaaacgactcgggtagaggctgaggaaggccgtgttgtttgtctacctgggactagtgggatgagagactgagaaaagaaataagacacggagacaaagtacagagaaagaacagcgggcccaggagaccggcactcagcatacggaggaccagcaccggcaccggcctctgagttccctcagtttattgattaccattttcagtgtctcagcaagaggaatgcggtaggagagcagggtgtcagcaagaaaacctgtgagcctttcctttcgctgctgcggccgcagccatgagcatgctcgggcctcagaagaggctcgcctctagtgtcctccgctgtggcaagaagaaggtctggttagaccccagtgagaccaacgaaatcgccaatgccaactcccgtcagcagatccggaagctcatcaaagacgggctgatcatccgcaagcctgtgacggtccattcccgggctcgatgccggaaaaacaccttggcccgccggaagggcaggcacgtggccataggtgagcagaagggtacagccaatgcccgaatgccagagaaggtcacatggatgaggagaatgacgattttgcgccggctgctcagaagataccgtgaatctaagaagatcgatcgccacacgtatcacagcctgtacctgaaggtgaagggaatgtgttcaaagacaagcggattctcattgaacacatccacagctgaaggcagacaggccagtaagatgt

SEQ ID NO: 127181 - DNA, 957 bp, Homo sapiens
agtagaaggactgaacctccagaaaaagtactttaagttacctacaggtgatcctagtcaggcaaatgaaaacagtagcctaaagtgtcagtttcaaccagaaaataacagctctgatttctcatggctcacactcttctgaaacgactcgggtagaggctgaggaaggccgtgttgtttgtctacctgggactacacctactgaaagaagttctcaagttctgactgagttctaaaattttttgaagattagaattcttcatatgtgggatgagagactgagaaaagaaataagacacggagacaaagtacagagaaagaacagcgggcccaggagaccggcactcagcatacggaggaccagcaccggcaccggcctctgagttccctcagtttattgattaccattttcagtgtctcagcaagaggaatgcggtaggagagcagggtgtcagcaagaaaacctgtgagcctttcctttcgctgctgcggccgcagccatgagcatgctcgggcctcagaagaggctcgcctctagtgtcctccgctgtggcaagaagaaggtctggttagaccccagtgagaccaacgaaatcgccaatgccaactcccgtcagcagatccggaagctcatcaaagacgggctgatcatccgcaagcctgtgacggtccattcccgggctcgatgccggaaaaacaccttggcccgccggaagggcaggcacgtggccataggtgagcagaagggtacagccaatgcccgaatgccagagaaggtcacatggatgaggagaatgacgattttgcgccggctgctcagaagataccgtgaatctaagaagatcgatcgccacacgtatcacagcctgtacctgaaggtgaagggaatgtgttcaaagacaagcggattctcattgaacacatccacagctgaaggcagacaggccagtaagatgt

SEQ ID NO: 127182 - DNA, 979 bp, Homo sapiens
agtagaaggactgaacctccagaaaaagtactttaagttacctacaggtgatcctagtcaggcaaatgaaaacagtagcctaaagtgtcagtttcaaccagaaaataacagctctgatttctcatggctcacactcttctgaaacgactcgggtagaggctgaggaaggccgtgttgtttgtctacctgggactaaattctggttattgaatcacagcacctactgaaagaagttctcaagttctgactgagttctaaaattttttgaagattagaattcttcatatgtgggatgagagactgagaaaagaaataagacacggagacaaagtacagagaaagaacagcgggcccaggagaccggcactcagcatacggaggaccagcaccggcaccggcctctgagttccctcagtttattgattaccattttcagtgtctcagcaagaggaatgcggtaggagagcagggtgtcagcaagaaaacctgtgagcctttcctttcgctgctgcggccgcagccatgagcatgctcgggcctcagaagaggctcgcctctagtgtcctccgctgtggcaagaagaaggtctggttagaccccagtgagaccaacgaaatcgccaatgccaactcccgtcagcagatccggaagctcatcaaagacgggctgatcatccgcaagcctgtgacggtccattcccgggctcgatgccggaaaaacaccttggcccgccggaagggcaggcacgtggccataggtgagcagaagggtacagccaatgcccgaatgccagagaaggtcacatggatgaggagaatgacgattttgcgccggctgctcagaagataccgtgaatctaagaagatcgatcgccacacgtatcacagcctgtacctgaaggtgaagggaatgtgttcaaagacaagcggattctcattgaacacatccacagctgaaggcagacaggccagtaagatgt

SEQ ID NO: 127183 - DNA, 308 bp, Homo sapiens
cagaatgtacctgaagctattctgaaagttaaatatcattagatacattgtcaaaccctgaagctgaaattccagccattcagggagcccctcagggagatcactgcttttcccttgcaaaaataaaaatagtgtataaaatactatttaaatatatactcttatctaattctaatagctagtatttgttaagtgcttagtaagtgccaagtgctgttcaaattgctttttaggctcacacctgtataatcccagcactttctgaggccaaggtgagaggactgccatcttgaaattttttttttaaa

SEQ ID NO: 127184 - DNA, 851 bp, Homo sapiens
gggggtaccatttccattatacagacgtggaaactgaggcagtcccctgcaggcaggatagagcaggccccagctgggtgggcccagggccgagacccagccctctccacctcagctctcagggatgggctttctgggtcttgtcttcctcccctgccaacctgttttcccacaccggggcctaattcacacctgggagcccctcatggcttcccttcctcctcaccaagactcgcctcagacccctcctgcaccaagccctccgccttctccatcccatcttcctctccctccattcctcccctccttcggtttccgtggcaaccccatcctccgctctgccactcggtcctgccttcccatctcatctctttcttccctctttcatctctcccctcatcgcagtgtacagtccaaatccccctctgtcctttgcctctgctctctcgctcccttttactctccttttatctccttcaatgttctcttgtcatctcagggtgacatttatttatcttttgcttaaaaataaaaaagaaaagaaggaagaaaggagggaaaaagaaaccccattccatcagccagggcttctccagatcagtcccggccttctctctctcgggtcatctctaagggtcagactccccacagtggccaggagggaggagacaaaccccagaacggacccctgcctgccacagggaagcttctctattgacctcacctagggaagggaggaggaaaacacacgggtgggaagtgtgtgttgggggggctccctgggaggaggcatcccagagagcctggccctgcttctctgaggtcagggtaggggagaagccggcacccac

SEQ ID NO: 127185 - DNA, 273 bp, Homo sapiens
tcaggctagtgaccaacttcttcagtgggagctgcggatttgccacctgatctaaaaggcaggaagtagccattgtcggttcctacgtgaggtgacaagaacagtgcgctggtcaggtgtataaatgctaccaaagaatgcattagagacatggagaccatctctcaagctagtcagtcagtttaatgtgaggtgcttaggaaaggacccattctactgcaagtgacatacctgccagagcctggtttgaatgctggtaagtcatggcagtgg

SEQ ID NO: 127186 - DNA, 244 bp, Homo sapiens
gagaaaagtggaagcggtgtgggaagaagcggggtctgggccagctgctggtcctgctctcctccctcctctggcctctaggcttccaggagtggttcggaatccgcgccatgtgctctgggggctgtggcagggcaggggcaccttggaacctgcgccatgtgctctgagggctgtgccagggcagggaaattcctcgtgtcccctgcgcacaacacggacagaaggctgggtccacccagtg

SEQ ID NO: 127187 - DNA, 508 bp, Homo sapiens
gtgacgcaggccctgggctacagcaaccttaccagcccctccagcttagaggtggcagtggctctctgcggctgcgatttctttctcggagcgtcctccccatcccgttcggcctctgcctccaccgtcgtctctgtaacccgttccctgtgggagagtctctgttgcggtgttcaggggtttcggttttctggctgaacagtgattaacgcgagggaaggcgctgacggcaaggtggcaggaagaacattccaacacagaccacaacacctatggacctggaaaacattgtgctcagtgaaagaagccagacacagaaggacaatgttgtatgaggtcttattctgttgcccaggctggactgcagtggtgcaatcctagctcactgcagcttcgacctcccgtgctcaagtgattttcccacctcagcctcccgagtagctgggactacaggtgcgtgccaccacgcctggctgatttttcttgtatttttttgtagagatggggg

SEQ ID NO: 127188 - DNA, 418 bp, Homo sapiens
ctgggctggtgtcatgtctttgctattgtgaacagtgctgggctggtgtcatgtctttgtgactgtgaacagggctgcagtgcacatttgcatgcatgcatctttatggtggaaagatttatattcctctgagcgtaaacccagtaatggagcaatctgatttctgacaaagtttgtaaaggcaattccatggggacagaaatcttttcaacaaatgctgctggaacaacgggatgtccacaggaaaacaataaacctcgaaccaaagaagatttacagatggcaaataagcatggggccagacgcgcgacatcctttgacgtgagggagcgcccatgaaaatagcagtgaggcaccgcacacctgtcacgatagcccaaatccagagaccgacatcaccaaatgcgggtgaggatgt

SEQ ID NO: 127189 - DNA, 162 bp, Homo sapiens
agggaatggacgaaatatatctgtgtatctcttcctttatatagggtttcctctaaatgggcaaactggagaaaatttaaagttcttagagaactttctaatacaggtcatttttcgtggtgtaaatacagtctgatagattgggtattttataaatgtgaa

SEQ ID NO: 127190 - DNA, 728 bp, Homo sapiens
gggaaagcgtaaatgcaggagctccgatggccctttcagcctctggagatatgcatcttgttccctaggagcccagtttccagttgcatgaaagcctaaatgtcattacatgtgccattgctggaagccacatttattaagtatttcccatgtgccaggcaccattatctacttcagtaaatgagaaggactgtgaaggcttgtaaccatgataataatgaatatgaatataaaggcttggcatactggtctcatacaagtaagcagtcagtaactatcaattgccagcaatatttgtcttgaatttgtaacaactcctagtaactacctaatgaatcagcaccatcatcaaccaattttactgaagagaacattgaatcttagagagcagagtaaccttacccagggttactctgctactaagtggctaagtctgggttcaaatccaggttggtctgatttgactgtttggtccactctcaaggtgtctcactcacatgtcaggtcagttcacactgggttttggcaggaagctatgtggacttctccctagggttgtttgagggatctcatggcatggcaggcagcatccctagaacaaaagaccaaagacagagcaagttggaagttttaatgtcttttatgacctcacttcaggaatcacattccatcatttctgcaacatcaggccagctctcttcatgtgggagggagactaactacactgg

SEQ ID NO: 127191 - DNA, 714 bp, Homo sapiens
gggtgactgtcagcacctcactgggcagggcgcaagggctgtggggtagacgttgggtggattcaggagactgcagaaagcaaagtgggtgttaatgggacttttatttcctgtggaacaaaggacactacacttttctgcaaaagaccaagtagtaaatattttaggctttgtgggccgcagatggcctctgtcatatattccttttttttcttaaaacaacccttaaaaaatgtcaaaatcattcataactggcaggctgtgagctggatttggtttgccaacaccttcttatttcatcacaactaattaccactcttctttagaaatccagtgtttaatgagtttcctttataataaggttgagatttgggaagtcagtttttacttgaggcaaaaaagttgtatcttgattcataattcagaagtgtcattttatctaggttttaggcatagcttctcacctgattggtgaacgtataccctgtttattattagctaaaaataagtgcttgatgccagattcactttttttctgatttatttcttagtatttttcatactttgcctttaatactaagtgtggggaagagtagtaaaaatatattttaaaaaaaggttttgtgatttttaagaacgtagaggtgcatgagctgtattattccaccagaagcatggtgggtggcactggcattgttattctgtgccctcaga

SEQ ID NO: 127192 - DNA, 308 bp, Homo sapiens
gctcacattaatacagggcctctctctcagcaggagccaccgtcaagacagggctggcacccaagggccccagcacaagctacaaaggcctcccagactgactctcccacaatgtgcacacaaggacaggacctccacccagttcactcctcggctggagacactaggtgtcctgcccctaatctcaccagagccacctcataaaccctgcaagctctgcgaagggcagctgggcacagctgaaagcccagccaccagcccatgtcctgggtgggactgggcaggaggggccacctcctactgctgat

SEQ ID NO: 127193 - DNA, 599 bp, Homo sapiens
agaggacctggatagtaaatttcagtacatttaggtcaatttcagctcttaactcagcagtggctatccatccccattctcctgcgtatttctggatcagcttgcacacagcttgccgaaaccagcaggagccataaggatactgtccattaaatatcagggatctgtgttctgatatctgattgatgctctgatcaaaaaggcagagacacagacaaaggtgggaagttttgttgcaactcctcctttgttgcaagcccttccctctccagctgaagtgagatccaggggggtttaaagggccagcgcctcggcacctttagtttttctccttttccccttttgagagccagacattaaagactaggacattaaattaaaagcaaccacatatatagaggaaattagaaagtaactgtgcatgcccggagaaaggtatagactcagaaatgaccagaaaagaccttagatttatacctcaggctggtccttggcacagagaagcctatatcaattaaaacagaacagatacagcaaattctgggaaaggagaagaatctgatttccagagacatgatattattagattcatatatata

SEQ ID NO: 127194 - DNA, 288 bp, Homo sapiens
gagagtggacagatggccctcccacagctgggggttggggtggcagctgcctcccacccccacggccaccagtcttaggcaggctgcccgccagcatccagccaaggagcccagggggtggctgtcacagctgggagccaggaggggtgggtgtcccagagaccagaggccagcagtctgctccagcatcccgctgttttgagctcacagcacttcccatcggtacccttgctcagccttgcctggtcgtgatgcagtcaacagtgtctcgctgtctgccaggcactg

SEQ ID NO: 127195 - DNA, 299 bp, Homo sapiens
aatgtcaactacagtgtagaaaggtgattttggccttggagcctgggagagatctgaagagcccacactcaggtcttgcctgagctctgtcaacaactttggttctgctctgtgcctcggcttcctcatctgtcaaataacagggattaactgactatatgacctcccaggcctctcccagctcctcccttctctgaatcctggccagtggtcataaggctgaagatttgctaagagtcacccttgaggagcttgttaaactcactctccaaaacgcaggtattgtaaatgctgacatt

SEQ ID NO: 127196 - DNA, 372 bp, Homo sapiens
ggcgtgggacagcctccatacaaagtcaggccagagcctcgcagggacccgtagtaccgactgtgtttgaggagcagccctgtgctttctgttgctccagtctacccgccccctgagctgtcagcaatgcctctgagagacggtgggcagaagggcagtcatccatggatccccgagccagggcccttgcacatgacctcagatgagaggccgatggtgccaaggccttctgagtcaggcttgggttcaaattcctgctccaccactgggtgatgaagtacaggacctccttcccgcgtggttagagggcactccgcaccctgtccatcctggtaagtcacttactttggccaatggaatcaagtgaatgcc

SEQ ID NO: 127197 - DNA, 242 bp, Homo sapiens
tttggctgtgcaaatagaagtacaaggggaggagattcctttacaggtcccaagttttcttctgctatagataatagagaaagtgtttcgtttcttgttcctgaagactcaaaactttaaaaccctgaatgtcggccaggcatggtggctcacgcctgtaatcccagcactttgggaggccgaggccggtgatcacttgaggtcaaaagttcaagtccagcctgggcaacacaggaagaccc

SEQ ID NO: 127198 - DNA, 630 bp, Homo sapiens
ttgagattatactaggcatggtgctgcgtgcctgtagtcccagcttctctggaggctgaggcgggagaatgacttacacccaggagttggcagctgcagtgagctatgattgagccactgcacaccagcctgggcaacagagtgagagtccatctcttttaaaaagaaagaaagaaagaaagaaaggaaggaaggaaggaaggaaggaaaggcttgactctttttttcattcattcaacatacacaggaaaatgagactatactaggctggtaatacaaagacaaaacactatttgatctcaaggagtttatcctctagggaaggcagatactcagactagtaacagcatcctgggataaggttaagtgttatggacaactgaggtaagaacaaagtgatgtgggagcctggggattgctctctttaaggaaaacaaggaaggagtcatggtctaagcactcattgaactgggttttcttcagtgagcatatagtctagtgaatgtgactgccacgcccatgaataattccaataccaggtagaaaatgccgagtgccctacaagaaactcagacatagggctataaagtaggttcagaggtgagtgtgtttacttctagctggggtctc

SEQ ID NO: 127199 - DNA, 662 bp, Homo sapiens
atgcccgcctaattttttctatttttagtagagatggggtttcaccatgttagccaggatggtcttgatctcctaacctcgtgatccgcctgccttggcctcccaaagtgctgggattacaggcatgagccaccgtgtccggccaagttctagtgttctttcagcgagctactaatggcagtgttacctagaatgagccaggtgtatctacatgagagaacaaacattgcggagaatgaatgagtgaaggaagtaattggtctctgttacaggtgtatttaatttcatataatatatgttcttgtgtgtaaatttaatcctattttgaatgcaccagacaggtccctgtgggagaaaacctgtggtgagttccttaaaactggaggagttctctcatggtgcttgcagtcatccctggtttgttagttggcagcctgggggaaagtgacaacatttactgaggccaagtacctgcctaggattatgtaggaaagtttttacagatattatcttaatctttttaacagctttatgaggaaaagctgccattttatgagtgaggagactgagttcagagagtttaaccaggttccagtattttttaaaaattgtgaattagatagaagtgttaccagtatcatacaggtcatatagatggcaaa

SEQ ID NO: 127200 - DNA, 406 bp, Homo sapiens
gaagctctctctgtgggggaaatggtcagattttgaagtcacacagacaggaggtagaatcccagtgcagccacttacaagctgtgtgctccttggcaaggttcttaacctcccagagcatccatttccgcagctgtcaaacacagataacaaggaacctcgaagggtgggcgtaaggttgagatcgtgggtactaaattcctggttcaaagcgcagctggcctaccaacgaatggaagctgtaagtccattatgaaagactggactccggggtcactgatgctgtgggcactgcctgacttgcaagcacagggggaaagctgtgattgatgtgggcagaagtggctggaacaggtagcaagtgaatgatatggcagcagcctggatgatcaaatgggtaccctgg

SEQ ID NO: 127201 - DNA, 514 bp, Homo sapiens
ttcacacacacacaccccacaaggcatacaaagaaacaggaaaacatggcctattcaaaggagcaaaattaattggtagaaatcaaacctgagaaagcacagacatcttactaactaggcaaagtctttaaaacagctgccttaaatatgttcaaagagtgaaaggaaaccatataaagaactaaagaatattaaaaaaaaaacacataagaacaaaatgaaaatatcaaaaaagaaaaattataaaaaggaaccaaacaaatcctgaagcaactgaaaagtcccataactgaatttaaaaatttactagagaagttcaaggtttgagtaggcagaagaaaaaaaatcagccaactttatgatacgatatttgaaattatcaattctaaggaccaagaagaattatgaaaagtgaactaaacctatgagatttatgggacatcatcaaatataccaatatatacattatgggagtcccagaaggggaagagagaaaggatcagaaagattatgt

SEQ ID NO: 127202 - DNA, 529 bp, Homo sapiens
atctcattttcactttcagaattttaattgcggcacaatctccaaggtttaacttacacaggagtatacataaatattgccagcattcacctggtgattaaaaatcatcaccaaatcacatgaccaggatcagtggccagagaggtaatagtgagctcccacttacaggaaagggacagagagccctgggtgcttggctcctacacagctctaggctccccaaatcctgctggtttctactctgctctttaaaggtcacttcagtgtgaatcatttacgggacttgtcatgacgcagctcccaagaatgtgtacaagtcagtttcacaggcagggaaaaaaaagtgagaaagaacagaatgggcacagccatcactctcccctaaccctgaaagataaaacaaaggagtgggggctgatgccaccccacgggtgaccctttgaattcccgctgaagccagttctagaaaataaggtctttctgagaagcaacttcacagattccaagtgaagcttggtttctttataat

SEQ ID NO: 127203 - DNA, 727 bp, Homo sapiens
gaaattgatgttgaaatttgagcccttatttggaacttgttgcccttgaggacacgtgaaaagggcaaggggcaaaaacatgagattcctttaaaagtctcagcttagaactagcaccttgtcacttctgctcacattggttccagaaagccacatgacaatgccagaaaatgaggtaaggaaggatgctctgcgtatgtgtgacattgggaggggatgcttgatcttctaacagagaagagaatgaattagttgctgagaaaaatcatataatccattattgaagtatttttaatttcctgcttccattccagtatatttttgaaaatatttatgatcttttaattatcctaataactttccttctccactagcattaatagtgcttttaaaatatatatgcttgggaaacacttgtaagttgaattaaaagggaaagtaattatgaataagctatagggtctatctctgcctaattcagttattgctcttactctttccacttgtcctttgatactgaatacaaagaaaaaaagtaaaggaagagaaaaacaaccagcttgatgttctaggaaacgttgatcattttctaaaacaatataagcctgtatgttcacaactgatggacacaataatgttctcgccatgtgagcagaaaggatgagatttgtagggtcacaatttataaaagctctgcgtcctgttgacagagtctagagggacattc

SEQ ID NO: 127204 - DNA, 577 bp, Homo sapiens
tcataggactgaagggcaggaaggacactgacaacagccttaaggcaaacctctcacaggcttgacaggagggaaaggagtagatgatgagaagaaagagaatggaaaagaagacacccacagtcctcctagaaactttaactaaatggacgaggcctaagacaggacctggttgtaaatttcatgctttggaaggttattttagactcaagtcccagtgagtctatgttagactcaagtcccagtgtttgggctgtattttataatggggacatttgtgtaatgggtttattcatctatccattgtgcacccgcctacccacccatctatccatccattcacccatcatctgtctatccatctacctgagcatccatcctgccatcatacatctattccatccactcttccacccattcacttttccatccatccacccgtcatctgtctatccatctattcatccatcatccattattcatccacccacccatccatctatccacctacccactcagccatccatccatccatttgtccacccacacatccatccatccatccatccacccatcc

SEQ ID NO: 127205 - DNA, 227 bp, Homo sapiens
gaagcaaccctgccagcagccagtccctgagctggggtccaggtcccccaggaggcatacactgagcctctatgtggacagacaacagagccactctgtccttgagaaagaaccctgtgtgtcccactcactctccttccagcacaggcacagacatccaaatgtcccattcactggccgttacagcctccagccctcaaactgcctgcagcctccacctccgctgg

SEQ ID NO: 127206 - DNA, 503 bp, Homo sapiens
ctcactgcaacctccgcctcccgggttcatgcgattctcctgcctcagcctcccgagtagctgggactacaggtgcgtgccacaacgcccggctcctttttttgtagtattttagtagagacggagtttcatcttgttagccaggatggtctagatcttctgaccttgtgatccgcctgccctggcctcccaaagtgctgggattacaggcgtgagccactgtgcccggcctctgccctaccgtctttacccagaggatctactgattttataaagattaccttcctaagcattctccttcttaaactgtccataaatttaatcaaggtagttcttagcaacagtccctttagcagacagagatactgaaatctattctctatttgaaatatatgtaactttataaaattttaaaaatccatagaaatatttcaagagtgattatagaaatggatgaaaaacagcacaattagaaactatgccactattcagaaatgtgattt

SEQ ID NO: 127207 - DNA, 319 bp, Homo sapiens
agttggatcactgtctcccggcaggctctgggtttggtttattcttgaaagctatgatcctaggagataacattgccggcggagaggaggcaaatgtgttaaatggggaaggtttttgtgtttggagaaaggcaaatgttctttcactcagtgtttttccccatttatttccttccaaaccttcttattcggaacaaactgcatctttccatttcaaatggatgtagcctgtgtatgagatgaatgggtgactgaatgctgaggggaatatcacgtaaaaaggtagatgatgttctctatactctgatgattggttttg

SEQ ID NO: 127208 - DNA, 464 bp, Homo sapiens
tgtggatttattcctaggtctgaataaggcattgtgtggcatccagagagaggcaggacagaggaagcagtgagagagaagcaattctagaaaatgtggataccttgctgctcagtgtggcttatagacagtagcacatgcatcccccggagctttgtagagatgctaaagctcagctcccaccccagagctactgagtcagaatatgtggtttgtgtgcacgttaaagttagcgatgctggctaccatccttggttcctggtggcatcttttaggaagagttgctacctgggatggattctgcattgtccccttccagtggccttaaagatctatagtgttacttggaataccgagtatttcccaggtgtccactattgtgatctgactttaggaagacataaattggatgaaggagagatagcaagcaggtagatcaactataagcccagtcttctcatgaa

SEQ ID NO: 127209 - DNA, 227 bp, Homo sapiens
agcaattgacaaagtaaatcaaaatttcaaatggaccgggcataatggtcactcctgttaaccccaccacttcaggaggacgaggtgggaggatcacttgagctcacttgagcccaggaattctaacaccagcctgggaaacataacgagatcccgtctctaaaaataaaacacacacacacacacacacacacacacacacacagtcttcaaatgcgcccttctac

SEQ ID NO: 127210 - DNA, 684 bp, Homo sapiens
caggtgatctgcccacctcggcctcccaaagtgctgggattctaggcatgagccaccgcgcctggcctggctcctcttcttcttccactcagatatgcctgaccctgtcaacactttggttgaggtcttctttcttctttcttttttgctccgcacatttagcttatgacttcaaccatcatttctcagagcatgggtctggctcaacctctctcctgaatttcagacctacaagtctagctacttggtggagacctccccagaatgacctgctgcttcccaaaagcagactctccaaattacagtcagtatctcccccggaagcattcccccaggcatttctctttctgccttcaattccccattctcctacattgccttgccagaagcctgctggtcagcttggatttctttttgtccttttttttctatattttgctggtgcctagtcatgtagttgctgcctctacactttctcttctttaaaaaaaattattaaagcaccacgtgcttgttgtaaacatttccagaaaatacagaagtgctcaaagtgaaaaaatggaaatgccttgtcccttcctcattccctgccctaacctcacgccccagattcagctatgtaatagtctgtcatgccaagtcttatttccagctcctcttttccatccccactgccatcatctg

SEQ ID NO: 127211 - DNA, 608 bp, Homo sapiens
gacggcttctggagagagcatgtctctctttcccctgggctccatgccagcttgccagaatttttacaatttgttttcctcatttttctaattatgtttcctcctgaaagtgattatagatagaattcatttgtatttgtggagacttctttatcagatcagcaagttttcctttttttacgagttaatactttcatctttagggttctcagggaatacacagcatatgtcaaaacaaaaatgagatgaaaattcctaggtaattttttttttacttttattttaagttcatgggtacatatgcaggtttgttacatacgtaaactcgtgtcacgtgggtctgttgtacagattattttgtcacccaggtaccaagcctagtacccaattgttactttttctaatcctctccctcctgccaccctccaccttccaataggctccagtgtgtgttattcccctctttgtgtccgtgtgttctcatcatttagctaccacttataagtaagagcatgcggtatttggttttctgttcctgcattagtttgctaaggataatggcctccagctccatccatgttcccataaaggacacaatcttattcttt

SEQ ID NO: 127212 - DNA, 521 bp, Homo sapiens
gtttgatgcgtgtgctggaagagatagaccgagtgtgttatgagttgggggaagagcagatggggtgtgactgccagcctaccagctaattagaaaatactgatttattaaacctgaactctaagagaaaagcccgtaatatgtacacctctgacagaaaggacagaaatgtggtttttcatatgaccacattctgaattacttttatttatgaactatatgttgttatcacttgaaatgacaagaaaggtcatttctccttagcaaagaaaatcctttcagaaaattttcgaaataaattaccaactagaatttgtaatgaggcatgatatcccaaaatattagacaaagagtaagacaaatacaattcagaatcatattctgcttgttgctggcctgataataagccttgattcatttggaaataatagtttatagtcagagataaaccattatttttggaaaaatgggtccatcacatcacttttatgtgttatcttcataacaaatcagaacataac

SEQ ID NO: 127213 - DNA, 407 bp, Homo sapiens
gaggagggaaggtgggggatgccaggcccctctgggtgagtcgaagatctccaccagaggctcatttcaaaggggaaggcggcacctttattttcaaaagaggcaccgctcctggcttcctgtgagctccacttctaccgtagttagaggaggagggtttgatggggctcagggtcatggccgaggctctccagcctgtgtggatgaatgcactcgcagatctcatctctccgctgctccctccccagcctgatgtccagccctgcccttgcactctagtctcatacgctattgctcacttggcatctcaaatgacagttgcccaaaacataattccagcttctccttccagatttgtttcatctcccttctgtctcactgaaggacagccccacccactcagccgc

SEQ ID NO: 127214 - DNA, 132 bp, Homo sapiens
tgagacaatttatacaataatggacctataagctctcaaaatgtcaatgtcatgaaaacaaagaaaggctgaggaactgtttcagattaaaaggacatgaaagagggccaggtgcagtggctcatgcctgta

SEQ ID NO: 127215 - DNA, 768 bp, Homo sapiens
gtctttctgtccctttatctctcctttcctttctaaactaccattgtgcatatgttgttatgcttgatggtgtcccacaggtctctgagactcttcattttctcatttttttcttctaacgggataatttcaattgatctgattctaaatttgctgatttttctgcttattcaattctgctattgaattcctctactgagttttcattttaggtattatatttttcaaatccagagtttctactttatttttttaaaaacatatataatttttctctctgtattctctattcagtgatacatagttcacacaattttctttagttatttagacatggtttcttttggttattggaacatctttaaaatagctgatttaaagtctttgtctagcaagtccaatatttgatccccctcaggaatagtttgcgttgattgctttcttccttgtgtatgggccattgctttttgtttctttgtatatcataatttttttgttgaaaacttggacattttaaataatgtggccactctgcaaatcatattctctctcttgccagggtttgtttagtgacttttctgaactgattctgtaaagtctatattctttgtcaagtatggccactgaagtggcctgctctgttagcttagaggtcaccaaataattggacagattttctcaaatgcctagaaccaataagtcacaaagtcttggctgagtggctgtgtgcaagtgttggagcacaccttcagtgcttagccaggcagt

SEQ ID NO: 127216 - DNA, 284 bp, Homo sapiens
ccagtgtaatcataaagatccttaaatttggaagagggaagcaaaagaaggcagcgtcaagtggtgcaatgtgagaaagacttgactggtcattgctgtctttgaaggtggaaggggaccataagccaaggaatgcaggcagctgctagatgctggaaaaggcaaggaagtggtttctcctgtagagtctccaggcagacacactggttttagtccactgtgacccattttggactctgacctatagaactgtcagataaactgtcagaagtgtaagctggttg

SEQ ID NO: 127217 - DNA, 1843 bp, Homo sapiens
  misc_feature (518)..(518): n is a, c, g, or t
aaccaaaagagtcttcagaaactttgctagacctgaagtacttgaacctgtgtcccctgaatctttcttacagcatctgggacaaatccctggccctgtgacatccgaagcagaactgtgccctgctctctccttctgtgatgaccaaggatggtgaactcaagttgttctctacaagccaggccagcaacctaaatacttggagaggaacttttagaaactataatcctgacaaaatagaaaagtttcccataggggcataccataatactataataacctcccaggaactattgtttgccaaaatgtagttaatatattttaagatatatgcttttttgcataggactagaaccagaaaagacaccaaatgcccccttgacatcaatgtcctttctagtgggacaatttggtctccattaatgccaaacctttctgaacaggatacatggcttttaaagggcagatgtttctcctgctgctagaagttcctcagtttactagagcacaatgagganagtattcaacctccctactgccaaggaattccctgcttctcccccaccgccatcatcttgtccaagctatcagaagcaaccttctagagataatctaacaatcctgattagaattgctcccatatccctggtgaccacaggcttcattcaaattgtccaaactggttaacatgtatgtgatggggtatctctgcatctgtatgtctgtctgcgaggttccttgtatattggctgtccgctgacttgggacagatctctctagaacttgggttcagttctctgacatagtccactcagccataggctgagtggctaaatatgcataaataagcatgcctaaataggcatatataggttggtgcaaaagtaattgcggtttttgccattaaaaatgatagcaaaaatcccaattacttttgcgtcaatctaatattacattgcttgatagattaagatggaatcccaccaggtttagggtaggactggatgctcaaaaaataaagaaggagaaaaatctgtggcagaggcatcctaatgagaacctgacttctccttgcttccctctgctctctcctgcgcctcagagacttgtccccattgcagaagcttcctccatgctaggccagaggatatcaaagtttagtttggtcaagatttgggccaagaaaattcctttttagaagagccctcatatctgaatcacatcactttgggccagttatctctggtcaccctcagacaaaccctcgtctctttttctcccttcctagaggaattcccagggaactttgcagaaataggtctccagagttgctacagaggttcatggctcctttcgaggagggacatgtatgaaatttgaacagatcaagacaggtgtttgtcttcaaccatgggggaagacctccagcttccattttcccctatacgtgtctgtgctgacatcctttccagcagtagaagactaaaaagatatatcttaacccattcctcaaaaggacatcttcctaaagccagagaaaattgtctgcgcttccccaccccaggaagaggcaaaagggaagtgagggcgtcacaaggtcttttgtaaatcactattgtgtttgtcacagcactgggcggagagctggatccacagagctctcagtttttctaagcactgtcctgtaatgtgctaatgtctgggggtgggagggctggggaggggtggggttagagggaagatgccaacctttgtatggagatgattttataaccatgcacttttgtaactgtgcagaatttttcataaatgtacattaataataaagagtgtatagtttaac

SEQ ID NO: 127218 - DNA, 405 bp, Homo sapiens
aaaagcagagtccctgacttgccttcagacattaaggcttataaaaaataagacaatctccctagaactgcacatatgataccggaggtcatgcatcatgcatttctagaaccataacctccttcactggagacagtgacaccatggtttacgtgtaaacctaggctgtctggaatctatctccaacctacttgtgacctatatgcaatcttctcctgcttgctcactgagacccactctgtgctacagaagaggctcccagctgtcccacctagacgtggattgttcctacaaccctgctactttactcatgctcttccaccaggaagaattaataatgtattttctgataccatttctgttgcatatatgcacataattcttacatacattgggttcaagttt

SEQ ID NO: 127219 - DNA, 202 bp, Homo sapiens
tcggtatgaagggaagatggggagtgatttctgacagagtgaagtaagagcatatgtcctctatatgcaaggtgctgtgtttagaaagcagttttcagtttgccactttcagcctttcagacgagatgtcattttcgatataatgttcgtatgtgttactgatagtaaatgccatgtttcctcttggtggaattgcaccgta

SEQ ID NO: 127220 - DNA, 757 bp, Homo sapiens
catcatggcagacacctgtaatcccacttacttgggaggctgaggcaggagaatctcttgaaccagagagacagaggttgcagtaagctgagattgtgccactgcactccagactgggcaacaagagtgaaacttcatttcaaaaaaataaaattaaaaaaagaaataaataaatacatcaagaagacaatcccccttacaatagctacaaaaaaatacaataaaatacttaggaataaatttaaccaagtaggttaaagacctctataaggaaaactataaaacactaatgaaagaaattgaagaggatataaacaactggaaagacaccctatgctcatgaatcagaagagctcatatcattaaaattaccatattacccaaagcaatctataaattcaatgaaaataccaatgtcattttttacagaattagaaaaaaaatcctaaaattcatatagaacaaaaaaagagcctgaacagtgaaagtaatcctgaacaaaagaacaaagctggaggcatcacacaatttgacttgaaaatatattacaaggctatagtaaccaaaatagcatggtattggtataaaaatagacacagaagaccaatggaacataacagagaagacagaaataaatccaggtagttacaactaactgattttccttttttcttttttctgaatgtttctcaaaaagccaactgattttcaacaaaggtgtcaagaacatacactggggaaagaacaccctcccttc

SEQ ID NO: 127221 - DNA, 466 bp, Homo sapiens
agacagagtctcactctgtcacccaggctggagtgcagtggcgtgatctcggctcactgcaacctctgccttccaggttcaagcaattcgcctgcctcagcctcccaggtagctgggattacaggcacaccaccacgcctggctaatttttgtatttttagtagagatggggtttcaccatgttggtcaggctggtcttgaactcctgacctcgtgatccacctgcctccgcctcccgaagtgctgggattacaggcgtgagtcaccgctcccggccctgtgtatgctctttttgtaaatgaaagggaaatatgtatatatgggtttttttattttcattttttttcctttttttgcataaaatctagctcctgcaggagaattttgtgtatgtgtgtttaaaaaagaacaaaacaaaactgaaagcataaaccaaaaagcagaagaagaatgaaacagggtaaaa

SEQ ID NO: 127222 - DNA, 391 bp, Homo sapiens
agtgagcagagagagggccctgaatagaatgggaggcaggttgaccctaagcagttcccagcttgatttttccctttagcttagtgatttgggggccccaagatttattttcctttcacatatccaccaacaaacacccaagcaacagggaagggactctgggtccttaagcttctttaggccaaccttgtgcttttatagcaaaggaaaataaagtccaaaagggaaagtgactttccctagtccacaaaagttgttggtgaccacaataaggagtttcaagtcctagacacatcctgcctcagtctctaccctccagataatgagcccttcttgtcatacttgttatggacattcatacaaggctaaactatttgaatgacttaacact

SEQ ID NO: 127223 - DNA, 691 bp, Homo sapiens
tccatgacactcattggtatacaagaaaaatcattctgctgtcttcatcatcaatttaaggtgttcagctgtgatgccttggtactttatgttgtgattaattgccttatactaacatctgatgaatatttttaaaaacattccttaggttacctatgtggctgaactgtgtggttagttgggaaactggggctatgaagtgagttccccaaagagctgaattcaatcgagatgtcatgcacaactgacctctttaatagagtattttactcttttgacagcatctaaaaccgacctttccctcagggtctagctcagtttctcctcctgcccaaaacctttcctgacaatttaagttcttactgacatctttcctctgggacacctaaagccctgtgatctgtgaagctgttatggcatttgggtatgtcatcatatgccatcatttattccctaacttttcaagtcaaaggccatatgcgctgccttttcagctccccctgcagtgcctagcatagtgcccagtacatatggaagctccatggtagaagtggattgaattggcttatagcctttttcatcattacctgaattatcatatctaggactagggtctgcattatttctttttatttttccagtcattatctgttccttagtgacccaggagcatccacagtgagttgcaagt

SEQ ID NO: 127224 - DNA, 224 bp, Homo sapiens
ctcctggtctccagctgcaggatactcatattagaaaaacgccagctcctcccgggttctacagctgcatgaccctcaaactaaaaaacacccgctgctccccaggtctccagctgcatgaacctcaaactagaacaacatcagctcctccccgggtcttcagttgcctgaccctcaaactagaacaacatcagctcctctccaagtccccagatcacggccct

SEQ ID NO: 127225 - DNA, 576 bp, Homo sapiens
gcactaataacttcttgagggtgattctagctgagtgtttcctgcttgtttcttataaatgtatttggtacaggatcagtgtagttatatttccctgaagctatttcttacacacgatggcttcagcaggtttgaggccaaaatgccataggaatgcacatgccttcctcagattttgcctctccattttgaatgtatgcaagtcttgaaaatcctcgttattgggacccttctgacccctgaccacagccttgtggtctgacagacgctgtagcctcatggaacagggcattttctccacctgtggacttgttttctgtattcctaaagggaagaaaataaagaatcctcaagatctcttccttgttcaaaaatatgggccaaataatagtacaacattccctccccagcctcctgggtctttaatagttgccctcacctccctcatctaaattagtcattaaagactagagcattatctccaagaagcctatatgaaaggcacagcatttaactggcatgaaggccattttatctctctcctaggtattgattagtttctcagattagatcacg

SEQ ID NO: 127226 - DNA, 601 bp, Homo sapiens
gaaaacatcttacatagatgtcatttatgaacacaaaaaaattgacatcaatacattactgttaatgagacaacatatggtatacagatttcaccatttttcaacctggacttccttgtgcgtgcatgtgtacatatagttctgtgtaattttatcccatgtgtagttttgtggaaacaataccacaatcaagatacagaattgttccatcaccatgaaaacactccttagtgctgcctctttgtagttacaatgccccgtgacccccaaccactagttttgtcattttgagaatgttgcgtgaagtcatgtagtatgtaatctttggagattgatgttttaaaaatgtaatttgttttaattcataaagtgaaatctcagaaagtttacaaaaatagaaaaaaattcttaattctatcactaatacagtcaattttggagctttttatagcctttttcatatacatcttctatcacttatagtatatactcaattttgtttgctactttttacaaactttatattaagtattttccgtgtcaccatccatcatatttagttgttgctatcataagaaatgttgcaaaatataaaaaaaaa

SEQ ID NO: 127227 - DNA, 497 bp, Homo sapiens
tggatgtgagtggatgatggactctggcctgtgtctactctcctgatgtgtagcccaccaacagtaatagaagtagagggtagggggttttgccaaggctaaggcttcaggtacttgctaacagttatagcagctgggtcactgtcatctggacttaccagttcatgccagtgtccctgtgacttatgcatagtgtgcgccacagccctctagaggtacctggagcccggactgccaggctggaggctctggggtactgaaggtgagctgtctgggcaaactattaagaacaagacgaactgttcacaatggagcttctcccacagatggggagctctgtgaggccttcacctgggtgcatgttggacttccattgctgttgctgttgtccctagacaagcccgttagcaagaagcaccggcaggggagccatgcactccataggcttgggatcacccccgggaaagcgatcttccccgggctaccacccccagctg

SEQ ID NO: 127228 - DNA, 653 bp, Homo sapiens
gctcttcgtctgtattgtcctgaaggggttggttaaagcaataaaataggaaatgagaataagaagaaaaaaataaagtagcagaagggaaagagacagtttttatttgtaaatggcagtttttctgttaatcttcttgagttttgtgtcagaactaacaagagttcagtaagatggctggagagaaaatacagtatacaagcaagcagtaaacagtttgaaagtctaatagaaaaactatcctatttagatagtatcaaaagtgctaaaatactgaggaataaacaagaaatgttcaaggtccctataatgaaggaaactagttttaaccaaaggacaagaatgacttgaatatgaataaatggagagaaatactgtgttgtggatgagaaggtgtgattgatgtattcatatctgttttctaattattgtatccccattttctagcaaagagtgggtgctcaacagctacttgtgctagacactattttgggtgcttggtgtgtaccgtagtcaacattatatttaattaccatagcttaatttggggagaattgatatctttacagtagtggatctctgttgaaaacaaaatcccttccctctgggagcttatgttctagtcacacacagaccactcaggggctcttaaa

SEQ ID NO: 127229 - DNA, 413 bp, Homo sapiens
tggtgaggaccacccccaaattgtatttatacacctaagttggaaacttcattgagtgatctgcaaaaccagtatgccatttttaaaatgaaaacgctaaacttcagaaagacatgccgaaggaaaacttcacaggaggcatttacctatcgccatctgcacaaagcctttgcaatgtcatggaaattctttgatatgattccccagtcaggcagttgaaagatcatccatcaaacaggtggatgtcttgattagggcttcagaaaaatatgaatatttcagctgtaagcttccccatgactgtcaaatctgctactcataagacaatatccaatctcaaaattcctagaaagcttcaaaagccacggtcaacccacaagccacggtcaacccacaagccacggtcaacccac

SEQ ID NO: 127230 - DNA, 297 bp, Homo sapiens
ggagagcaccaagatacccagaaaaagaagcaactcagagtaaaaatcaaatggaatgctagagaaagcggtacccacccataaaaataatttccatcctcttccatttatagatgaaaaatgaaggcccagaggattaaatacagacagaatttatgttcctaatactgatgccaaggacaggaagaccttgactagtctcgggaggacgccctgcctgaagtaccaacccttctgcagtggtgagtgactggcacagggtaaaactctacagtaatgatttgcattgcgctatcc

SEQ ID NO: 127231 - DNA, 189 bp, Homo sapiens
agcaagctgttagtgaaaagtgacactggaagaggatttatacattttgtgagtcacatatcaacaacattgggcaatatgataataaccacagatgctattatccacagaatattcaaaatagcatcaacattatttcaaatatttggcaaaacaaagatataaaccaaaaccaaaatgaacagtaac

SEQ ID NO: 127232 - DNA, 450 bp, Homo sapiens
ggtctttctggtctccctctcgaagatttttttcctttcttcttcttatttttgtatatttaccttttaaaaataatcctctttataacaaaatacacgcttgttgcaaaaattgtttactatgaaaagaggccaaagccctgcttagaagcctagctgcaaaaatcaagtcaggcagcaatttaaggtaccactagaggtttatcagaaaacaagtccagtgatgctaggaggagccaagtaaaagaacactattcatagtatttcaaacgtgcacaatgattttttaatgctgtataactgtgtttagtggtgatatgcagaatttattgttgttatcttaaaccaagtgtctgcctacactcttttggcagtgaagaaaaaggaagactatgtggtaagaaactttcccaaagggcaggctgcagagcaagttcagataaatcactt

SEQ ID NO: 127233 - DNA, 303 bp, Homo sapiens
gggggctcagggaaggtgtttgggtcattccctcatgaatggcttggtgccctctccttggtgatgaatgagttcccactgttcacacgagaactcgttatttaaaggagcctggcaccttcttctcctctctctctctccccccacccccttgccctttctcttgccatgtgacacacctgctccccctccaccttcctccatgagaaaaagcttcctgaggcctcaccaggagctgagcggtgttggtgccatgcttgtacagcctgcagagctgcgacccaaataaacctgttttctttg

SEQ ID NO: 127234 - DNA, 499 bp, Homo sapiens
cctcatattatactttctcaaagctttatacttctcaacgcttatacttcctcaaagcttcatacttctcaacgctttatacttctcaacgctttatacttctcaacgctttatacttctcaacgctttatacttcctcaacgctttatacttcctcaaagcttcatacttctcaacgctttatacttctcaacgctttatactttctcaacgctttatacttcctcaacgctttatactttctcaacgctttatacttcccttattaccactcagctcttagaagttgtttgggctggagaaatgttttcattattaggacactttctgggtcctctctctagagaggcaactgagcctcaaccataccatctcccaggctcactccgtcctgcccaatctgtttacatctctactttggaggcaagctctatccagttctactaacctcagtgcgatgactcagggaaaacctagtttctttttcctaggaaaatca

SEQ ID NO: 127235 - DNA, 245 bp, Homo sapiens
atatttacagaaaagggaaaaaaacctaacctcttgccaaaccatgcccaaaagataacttaaatataagacttagcgagcacagctacacttgggataactcctagttcatggccatgaacacatgtatgcatgcatgtgcacaaacgcacacacacatatacaaggaagtagacagtgatttagggggcctcactggatgtgggaagactgcccgcagaagtgctggttggtaatatttatgc

SEQ ID NO: 127236 - DNA, 395 bp, Homo sapiens
gtagctgggattacaggcatgcgccaccatgcccagctaatttttgtatttttggtagagatggggtttcaccatgttggccaggctggtcttgaactcctgacctcaggtgatctgcccacctcagcctcccacagtgctgggattacaggcgtgagctaccacgcccggcctgtgttgaactttttatacaggaggccccctccttcatcttcaacagctggatgatataccttaatttctttaactactgctaatttctttatcttgtatcgataaagttaaggttgtttccaatctctttctttttgctataaagtaaccttatggagcctaactcccccctttcagttatacaatacacgaccatatacatgtgtcgtttcactcatatg

SEQ ID NO: 127237 - DNA, 319 bp, Homo sapiens
caccagatggtgagcccagaggaagaccccgtggctctgggccagtgtgcgtcagccaggtccccagcccccagtgtgctgaagctcaggcccttcccaacgccctggtctcctgcactgaggtgtggtgagcacaaccaggtcccactggatgcatgcacagggagggatgtgccctaggttgggtcgatgatgagaaccttatattgtcctgaagagaggtgatgacttaaaaatcatgctcaataggattatgctgaggcccagtctaggttaaaattctggaagaggatgctgggatcccaagttcacaggcagg

SEQ ID NO: 127238 - DNA, 829 bp, Homo sapiens
gatgttgcagtgagctgagatcgcaccaaggcactccagcctgggcaatgagagagcgactccatctcaaaataaataaataaataaataaataaataaataaataaataaataaataaaagttttattccccacttattaggctcacaaagatgaaaaaaaatttatgaaatactttattgaaggtatgtgcaaacaatccctgacacattgtttggggagagcatggattgataggcctttatgaaggagttaccaatataccaataacctccttggtagtttcaaaaggtggcatctttccctgtttggtattggagacccaatacaagaaatgggaaagtgagcatcaagcaatgcaagctttattcgatggccaaagaatggagaagtgcaagtatggcgcacaagctaacttcttgactagtgaggagtgaggaaattgaaatagaaagtatatctaatgaagaagttggtcattaagagtgaggggaggaatgttcatgtcttttccagaaataggtggtgaacttcttggaaccagagtgccgccttcctttttgtccttttatggcttcttctggtcattgtcatggggattatcaactgtcatggcactggtgggggtgtcatttagcatgaaaatgagattataatgatgcctgaggtcttcttgaagtcctttagtcaactatcttggttctaagcaatctcagctgctctggttacaaatggaacattttacctgtttcttaaagatcagcagagttagggtaggatagaaattcagctatggccctgtaggcgttacactaggtaacaaaagaga

SEQ ID NO: 127239 - DNA, 83 bp, Homo sapiens
tatagggagaaataggagccattttgatatgttagcctggtgcctggcacagggtaaacttccaatcaaggggaactgttcct

SEQ ID NO: 127240 - DNA, 190 bp, Homo sapiens
gctctcagccttagctgtggaagagtcagaacctgaaggctcacacgctgtctttgccctggtcacctctgactgggttagtgacagccttggcagcaagcagtaaccccgaagggacatactggctggcatagactcggaggtgtggcctcacccagaccacggcctgcccagtcccccatagcctgtg

SEQ ID NO: 127241 - DNA, 648 bp, Homo sapiens
tactcatatatctatatgtacacatacatacatacacagacacacacacatatatatatatatatatatggagagagagagagagagagagagagagaggacaacgaagaggaaactaaagagaataaagggtattaacagcaggtctgtgacttattccctgggggatgtgaagggaataaatgaccttaatagaccacttcataaacatgttaatgacctcccagaccttcttgtttatcttgttaatagtggttaactagaggaaagatacctgcaaatccctatctataaaatgattttagtagggtatacctggcctggctagatagcttattgtaaataaacctggaatgtttggatttatgagtcgtggctggctggagaatagggcatagctacatgaacgtttttctatttttgtaattgacagattataaaatggaaaacttttgagactgaaatgatttcctttcaatgtttctgtgtaaatttttaaaaacgtatctgttaatatgaaaccaaagcacatcataatgggaaataacatggatgttttggaaacgcatgtgtgattatttcaggttccccagggaaataatgttctatctgtgcccagcacttccctataattctttcagtcattaa

SEQ ID NO: 127242 - DNA, 713 bp, Homo sapiens
aaaaaatccctcatgcccaagccaatcagcatacagcattcctctggtcacatgattgggcactggatgtcacatgacctcagtctagctgggaatgctgggatgcactctgtcttcctctgggtttggcactgcaaagaaatgaggtttgggaccactacaaccaccggtggacaaccaggggctactggctcactgccaggagccgttaagatgcaactgacccaggctaggcatggtggctcacgcctgtaatcccaaacattttatcttattttttttggagacagagtcttcttgctctgtcacccagtctgcagtgtagtgagtgagtcacagcccactataacctggagctcctgagctcaagcaattctctcctcagcctcccaagtagatgggactacaggcatagaccaccacacctagctaattttgaaattttttttttgcagagatggggtctggctgtgttgcccaggctcaaactcctggcctcaagcaatcctcccacctcagcttcctgagtcactggaattacaggcatgagccaccatgcttggcccccaaacatcattttcaatggctcttcatccaccaattctatggatgcaccgtcttccatgtgtccattctccaatggatggacatcttagtggtttgcatattttgctactgatgaaaatcttatgcatagagctttgttccctgcc

SEQ ID NO: 127243 - DNA, 510 bp, Homo sapiens
ttgatattatcctaggcctcccaaagtgctaggattacaggcgtgagccaccatacccggcctgttacttcaatgttgtaagggaatatatagatggaagttgagaattctttattttttgtaaaaaagtcaaacacctgattacttgcctgattcttcttagtgaagtgagacagagactcatgcatgtaagcagtatacttttctacttgtgcttttgctctgcagtaatctgaaatgagacatcgcccatcttagaattgtggtttatttgcaggggaggcatgcattttcctactgccctatacacacaagcctattttattactttgtttgaagactgggtgtgtctaatgtagtggaaattcatcgattcagtgttaagtacaggtgaaacacatttcaggaccacattagacagtctttttaattatccttttttttggattattcatgtgactgctttcctcttttcacgtgaattgctgagaatttatcatcctttccagt

SEQ ID NO: 127244 - DNA, 837 bp, Homo sapiens
atttttagtagagacgggtttcaccgtgttagccaggatggtcttgatctcctaacctcgtgatccgcctgcctctgcctattcttccatttttaaataaacaaacgtgtgtgtattcatatctttgcttttttcacttcacaatagaatctgaacatctcttcatagtattgtttggaaatattgctcattcctcatttctttgcatagtatatattactctgatgtgtggacatgctacagtttatacaatcagtcccttatttgacaagtgtttgggttgtttctagtctttgccttcacaaatacaaaacaatgtacagctttgttagccttgttcatgtctctttgtattttgccagcatacctttgtgataaattcctagaaattgtattgttgggacaaaagctaaatgcttatacagttttgtgaaatattgccaaatccccctctgtagttgtgccagtttgtatttccagaaggtatacatgagatcatctgtgtttccacagcgttattacaaactatattgtcaaatttggggattttcacaaatctgataggaaataaatgatacagtcgaggagcggatcatatttatcttttttctgtatggctatctagttacccacaaaaaagctaaactttgctgcattgattgaaatgctgcctttatcatctactaaaatatttatatataagtgagtctatttctagattttctatgctgttctgctggtctttattcttgcaccaataccatactgctttattaggagagccctttaatatgtttcatggctatagctatgtctcatttctcttcttttccatca

SEQ ID NO: 127245 - DNA, 324 bp, Homo sapiens
tgcacccgtggtgaagattccaaaatgctgggattgcaggcgtgagccaccatgcctggcccatctctctttttaaatggtggcattccattggaaaaatacaccatgaaaatttactgaatcatcttcctattgagagaaattttactagttttcagtttctagttgagcacaggttgttttgttgttctgcagagttgcttctgcaggataaaattctctagcgtggcattactgggttacagggtagtcacatctcaatggttcttgttcaacatggccagattccctatggaacactgagctcactcacatgtctctagc

SEQ ID NO: 127246 - DNA, 744 bp, Homo sapiens
ctgacctcagatgatccacccgccttggcctcacaaagtgctgggattacaggtgtgagccactgcacccagcctaattttcttatatggtataaggtaagggtccaactttattatttggtatgtggatatccagttttttcaacacatatttcctactgaatgatcttggcactcttgtagaaaattatttagccatttatagccagagttgatttctggactctctctattctattgtattggtctaaatgtctgtctgtatgccgttataacactgttttgattactgtagctttgtactaagtaaattttgaaacaaggaagtgtgaaacctacacatttgtcttcttaaagtgtttttttcttagtacttggggtcctttaagattccacatgaattttaagataggtttttttatttctgcagtaaatgtcattgggattttgatggagattacattgaatctgtagattgttttggttactattgatatcttaacaatattttcttctaatccataaatgcagagtgcctttcagtttgtgtctgctttctttcagcaatgatttacagttttcatgcatgctttttgcctccttggttaagtttattactaagcattttattcttttgatgctattgtatatggaattttttatttctttttgaattgttcatgttagtgtatagaaatgtaattttgtgtgtgatttcgatctttgaaatcatgaattgttatt

SEQ ID NO: 127247 - DNA, 198 bp, Homo sapiens
gagctgcctataaggcatattgcaaggtcagaggtttttctttttttcaatctcaacagactgctccaattgtcctccaaagaagcagtaccagtgtatgttcccacctcaaaacaacaatgtatgaagatacccatttctgtttgttggtgccaaaatgtataatcaaatgtcttaatttcttccctgtttgatgag

SEQ ID NO: 127248 - DNA, 411 bp, Homo sapiens
attatcttctcaattaaatgtcagctctatggtggtaagaacttggtcagtttgattccctgctgtattcatagctcataaaaaagcatctggcaaaggatgagtgctcaataaacaatgtttgtttagctgggcacagtggttcacgcctgtaatcctagcactttgggaggccgagatgggtggatcacctgaggtcaggagttcaagacccagcctgggcagcatggtgaaaacctcatctctactaaaaatacaaaaattggctgggcatggtggtgcgtgcctgtaatcccagctactcaggaggctgaggcaatagaatcgcttgaacctgggaggcggaggttgcagtaaaccgagatcgcaccattgcactccagcctgggcaacagagtgaggctccgtctc

SEQ ID NO: 127249 - DNA, 397 bp, Homo sapiens
tggctggcggtgtgtgtttcaatgcttctgctgtatgactctgtgtgtgtgtctgggtgtgtctgtgtgtgtgtgtctctgtgtgtgtcacccattcgctcttctgtctctgtccctcggtctctgtgtgtttctttccctctctctgtgggtttgtgtgtatgtgcccgtgtgcgtgtgtgtctttggccgaatgtgccctgtgcgccacaaagcggcttctggcatggcggccggtctttggtgagcctctttctgcgcctctgcctgggtcatgagggccggttgtcaatcgttttcaccgccccggatccgctttgtgtgtgtgaagacctggcccacgtgaggagatgcgtcggtcccggagcaactgaaatctcatccccatcctgagcgg

SEQ ID NO: 127250 - DNA, 626 bp, Homo sapiens
cctacatcctgatcttctctgtcctttcatgcgtcaccccagacaaccatgcccggggcaagaagaacctgatcgacccaaggccctgagggatgcctagacgtgtcccatctgggatctagagactaaagcatcataaatcacatgcttggtaacaccaagacactcacttcgaggacgtgcttatactacttttttctggagcaagagataaaactgttatttcagcctgattccaggagcaaagaggaagggctcttgattccatccactcctcaccccagccagggcccactttctgctcttctgcagagtaccacagtcagtattacatctctgtgttgagccacatgtaaaggccatttttaaaacaacaaattgacaaaatatagtatcagtataagaattttgagaagattttgtcatttgaggacccaagaaaagttgcttttagaatttatttaatgcattagtgtctgagtccccacatgttcttagactaggaggactgctgccagaacgccttggtgtgatgatatgattgtaccaaggacagcctttcattttatctctactaatatttcatactctcttctgcagattgctcccagggattctgttaatgt

SEQ ID NO: 127251 - DNA, 586 bp, Homo sapiens
  misc_feature (136)..(136): n is a, c, g, or t
gcctataccacaaaggggatggtggcccagcgaagcccaaaatgtcattcacaaggttcagttccaggccggcccaccatgatgatcagaacccggccaatgacactgcggctgctccagtgcacccacccaaggnacctgcctggcgagctgctgggctaccggctgcagtactgcggggccgacgaggcgcggcccaacaccatagatttcggcaaggatgaccagcacttcacagtcccagccagggcccactttctgctcttctgcagagtaccacagtcagtattacatctctgtgttgagccacatgtaaaggccatttttaaaacaacaaattgacaaaatatagtatcagtataagaattttgagaagattttgtcatttgaggacccaagaaaagttgcttttagaatttatttaatgcattagtgtctgagtccccacatgttcttagactaggaggactgctgccagaacgccttggtgtgatgatatgattgtaccaaggacagcctttcattttatctctactaatatttcatactctcttctgcagattgctcccagggattctgttaatgt

SEQ ID NO: 127252 - DNA, 427 bp, Homo sapiens
tccctactggaagaagctttgcagagtgtcctttcccttctttggttttcctcctacctctctgtcacctcttcctctgcctcctttgctggcccttcttcctcagccagaattctaaattctaaacactaggagtgccttactgttctcttctctattcctctctccctggtgatctcaaccaggcccatgagtttaaatactgtctcccatgctatccaatagggtggctgttagccactcataactattcaaattaaaattaaataaaatttatcctgaatcaaggaccagaggaaaaaaatgttaaatagaatttaaaacttagttttctgggtgcactaaccacttgtcaagtactcaacagccacatgtggcttgtggctttcaaatcggacagagcagctatagaacagcttcatctttg

SEQ ID NO: 127253 - DNA, 823 bp, Homo sapiens
agatctgaaggatgagtaggagttgctaggcaaggtagactacaaattcaagagctgaccagcatggtggctcatgcctgtaatcccagcactttgggaggccaaagcgggagatggctggagcccagtagttcaataccagcctgggctatgtaaggatattccatctctataaaaaataaaaagttagccagctgtaggggcacatacgtgtcgtcccagctacttgggaggctgaggtgggaggatcactttggcccacgcagttgaggctccaataagccattgtgccactgtactccaggctgggggacagagtgagaccctgtctccccacccccaaaaaaaacaaaaccatggcatgtatggagtgtgtgcacaaaatgaaaaaatgagagggaagtgtaagatgaggctggaaaggtaagtagaggctacaccataactgaattcaagaactattagttgatgaaattggaaggacatactcaagggagtagaaatgatgtataaaggaaagagatacattatacatgattctcagatgtttagcttctgcaactggtgtaagaaataaatgaaggctgagcacggtggctcacgcctataatcccagcactttggaagggcaaggcgggtggattacctgaggtcaggagtttgagaccagactggccaatgtggtgaaaccccgtctctactaaaaatacaaaaattagccaggcatgatggcaggcacctgtaatcccagctactcaggaggctgaggtaggagaatcgcttgaacccgggaggcagaagttgcagtgagctgggatcacat

SEQ ID NO: 127254 - DNA, 214 bp, Homo sapiens
ttgtaggtgcgaggcagaatagacagttgagtggatattggccatgatggtgacatagtcggcgcactgaggaattcagggtagggctgggagctggagacggtaataacctgggggtctgtgcatacaggctggagtccaagagatggttcagagacagttcctctagtcagcctcaggctaggtgctgtggctcttcgctgtaatcccagca

SEQ ID NO: 127255 - DNA, 683 bp, Homo sapiens
agggcactgtatttctgattagataagtttaaaaaaattaagtttaaatttaattttctatgtttttagagatgggattttgccgtgtcacccatgctggagtgcaggggctaatcacgggtgtgatcataggtgcattacagccttgaattcctggcctcaagtaatcctcccacctcagcctcctgagtagctgggaccacaggcaccgctgttacctggcttgattagacaatttttgctgcagaaatagctggctgttttttcaatcttacaatttaatcatgccaccctcccccactccccaaaagcatatacttttgactaataatccttggttgtaccttttcaacctccaagctaaccccagttgtgaatcaggtgaaaataatcaaggaatttatcattgctgaaatgttgtgctatctgtgtattaaacaccagatgctatattgtcacagatcttgctatattgcttttcatggtatcattgtgaagtttttagatggcatatatctcttgttgatcacatagtgggtgaatttacaaaacttttagcaaatctatggtatagctctgtattgaacttttgtggatctgttctttcttcccttgtctactatacttatatcacaggcccataaatgctataaattttgggcttctatctacaatctataggg

SEQ ID NO: 127256 - DNA, 245 bp, Homo sapiens
attgagacgcccataagagtctggaagttgcttccttttgggtttgaagtcgcttggaggctggtcccgtccccggtctttctgctatagggcaatgtatacacttcctatcgcatagttttcctgctcaaaaccttgttgactcatcctgccccttgctttttaaagtcctcacccgtgcgctggattcccgccctgggcgcctcccagcccccgtcggcctcccctggagcgcagcgccgggg

SEQ ID NO: 127257 - DNA, 1994 bp, Homo sapiens
gcactgggtgctggtgtcatccagggaccccacacacttccttaaatgtgatcctgcttccctctgcgcagctgcatcctctcctcctgcaggactgtctggaaacttggctctcagtttgctctcccttctctcctctgcctgtcccaagcccctctttctaaaaaagtgatggaatattcatggggttatttcttgaaaatacttggcggcctccatgcttctgttttctttgagccaggtggtcaggagggtttacaaagaatgcctgggctcccccgcaggtgccggcagatggggtagcgaacggtcctgtgcctccacctgctccgggagggagtctcccgtctctaggcctggccccttcctaaccctccacgtatcctgttctccagagacttcagaacccactcctgagaacagcggagccaggcgcttagaggaagaccaaatgctgccaggacacggattgtccaggattacattccagcatcttattagaggaccgaagcagagggtgctgtttcaacgccaccaccaggagagaggcagaggggctgtgccgtgctagagtcctcagggagggagtgacctcgaccctggctgtgctgcaagctgactccagccttggtgtcagcagcacccggcgaacagcagcaggaggagccgctagagcagctgctcatgggcagagctgccctcgggcaactcctgccaccaccccctccccagggagcccaaggcaggggaggctcagcatggaatgaaacaggggagtgagggacacaaggaggtgggaagtgggagggtcccagccccaccaagtacacagagaccccctcgacatcctggacaccacaggggcacctgcaggctgggagaccaggtcctctgtgcatgggcccgggaggcagacctgccctaagggtgatgcacaggctacaggtgctgcacgctccagcgcccactctagacatcagcctccaggttgactaagggtcaggtcatgtttgaaaccatgcttggctggaccaggacccatggcaagagcacctgggcaccagtgtttagccctggtctgcaggaaggaggacagcagactttaggaccccacagcacggcagtgctgaccatttcacccacttggcctccttgagaaatatggatggggacccctctggggatgggcaaggccttccaggataggctcagttttggtcccctgctttttgaggttgggttaaaattccgaccatggcagaggaagcacagctcaggttcccacacctcacttttcacagcctctgagggcagcagtgcacgtggaggagacgtctcccatgaggccaaggcctccagtgctcaccgatgccctctgcgaagttggggtagaactcgtcagtgaagaggggctcgggcagctcacggaaatacagcttcagcgtgcctgcgatggcgttcacgtccatctcgctcatcatcactgacacgtccttgttatctggaaagagcacggaaatgcagcggcctccttgaagatcctgataaatgaagaaaagacacagagaaggatgtgacatgcctgggccatggagcactctgagatctcatcgtggacaccactgcccacacctccatcccgtcctgcgcaggccgacactcactgacgttgaaggctgccttcagtgcctggatgtctgcggccaccccagacatgcggtagatgcccacctcctccatgcctcggcgctcgatctcctccacgcactggcgcacgatgtagggcaccttggacctctctctcctgcgggaggagggaatgttctcagtgtcctaacagccctgcttgggccataacacaggagacctgctccctatgtgcacacccggaggtggggtgaggacggtgatgaaggtacccaggtctggggctgcacacagagccttctgcatgcctgtcctccctctgcaagctctgtcctcattgcatgtgc

SEQ ID NO: 127258 - DNA, 1475 bp, Homo sapiens
gcactgggtgctggtgtcatccagggaccccacacacttccttaaatgtgatcctgcttccctctgcgcagctgcatcctctcctcctgcaggactgtctggaaacttggctctcagtttgctctcccttctctcctctgcctgtcccaagcccctctttctaaaaaagtgatggaatattcatggggttatttcttgaaaatacttggcggcctccatgcttctgttttctttgagccaggtggtcaggagggtttacaaagaatgcctgggctcccccgcaggtgccggcagatggggtagcgaacggtcctgtgcctccacctgctccgggagggagtctcccgtctctaggcctggccccttcctaaccctccacgtatcctgttctccagagacttcagaacccactcctgagaacagcggagccaggcgcttagaggaagaccaaatgctgccaggacacggattgtccaggattacattccagcatcttattagatggcctgattagccagaggtttccaggccgtctgtccgcctccaggagatggactgggacctttagacatcggtggagaacaggatgctctgtcccttgctgtccagggcagggatggcctccagccgcaagaagtacagcagcacctcgacctgccctcgcggagtggggaagaggagagtggctcagaggggggctcacagctgctggtgggaggtctttggggcccaagctcccaagtccacctcaggtgctagaaacccctgctggtgtcatgaaccccttacagtgagacgggggtggggtggggtcctgacaaggcatgacttgttgggtggggggtggttatttattttagagatgcacagggccttgctctgtcccccaggctggagtacagtggctccatcatggatcactgcagcctctaactcctgggctcaagcaatcctcctgtgtcagcctcccagatacctaggattacagatatgtgccccaatgcctgcctaatttttctttgtattttttctggagatggggtttgctacattgcccagactggtctcaaacacctgggttcagttgtcctgcctcggcctcccaaagtgctgggattacaggcatgagccaccacactcgaacacttggggtggttttaagcccccagcaaggtgcaccagcaggaccaggaggtggcctgggcaccccctatcactcccatccatgcaaacctaggcaagtccctgtctctgaatctcagccaccaccacatacaatgcaagtcggaagatgggcaggactgggggtggggcaggcagaggccacctctgtcaggctggggttgcatgggctggagcctgtcttcccatacctgggacatgacctccaaggaccagctgtcagtcatggtgatgggctggctggggttggcagggagcttgctctccttctcggagggccggagcagcgtggg

SEQ ID NO: 127259 - DNA, 1150 bp, Homo sapiens
tgcgcagggctgaatggtcgctgagacagagatggaagccaggacaagggagcccaccgggcccagatagagacttcagaacccactcctgagaacagcggagccaggcgcttagaggaagaccaaatgctgccaggacacggattgtccaggattacattccagcatcttattagatggcctgattagccagaggtttccaggccgtctgtccgcctccaggagatggactgggacctttagacatcggtggagaacaggatgctctgtcccttgctgtccagggcagggatggcctccagccgcaagaagtacagcagcacctcgacctgccctcgcggagtggggaagaggagagtggctcagaggggggctcacagctgctggtgggaggtctttggggcccaagctcccaagtccacctcaggtgctagaaacccctgctggtgtcatgaaccccttacagtgagacgggggtggggtggggtcctgacaaggcatgacttgttgggtggggggtggttatttattttagagatgcacagggccttgctctgtcccccaggctggagtacagtggctccatcatggatcactgcagcctctaactcctgggctcaagcaatcctcctgtgtcagcctcccagatacctaggattacagatatgtgccccaatgcctgcctaatttttctttgtattttttctggagatggggtttgctacattgcccagactggtctcaaacacctgggttcagttgtcctgcctcggcctcccaaagtgctgggattacaggcatgagccaccacactcgaacacttggggtggttttaagcccccagcaaggtgcaccagcaggaccaggaggtggcctgggcaccccctatcactcccatccatgcaaacctaggcaagtccctgtctctgaatctcagccaccaccacatacaatgcaagtcggaagatgggcaggactgggggtggggcaggcagaggccacctctgtcaggctggggttgcatgggctggagcctgtcttcccatacctgggacatgacctccaaggaccagctgtcagtcatggtgatgggctggctggggttggcagggagcttgctctccttctcggagggccggagcagcgtggg

SEQ ID NO: 127260 - DNA, 450 bp, Homo sapiens
ctaaaaaagtgatggaatattcatggggttatttcttgaaaatacttggcggcctccatgcttctgttttctttgagccaggtggtcaggagggtttacaaagaatgcctgggctcccccgcaggtgccggcagatggggtagcgaacggtcctgtgcctccacctgctccgggagggagtctcccgtctctaggcctggccccttcctaaccctccacgtatcctgttctccagagacttcagaacccactcctgagaacagcggagccaggcgcttagaggaagaccaaatgctgccaggacacggattgtccaggattacattccagcatcttattaggtatctggatctgttggggaaaaaattagaaactatgtataaaacttacaaatattcaagtatcaaaaggttatttaggatgaaagttttaaaacaagtcatcagcaag

SEQ ID NO: 127261 - DNA, 1244 bp, Homo sapiens
gaggaataaacactaaatccgaaacatgacggaaattatgtattttattgcagtgacagaaagagtaaggcccttgctcaggtttacccatgaaaattatgtttggctgcacgtagagaaaagctgaccacagtggcttgagcagacgggcaggagttccagagtgagcagtccaggctgatacggtggggtgcaggacactcctatgttttggtcccaccatgctgaggccagggagagatggcctgcacctctgatctgtccaggcagaaaggacatgggaggcctcaaccccttcttgtgggtcctggtatttttattcaggaagggaagcccttctctgcaaactttcgctgacatattgcttaggccacaactaggtcacaggcctctggctggagggaactgaggacaatggagttgtcactttccagcctggagagtggagggaagcagagaggaaggtagctgggagcagatgtctcgtgaacccagagccacatctgccagacctggtgacaaagacaggctgtgtgccttcccagtcatatcttgtatcatttgttttctgtgccagctgggctttggaaacaaatgcagagaaactttatgttcttccttcattccctcttggaagttgcagatggatgccaagggtgaatatttattgttgacccattgaaagcaaactggacaggagaagggatgaggtgggggaaggggctaggttaaatggatccaagttcacacctattttcagtgtcaaagccccaaatcacacttgagcgtctcctcaagttagaatgagcaatagaaaaccagacagccctgtatctatgggaatgttgcttgcatcagagccaccacaccttgctgtgaggttgatcggtttctcgcagctggaaatagttgcttcccgccccccatcttcctcactcttttaaactctcaaaaatcccccagcctcccaaatttgttttaatttttaagagaattcttttctacaaaagagggaaaccttctttcaaatggcccttcataaatttccctaaagaggtttttatctctgatagaaatatgaaaaacagataaccagataattgccctctatctaggctttaaacacttattcatacattgaatttctgcaagttacagatgattgttgctgtgtgattactggccctgtctatttcctcagcatggatgcaaatctttctccctgagaaagtcattgcttcgtt

SEQ ID NO: 127262 - DNA, 739 bp, Homo sapiens
gaggaataaacactaaatccgaaacatgacggaaattatgtattttattgcagtgacagaaagagtaaggcccttgctcaggtttacccatgaaaattatgtttggctgcacgtagagaaaagctgaccacagtggcttgagcagacgggcaggagttccagagtgagcagtccaggctgatacggtggggtgcaggacactcctatgttttggtcccaccatgctgaggccagggagagatggcctgcacctctgatctgtccaggcagaaaggacatgggaggcctcaaccccttcttgtgggtcctggtatttttattcaggaagggaagcccttctctgcaaactttcgctgacatattgcttaggccacaactaggtcacaggcctctggctggagggaactgaggacaatggagttgtcactttccagcctggagagtggagggaagcagagaggaaggtagctgggagcagatgtctcgtgaacccagagccacatctgccagacctggtgacaaagacaggctgtgtgccttcccagtcatatcttgtatcatttgttttctgtgccagctgggctttggaaacaaatgcagagaaactttatgttcttccttcattccctcttggttcggtatcccaggctggataatttattggtgaccaattgtatggtacttgtcaggatcggcccagtctctctcctctgccccttactcttactcttccctcccg

SEQ ID NO: 127263 - DNA, 2443 bp, Homo sapiens
ggggagccgaggcgagcgcgagcgaggtccagcaccatgtgctaggtcactcccagcgcgaggccacacctgggccgtcggagcagcccctcctcacttcaggggtcaccctccccagcacccattgccccaccatggctggggaccggctcccgaggaaggtgatggatgccaagaagctggccagcctgctgcggggcgggcctggggggccgctggtcatcgacagccgctccttcgtggagtacaacagctggcatgtgctcagctccgtcaacatctgctgctccaagctggtgaagcggcggctgcagcagggcaaggtgaccattgcggagctcatccagccggctgcacgcagccaggtggaggctacggagccacaggacgtggtggtctatgaccagagcacgcgggacgccagcgtgctggccgcagacagcttcctctccatcctgctgagcaagctggacggctgcttcgacagcgtggccatcctcactgggggcttcgccaccttctcctcctgcttccccggcctctgcgagggcaagcctgctgccctgctacccatgagcctctcccagccctgcctgcctgtgcccagcgtgggcctgacccgcatcctgcctcacctctacctgggctcgcagaaggacgtcctaaacaaggatctgatgacgcaaaatggaataagctacgtcctcaacgccagcaactcctgccccaagcctgacttcatctgcgagagccgcttcatgcgggtccccatcaacgacaactactgtgaaaaactgctgccctggctggacaagtccatcgagttcatcgataaagccaagctctccagctgccaagtcatcgtccactgtctggctggcatctcccgctctgccaccatcgccatcgcctacatcatgaagaccatgggcatgtcctccgacgacgcctacaggttcgtgaaggacaggcgcccgtccatctcgcccaacttcaacttcctgggccagctgctggagtacgagcgcacgctgaagctgctggccgccctgcagggcgacccgggcaccccctcagggacgccggagcctccgcccagtcctgccgccggggccccgctgccacggctgccaccacctacctcagagagcgctgccacagggaatgcggctgccagggagggcggcctgagcgcgggcggggagccccccgcgccccccacgcccccggcgaccagcgcactgcagcagggcctgcgcggcctgcacctctcctcggaccgcctgcaggacactaaccgcctcaagcgctccttctccctggacatcaagtctgcctacgcccctagcaggcggcccgacggccccgggccccccgaccccggcgaggccccgaagctctgcaagctggacagcccgtcgggggccgcgctgggcctgtcctcgcccagcccggacagcccggacgccgcgcctgaggcgcgcccacggccccgccggcggccccggccccccgccggctcccccgcgcgctcccccgcgcacagcctcggcctgaacttcggcgatgcggcccggcagactccgcggcacggcctctcggccctgtcggcgcccgggctgcccggccctggccagccggccggccccggggcctgggcaccgccgcttgactccccaggcacgccgtcgcccgacgggccctggtgcttcagccccgagggcgcacagggggcgggcggggtgctgtttgcgcccttcggccgggcgggcgccccgggaccaggcggcggcagcgacctgcggcggcgggaggcagcgagggctgagccccgggacgcgcggaccggctggcccgaggagccggccccggagacgcagttcaagcgccgcagctgccagatggagttcgaggagggcatggtggaggggcgcgcgcgcggcgaggagctggccgccctgggcaagcaggcgagcttctcgggcagcgtggaggtcatcgaggtgtcctgacccctccgctgccctcggccccgccgcccgcagccaggcccgttataaatgtatattatatataatgcaaagaaaggtaaatggttttactgggatttttatcgagaagtaaatatttcgattttttatttatttaagctgttcattctggcaatgatttggcaacagtgcgggtggtcctcgagctctatttttactgtctggtatttaaactgaaacatacgtttctaagcaatacgaggccaccttcagtcgcaagctgggtgccaggcctggggcccctcccagttcccccgccccaggaaacactgctgacctttgcaaaggctgccgagctttcgtgcactttttacataacaaaaaggtgaaaaaaaggaaaaaaaaacttctttgccacaaactgagccgcagaaccccccttctccccccac

SEQ ID NO: 127264 - DNA, 876 bp, Homo sapiens
  misc_feature (863)..(864): n is a, c, g, or t
ctcccctgctccctcccttctctgcgccggcctagggctctgcaccaaagccataggatggaggagcaggagctggtgtgccccggagaggtgcggccagccctccatcagctccaggcaccaaatcttggtggcaaggagggcaccccgctgcccgttgccccagagctgttctctggcaggggaggacaggcattgggcttcatggtgccagggtgttcagaggggctgagaaatagaacagtgtgtgtaggggcttcgggcagggggttctggaacgtcagatgaggtgcagcccaggggaggacagaggtgttagtgcccccaactcctgccagagccccagtccagccacagagtggctcagaaaggccattcctagagggctgcggccctcccttctcccttgcccatgcccccagagctgcctgccgggcagggtggcaccactgcaggagaggagcttggcctccgggggtcaggcaggaggcgcctggctagccagtgctggctccactgggcaggaagccctggacccccaggtatgaggagggggtggtcttagggttctgttccaggtctgccccgcccccctcccagccatgccccaggcagaacttggaattcaggtgtgcacctgcaggctgaggggctctgtgagcaggtgctgctcacacagggagttcaggcgccagccaagcccctgtgctgctgggataggcctgcttcacttagggagcactgcctcaagacaggtaaagccccctcgtttgcccccacccccatggggccgctcaggagagaaactcccattcacccctcggccgaattaacaccaggcctcgtacctagcctaagttgtnnttcctgcgcgtc

SEQ ID NO: 127265 - DNA, 755 bp, Homo sapiens
tattactagtgaattcactagtaatgccccgagggcgcacagggggcgggcggggtgctgtttgcgcccttcggccgggcgggcgccccgggaccaggcggcggcagcgacctgcggcggcgggaggcagcgagggctgagccccgggacgcgcggaccggctggcccgaggagccggccccggagacgcagttcaagcgccgcagctgccagatggagttcgaggagggcatggtggaggggcgcgcgcgcggcgaggagctggccgccctgggcaagcaggcgagcttctcgggcagcgtggaggtcatcgaggtgtcctgacccctccgctgccctcggccccgccgcccgcagccaggcccgttataaatgtatattatatataatgcaaagaaaggtaaatggttttactgggatttttatcgagaagtaaatatttcgattttttatttatttaagctgttcattctggcaatgatttggcaacagtgcgggtggtcctcgagctctatttttactgtctggtatttaaactgaaacatacgtttctaagcaatacgaggccaccttcagtcgcaagctgggtgccaggcctggggcccctcccagttcccccgccccaggaaacactgctgacctttgcaaaggctgccgagctttcgtgcactttttacataacaaaaaggtgaaaaaaaggaaaaaaaaacttctttgccacaaactgagccgcagaaccccccttctccccccac

SEQ ID NO: 127266 - DNA, 2133 bp, Homo sapiens
tggcgagggtgaatggcggagtcgttgaatgccggaggcgttgaatggcccccaggtggaggctacggagccacaggacgtggtggtctatgaccagagcacgcgggacgccagcgtgctggccgcagacagcttcctctccatcctgctgagcaagctggacggctgcttcgacagcgtggccatcctcactgggggcttcgccaccttctcctcctgcttccccggcctctgcgagggcaagcctgctgccctgctacccatgagcctctcccagccctgcctgcctgtgcccagcgtgggcctgacccgcatcctgcctcacctctacctgggctcgcagaaggacgtcctaaacaaggatctgatgacgcaaaatggaataagctacgtcctcaacgccagcaactcctgccccaagcctgacttcatctgcgagagccgcttcatgcgggtccccatcaacgacaactactgtgaaaaactgctgccctggctggacaagtccatcgagttcatcgataaagccaagctctccagctgccaagtcatcgtccactgtctggctggcatctcccgctctgccaccatcgccatcgcctacatcatgaagaccatgggcatgtcctccgacgacgcctacaggttcgtgaaggacaggcgcccgtccatctcgcccaacttcaacttcctgggccagctgctggagtacgagcgcacgctgaagctgctggccgccctgcagggcgacccgggcaccccctcagggacgccggagcctccgcccagtcctgccgccggggccccgctgccacggctgccaccacctacctcagagagcgctgccacagggaatgcggctgccagggagggcggcctgagcgcgggcggggagccccccgcgccccccacgcccccggcgaccagcgcactgcagcagggcctgcgcggcctgcacctctcctcggaccgcctgcaggacactaaccgcctcaagcgctccttctccctggacatcaagtctgcctacgcccctagcaggcggcccgacggccccgggccccccgaccccggcgaggccccgaagctctgcaagctggacagcccgtcgggggccgcgctgggcctgtcctcgcccagcccggacagcccggacgccgcgcctgaggcgcgcccacggccccgccggcggccccggccccccgccggctcccccgcgcgctcccccgcgcacagcctcggcctgaacttcggcgatgcggcccggcagactccgcggcacggcctctcggccctgtcggcgcccgggctgcccggccctggccagccggccggccccggggcctgggcaccgccgcttgactccccaggcacgccgtcgcccgacgggccctggtgcttcagccccgagggcgcacagggggcgggcggggtgctgtttgcgcccttcggccgggcgggcgccccgggaccaggcggcggcagcgacctgcggcggcgggaggcagcgagggctgagccccgggacgcgcggaccggctggcccgaggagccggccccggagacgcagttcaagcgccgcagctgccagatggagttcgaggagggcatggtggaggggcgcgcgcgcggcgaggagctggccgccctgggcaagcaggcgagcttctcgggcagcgtggaggtcatcgaggtgtcctgacccctccgctgccctcggccccgccgcccgcagccaggcccgttataaatgtatattatatataatgcaaagaaaggtaaatggttttactgggatttttatcgagaagtaaatatttcgattttttatttatttaagctgttcattctggcaatgatttggcaacagtgcgggtggtcctcgagctctatttttactgtctggtatttaaactgaaacatacgtttctaagcaatacgaggccaccttcagtcgcaagctgggtgccaggcctggggcccctcccagttcccccgccccaggaaacactgctgacctttgcaaaggctgccgagctttcgtgcactttttacataacaaaaaggtgaaaaaaaggaaaaaaaaacttctttgccacaaactgagccgcagaaccccccttctccccccac

SEQ ID NO: 127267 - DNA, 363 bp, Homo sapiens
tggcgagggtgaatggcggagtcgttgaatgccggaggcgttgaatggcccccaggtggaggctacggagccacaggacgtggtggtctatgaccagagcacgcgggacgccagcgtgctggccgcagacagcttcctctccatcctgctgagcaagctggacggctgcttcgacagcgtggccatcctcactgggggcttcgccaccttctcctcctgcttccccggcctctgcgagggcaagcctgctgccctgctacccatgagcctctcccagcgctctgcagcaccacaacctcctggtctgttctgtgagtggtttctatccaggcagcatggaagtcaggcgtcccgggatatgca

SEQ ID NO: 127268 - DNA, 1215 bp, Homo sapiens
ctcccctgctccctcccttctctgcgccggcctagggctctgcaccaaagccataggatggaggagcaggagctggtgtgccccggagaggtgcggccagccctccatcagctccaggcaccaaatcttggtggcaaggagggcaccccgctgcccgttgccccagagctgttctctggcaggggaggacaggcattgggcttcatggtgccagggtgttcagaggggctgagaaatagaacagtgtgtgtaggggcttcgggcagggggttctggaacgtcagatgaggtgcagcccaggggaggacagaggtgttagtgcccccaactcctgccagagccccagtccagccacagagtggctcagaaaggccattcctagagggctgcggccctcccttctcccttgcccatgcccccagagctgcctgccgggcagggtggcaccactgcaggagaggagcttggcctccgggggtcaggcaggaggcgcctggctagccagtgctggctccactgggcaggaagccctggacccccaggtatgaggagggggtggtcttagggttctgttccaggtctgccccgcccccctcccagccatgccccaggcagaacttggaattcaggtgtgcacctgcaggctgaggggctctgtgagcaggtgctgctcacacagggagttcaggcgccagccaagcccctgtgctgctgggataggcctgcttcacttagggagcactgcctcaagacaggtaaagccccctcgtttgcccccacccccatggggccgctcaggagagaaactcccattcacccctttcccagggtgctctctctctaggtggcatgccagcccccaaacacaagtggcttttgggcccaggtgggtcagcctgctgcccctgccccataccccctcgggccattgggacccctgcccttcagatgtcctagggtctaggagtggggccagtcactgtgggaagaggccaggggcttggccggagaggcagcccagggcaggacccagtcctgagtcctggagcagggccagggaggcgcccatcccgccccggccagccgccctctctgctgtttcttctatttgttcttcttttcacccacagctctgtgttcctgtcatccctcctttcagcaaaagtcctgttcccgttccctctgtccccacccactcctgttcccccaagaaaa

SEQ ID NO: 127269 - DNA, 523 bp, Homo sapiens
tggcgagggtgaatggcggagtcgttgaatgccggaggcgttgaatggcccccaggtggaggctacggagccacaggacgtggtggtctatgaccagagcacgcgggacgccagcgtgctggccgcagacagcttcctctccatcctgctgagcaagctggacggctgcttcgacagcgtggccatcctcactgggggcttcgccaccttctcctcctgcttccccggcctctgcgagggcaagcctgctgccctgctacccatgagcctctcccagccctgcctgcctgtgcccagcgtgggcctgacccgcatcctgcctcacctctacctgggctcgcagaaggacgtcctaaacaaggatctgatgacgcaaaatggaataagctacgtcctcaacgccagcaactcctgccccaagcctgacttcatctgcgagagccgcccgcaaggggttttccaagtaagaaaattactgtgcagacagcccgggccaggctggaagacgtcgctggggtatctt

SEQ ID NO: 127270 - DNA, 850 bp, Homo sapiens
ggtcacttcactatactaactgggagtcaaaggtcagatgggccttgaaaggagtgaaatggaggtagcaggatggagcaaatcgaggcagccagacacactatcactccttgagcatttattttgtgctggacactgtgcaaaggactttatgctagtacattaaatcttcataacagccccatggggctagtgctagtattcctacattattgtcgtggaaacggaggctcaaggaggttaaatgacttgtctaaggtgacccagctaggaagtgacacagccaagacttgaactcaggtgggcctgagctcctaagtgctaggcctcaactaccctagagaagcttctgcttgctctccccaggccctggagaggcccacgggcagaagaagagcttgcctcatcacccttttagaccagcctgtccccacccttcgaaggggagtcagctagaggctacagctctctgggctgctgacatcccaggctggggtgggcgtgtaaggtctccagctgtgaagaatcagctctttgcaccctagaccttggttgctggattcagggcaccacttggcatcttctagaagtacatggggcaggacaataggtgtcagcagccctgcctggaggaggagctttgggccctgtggccctcctcagcactgcctttcttgccccttgggccctggcctgttctacattcccttgatgccccgccttacctgcccctcccaaactactgtgatccttggggtccttgcacagctacctacctccagcctgtaatcatcctatatgccaaactgggcctgatatctgagacacaccacccctgagctgcctcccc

SEQ ID NO: 127271 - DNA, 735 bp, Homo sapiens
ggagttatgaagattgggtcgaggaagaagaaaatggagacgggttatgaactgttgaagaatttttgttatgaagagaaagggtcatagtatggtactagctagtatgtgattcagagtaccttcattccctctctctgctgtcctccttcaacctctccctttcatctctttctttttctcttttctttcttactcgctcccactcttcctgttttctacctactttccctcctttctccctaacatgatacacttgaacatttaatgttacaggatgagaatttaacttgggacagcatgacatcttatcttatgcctataaatatgagtaacataaataaatattaaaataggtgttagatcagaatgaaactgttaatagtttcttgaatacaggatcacagccacatatatacctttaaacatacttgctcaataaattttaatgataatctttgaaataataaaatatcaacactttactaaatgctttacatgttttccacaatttcaaccttatcagcaaaatctctgcccattttatagatgagaaaactgaagcacagagaagttaagtaacttgtccattgttctatacctggtatggcagtgtggttctagagtctatgctcttaatcacaaggctgtattccttctcactccactgtactagttattttcatgcctttaaaaattcattagtaatatttttgttgtaaattatgatacaga

SEQ ID NO: 127272 - DNA, 481 bp, Homo sapiens
gaggggaatcacaagcaatacagtaaaaggagccagacacccatgaaatggcctcagggcatgtaggaacgcagatgaatccactgggaggacaagagaaatgaagggccaggattctcccccttatcttcagcagactcattccaagaccctcagcggatgcctggaactgcagatagtgccaaaccctaaatctattatgttctttttcttttttgagatggagtctcgctctgtcgcccaggctggagtgcagtgacgcgatcttggctcactgtactcccgtgatttaaagcaagaccctgtccaaacaacaaaaatgaaaacataaaaacaaaaaaataattcaaggctaggtgcggtgattcacacctataatctcagcactttgggaggcagtgagtcttgatgataagggtgagaaactgaaatcccaaacactgttttgttgcttgttccgctggggaccgagctcgatcgt

SEQ ID NO: 127273 - DNA, 596 bp, Homo sapiens
tgctctaggtaataaataagggttgtccttcactgattaagggaatacttaaacttcaataaatttaacaaagaaatcacactttagtttttaagttttgacagatgtattttattttatttttttttggagacagagtcttgctctatcacccaggctggagtgcagtggcgcaatctcagctcactgcaacctccgcctcctgggttcaagcgattctcctgcctcagcctcctgagtagctgggacagcaagcacgcactaccacgcccagctaattttttgtatttttagtagagacagggttttgctatgttgcccaggctggtcttgaactcttgagctcaggcaatccgcctgcctcagcctcccaaagtgctaggattaccggtgtgagccactgtgcctagccaaagttttaagagatgtattttaaatacatctttcataggagtctgcaagctttttatctctaaaaaatgacttaatttttagggctcaaaaattccattcttcaaaagaaatgtccaagtattttcttttatagcttcaaactttctgcacctaactacttgactgttccatgccaccccaaa

SEQ ID NO: 127274 - DNA, 313 bp, Homo sapiens
agtgtatcccctactccgtgttgctgaaagacctggagatgcggaatctccgggaactagaagaccttatcattgaggctgtctacactgacatcatccagggcaagctggaccagcgaaaccagctgctggaagtggatttctgcattggccgtgacatccgaaagaaggatatcaataatattgtcaagaccctgcatgaatggtgtgatggctgtgaagcagttctactgggcatcgagcagcaagttctgagagccaaccagtacaaagagaaccacaaccgaactcagcagcaggtagaagcagaggt

SEQ ID NO: 127275 - DNA, 421 bp, Homo sapiens
cctactttgggctctcttccagtttgcctacaaagtgctatttgttgcaagggtgaagcaggcaattctctgggcagcgacactgtggctgcaggcagttgctgtagttcaaagcaaacagccaagctagagtaggagggacactgacggggtttgttcattagaattttgaacattaatttttgaaggaaagaaaggggagtacaaatagaataggaatagaaatattgtgaaattttctttataacagaacaaaattgggtcaggagaaaggactttaagaaatcacttaacatttatcattactttgaaagcaaatgccttttttgagtaaaagcaaatgctttttgagcatttactttgtctgcagtgcactctagtggggtgggaaacgaaagttagcactaaatattaacaacgg

SEQ ID NO: 127276 - DNA, 694 bp, Homo sapiens
gccctccccggtgccccacatgcaggctgaagaactacggtcctatcatttattttttttaaccacttctccccgaccctcacttgtctacacaacttgtaggcctgccatcaatgtgatttgatcaatgttaccacgatcctgcgttccatcctttttaagttgttagggggtttcttttttgtatttgtttcattattcagccggcactggagttgcattggactggtagcacatcctggggaggaactatccatctggttttggttttgattggggggatttttagggggaagtgctcatttttcctgagatacctgggcctatatcttccccctgtgtctcctgtttagcctttcccactcctttttcagaagtgaaagagcagacagaaggtcccctacaaacagttaactacggtattttctcgattccaggatgacattaattgtaaggtgccacagccattaaatagcaccttttcccaggtcccaggggcaattcaaggacagtctcgtcatccacccagcactggcgagcagaaagagatgggtatagtgtggcagtgcagggcatgggcctgggaatgtaccaagagcagcttctagtgccgtatgactaggtcataattaattcacacatgcccttcttgtcttgtgggaatcaggtgcttcactttccctttggcttagag

SEQ ID NO: 127277 - DNA, 762 bp, Homo sapiens
ctcagcctcctgagtagctgggactataggcatgtgccaccattcccagctaatttttgcatttttagtagaggcggggtttcaccacgttggccaggatggtctcaatctcttgacctcgtggtccgcccaccccagcctcccaaagtgctgggattacaggcgtgagctaccgcgcccggccttcttcttcttcttttttttttgatcaacgtgctttattggccctttagatgtttttctcttttctatcaaagtttttggagtattacaaattttatttcttttttctttttcttttttaaattttaaccaaccattttcacccccccttccctacttaccctttccaccttctggtaattaccaatgaactctctacctccatgagacccacttttttagctccacatataaatgagaacatgtggtatttgtctttctgtgcctagattatttcacctaacataatgacttccagttacatttatgttgctgcacatgacaggtcttcatccttttttatggctgaataattttccattctgtatatgtactatctgtgagtggaaaacaaaaccaacaaaaaactcaaagggtttttcctgttttctcactcaacaacaaacaacgcagaaaacttcagtgaacaaatgtgtggggttttttttctccacacaccaagcaagcaggcaattctgccagataccagctgggtgtcctctaattcagttctgaagatgtccacctgaagatagcatc

SEQ ID NO: 127278 - DNA, 234 bp, Homo sapiens
cttggaagatgaagcaaatgttaacgtacactgaaaacatgtctccattcattgcgtaccaaccgtattttcttagtggcagactagtgtctcccctgggcctacactgaaatgatccatgtgaaagtcaaacatgaaagcattcttaggtttcaacatggggagtacattacaaagccagcagatgtgcagaaataaaattctaataattatgtttttgcagttggaatagct

SEQ ID NO: 127279 - DNA, 330 bp, Homo sapiens
ccaatactgcagactccagcttaaacacatggacacatgcacacacacaattctccaacctcttgaataattcccttgtaagcttccccaactggcactaatgtgccatgttttttaagtgtttgtagatcacagaatttcctagtatctctttatgaactttatgtttagagcatctattttaagtgttctgagttctatccggtgactttaaaaagtaggctttctttgtatctccatccccgaaccctcctctaatcttcagttgcatgacacgcttccaggatacccaataatcaactttgacacattttctttcccatcagatat

SEQ ID NO: 127280 - DNA, 250 bp, Homo sapiens
aaacaatgagatatgccatgttgtgtaggaaagtgttggcatagccaggcatggctacttatccttagaaaggctgcttactaaggcccttggctggagtctaagaactcaaatttcaggagggttcccacaatttccagactgataaaaagtggctcaatgtgcctaaactgttcatacaaacaatttggtttatcataaacacctgtttccttctgggagtcttaaaattttagtacatgccaggcag

SEQ ID NO: 127281 - DNA, 737 bp, Homo sapiens
agtatgggttttaaaagtaatctgctgtatttattattgacataaacagttacctgcagtccatttgaacatcatcttagatttaactcatgtattaaagatattatgttttccactcagcaaggtcaccttcaaggtgaaaactgtatgtggttgaaaatgaaaaagatcaagtgtataaagataaatatttaaaaaataaatgatatataggatttcatttttgtacactcctgattaataatcatattctgtttattttttacacccaccttcttctcccaatctccaactccagaaaccactaatctgttttccatctgtataattttgttatttcaagaatgcaatgtaaatggaatcacatagtctgtaaccttttgagagtgactcttttttttttcactcagcataattcccttgaagtctgtttacttttatgtggattgtctgtctcatgcttgtttcaccagggtagttacaactagggtggcataatttgactgattcaagaactacttcaatataaatcaaaataagagagtctaaattctaagtaattttttaacaggacaagattatttataattatgagtccatggtaatgagtgaggaatatttatttttagacagtgttagagcaaatatggacaaaaacgcgcctagttcaactatgacatagttggcagcatgattaaaagaaccaccaaatttccctaatgccagtttgagtgttt

SEQ ID NO: 127282 - DNA, 531 bp, Homo sapiens
ctagattccagtaagatagggtgatatagtgaagtaaaattggtggtatactaaaatgaaataaggtggtatagtgaaataaaatttaaaaggagttgaagacctgtatccctgcttcacactggtacatcctgcctctgtgactttggacaagccatctaacatctctaggcctcactttccttatctgtaaaacgaagggttgagctggatgattcctaggcctttttcagcaccatcatcctgttggggggtttatgttttgttttgtatgtgtgtggttattatctgagcagtttggtttatgtggtgtggtatttctttagacaagagaggctgtcctggtcagtagatacacaagatagtctatgatgtcaattaaggtctgtgaggtcaaattaagtgatatgcaagattactttgatatgagcaagctgaaaccaatagaaactaaagaaaggcatgagaaacttgaagggcagggaagcccttgaccagataggatcattgagaatatagggaagtttcaag

SEQ ID NO: 127283 - DNA, 479 bp, Homo sapiens
aactgttacatttaagaatgtttaagatggtaaaatttcatgtgtatttatttcaccacaatttttaaaagttgattttaaatgttaactccttaaaagaaacgatggctcatcaaactaaccacttaagatgggtgcattttatggtggtataaaacctaagtaagaggtcaagttctcaacctaagtaagaggctcacagtggcctctcagggaagcacgctgctgttatccatcacttagcaacgcccactctaaggcaaagtccaaaccagtggaatccatgtggcttttgcacagcatcatgagtaaaatcctctcctcaagtataactgttatttaaagagaaaatgtgtcaagcatggttagggttatatcatgtttcctgatctgttctcagagttattttagaatcaaagtccctcgaggaaacatgaaagatcgcttaatttcatgttcatctttcagaaacaccattg

SEQ ID NO: 127284 - DNA, 402 bp, Homo sapiens
aactcactaaaagcaggaagactttaaccccaacatattctctaagaagaatctgctttttgaatagctgctttcagtttagttcaaacacaagacaatggcataaattcacaccttggaggttagttgacttttaaagcttattgtgctatattaactccttttgtgccaatttatcttgagcaagagggtttttctttaaactacacatatgagctagaatttactacagaagaaaaaagttttataatctgaattattaaactgaattttttttcctttcagttactttgaattgtgtcatctagttttgaaaatatggttatattccaatgagaacacatggacacaggaaggggaacatcacacactggggcctgttgcggggtgaggggagcaggg

SEQ ID NO: 127285 - DNA, 245 bp, Homo sapiens
gctcaagaatgtgcaggatacatccaaaaatggttacgatggtaaattttatgttatgaatattttaccacaattaaaaaaaaatttaatgctgttaggcacagaatcaggagaaccacaagagcttaatgactttgacagacacaccaatacatgcatagagaaagaatgaaaatattaaaccaaagaatgaatgagtgatgaaatatttaaataaggtgggtacatagcacatcagaacatat

SEQ ID NO: 127286 - DNA, 794 bp, Homo sapiens
gaatttaataagttattgcctaccccttagactccaacccagcttgattgtcatttatttatttatttgagatggagtctcgctgtgttgcccagactggagtgcagtggcacgatcttggctcactgcaacctccgcctcccgggttcaagtaattctttgcctcagcctcctgagtagctgggattacaggtgcccaccaccatatccggctaattttttgtatttttagtagagacagggtttcaccatcttggccaggctggtcttgaactcctgaccttgtgatccacccgcatcggccttccaaagtgctgggattacaggcgtgagccaccgtgccagagatcttcatgatctttctaggaaagctggaggctaaaaaccgaaataacaaaacccagcattttaacaaggccacttaaaatcattatctgatgcttgaatttcttctgtaatcctcaaacctgtttcaatctatatggcaaataaattggtttagaatgcatggctaaaatgaactataggacaaaagatatctcactggagaaaactgaaaactttaataattgttttttggtaggccaggtaaatattttttggtaggccaggtaaattgtttttggtaggccaggtaaatatttcttggatttgaagggtgtgtttcttagattattgctatctgatacagcagttattttaagaatatcatcaaaatgtcattcaacttgatgtgtgtgtgaaaatttaaaatgagaatttaaactggagatggtgagaccccaccccagatc

SEQ ID NO: 127287 - DNA, 450 bp, Homo sapiens
aaaactggtctcctgggaacactggaaagcagtgcgtgatccgaaggggcagaaatgactgacactctcaaattcccctctgcatcatgggcactcagcactgtgcctagtgcatagtaagacttcaacaaatatgtgctgttgttataattcggcatgacgatggaggtgcagaggtttacctgtgtttttattatctctggttgacaaggcggccacacccaggttgcctgttctgaagctgtctcaagacagtgaccatcacccaggctgaggtccaggatgatgtgagtgcaaattgctaaagctctccttcaggtgccaggcctgccatgacacatggcgagtcctagcagaggtcagaccaacaactcagttctttcaggtaacctgtactgatgaaaccgccccccccccccccgccaatcttactcttctgttatttcatgt

SEQ ID NO: 127288 - DNA, 269 bp, Homo sapiens
tattgaaagtggcatggtgaaatctctgtgaatattggatttttctagttctccctttatgtctgtccatttttgtttcttgtattttgttgccttgttactatgtacatgtaagtctttaattgttatatcttcctgatgggctgttgcatttattttgatgaaattctctttagcaacattaaaaaaaattttttaaactctcttttgtttacatagtcactttagctttgttgtgtttgctgtttgcatatctctgtttccttcct

SEQ ID NO: 127289 - DNA, 609 bp, Homo sapiens
gatttcttggacaggaagaaaacctggaagaatggcagtattaccccaggtgacagagctctgtaaatctcagagttcaggagctgtggttgagctctcttaacacctgcttcctttggccaagaaagatgaaaacaacaacaaaaacccagcagccgccgtcctgagatgttctctgcagggctgtttgtggctgtaattttatgcttggccggacttctgggttacctgttacctagcttcaaggtgataattttctttgttttacctacaggttttgcttttgcagcatggctaaaacactatggaatacagatggaaattttactcttgatttggcattcatttaacaagctggtatagcaaaggattctgttactgaaaaaggcaaatcactcaggatgtatagagtaagaaagctgaatttcatgcatgtaaaattgttttcattcaatttctcaaattacatgaatccctggaaggtcaataataatgcaaaattagatttttttccttaattaaattatgtttttaataggttattacatgaccatggtaaaaaaattaaaagtacaaaatgtgtgcaataaaaaattatctccatttcac

SEQ ID NO: 127290 - DNA, 228 bp, Homo sapiens
actaaattacagtattaaaagaaacaagaggcacatttttgggccagtaacaattttaaaaatctagtctatttacccaacttgaggctgttatttttagagatgagacactagacactgaaagtttttttttaaactttagatttttattttcattttaaagatgtttttcccttttgcatttttaactaagttttgaggtcagaaagcgagtattgcacatgcaca

SEQ ID NO: 127291 - DNA, 511 bp, Homo sapiens
gctggcagcagggtctgggatggatgtactgcctttctcagagctaggctgggaaaaacatttccttgtcatttattttttaaatgtcaggagattttaaaacttctaggagagcagataagtgataagaagaaaatctgggtcgtttttgtgcatacaaaggggccattctaatagtggtttcaaggggtcttttctagacaaaaggggaggagattgttttagtagccctctcttcctttcctggggagtttgaaactatctagttttgaaatctaaaaatccccaagctcttggatctggtcctttttacccccttagccatatattccagtttctgctaaaaaaagtctgcctcaagatataagtgacatccaactgttggggctgttttctcttttcatagaaaccagagcttctggggttctgagatgtctctagcggtcactgacctaaccattagcaactgggttctacaaataatgtccctggggaactcaataaaattatc

SEQ ID NO: 127292 - DNA, 274 bp, Homo sapiens
gcagcagcaggtaatcactgccacccttagggacccagagagatgatgggaagaagtggtgttcccagagcccaactgtgggtctgtctggcaggagtgaaaactgcagagaaggcatgggtctggagctgggactgtagagccaggggctgattgaccaggggtgaaaccttagggaagatacagaaagggagagaaataccaaggctttccccctccttctacccttcagacctctgccattgccttttattggtgggacctatccacaaag

SEQ ID NO: 127293 - DNA, 204 bp, Homo sapiens
ccccagatcatacttccatgagcgcacctcttaaataggcttattatcctatttgtaaataagcttactgcgagctcaggcaattcacctgaattatatggctctcagtttcatcatcatttttaaaaggtagataagcacatctttccggccaggtgccatggctcatgcctgtaatcccagcactttgggagcttgaggcgg

SEQ ID NO: 127294 - DNA, 735 bp, Homo sapiens
ctcctgtctcagtcccccaagtggctgggactgaaggcatgagccaccacaccaggataatttttgtattttttgtagagacagggtttcaccctgttggccatggtggtctcaaactcctgggctcaagcaatctaccctcctcagcctcccaaagtactgggattacaggcatgagccactgtgcctggccatttttcacttttattaaaaatggtgggggaacccttcaagtctcaagccccacctcagacctcctgacttcagcatctctggggatggcacccccggtgccaggcagccagatttggttctctgtctaaccaggctgaaagccaactggcatctgtaggggaccaaggactccatgaagctcacaggggtttcaaagaaactacgaattcactaaccaattgactatctccttgcccgcctctttccctttctcctctccttcctcaagtattttttgagtacctcccctatgtataatgtcaagcatgcatctgcagaccttcttttcccttcgggagctgggagtggatgatgcctattttgcacccttgagattcatggaaaatgtgcatctttataatccttgaccgtctcttcatacctttatgcctgagaatgcacccttggtgctgtgagccctttgtggagaatgtgacttcttctcccagacaagatctcattgtgaggccaggtctaggtttagaggttcataatgatggg

SEQ ID NO: 127295 - DNA, 736 bp, Homo sapiens
tgggaaaggaagaagaaaaacttatctctatacatggaatgatcttgcatagagaaaatatagggaatccacaacaaaacctattacaataaaaacaaagtcagcaaggttgcaggatgcaagatcaagatacagaattcaattgtatttctatacattagcaataaaaaatctgaatgaaattaaaaataacaattccattcacaatagcattaaagagaatacaatacctaggaataaatttgagaaaagaagtgcaagacttgtacactgaaaactaaaaaccatcatttaaaaaagtaaagacctaaataaatagaaagacatccatgtttatgggttggaaggtttaaaattgttaagatgatactactccacaaagttatctacagatttgatgcaatccctatcaaaatctctgttgattttttaatagaaattgacaagctgatcctaaaattcatatggaaatataagtgacccagaacggccataatagtcttgaaaaaaactcaaagttggagaactcacactttctgatttcaaaacctattaccaagcttcagtgtagtactggcataatgacagagatcaatggaatggaactgagaaaccagaaataggccatcacatttatgggtccactgatttttaacaaaggtgccaagacaattaaatggagaaagaatagttttttcaacaaatggggctgggacaatcagaaatccataagcaa

SEQ ID NO: 127296 - DNA, 638 bp, Homo sapiens
ccatcatcatatggggtcacagggagataataaagtcataagggtggtgccttcatgaatgggattagtgccctcataaaagagaacccagagctaaccccttataccatgtgaagacacaccaagacagtgccacctatgaaaccaaaatgcaggtccttaccagacatcaaatctgttggtatcttgatcttggacttcccagtctccagaactgtgagaaataaatttctgtcacgtataagctatctagttgatagtattttgttctagcagcctgaacagactaagacaagtccctgcccttggaaaatttccaaatgaaatgcaggaaagccatataaacaataagtatggaaaaatggagtcaacgagtggttgggagaaagagagcaacacagtcaatgttggtgcagaggatgaggatgtggggttgaggggagtggtggggcatcaaagaagtctttcaggagaaagttgagaaagttgcaaccaaattgttactgagggatggaattccaggtcacgtgatttgaaagtaagactttcataatcctgcatagattctgaacaattgggccactagaagattttggactatgtatttattttcaaacatcttttttccctgtcagtac

SEQ ID NO: 127297 - DNA, 180 bp, Homo sapiens
aagaggagcccgaacggagctgagcagagaaaggatctgcagcctctccctggtgattggcttgggcagtcccaggaaggcaccagcactggtctagagcctaaacctacacatctggaaacatcacagagggcttccttctctgtgctccatgaatgagggcataccctcttcttttat

SEQ ID NO: 127298 - DNA, 402 bp, Homo sapiens
tgatgtcctggaacatggacaatagctattctggcagctgcaggttatctaattcttggatgattaattcttcgtggcccaggtcttggcctttgctattaataagacctcgttcagtccaaatttttccaaaggtgtgagctaccccaaaggcgtacttggaattagtataaatagtcccttcttggttttgcaagtgctttaaggcttgatttaatgcaaacaattcacatgtttgggcagaccaattatttggcagtcttctggactctgcttcttcaagtgcctccccatctacgactgagtacctattatgcctttttccttcaattacttgggaagagccatctataagtcctgccccgttttgtaaagggtctctcttaaatcaggcctaacttt

SEQ ID NO: 127299 - DNA, 266 bp, Homo sapiens
tactgttccctctactgcaaacacttttccatgcgcttgcctgtcaggaacactcatactcatcctctaagtctcggctccaatatccttgcatcaggaagccctcctcatcctcttccccactccaccacaccgctagacattgatttctgttatttcactgcaatttgcataaatcacagtcacagtctttattacactgaattgcaatgatcttttatttattttgtcttctacactgagagtttcttgaggccagggactaa

SEQ ID NO: 127300 - DNA, 290 bp, Homo sapiens
ctcagccccccaccagcccaagctatggaaaagaaactgcccccttgtatgaagagcaaggtgttggcggggaagtgcactctgtatatctgtctgtctgtctgcaactgtggctatcagaataatgtctcagcccttttcctgtcagatctcggctgaagcaaataaggacaatgaacagcagcaaagaggtcatcctgggcatctctttcactaatggaagtcaccaacagatctaaatctaatcgatcctaataatagagctacatgtattgagccttgggtcaata

SEQ ID NO: 127301 - DNA, 440 bp, Homo sapiens
acactaacttttttccacttaagtaaggggccccaccacttgtgatcaggaagctgtaaagagctaattcaatctggcattagcctctttctcatttcccatcctgtaatggcaaacatcatgtattaactaaaagttgcactttgaagtataaagcctaatgggaattctgaactttagcttggtgatctttaatatacttatcttagtctattttgagctgctataacagaatagctgagactgggtaatttataaagaacacagatttatttcttagttctggcggttgagggccctgcatttgggcaagggtcttcatgctgcatcatcccatggcagaaggcaggaagtcaagagagagctaaactcacttttataacaaaagtggattttttttgtttgtttttttttgtttttttccaagatggagtctcgct

SEQ ID NO: 127302 - DNA, 761 bp, Homo sapiens
ggctctgtggccccggctggagtgcagtggcacgatctcggctcactacaacctccacctcctgggctcaagcgattctcctgcctcagcctcctgggtagctaggattacaggtgcatgccaccacacccagctaaattttttttgtatttttagtagaggcagggtttcaccatgttagccaggccggtgttgaactcctgacctcaggtgatctgcccacctcggcctcccaaagtgctgggattataggcgtgagcttccgcgcctggccagctgactccatttctatagcaatgagacacattaggcagcagcagcagcagcagcagcagcgaccaccaggtccatgcctcttttccgtggtcacagctccatgtgtccggggaagattgctaatgcttagtttcctgcacaaagcaaaccaaagcatttttgagaattttctacattattcctaaacattagcaatagaaacttttaagagcaaatgccagtcttaattcagcagctctcccacttgaggaatagttagatatgtgagtagcctggagcccatgttatagggctgctggttaggtgctctctggtgcatcattactgctcaaagcatgacccacttgctctttcagatccactcagggtattttatgtccatttccaggaaccatccaactccttccctattcagtccaaacttccttttttttttttttttacttgaagttcaggggtacatgtgcaggttgttacataggtaa

SEQ ID NO: 127303 - DNA, 655 bp, Homo sapiens
cttttctgtcaggcatatcttcagccttcttcccccaaagactggctcctctgctcatcgcttgaggccaccagcctcaagtctgcatgactttgtcttgactcccactagtaacggacacaatctttcagtgagagacccaatttcctatgagagagaatctgatttcccaagatttagtcgtgtccaccatgcccataaagctgcttcctggaagagatgagtgtattgataaaagcacagtggtctgattatgtccctcagccaaagctgcagatgcgggcagatgattttacaaaagcatgaaggctccaagacaataattaatgattaaccacttcagtatcctattctattcatccacagctagtcgttgatgtcactagtgcggatactgtaacaatcgtgtctcatctcagggcatgctacatttgatttcaaaattttcaatattttctatttctgatttcaggtgtggtgccacatttacatgatgagataaatagaagattactttacagaattattttagaatgtttcacatggttttcaataactaaggaacaccgtgatatcatcattagtgtttgctacatcaagtgaaggcataggcagtaacacacatgcctcgtccaaaaagaaatcaaaagggcta

SEQ ID NO: 127304 - DNA, 328 bp, Homo sapiens
ctgccacacatagctcctgtaaccaaagggcctgggccacctccctcagacacgctagggctgctggactggagagagccacatccagtgtgaccacaaaacacattaggagtgatgttcatataatatcactaccgtcagtttatgtgcacttacaaaaaaactggagcatactgttaatcttttaatgaagtctgtcttataaagccatacaaaagttctagatgaacactttctttcagaaattaaatgcatggaaaggaggacagaattattcctaagaaccacatagaagaaagtgaagtatcccttatgttacagtgtgtgt

SEQ ID NO: 127305 - DNA, 535 bp, Homo sapiens
tggccatgtctgagctgggaaagagaagctagagaaatatgaaagcttttgttagctctctagaggttgcctatgaaaaaggggtagatttactccatgtcacaacgtaggaacaaagtggaggttatatagagatagatttcagctgagtgcaaggaaggactttcaaatcactccatatccaaaaaatgaaactggatgacaggcaaggactccacggccatctcatcaaagagttttggaggagactcctgctcttggcaagaggttaagtggaggaccttgacagtcctttctccccaaagattctctaaaatgtcagtacatcctggctatatcagataactgcaatttcaaaataatcaatgatcctatacaatttatatctctggaaatctagttcatattaaaataatcaataaatacttttgcacgctgtgctatttttttttttttttttttttttttgggggcacagaaaaaggggggggggatcctttaaaggcgaaggggggggttgtaagtttgggcttgg

SEQ ID NO: 127306 - DNA, 353 bp, Homo sapiens
tgcagccaagacagtgcctacaatgaggaggtgtggaactggaaagcctggagcaggcgggtaccagaagggctcccaaaggctggaggaacattcttcactccagaatagaaagcgatcctggaatcgtttggaatcactggagatgtattagagcacacatacagaacgtccagtgggaaacagggagttgagctgatttctccatggatgaggattttaaaagataaaataggcagggcacagtggctcatgcctgtaatcccaacactttgggaggctgaggtgggaggatcacttgagcccaggagttcaagaccagcctgggcaatgtagcgagaccccatctctac

SEQ ID NO: 127307 - DNA, 615 bp, Homo sapiens
tcagagggtgagttcagaacaggcagagggctgggtccaactaggattagtgttctgcaagctataacctagtgagaaaagggcaatggagttaaagatgtttgaactaaggtagttattgactatagaatctaggctaagagggaaatgagagaacaaagagaatattgaataatgaagaaatggtggggtcagcagactttgtgtgcctacgtgagccaatgcatcaactgttggactgaggctgtagagccttgctactaaaatgtggtcccagggccaggagcatcagcaccacctgaagcttgtgctaattcccaggccctaccctacatgtactgagtcagaatcgctggggctagggctcagaaaactgtgttcacaaacccttttgttgattctgatgcttgttaaagcttgagaaccattcttccagagtaagagagctgcaaagactgggggacagcgcagagtgggatgcttgaaatggttacagcaatcacaaggtctgaaatacagctagggggatgagaaactgtgaccaagtggaagaaaaaatcattaggaagacacaacaatccaggtggggtgcagtggctcatgcctgtaatccca

SEQ ID NO: 127308 - DNA, 277 bp, Homo sapiens
tttctagtcacaggcaccctcctgcctcagggcctttgcacatgccattccttctacctgaacattcttccccagagagccacatggttcacccctcactacctgccagtctttgctccaatgtcacctttcaacgaggccttccctgacttatttaaaaggacaacacaccccaccctccctccctacccacctctctgcatcttcttcttgtgcacctatcaccatctgagtgctgcagatgttaatcattcatccatttatttgattctcgcct

SEQ ID NO: 127309 - DNA, 457 bp, Homo sapiens
tggttttaacatctgtactacctcttttgccagctgttctaacccacaaggttgttgatcccactgacaatataaactgtctttgaatataaactgtgtgaggtttacaggatttgatgtctcagggaactgtcaataaactaatgggatacaacaaagttgctgagaaggtaaccatattataccatcttccctgaattctagatgttgccctgaaatcaattcatacttagccagcttcagtatggttactacaacatgtaaaccatcctcagtgactctcagcttacccaactataaaaacaggcatctccctctctacctgccacacttcatgggagcttgctaatcaaatgaatttccacctagggctctaatgagaaacaatcaccttccctttgggcctctcccttaatttattacattaattactgtaacaaaggaactgtgtcatctc

SEQ ID NO: 127310 - DNA, 482 bp, Homo sapiens
ttctatgccagaccccagccaggacctactgttagggctcttcaagaggatgaaggcgaatcctaggcctctattcctgtgaaggcccagctcttactgggaagggcagggaggcccccagatactgtctccagggaacgggacagttcaccaagaccacacacacagcctgctctcactgaaggacaatgagatgtggaaaggttcacttaaaaaaaaaaaaaagcacattagggtttttcttaatgcacagtacaatgaagaaaacagaaaacagaccagaaccctattgtccagataacacctactgacctttgaaaagaatagaagaaataaaagcacatggttaaaaaattccaaacagtgcaaaaataatacaagattacctgtggaggtcaccaagcacttccggttcctttccatgaaaaataagtgcttattactttctgggattccttctcaaaaacttcttaatgattgaa

SEQ ID NO: 127311 - DNA, 257 bp, Homo sapiens
aaacacacacacccagtgtataaccaatctgtgcctactcaagtcctgcaggtggccctgcagaacctgagtatatgaaaagtcagccctccatacatacaggttttgcagcccatgaatactgcagttttgatgtgcatttggttgaaaatatccacctatttgagggcctgcgcggttcaaacccatgttgttcaagagtcaactgtatatcccacaggtttctgaggctctattcatttttttaaaaaaatctc

SEQ ID NO: 127312 - DNA, 638 bp, Homo sapiens
atggaggtcagtagcacttttaatactaaaaaggaagccaggtcctgtaggggggcagagagaggaagtgctctaccaacatgtttccataagccaggctgtcctaggtgacccatctaaagaggaagatacttgtctgaggtaagtaaacatcttcaaggtcactggaactcctgggccccaagagaagtcgaattctaaaggttgtcctagatctgcaaatatagtctgttgtttatatgggagtgagcagggttattcttaaaattgttcttgccttactcaggatttctataggagctgtatcttgttctcaggcaggtaggcatgcaagtttgtcagcttttcacactaaacaaggaggagagacaatatatgggaagaactttgttttatggaaaaggcaaattcataccacaatagcacacaaaagtatgaaaacctctgccaaagaatgatttattttgacacagtaagactggttataaaacacagatgctttatgcaggaatcttccagcaagacaagacattctcagtggagcctccactaaaaagctcaaatacaattaattcatcccattatgactgacatggacaggaaaagcgaaagttctttgcagtggtagaagtttgtct

SEQ ID NO: 127313 - DNA, 105 bp, Homo sapiens
ttactagtctataatcacacaatatttttacctgcatcattccatttgttccaacaacctggtaatgtaggctgggcaacagttcattgttatgttttacaaaca

SEQ ID NO: 127314 - DNA, 299 bp, Homo sapiens
cagaggtggtcattacacactgagtgtgggggtgcaagaaagatggtaccttagagacaagtaagtatttgttgttactttcactatgacatgtcagtgttatgagctgactccaaatttcatgtgctttcagtttaaaaatgcttcatgacatctaaagaaatgctgaaggcgcttgccttcccagcagaaattctaaacatgatcattcccagaaatgctggcagaaagatcacgtgtgagtgtggggcataaaagtcaaatgtttgtgtatttctgcattggggggcttgacaata

SEQ ID NO: 127315 - DNA, 232 bp, Homo sapiens
attctgcctcagcctccctggtagctgggattgcaggcacatgccaccacgcccagctaatttttgtatttttagtagagacagggtttaccatgttggccaggctggtctcgaactcctgacctcaagtgatccgcctgcctcagcctctcaaagtgctgggatgtgagccactgcacccggccaatatgccattgattttgttggaaattggcaaattgtttggagtatt

SEQ ID NO: 127316 - DNA, 376 bp, Homo sapiens
cctgattcaaaaagtaaaagctttaaaacaagatccagtctagaatagaggaaatataatccagggtatctcatccttttttttttaatgtttaaaaaccatatgaaggttgtctaacttaatgtctaaaaatagatatctaattcattcaacaaaaatactaatggccaaggagtttgagaccagcctggccaacatgatgaaacccgtttctactaaaaatataaaaattggccaggtgtgttggcggcacctgtagtcccagctactcggaaggctgaggcaggagaatcacttgaaccgggaggtggagggtgcagtgagctgagatcgtgccattgcagtccagcatgggcaacagagcaagactctgtct

SEQ ID NO: 127317 - DNA, 575 bp, Homo sapiens
ccagcattaaccattaactgtggctgagataacttgactggactcttgctgctgcatgagagaatctgcaaaatgtgtcatctacacacacaactgtcccttagtctcagggtctgtgacccagcttaacctctgttgatgaatataaagtcaagggataacaaaccccctttaccatacatagcattcctaaggtttacattgtcatgagtaaagatcccttgctaatacggtacaaggaatagtgccttcggagtccagacactcagcttctagacctggagcagctgttaactcagggaagcaggtgatctctccatctctgggcctcagcttttccatctataaaatgaggtgattggattaggtggtatctaagaccatttccaactctatcatgccatttttatgaagctggagacaccctcagacctggcccactttatcttcaggtccgccaatcctctccaacttgtggaggagcctatactctgtccttaccatgcacaggttgacgaacagggaagacaagctgccattgagggtggtaatctaatggcagaccacacaccaac

SEQ ID NO: 127318 - DNA, 704 bp, Homo sapiens
atcctttcacgtgttttaatattttccattggatttctacgtctttatttctgtgactggtctatagcaagactaatattaatagatgaaaatgttttgaggttgattgtataacctttaagcttcccgcatcagtttaccttaagacagatcttaattcacatatccttattagtagcttagtcatatataagaaacattgagtgctcttttccactaattttaagtccctttcatgtattttcaaagtgacagtattaacatgcttgcttctaaagttctttttccagatactgatgtaaaggttctcctctatcctacattaattttaacctcaaaagatcaccttgaagaaaaaatttctagttttatcatttaggtttattttagcctttgcctcttcctaaaattattaatagaatgtagttagtgtgactgaattttgtgatatgaatactttctacagagaataagaccaaatctctaaatttgctttgaactgaaatgtaaaatgcttttgaatccaacaatttttaacctagtttgagatcaaactactatagattgtgcaattgaaagtatgttttcttcaaatgaatacacaaaaatctataacctacatgtatatatagtgagtacctagaagatacaatttcagttagaataaactcaagagctctgttgtacaacatggtagctgtagt

SEQ ID NO: 127319 - DNA, 636 bp, Homo sapiens
gagaactctgtgggaacaataactttctaagtcataatacacaacactaattactgttatttttcagtaaaagatcatgaaatttattagaaaataaagattttcttattgttgttgcattggctagaaagcatttggtattaagtttaaagttgataacaaaaacaaaagttaggttttcaaaagagaaggaaaaacttagtcttgttttcctacatctccttagactcccagaattcttgcaaaaacttaaaatgtgtcagatggttttgtgtcttttcttcaaatccacttttaacagagggctagtttggactatttgcacttaaattttctctgtattatagaaaaatattccagaaaaaatgtttgttaattcttgctaatattcttgttgctaaagcaagacaattgttaactattgtgaatggtcatgtttatttgtgcatctccttccactaagcaaattcagtttcgtaatcaatctgcagtgtggtgaatttggattcaagaaatgtggctatttcttgcatttatatggtgaatatggactcaccacattgcacatgaattaatctcaaacttataaagttgattctcagaagaatgttactaaaagccaaatatattttttat

SEQ ID NO: 127320 - DNA, 999 bp, Homo sapiens
caaaggattgtgttgaaaattaagtgaaaacttacataaattatgtagtgtggtggggacatatgataggtactgtggcctatccttaggagggatgaggaatggaactatttttaaacataaaaggtcaactttatatgctgccatataagtaacccagtgcaattggagcttgaatcaacagggctgggagaaagcttacagagtgtgcctttgaaatcccaatacccagtcatggtgatttatgagaccttaccagcttgcatatgtgatggcccactgagtttgtttactttagttttagctcagttacccagcactctatgatagcctatttttatttacactctcactaactcctctattatgatttctttgaaagaatatgaagacagccataaaaaagactcttatggaagttgagagggtctcctggtaggtcttcacttcactgtgtctaaacattggtctgttgcttgtgctttgctatctctcaacctggatgaccttcaggctcttccaaatgatttctctgattccctgaaatactgaaatgtgattacagaagtttcagtgttatcaatatcagatagtagtgtctctccctgggaactagaatgaaaacaaaataggctcgtatcatgcacgcttcacaatgaaatgcgagtgagaacaggagatgcatggaaaacctaaaccagtctaccccagaagagggcttggcagagctgagaagaccaaccggaagagaggatcctaaaagggctatgtcaacgggaagcagacacagggaggaaaaggacacctcgcaattcacgggggaccattagaggagagacaatgacggaaagaagcctccatatgtggcaaaacaaagacaaaagtgggcgcggccaaagtacaaatgaggcacgaaaatacggtcagagcatgtgcaaacgcaccagaggcctatacactcctcacgacacgcaacaacacaataggacaagaaggagg

SEQ ID NO: 127321 - DNA, 379 bp, Homo sapiens
acccaccatctacaaattctccttaaggtcttaaccctttaatttctattctttctcctctcatcatttagaaaacggataatttccaatttcttgggagaaaggaagggattaatcaggtgtgaaaacctcactcaacctcacctccagcaataaatattatgatcaccaccataacagctacccttaagcatttcagtgctactcacatattcagctgtcacgtaatggccttgacaatcctcacagagcccatttgaggtaggtgttattatttgcagtttatgaatacataaaccgaggctcatagcatttagaaagttgccagaagtcatactccaagtaggagtgcctccaaggcttgagctgctttcctttt

SEQ ID NO: 127322 - DNA, 337 bp, Homo sapiens
caggtgtaggtgcttggagaggctgtgggactgggttcctaagctcagttagggtcttgtgaacctattgtggcacctgagtctcgagttacaggttcactgtctgtggatgtaggttgtccatcgagcaagaatctgtgactgaggcattccccagcatcttgtgaccggaggcctgaattgtagctgtgattttgctccagaggagagggcttctctgagaaattcctcaatgaaattgtttatcttataatgagggtcaactatggccaaagcatggacattaatgtcttttggagggcagaatcactgattctagcctctgagcagtggaagg

SEQ ID NO: 127323 - DNA, 760 bp, Homo sapiens
tgcagtggctcacacctgtaatcccaacactttgggagcctgaggcaagaggattgcttgagctcaggaattcaaaaccagcctgggcaacatagcaagacgctgtctttactaaaaataaaacattaaaaaattagctaggcgtggtagcacatgcatgcctgtagttccagctacttgggaggctgaggtgggaggatcacttacttgagcccaggagttcgaggctccgccactgcactccagcctgagggacagagagagatcctgtctccaaaaaaaacacaaaaagcaaagtagaaagcatgtgccctgggacactgagtcagctcgcaaataaatgcactagccaaaacctcaaggagaaggtagcatttgaagtgagatttaaaggacgacctgtatttaaacatgggacatgggaaatagtgtaagtaaaggaattagaattcaaacccacatttaattccaaagctacgctaccccaccccacagtgtggcttgaacagagtaccttacacaaaacagaaggaaaaagactgaggccatatcacagaaggcttaggatatcacactaaagaatattcagcagataaaagctaagcagagtaatgagactccagtgagatcagagctgtttaaatgcatgattacatagtacttgctgagagtattttctggtggtaccaaagtttctaacacaagatcttaagttacctgttgtattcccctgtctctctaatcaaccctagatgagatc

SEQ ID NO: 127324 - DNA, 281 bp, Homo sapiens
ccatcacgaatatcccttattcttccccaccccacttctcacctcttccatgaagccttcccagatcactaagtactccagccacaatccctcaaacccaagtcaaagtaatctctcactcctctgaaactttataacatgatatctgcattttattattttccaaataatatttatatttccaagtaccattcaaaatatgtgtgtgcatgtcttaacatcttgactagattatgaactccttgaaggcagtgccttttcttttctttcttttttttttt

SEQ ID NO: 127325 - DNA, 253 bp, Homo sapiens
ctgtgtatatacgtggtatgtggtgcatgtgtggtgtgtgtgtatagtgtatgtacacatggtgtgatacgtgtacataactgtggtgtgtgtgtagtgtgtgtgtaatgtgagtatacatcgtgtgtgtgctgtgtgtaaacatggtgagtatgcatgtcgtgtatgtgttgtctgtgtgtttacatggcatgtgggtgtggtgtctgtgtgtatacatgctgtgtgtttgtatggtgtctgtgtgtataca

SEQ ID NO: 127326 - DNA, 736 bp, Homo sapiens
gaggttgaggctgcagtaagtcatgttcttgcccctgcactccagcctgagcaacaaagcgagaccctgtcacaaaaagaaaaaaacataaaactgatatggaataattaccatccagaatatataaagaactctcattaatcaataagaaaaagaccaccccttcattaaaaaaatggggagaaagatataaacaggcatttacagtacagaaaaaacagttggtttataactatgaaaagattatgcactgttagctgggtgtggtggtgcacatctgtggtcccaactacttgggaggctgaggtggtaagatcgcttgagcctaggaggttgaggctgtgtgagctgtgactgcacgactgcactccagcctgggtgacagaataagaccttgtctcaaataaaaataaataaataagaaaagattcttggccaggtgtggtggctcacacctgtaatcccagcaatttgggaggccaaggagggcggatcacaaggtcaagagatcgagaccatcctggcccatatggtgaaaccctgtctctactaaaaatacaaaaattagctgggcatggcggcttgtgcctgtagtcccagctactcgggaggctgaggcaggagaatggcttgaacccaggaggcggaggttgcaggttgctggttgctgagatcatgccactgcactccagcctcctgacagagcaagactctgtctaaaaaaaaaaaaaaagaa

SEQ ID NO: 127327 - DNA, 654 bp, Homo sapiens
attccattgtatgtgtataccacaatttctttatccatgaatctgccaatagacatttaggttgttttcacctcttggctattgtggataatgcagcaacaaacatgggagtgcaaatatctcttccaagattctgttttcaatcattttgtttaaatatccagaagtgagattgctgtatcatatggtagttctattttaaattttttgaagaatctctatactggtttccttaatggttgcactattttatgtttctatcagcagtgcacgagggttccaatttctccatatccttgccagcatttgttttttgttattttgataatgatcatcctaacaggtgtgaggcaatatctcattgtggttttgttttgcatttccctgataagtagtgatgttgagcatcttcatataatgtctggtcgtttgtatgtctttggggaaatttctttcatgtcctttgcccattttaaaatttaatttttttgttactgagttgttgtagttccttctatattttgtatattaaccccttatcagatatgcggtttgcaaatattttctctctccttaagatttttattctgttgattatttcttttgctgtgcagaatctcttctgttggatgttgtcccacttgtctatttttg

SEQ ID NO: 127328 - DNA, 573 bp, Homo sapiens
aagtggcagagtggagacgagagagggcagaaccggtgaccccgaggacagacagaattcatctgcctgaacacacagaaacggaccgaggacggtcaaggcctcagagacccgcaggaccctaaccaaagagcagatttctaagtttctgcaatcgcagaaggagagaacaagtggactgaaaaaggatgtgaggaaatgatggctgaaaacttcctgttagccaagagacataaacccacagatgcgagaagccaactgaatccaaatagaacaaacccagagaaatctgctccaggatgtatggtaatacaatttctgaaaactaaagacagagaaaaaaaccttgaaagctgccagagagaaacccctcattccttcgagagaagcacaagtctaaacagcagcaggtttcatagctggaacacagaagccgggggcagggacacgcgcttcccaggcactggatgaggagagccaccacctggaaatccacatcccgtgagatgccctcggagtgacgcggggacaaaggccattcccagacgaagaaaaacttagagaatttgtggc

SEQ ID NO: 127329 - DNA, 401 bp, Homo sapiens
gcactgactacacttggtcccctctcttctctctccctggctctgtttccttcacggcacataccacgatttgtccttatgtatttgtttctctaaatgcttactgctcccagggcaactttcttaggatagggttcatgtctattatattcctcaatgaaaagccatgatctagccggtgtctggcacataatgcaagctcagttagttagaatgaatgactgaaggtattgtatataaactgcctggcacagtataggcaagaggtggtccacttccagggaagcctggaccgtctgaggtagctattttgcccctaagcacaagccagcaacaattctcactttcttcggaagctctttaagtctcccaacttcactcaccaaccccttctacacaca

SEQ ID NO: 127330 - DNA, 256 bp, Homo sapiens
gtgtatgactgtgcgtgtgtgtgtgtacgttgtgattgtgtgtataattgcatgtgtgtacgtgcatgtgtgctgtgattgcaagtgcatctgtgtgtgtttgtgtgttgtgggagtacatgagtgcctgtgtgtgtgtgtgagcaagtgagtgcacatgtgtcaccgtgaagggaccatatttgggaacatctcttgggagggagactgagctaagccctgaaatggtcaaatatatgaacaggccaagctgcct

SEQ ID NO: 127331 - DNA, 176 bp, Homo sapiens
tccttcttcatctcctttccatgccactggcctagagaaggagaagccactggtcccttttccctcctgctgaaaggcaattcagcattaaggcaattacatcttatctgtcccttaacaacagagggaagaaaacccattgcaggcccagtgacacagcagataggaggtcctgg

SEQ ID NO: 127332 - DNA, 508 bp, Homo sapiens
atttgtgaacctatattatgtttgtttgagagaaaaaacttttggatttgaagataatttaaaaactatcataattctggttttttttttaggtattgtttatttttacctgtcaaaaacacataaaaaatttacaatcaagtatttttaaatattcagtttagtcatcttaatgttatgcaacatatccctaggatgtttttaccttgcaaagctacatctcactacacattaaacaactaccatttttttccatttcatggcagttttcaaacactattttgtttcctgattctaagagtgtaactgctttatatatcttaatacaatcttttccatggctggcccatttcatttggcatgttatgaagatttatgcttatagttgttacaatatttcctgcttttggaaaaatgagtgatattttaaattatatttactgaatgattggttgaccgaaatttgcattgcttttacctattgggctttcactaacaattctgcaaa

SEQ ID NO: 127333 - DNA, 874 bp, Homo sapiens
cctctgcctccccggttcaagcgattttcctgcctcaacttcctgagtagctgtgtctacaggcgcgtgccaccacgcccggctaatttcttgtatttttagtagagacggggtttcactgtgttagccagggtggtctccatctcctgacctcatgatccgcctgcctcggcctcccaaagtgctgggattacaggtgtgagccaccacgcccagccctctccttttcttactaaaccagtgctgtaggggcttgctactccaagtgtggtctggggacctgcagcattcctgtcatccaggagcgtgttaaaactagagtatcctgagccccatcccagacctacttaatcagaatctgcattttagcaaaatccctaatgagtcctgagcatgttactgtgtgaggaagctctgcttagaggaggaaagtctgacaattacaactatgcatcctggccaagactcaggacttgaatccatggactggacccgaaacattggtctatctcagtgagggaggaagggtgctactagaatctgatgggtagagaccagggatgcagctaaacgctctataacacacaggacacccccttccaccaacaaagaattatcctgcacaaaatatcaatggtgccaatgttgaaaaaccctggtctaattgtctagatgtagaattcacatcctgtagatatgtttcgtagcctcagatgtatgcaaatctctaggaagtagatcttaaaggagttgatacaaattgcagtgtgctatgcaaatgggaatatttttattgggacttgaaaagagaaaaagagcttaaactgaagcatgaaagatttccattagagttttgagagtgtcagactctcaa

SEQ ID NO: 127334 - DNA, 539 bp, Homo sapiens
tgaccttgtccatcactttgaaaaaggtactaaattaggtgagacatttgatagtgatagttcagaaatgttcttatcagtggaggccaaaaggtacaaaatttatcctttagcattgtctcccatttatgaggatgacagctcacaggaggacattctatctagtgaggtttcacctggtcaccatggccccaggaaatcaagagacagtgaaaaccagtcctcttctgttttatcccttctccagtcagtgtcagaacgtttaaagatgaattttgatgaagatgacagagaggcagctgatgaggaagaagaggaggaggaggcagcagtattgcataaaggagatctgagagctggaagtggggagcgtgttaccttccagttgccagatccttccatcacattttaccctgatgaccaggagagcgttggaatttctaagaattcatatgtgatgccaaatgaacctactacctccaatctgcaagttggtctgtggccagaaaagacctcgtttctccagaaatctgacctta

SEQ ID NO: 127335 - DNA, 428 bp, Homo sapiens
acatgtcactatgaaaacaaactgcagcgcaaagcaagaaaggaagaataattgagattacttatatctctagagaaggatggacctcactaggttgttcatattcatagacaggatattaaagttacagatcctaaaccatgaaaaatgaatatacaaaaactatttccaagaagaaaatcacagcaacttgtaccttaaaggttatggattggctaaaagagaccacacactggttcacctcctttaaatccccaattatttcaccaatactacagaacttaatagaagccaggtgattacccagagccacagaacaggcacacaggcagtttctctttgcttggcctttcctttgcccctgtgttccatacacagcacacaagaaaggattctgactgagctgagaaattcctgctatttcactg

SEQ ID NO: 127336 - DNA, 312 bp, Homo sapiens
  misc_feature (296)..(296): n is a, c, g, or t
cacctgccgggacacctcacccccagcccactggctccctgcatcccagttgcatccacaggcactgaatgctttgggtcggtccccaaactctcagagccccagtttcctctttcgtaaaacagcaattaataaccaccattgtaggactgttgagttaattagcaggaacatataggatgcacttgattacagagctggtgcacattaaagctaaaaaatggttgctgccgggcgtggtggctcacacctgtaatctcagcactttgggaggatcgattgcgcctaggattttnaaggctgcagtaagct

SEQ ID NO: 127337 - DNA, 364 bp, Homo sapiens
ccaatatgacatgtaattttacagcacagatagtttttcaaaagaattacattcccaggcttagcagagggagcggcctacttattgaaatgtgaaatcgaatctctgaaacagaaacaccaaattattatactaatctgtaaagtagctataaaacgttatttttcagagtgaagtatctgtcaagatggctagttttggtgtataatagaaacggtattttattccttttatttctgtaaacagattaagtctgtgtgtgtgtgtgtgtgtgtgtgtgtgtgtgtgtgtgtgtgtgtacatgggatataatacaaatctacctcgacttataatgagttacatcctgataaccacaggccaa

SEQ ID NO: 127338 - DNA, 701 bp, Homo sapiens
tatgtttagccctgggagccatgtgttatttatcattgtacagatcttcttgctgacacaactgggtatggtagacggcctgataggattaactgcaagtaaagcagaaattattaaaaacaatattgaggccaggcaaggtggctcacgcctgtaattccagcactttgggaggtcgaggtgggtggatcacgaggtgaggcgttcaagactagcctgaccaagatggtgaaaccccgtctttactaaaaatacaaaattacgtgggcatggtggtgggttcctgtaatcccaggctgaggaagataattgcttgagcccagaaggtggaggtggaggttgcagtgagtcgagatcacaccactgcactctagcctgggtgacagagtaagacaacgtctcaaaaacaaaaacaaaacaaacaaacaaacaaacaaaaattaaattaactggatgttaaatgtggtttctttacatttaccagaatttcagccaaggtcctaatggccccaaataataggtgctacattatcaagcagatatatcaagagattgtgataatgttaatgaaacccctttgctcatcactcatttccaaaatttatattttcaaagggaattttgtacagagttcctaaaaaaagggatcatgatgtcagtgtattgcctcactgattgctaaatgaagaggactataataa

SEQ ID NO: 127339 - DNA, 547 bp, Homo sapiens
tttatagttgtgtttatttattatatctcagtaatacgtaataagagagttcttatgagtggaatgtctacattggctcgattgctttaacattgacttaaataatttgatctctgatggacgaaggtatcagaactacatgtgtgattaaataataactttttagattttttaaaagcttaaatgggtaattttgattctatgccatcactctcaacaaatagttttgagcccactgctataggtgactgctatgatggcggaaagtacaggatacacaggagtttaagggaagaaatgcccgaggagagcaggaaaatgcctcctccaaactggaagtaacacataggggcaatgccaggtgagtggggatgcatgggcaggcaaagatggaagaatagtacactggataatgtgtttggttccagcatatgtacaggtgggagatgtgaggcccaaaagctgtagttagaatccaattgtgaaaggctttttatgtaatattcaaaggtttagatcatacattgtagatcagtgattctctttt

SEQ ID NO: 127340 - DNA, 601 bp, Homo sapiens
gtgttacagcttttaaagatggcaccgacccaaagcgtgagcagtagcaaggatttattgcgaaaagcaaaggacaaagcttccacatcgtggaaggggaccgagcgggttgccactactggctggggtggccagcatttattcccttatttgtcccctcccaaattcgatttctgtcctatcagaatgccctttttttaatcctccacaactggctacttttagactcctgctgattggtgcgttttacagagtgctgattagtgcattttacagagcgctgattggtgtgttttacagagcactaattggtgcattttaccatcctcttgctagctacagagcgctgattggtgcgttttacattcctaactagagtgctgattggtgtgttttacaatcctcttataagacagaaaagctctccaagtccccattctacccaggaagtccagctggcttcacctctcagcaccatggctgaatgcaatggtatcagggaaggagaaaagatgaagtctttggacaactgataaaaaatgatcagtctttaggtcgagcatggtggctcacgcctgtaattgcagaactttgggaggct

SEQ ID NO: 127341 - DNA, 315 bp, Homo sapiens
catttattcgatgcatacttctgaagatcatacccaaccatggactaggatggccaatgtccaagttagttggctatattatatggaggctacctggttaaaaaacaacaacaaaaaaaggactttaatagactcttttgcaagaatttgtatacacctatgtatttttgcagacttccagtatgtggtaactcagtatcagactcttggttagaaatgatcagtgcctccattgtaactaatacctccacaaataaaattacccaaggaggtattagttacaatgtgcatcgataacaccggccgagctcgatt

SEQ ID NO: 127342 - DNA, 893 bp, Homo sapiens
tcatccttaagggtacattgcttccagacggggtcacactatgttgtccaggctcatcttgaacttctgacgtcaagtgattctcctacctcaatctcccaaaatgtatggattgcaagaatatgccaccacaactggtctcttttagctattttgtaatatgagataacttttcattaattattattattctactgtgtaataaaaaacaaaaacttatttcccctaaaaaaaaaaaaaaaaaaaaaaaaaaaaaaaaaaaaaaaaaaaaagggggggggggcggggaaggaaaaaaaaaaaaaggggggggggggggcgggggccaggaggggagggggtgggggcaagagaaaaccggaaaaaggaacggggtggttgggtcctctcaacacaataaaaaggcggcgccgggggggaaacgcagggggggttcatgagcaccaaaatgccaaagggggggtgtcgagcgccgaaccggtgggaacaacacaccggaaggtcacggagattccaattataataccgccgcccgcgcgcggtgaggcaaataaaaataacatcaccacgacagctagcagaaaacaacacaaccaacatgcaaagatacgaccacgccaaaacacacgcgaacggcaagaagagagagacaccagggagaagaacacgcacgaacgaacgaagaaggagcgcgacgaggcaagaggggcgaggcggaggaacaagaaaagagaaaggagaacaagagaaaacaaacgaaagaagagaggagaagcacgaacgaaagaaaaaagaagaacgaggcagagaagaagagaagaaaacgaacagcaaggaagcagaaaaaaagagaagaaacgaaggacgaaggaaaaaagcagctagaaaagagg

SEQ ID NO: 127343 - DNA, 514 bp, Homo sapiens
tcatccttaagggtacattgcttccagacggggtcacactatgttgtccaggctcatcttgaacttctgacgtcaagtgattctcctacctcaatctcccaaaatgtatggattgcaagaatatgccaccacaactggtctcttttagctattttgtaatatgagataacttttcattaattattattattctactgtgtaataaaaaacaaaaacttatttcccctatctaatcataacacaatacctgtgaagcagccttttcccatcctcctgcttcagtctctggtaacccctgttgtactctttgcttctatcaaccctttttttcaggttcctcaaatgagtgagataataagatcataaagtatttgtgtttctctatgtggcttattttacttaacatggtatgctcaaggttcatccatgctcttttaactgacagaattttatgctttcttatggctgaatagtatttcgctgtgtatatatagtacattttccttatccattt

SEQ ID NO: 127344 - DNA, 481 bp, Homo sapiens
tgttgggattataggggtgagcctctgcgcccagccaaaacatattcatttgaaactgcctatttttattttcagtgttatggtaacattgattccctatagctttcatctacctctactcatgagtaggtgacgtttttctaccactcaacctgtacacattttaaaaaagctgtcccagctggttttgaaatgtagaagtgtgccttgagttgaaaaataagtaggaaagtacaggtctttagataactaactgtggcatggagtcagtttatactttctttttcaggtgaatacattatagttcttcagtgtgacttgaagtagagcattcacagtgtgcgtgaaaacatgcagtaccacttgtgtctggctgagggggaagtagggagtggtctcataggtggatttttaggaagttctatgttttgaacagaattcagcaattagtggaattatgttgttggttgttaggaagtat

SEQ ID NO: 127345 - DNA, 604 bp, Homo sapiens
ccatgttcatggatgggaagaatcaatactataaaactggcaattatccccagtccatctggaaatcaagtgtaatcctttaaaatttccaatagattttctttcataaattatacattttggatcctaaaaatcatttgaaaagaaaaaaggccaagaagagccacaataatcttcttccttttaaagaaggtgaagaattgtcctaacatacaatagtgtggtacaggaacaggcaaacagatgaagtgaatgagacacaaaggttagaagcaaacctgtctttgtatgggaatgtggtatgtggtagaggtcacattacaaaccacagaaaaagcatggaaggttcattaagtggttctgaaacatggaaaggtaaaattgaagacaaaggtgaaagaaacaaagatctttaacactttaaaaagcaaatatatgaaaatgtctttatgacctctggccaaagatttcttaaaacacaaaagcaaagccataaaagaatatgctgctaaattaactaatgaaactttaaaaaaaatttttttcatgaagaaacaacgtaaagtacaaagacaagccacagactggaagaaggtatctgcaa

SEQ ID NO: 127346 - DNA, 458 bp, Homo sapiens
aaaatttgccaggcatggcagcatgcacctgtagtcccagctactcaggaggctgaggcaggagaactgcttgaatccgggaggtggaggttgcagtgagccaagatcgtgccactgcactccagcctgggcaacagagcgagactccatctccaaaaaaagacacaaaaggaagtagaaggaggctgggcacagtggctcatcctagcactttgcaatgccttggcaggtggatcacttgagcccagaagttcgagatcagcctgggcaacatggtgagacccccgtctctacaaaataaatacaaaaactagctgggcatggtggtgaggaccttagtcccagctactcaggaggctgaggtgggaggatcgcttgaggcaaggcggcagaggttgcagtgagctgagatggtgccactgcactgcagcctggaagacagccagaccctggctcgg

SEQ ID NO: 127347 - DNA, 219 bp, Homo sapiens
agagaagggaaggggaataacagtcacctcagaggtgctatgggaaacagtggcatcggcaaacctgctggtggaggggaggactcagaggaatctgatgaagaagtcaatgaagtcaagtgtcagctatcagccaatatgaggctacgccaagcctacagcctccgggctcctggctcacggcccctccctggcctccctgtctcagtctcaccctat

SEQ ID NO: 127348 - DNA, 467 bp, Homo sapiens
ttctccccacaaccccttcaccaccaatggcaggccaggaaggtttttctaagtaggatagaatcactttgccccaaggaacctgagaagaaactttaggccacagccttggtacacagaagaaagtgtcaccatctcgtcctgtctctaccacccctcacattacagatcacttctctatatcacggacacggatacacaaactcctttcttttccaaccctgctccctcctgggacagtctcttgaacataaggaaataggtcagaaaaccagaaggggagaactagaaataaagttgtttctctcttttcctaccaaataggagctagactggacatcacagtcagaagccagcttgaggggagggggacaatcgcctctccagatcaggcctcagaaatcgtgggtagtttccgtcaacatgggaaacttaagaaaaagtagcatgaactacgagactgaaac

SEQ ID NO: 127349 - DNA, 462 bp, Homo sapiens
gaggtctcccagcatcttaaacatatgtcccaacccaaactcttgattctgcctttaatcacctccccttgatcttctcactcgccttcccttccctccagccttctcgattcttccagatgcccaagccaaaatcctcagggttgcccttgactcctctctttctctctcacctcccatcctatatatcaacaaaatttcttggcatcatctaaaaggaattccagaagttgtccatttctcaccaccttggagaggtaatggtccaagtaacattatttcatatctgggttactgtctcctaataggtcacctagtttccattccttaggccctattgtacaggttactcttttggaatatttaatccaattatatcattcctttgtttgaaatcccccataggctcccccttttgttcagcataaaagccagactccttcaaagccataaatggcttac

SEQ ID NO: 127350 - DNA, 393 bp, Homo sapiens
aaacttgactatagagggtgtggcaaggccttcatcagtggactgcatactgagccgccacattctgactcacacaggagaaaagccgtttgtatgtgcagccaatggctgtgatcaaaaattacccaaatcttaactttcagaaaaggtaacaaactcctaatgcatgtggcagtacatgtttgctccagctgccctgtccctctaccctgcgtggactccagaaccgcccatgttggagcccacctcctttccccacccctgcccactttccactcacacctcaggcaaaccctgcattttgctgttcctggaaaatggcttatgcttggatacctctgggcctctgttgatgcgtctgtctgttccttgtggaaattcttcctgacattc

SEQ ID NO: 127351 - DNA, 356 bp, Homo sapiens
gtagttgggaatacaggcatgcaccaccatggctggctaattttgtattttagtagagacgggggttcaccatgttggccaggctggtctcgaactcctgacctcaagtgatccacctgcctcggcctcctaaagtgctgggattacaggtgtgagccactgtgtctggccacaaatcctcaaattctaacattttaatgcaactactatgggtcaagtttctcaagcatatgataggctcttttaatatgtcattttctttcttattttatttcagggaatgttacagtaggtagttagacataaacaaggcaggagaggcccctccacccccagccaggaatgtcaagtgacta

SEQ ID NO: 127352 - DNA, 431 bp, Homo sapiens
gaaaagctctgatttaacccgtctttaagcctggtatgcatattcctctctgttccggccaccttgtctagacacactacactgaggcagtgcccatcttagatgatgttgatacattgtcaaaaaatgggcaaaccaggtgcggcggctcacacttgtaatcccagcacttttggaagctgatgccgacagataaccagaggtgaggaggttgagatcagcctggccaacatggtgaaacctgtctgtttttctgtaaaaatacagaaacaatgagctgggcgtgggagtgcacttctgtaatcccagctacttgtggggctgaggcaggagaatcacttgaaccgggaaggtggaggttccagtgagccgagatcacgacactacactccagcctgggcgacagagtgagtctccgactcaaaaaaaaa

SEQ ID NO: 127353 - DNA, 240 bp, Homo sapiens
tgaatacatgtataccaagtaaaggagttaaactggtaattaaaatgattccaagaaagaaaaattcagattcaggtgattttacaggtaaattctatcaagtactttaaaaagaggtgacataaaacattcataaagtgttacagatttcagaagctgcaacaattttcaattcattgtgagttgccccaatgctaactccagacaaaaatatcacaaaaaagaaaaccacgtatcaat

SEQ ID NO: 127354 - DNA, 328 bp, Homo sapiens
gggtacaatggtacgatctcagctcactgcaacctctacgtcccgggttcaagcggttctcctgccttagcctccccagtagctgggattactggcatgaaccaccacacctggctaattttgtgtttttagtagagatggggtttcttcatgttggtcaggctggtctcgaactcccaacctcaggtgatctgcctgccttggcctcccaaagtactgggattacagggttgagccactgtgcctggcccaggcccacggagttttaagaggcttcctgtggcagtggcatccagacggagtgcagaaactcaaagttgaaggccag

SEQ ID NO: 127355 - DNA, 665 bp, Homo sapiens
tacagagacagttttaaataatagaaactgtgggtctgtttatttacttgcttttatgagcagtaatatttgttataggccaaccttgatgttaaggaaacctctttttttttgtagacagagttatttcctaagaggtttcctgggtacatatgcagtgaaattcttggtttgtctagtttcccaaataaaacccaatgtaatagaatatcacttttctggagttacaaaaatgacttgtttattcatttttttaaaatgtctcagaatatctaccaaaatagccattcttagacacagtatggcagatattttgaattataattaaaaaagaattgtacagcttcctatgtaaaaacaaaaaggctgctctttgatttctctgttttataatattaaatatcagaaaactataaatcagtgtccacattttgagtttgtttttctgctactggattcatttttaaaatgataattcttttaaaaaagagtttgaataccacaaatgtatgtgatgtgaaaatgaggtccttagttcattttctttcccactttctgccaatcatagcttccagcggtgactacttttaaccttggaatgtatagatctttttctatacatgtgacatatacaagatgattttgggggggcttaagtaaaaata

SEQ ID NO: 127356 - DNA, 518 bp, Homo sapiens
  misc_feature (4)..(4): n is a, c, g, or t
gganccccactactccacggttggctggtaataagaacacaaagagagactggtatcttggaagctgagagaggatggatgtcatagagagacatgttgtcgagacactcaaataaagagacaataataaagatagtaagtgaccacaccgaaactgagaggtaaaatacgttggtaaatgtggtgaaaagatttttaccacagttgagagaaaaggtagctcatcagcagttaaaaggtagctgattacagaatgctgaagaaaacttaggaagttaaaggaatgaaaaaaaacctatgcacactacaacttttcataatatcttgtctatgaaagaaaaaggggacagagaatgacacatagaaggaaatggataacttttagaaatcctgatggtggtaatgagacaaacttgtgcaagtttatacaatgaaacaaaagaaaccatggctaaatacttacataagagagtgaataaatgacgaacatgtaagtatttagccaaccgtggactagt

SEQ ID NO: 127357 - DNA, 745 bp, Homo sapiens
tatcatgaaaatccatctgtggaaggagtaacaagctgcttttagaaacttgatttctttttattctcccaagtatttggcttaaatatttctttgaaacatcacttaattttttcaaatatgtggtttaattttctaggaagtaacgactaaacttttaacaagacaaattgaataatacagttttacagtaggtttttcaagtacgacccattcacattcttctgatgagcctttgatcaagtctttcactgctgggcagtcttacctcacagatttaggatatgtcagggacatctgtgtcctcctaaatctgtattggagagaatattcagggaacatacatggtggtgatagaatcatggtatggggaatggtctgaattcaccaccaatgaacacctgaactctcttcattcatttatcttctagttcctcactgagcacctaccgtgttgatcaggtggagagaacactccctggcctcttgaaactaactttctactttcccagttctgcatcagaatccttgttctatgccagtgccaagtcacatagagctaaaaaatattcttcttggtaatcatgcacaggctgtagccttcaaaataaaattattcttcgtgctaaaaggatggtgttttctgtcattatattgtttctgcagtatgcttgttcagttatgtaaactcattttctgtgacatttataggatcctggcctagaatgcaggtttaaaggaggaa

SEQ ID NO: 127358 - DNA, 217 bp, Homo sapiens
ttccccctaaaaatcccgttctcccaaagtgctgggattacagatgtgagccaacgtgcctggccactccacacatttgatacattatgttccgtttttattcactttgatgccttctaattttctttgggactttctctttgatccatggactgtttagatgtgtgttgtttgagttgcagttgttgggagatgctcctattacctttctattatt

SEQ ID NO: 127359 - DNA, 545 bp, Homo sapiens
aaactttaaatgtttcattggagagattaatagttttcctcttgaccctttcttgtgacatgtttgtgagatgtttgaagatctctcaggttaaaaaaaaaattattgtattttaattcctgtatttttagtgaatttcatggagctttttttaaggaggtatctaaggttttgtaatactgtttttctgcttatttattgattcactaactctctgcttttatttttttctgagtttgcagaattcacaaattgttaatcacttaagaaatctgattaatgctctttgggggaagttgtcttcattgtctgcatcttttgcttgggtggaatttgtcagactccttttaatttctcctcttcccatctggtttgctttccctgtcttagtaaagcacagatttttttatttacagattttaatttattcactctaaattacagctacttttttatatagctcttactacatactgcaaagagaaagactgatctaattatctttttagttaaagggagaattcattcatttccctgtgaagtat

SEQ ID NO: 127360 - DNA, 320 bp, Homo sapiens
ttcagttttagggaattctgctagttttccaaagaggttgtgctcatgcattttcatcagttccagctgctgcacatcctcatcaccacttagaattgtcatgacaggccaggtgcgcgggctcatgcctgtaatcccagcactttgggaggccaaggcaggtggatcgcttgaacccaggaggcggagattgccgtaagccaagatcatgccaccgtactccagcctgggcaacagggtgagactctgtttcaaaaataaataaataaataaataaaagcaagcaaacaaacttactgaaacaacacagaccccaaaag

SEQ ID NO: 127361 - DNA, 661 bp, Homo sapiens
tctgagggagccggaagatagacggcgaagctgaatcccacagtactgagttcagcagaggttaggaactctggccaacctcacagaggggatttcatgtgtcagtgtcagtggtcgagaaataatgaaattggaactgaaaagtgattgagccggtacctgttactgtgggtgcaaaaggctgcgatacacgtgggatttggctcgctgaagctggaaactgtttggattcttgtggagcactctgacctctaactctctctatcatctctctaggaaaccgtatcacccaaaactggaagctttcattagtcacatgtcaaaaggatccggagcctctttcgaaagccccttgaactccttgcctctttacccaaatcacccattgtgtgagatgggagagctcacacagacaggtatgtgtgacccccatgcgctcaggggttcccccacccgctcttctgcttgcataccttccgagcagttctcctgggcggggtgctgtgcagctcagagcgggtaagcaaggactggctctgcaaggagctcggtcaccagggcctctaaataaacatcagagttctcaaaactaaatagaacctttctccttcttacaaaaacaatacgtgttcatgaaaataatttaggaaagacaagtaaa

SEQ ID NO: 127362 - DNA, 525 bp, Homo sapiens
cgccgggaggagctggcggcgagcgccgagccgggcgcgcagcgacggagctggggccggcctgggaccatgggcgtgagtgcaatctacggatcagtctctgatggtgggtcgttaacctcagtggggactccaagatttccatgaagaaaatcagttgtcttcattcaagaattggggtctggctcagaattcctgcagctggtgaaaatctgttttctagaagaggtttaattaatgcctgcagtctgccctgagctgtagccccagtcccctttgacatcacccattttccaatggaggaagcttccagggagacagggtaccacttggagagcccccatggccacttcagattgcagccattgccacttcatctcacctgaggtgctgaggggagagtctagtttacagggcatccttttgtcacctgctcgccacccttatgcccctgggtgtgaccagcttcctcagaaagagctgtaatcaatagcatattgattaaaaagcatattaagatgaaaa

SEQ ID NO: 127363 - DNA, 2981 bp, Homo sapiens
cgccgggaggagctggcggcgagcgccgagccgggcgcgcagcgacggagctggggccggcctgggaccatgggcggacatgttcccgatttgaggtgaaaccatgaagagaaaatagaatacttaataatgcttttccgcaaccgcttcttgctgctgctggccctggctgcgctgctggcctttgtgagcctcagcctgcagttcttccacctgatcccggtgtcgactcctaagaatggaatgagtagcaagagtcgaaagagaatcatgcccgaccctgtgacggagccccctgtgacagaccccgtttatgaagctcttttgtactgcaacatccccagcgtggccgagcgcagcatggaaggtcatgccccgcatcattttaagctggtctcagtgcatgtgttcattcgccacggagacaggtacccactgtatgtcattcccaaaacaaagcgaccagaaattgactgcactctggtggctaacaggaaaccgtatcacccaaaactggaagctttcattagtcacatgtcaaaaggatccggagcctctttcgaaagccccttgaactccttgcctctttacccaaatcacccattgtgtgagatgggagagctcacacagacaggagttgtgcagcatttgcagaacggtcagctgctgagggatatctatctaaagaaacacaaactcctgcccaatgattggtctgcagaccagctctatttagagaccactgggaaaagccggaccctacaaagtgggctggccttgctttatggctttctcccagattttgactggaagaagatttatttcaggcaccagccaagtgcgctgttctgctctggaagctgctattgcccggtaagaaaccagtatctggaaaaggagcagcgtcgtcagtacctcctacgtttgaaaaacagccagctggagaagacctacggggagatggccaagatcgtggatgtccccaccaagcagcttagagctgccaaccccatagactccatgctctgccacttctgccacaatgtcagctttccctgtaccagaaatggctgtgttgacatggagcacttcaaggtaattaagacccatcagatcgaggatgaaagggaaagacgggagaagaaattgtacttcgggtattctctcctgggtgcccaccccatcctgaaccaaaccatcggccggatgcagcgtgccaccgagggcaggaaagaagagctctttgccctctactctgctcatgatgtcactctgtcaccagttctcagtgccttgggcctttcagaagccaggttcccaaggtttgcagccaggttgaacattccgtccggattctttacaatggcgtcgatgtcacattccacacctctttctgccaagaccaccacaagcgttctcccaagcccatgtgcccgcttgaaaacttggtccgctttgtgaaaagggacatgtttgtagccctgggtggcagtggtacaaattattatgatgcatgtcacagggaaggattctaaaaggtatgcagtacagcagtatagaatccatgccaatacagagcatagggaaaggtccacttctagttttgtctgttactaagggtagaagattattgctttttaaaggctaaatattgtttgtgggaaccacagatggttggggttgaacagtaagcacattgctgcaatgtggtacgtgaattgcttggtacaaaatggccagttcacagaggaatagaaggtactttatcatagccagacttcgcttagaatgccagaataatatagttcaagacctgaagttgccaatccaagtttgcactcttctggcctgccccatgttactatgtgatggaaccagcacacctcaaccaaaatttttttaatcttagacatttttaccttgtccttgttaagaatttcttgaagtgatttatctaaaataaaggttggcaaactttttctgtaaagggccagattgtaaatatttcagactgtgtggaccaaaaggccacatacagtctctgtcataactactcaactctgtttctgaagcaggaaagccaccacagacagtacataaaggaatatgtgtagctgggttcccaggccggacaaaacagatggtgaccagatttggcccctgggctgtagtttgctgacccctcatctaaaaaataggctatactacaattgcacttccagcactttgagaacgagttgaataccaagaattattcaatggttcctccagtaacttctgctagaaacacagaatttggtctgtatctgacactagaacaaaacttgagggtaaataaacattgaattagaatgaatcatagaaaactgattagaagaatacttgatgtttatgatgattgtggtacaagatagttttaagtatgttctaaatatttgtctgctgtagtctatttgctgtatatgctgaaatttttgtatgccatttagtatttttatagtttaggaaaatattttctaagaccagttttagatgactcttattcctgtagtaatattcaatttgctgtacctgcttggtggttagaaggaggctagaagatgaattcaggcactttcttccaataaaactaattatggctcattccctttgacaagctgtagaactggattcatttttaaaccattttcatcagtttcaaatggtaaattctgattgatttttaaatgcgtttttggaagaactttgctattagatagtttacagatctttataaggtgttttatatattagaagcaattataattacatctgtgatttctgaactaatggtgctaattcagagaaatggaaagtgaaagtgagattctctgttgtcatcggcattccaactttttctctttgtttttgtccagtgttgcatttgaatatgtctgtttctataaataaattttttaagaatacctatactatacaactaa

SEQ ID NO: 127364 - DNA, 2847 bp, Homo sapiens
cagtgctccacatgaggagtcaatgagatatttcatcaaaagcatggagcacagcgtctgccccagttcagcagtccacctgatcccggtgtcgactcctaagaatggaatgagtagcaagagtcgaaagagaatcatgcccgaccctgtgacggagccccctgtgacagaccccgtttatgaagctcttttgtactgcaacatccccagcgtggccgagcgcagcatggaaggtcatgccccgcatcattttaagctggtctcagtgcatgtgttcattcgccacggagacaggtacccactgtatgtcattcccaaaacaaagcgaccagaaattgactgcactctggtggctaacaggaaaccgtatcacccaaaactggaagctttcattagtcacatgtcaaaaggatccggagcctctttcgaaagccccttgaactccttgcctctttacccaaatcacccattgtgtgagatgggagagctcacacagacaggagttgtgcagcatttgcagaacggtcagctgctgagggatatctatctaaagaaacacaaactcctgcccaatgattggtctgcagaccagctctatttagagaccactgggaaaagccggaccctacaaagtgggctggccttgctttatggctttctcccagattttgactggaagaagatttatttcaggcaccagccaagtgcgctgttctgctctggaagctgctattgcccggtaagaaaccagtatctggaaaaggagcagcgtcgtcagtacctcctacgtttgaaaaacagccagctggagaagacctacggggagatggccaagatcgtggatgtccccaccaagcagcttagagctgccaaccccatagactccatgctctgccacttctgccacaatgtcagctttccctgtaccagaaatggctgtgttgacatggagcacttcaaggtaattaagacccatcagatcgaggatgaaagggaaagacgggagaagaaattgtacttcgggtattctctcctgggtgcccaccccatcctgaaccaaaccatcggccggatgcagcgtgccaccgagggcaggaaagaagagctctttgccctctactctgctcatgatgtcactctgtcaccagttctcagtgccttgggcctttcagaagccaggttcccaaggtttgcagccaggttgaacattccgtccggattctttacaatggcgtcgatgtcacattccacacctctttctgccaagaccaccacaagcgttctcccaagcccatgtgcccgcttgaaaacttggtccgctttgtgaaaagggacatgtttgtagccctgggtggcagtggtacaaattattatgatgcatgtcacagggaaggattctaaaaggtatgcagtacagcagtatagaatccatgccaatacagagcatagggaaaggtccacttctagttttgtctgttactaagggtagaagattattgctttttaaaggctaaatattgtttgtgggaaccacagatggttggggttgaacagtaagcacattgctgcaatgtggtacgtgaattgcttggtacaaaatggccagttcacagaggaatagaaggtactttatcatagccagacttcgcttagaatgccagaataatatagttcaagacctgaagttgccaatccaagtttgcactcttctggcctgccccatgttactatgtgatggaaccagcacacctcaaccaaaatttttttaatcttagacatttttaccttgtccttgttaagaatttcttgaagtgatttatctaaaataaaggttggcaaactttttctgtaaagggccagattgtaaatatttcagactgtgtggaccaaaaggccacatacagtctctgtcataactactcaactctgtttctgaagcaggaaagccaccacagacagtacataaaggaatatgtgtagctgggttcccaggccggacaaaacagatggtgaccagatttggcccctgggctgtagtttgctgacccctcatctaaaaaataggctatactacaattgcacttccagcactttgagaacgagttgaataccaagaattattcaatggttcctccagtaacttctgctagaaacacagaatttggtctgtatctgacactagaacaaaacttgagggtaaataaacattgaattagaatgaatcatagaaaactgattagaagaatacttgatgtttatgatgattgtggtacaagatagttttaagtatgttctaaatatttgtctgctgtagtctatttgctgtatatgctgaaatttttgtatgccatttagtatttttatagtttaggaaaatattttctaagaccagttttagatgactcttattcctgtagtaatattcaatttgctgtacctgcttggtggttagaaggaggctagaagatgaattcaggcactttcttccaataaaactaattatggctcattccctttgacaagctgtagaactggattcatttttaaaccattttcatcagtttcaaatggtaaattctgattgatttttaaatgcgtttttggaagaactttgctattagatagtttacagatctttataaggtgttttatatattagaagcaattataattacatctgtgatttctgaactaatggtgctaattcagagaaatggaaagtgaaagtgagattctctgttgtcatcggcattccaactttttctctttgtttttgtccagtgttgcatttgaatatgtctgtttctataaataaattttttaagaatacctatactatacaactaa

SEQ ID NO: 127365 - DNA, 2763 bp, Homo sapiens
tctgagggagccggaagatagacggcgaagctgaatcccacagtactgagttcagcagaggttaggaactctggccaacctcacagaggggatttcatgtgtcagtgtcagtggtcgagaaataatgaaattggaactgaaaagtgattgagccggtacctgttactgtgggtgcaaaaggctgcgatacacgtgggatttggctcgctgaagctggaaactgtttggattcttgtggagcactctgacctctaactctctctatcatctctctaggaaaccgtatcacccaaaactggaagctttcattagtcacatgtcaaaaggatccggagcctctttcgaaagccccttgaactccttgcctctttacccaaatcacccattgtgtgagatgggagagctcacacagacaggagttgtgcagcatttgcagaacggtcagctgctgagggatatctatctaaagaaacacaaactcctgcccaatgattggtctgcagaccagctctatttagagaccactgggaaaagccggaccctacaaagtgggctggccttgctttatggctttctcccagattttgactggaagaagatttatttcaggcaccagccaagtgcgctgttctgctctggaagctgctattgcccggtaagaaaccagtatctggaaaaggagcagcgtcgtcagtacctcctacgtttgaaaaacagccagctggagaagacctacggggagatggccaagatcgtggatgtccccaccaagcagcttagagctgccaaccccatagactccatgctctgccacttctgccacaatgtcagctttccctgtaccagaaatggctgtgttgacatggagcacttcaaggtaattaagacccatcagatcgaggatgaaagggaaagacgggagaagaaattgtacttcgggtattctctcctgggtgcccaccccatcctgaaccaaaccatcggccggatgcagcgtgccaccgagggcaggaaagaagagctctttgccctctactctgctcatgatgtcactctgtcaccagttctcagtgccttgggcctttcagaagccaggttcccaaggtttgcagccaggttgaacattccgtccggattctttacaatggcgtcgatgtcacattccacacctctttctgccaagaccaccacaagcgttctcccaagcccatgtgcccgcttgaaaacttggtccgctttgtgaaaagggacatgtttgtagccctgggtggcagtggtacaaattattatgatgcatgtcacagggaaggattctaaaaggtatgcagtacagcagtatagaatccatgccaatacagagcatagggaaaggtccacttctagttttgtctgttactaagggtagaagattattgctttttaaaggctaaatattgtttgtgggaaccacagatggttggggttgaacagtaagcacattgctgcaatgtggtacgtgaattgcttggtacaaaatggccagttcacagaggaatagaaggtactttatcatagccagacttcgcttagaatgccagaataatatagttcaagacctgaagttgccaatccaagtttgcactcttctggcctgccccatgttactatgtgatggaaccagcacacctcaaccaaaatttttttaatcttagacatttttaccttgtccttgttaagaatttcttgaagtgatttatctaaaataaaggttggcaaactttttctgtaaagggccagattgtaaatatttcagactgtgtggaccaaaaggccacatacagtctctgtcataactactcaactctgtttctgaagcaggaaagccaccacagacagtacataaaggaatatgtgtagctgggttcccaggccggacaaaacagatggtgaccagatttggcccctgggctgtagtttgctgacccctcatctaaaaaataggctatactacaattgcacttccagcactttgagaacgagttgaataccaagaattattcaatggttcctccagtaacttctgctagaaacacagaatttggtctgtatctgacactagaacaaaacttgagggtaaataaacattgaattagaatgaatcatagaaaactgattagaagaatacttgatgtttatgatgattgtggtacaagatagttttaagtatgttctaaatatttgtctgctgtagtctatttgctgtatatgctgaaatttttgtatgccatttagtatttttatagtttaggaaaatattttctaagaccagttttagatgactcttattcctgtagtaatattcaatttgctgtacctgcttggtggttagaaggaggctagaagatgaattcaggcactttcttccaataaaactaattatggctcattccctttgacaagctgtagaactggattcatttttaaaccattttcatcagtttcaaatggtaaattctgattgatttttaaatgcgtttttggaagaactttgctattagatagtttacagatctttataaggtgttttatatattagaagcaattataattacatctgtgatttctgaactaatggtgctaattcagagaaatggaaagtgaaagtgagattctctgttgtcatcggcattccaactttttctctttgtttttgtccagtgttgcatttgaatatgtctgtttctataaataaattttttaagaatacctatactatacaactaa

SEQ ID NO: 127366 - DNA, 1161 bp, Homo sapiens
cgccgggaggagctggcggcgagcgccgagccgggcgcgcagcgacggagctggggccggcctgggaccatgggcggacatgttcccgatttgaggtgaaaccatgaagagaaaatagaatacttaataatgcttttccgcaaccgcttcttgctgctgctggccctggctgcgctgctggcctttgtgagcctcagcctgcagttcttccacctgatcccggtgtcgactcctaagaatggaatgagtagcaagagtcgaaagagaatcatgcccgaccctgtgacggagccccctgtgacagaccccgtttatgaagctcttttgtactgcaacatccccagcgtggccgagcgcagcatggaaggtcatgccccgcatcattttaagctggtctcagtgcatgtgttcattcgccacggagacaggtacccactgtatgtcattcccaaaacaaagcgaccagaaattgactgcactctggtggctaacaggaaaccgtatcacccaaaactggaagctttcattagtcacatgtcaaaaggatccggagcctctttcgaaagccccttgaactccttgcctctttacccaaatcacccattgtgtgagatgggagagctcacacagacaggagcataatcaacatactgttctacacttggcttttttccagtattctatctgggtatcaggagattgttccatatcatacagagaatgcatgtgtgttgacgagtctgtaaagcccccaggatcaggcagaacgtacccagcaggttatcagagaacattcggttggcaggctggggaggatggggtcaaggaggggactctccagcagtgaggagacagcagcaagcagggaatctgcagtcagccttcgcctgagcggtttcactgagcactcgctgcacactgaggaatgctggacaggagggaaaaacctctccttaggcccatgcaattacagatatcccctggctgggtgacttcgaaccctgagaccaaccagtcacaacactttccccagggaagaggccagtctggaggccaagtgcaaggcagatggtccaaaggccgtggttctcaaggccagggccccgctctgctcatccttcatgaataaccccaagaggctcccttcacaagctgttgtga

SEQ ID NO: 127367 - DNA, 620 bp, Homo sapiens
cgccgggaggagctggcggcgagcgccgagccgggcgcgcagcgacggagctggggccggcctgggaccatgggcgaaggcccgtgggtgtgaagctggcagtgcggagcccaccctttcaaacgggatgcgactgcggtcgggcttggcagtaacttaccctcctcagagtgagtgcaatctacggatcagtctctgatggtgggtcgttaacctcagtggggactccaagatttccatgaagaaaatcagttgtcttcattcaagaattggggtctggctcagaattcctgcagctggtgaaaatctgttttctagaagaggtttaattaatgcctgcagtctgccctgagctgtagccccagtcccctttgacatcacccattttccaatggaggaagcttccagggagacagggtaccacttggagagcccccatggccacttcagattgcagccattgccacttcatctcacctgaggtgctgaggggagagtctagtttacagggcatccttttgtcacctgctcgccacccttatgcccctgggtgtgaccagcttcctcagaaagagctgtaatcaatagcatattgattaaaaagcatattaagatgaaaa

SEQ ID NO: 127368 - DNA, 966 bp, Homo sapiens
cgccgggaggagctggcggcgagcgccgagccgggcgcgcagcgacggagctggggccggcctgggaccatgggcgtgagtgcaatctacggatcagtctctgatggtgggtcgttaacctcagtggggactccaagatttccatgaagaaaatcagttgtcttcattcaagaattggggtctggctcagaattcctgcagctggtgaaaatctgttttctagaagaggtttaattaatgcctgcagtctgtgagtaagagaaagggaggagagggagaaagagacatactactatctagaggtgggtgggagaaaggataggagaatgttcaaggtcctgaaaattcatagggggagattttggccccagaacctgtccctggacaaggttcctggttggtggataaggaagtgtgcccacattccagtgtaggggttaccagttaggagcaaagtcactgagataggaaaaatgaccccatgggaatctgaaatccatttgctgggcccatcattctggttttgagaaggccttgaaagccagctgagacttgggcttagcacggcaggagagcactgagctgtttgaagtttttgaatgaggtgtgtgcccttttggaaataatggcttgagcaagattggtctggggtttggcctgggaagccactttaccatggcttaatttataggccctgagctgtagccccagtcccctttgacatcacccattttccaatggaggaagcttccagggagacagggtaccacttggagagcccccatggccacttcagattgcagccattgccacttcatctcacctgaggtgctgaggggagagtctagtttacagggcatccttttgtcacctgctcgccacccttatgcccctgggtgtgaccagcttcctcagaaagagctgtaatcaatagcatattgattaaaaagcatattaagatgaaaa

SEQ ID NO: 127369 - DNA, 402 bp, Homo sapiens
agttaatgattaaaaaggcatggaagaagaactggatggcggcttggggagtagtttctgcagtcaggaggcacccttcacctcattcccttggcccacagtcatctgtgcatgcgtctgcccctccctccatcagtggagctccctctgagctgcgtactcgagggtggaggagagtttgggggaactcaaacatgtggtagtagagactgtagtaactttaaaattctctttgtatttgcagaatcatttccccaatttacacactcatgtttcagtttacagggcatccttttgtcacctgctcgccacccttatgcccctgggtgtgaccagcttcctcagaaagagctgtaatcaatagcatattgattaaaaagcatattaagatgaaaattattg

SEQ ID NO: 127370 - DNA, 3356 bp, Homo sapiens
cgccgggaggagctggcggcgagcgccgagccgggcgcgcagcgacggagctggggccggcctgggaccatgggcgccctctcccgcacggcccccgcactcccgccgctggattccagccgagattcaagctcccgggatcccccttcccgggcggtcctgagccggctagtctccagtgagtgcaatctacggatcagtctctgatggtgggtcgttaacctcagtggggactccaagatttccatgaagaaaatcagttgtcttcattcaagaattggggtctggctcagaattcctgcagctggtgaaaatctgttttctagaagaggtttaattaatgcctgcagtctgacatgttcccgatttgaggtgaaaccatgaagagaaaatagaatacttaataatgcttttccgcaaccgcttcttgctgctgctggccctggctgcgctgctggcctttgtgagcctcagcctgcagttctaattggaaaagaggtcaaaagaaggtgggcatcagaagtttaaaaatattccagatggcaaatgaattgtaaaatctgaatcctttccaaaaagtgtgtccacctgatcccggtgtcgactcctaagaatggaatgagtagcaagagtcgaaagagaatcatgcccgaccctgtgacggagccccctgtgacagaccccgtttatgaagctcttttgtactgcaacatccccagcgtggccgagcgcagcatggaaggtcatgccccgcatcattttaagctggtctcagtgcatgtgttcattcgccacggagacaggtacccactgtatgtcattcccaaaacaaagcgaccagaaattgactgcactctggtggctaacaggaaaccgtatcacccaaaactggaagctttcattagtcacatgtcaaaaggatccggagcctctttcgaaagccccttgaactccttgcctctttacccaaatcacccattgtgtgagatgggagagctcacacagacaggagttgtgcagcatttgcagaacggtcagctgctgagggatatctatctaaagaaacacaaactcctgcccaatgattggtctgcagaccagctctatttagagaccactgggaaaagccggaccctacaaagtgggctggccttgctttatggctttctcccagattttgactggaagaagatttatttcaggcaccagccaagtgcgctgttctgctctggaagctgctattgcccggtaagaaaccagtatctggaaaaggagcagcgtcgtcagtacctcctacgtttgaaaaacagccagctggagaagacctacggggagatggccaagatcgtggatgtccccaccaagcagcttagagctgccaaccccatagactccatgctctgccacttctgccacaatgtcagctttccctgtaccagaaatggctgtgttgacatggagcacttcaaggtaattaagacccatcagatcgaggatgaaagggaaagacgggagaagaaattgtacttcgggtattctctcctgggtgcccaccccatcctgaaccaaaccatcggccggatgcagcgtgccaccgagggcaggaaagaagagctctttgccctctactctgctcatgatgtcactctgtcaccagttctcagtgccttgggcctttcagaagccaggttcccaaggtttgcagccaggttgaacattccgtccggattctttacaatggcgtcgatgtcacattccacacctctttctgccaagaccaccacaagcgttctcccaagcccatgtgcccgcttgaaaacttggtccgctttgtgaaaagggacatgtttgtagccctgggtggcagtggtacaaattattatgatgcatgtcacagggaaggattctaaaaggtatgcagtacagcagtatagaatccatgccaatacagagcatagggaaaggtccacttctagttttgtctgttactaagggtagaagattattgctttttaaaggctaaatattgtttgtgggaaccacagatggttggggttgaacagtaagcacattgctgcaatgtggtacgtgaattgcttggtacaaaatggccagttcacagaggaatagaaggtactttatcatagccagacttcgcttagaatgccagaataatatagttcaagacctgaagttgccaatccaagtttgcactcttctggcctgccccatgttactatgtgatggaaccagcacacctcaaccaaaatttttttaatcttagacatttttaccttgtccttgttaagaatttcttgaagtgatttatctaaaataaaggttggcaaactttttctgtaaagggccagattgtaaatatttcagactgtgtggaccaaaaggccacatacagtctctgtcataactactcaactctgtttctgaagcaggaaagccaccacagacagtacataaaggaatatgtgtagctgggttcccaggccggacaaaacagatggtgaccagatttggcccctgggctgtagtttgctgacccctcatctaaaaaataggctatactacaattgcacttccagcactttgagaacgagttgaataccaagaattattcaatggttcctccagtaacttctgctagaaacacagaatttggtctgtatctgacactagaacaaaacttgagggtaaataaacattgaattagaatgaatcatagaaaactgattagaagaatacttgatgtttatgatgattgtggtacaagatagttttaagtatgttctaaatatttgtctgctgtagtctatttgctgtatatgctgaaatttttgtatgccatttagtatttttatagtttaggaaaatattttctaagaccagttttagatgactcttattcctgtagtaatattcaatttgctgtacctgcttggtggttagaaggaggctagaagatgaattcaggcactttcttccaataaaactaattatggctcattccctttgacaagctgtagaactggattcatttttaaaccattttcatcagtttcaaatggtaaattctgattgatttttaaatgcgtttttggaagaactttgctattagatagtttacagatctttataaggtgttttatatattagaagcaattataattacatctgtgatttctgaactaatggtgctaattcagagaaatggaaagtgaaagtgagattctctgttgtcatcggcattccaactttttctctttgtttttgtccagtgttgcatttgaatatgtctgtttctataaataaattttttaagaatacctatactatacaactaa

SEQ ID NO: 127371 - DNA, 3018 bp, Homo sapiens
cgccgggaggagctggcggcgagcgccgagccgggcgcgcagcgacggagctggggccggcctgggaccatgggcggacatgttcccgatttgaggtgaaaccatgaagagaaaatagaatacttaataatgcttttccgcaaccgcttcttgctgctgctggccctggctgcgctgctggcctttgtgagcctcagcctgcagttcttccacctgatcccggtgtcgactcctaagaatggaatgagtagcaagagtcgaaagagaatcatgcccgaccctgtgacggagccccctgtgacagaccccgtttatgaagctcttttgtactgcaacatccccagcgtggccgagcgcagcatggaaggtcatgccccgcatcattttaagctggtctcagtgcatgtgttcattcgccacggagacaggtacccactgtatgtcattcccaaaacaaagcgaccagaaattgactgcactctggtggctaacaggaaaccgtatcacccaaaactggaagctttcattagtcacatgtcaaaaggatccggagcctctttcgaaagccccttgaactccttgcctctttacccaaatcacccattgtgtgagatgggagagctcacacagacaggagttgtgcagcatttgcagaacggtcagctgctgagggatatctatctaaagaaacacaaactcctgcccaatgattggtctgcagaccagctctatttagagaccactgggaaaagccggaccctacaaagtgggctggccttgctttatggctttctcccagattttgactggaagaagatttatttcaggcaccagccaagtgcgctgttctgctctggaagctgctattgcccggtaagaaaccagtatctggaaaaggagcagcgtcgtcagtacctcctacgtttgaaaaacagccagctggagaagacctacggggagatggccaagatcgtggatgtccccaccaagcagcttagagctgccaaccccatagactccatgctctgccacttctgccacaatgtcagctttccctgtaccagaaatggctgtgttgacatggagcacttcaaggtaattaagacccatcagatcgaggatgaaagggaaagacgggagaagaaattgtacttcgggtattctctcctgggtgcccaccccatcctgaaccaaaccatcggccggatgcagcgtgccaccgagggcaggaaagaagagctctttgccctctactctgctcatgatgtcactctgtcaccagttctcagtgccttgggcctttcagaagccaggttcccaaggtttgcagccaggttgatctttgagctttggcaagacagagaaaagcccagtgaacattccgtccggattctttacaatggcgtcgatgtcacattccacacctctttctgccaagaccaccacaagcgttctcccaagcccatgtgcccgcttgaaaacttggtccgctttgtgaaaagggacatgtttgtagccctgggtggcagtggtacaaattattatgatgcatgtcacagggaaggattctaaaaggtatgcagtacagcagtatagaatccatgccaatacagagcatagggaaaggtccacttctagttttgtctgttactaagggtagaagattattgctttttaaaggctaaatattgtttgtgggaaccacagatggttggggttgaacagtaagcacattgctgcaatgtggtacgtgaattgcttggtacaaaatggccagttcacagaggaatagaaggtactttatcatagccagacttcgcttagaatgccagaataatatagttcaagacctgaagttgccaatccaagtttgcactcttctggcctgccccatgttactatgtgatggaaccagcacacctcaaccaaaatttttttaatcttagacatttttaccttgtccttgttaagaatttcttgaagtgatttatctaaaataaaggttggcaaactttttctgtaaagggccagattgtaaatatttcagactgtgtggaccaaaaggccacatacagtctctgtcataactactcaactctgtttctgaagcaggaaagccaccacagacagtacataaaggaatatgtgtagctgggttcccaggccggacaaaacagatggtgaccagatttggcccctgggctgtagtttgctgacccctcatctaaaaaataggctatactacaattgcacttccagcactttgagaacgagttgaataccaagaattattcaatggttcctccagtaacttctgctagaaacacagaatttggtctgtatctgacactagaacaaaacttgagggtaaataaacattgaattagaatgaatcatagaaaactgattagaagaatacttgatgtttatgatgattgtggtacaagatagttttaagtatgttctaaatatttgtctgctgtagtctatttgctgtatatgctgaaatttttgtatgccatttagtatttttatagtttaggaaaatattttctaagaccagttttagatgactcttattcctgtagtaatattcaatttgctgtacctgcttggtggttagaaggaggctagaagatgaattcaggcactttcttccaataaaactaattatggctcattccctttgacaagctgtagaactggattcatttttaaaccattttcatcagtttcaaatggtaaattctgattgatttttaaatgcgtttttggaagaactttgctattagatagtttacagatctttataaggtgttttatatattagaagcaattataattacatctgtgatttctgaactaatggtgctaattcagagaaatggaaagtgaaagtgagattctctgttgtcatcggcattccaactttttctctttgtttttgtccagtgttgcatttgaatatgtctgtttctataaataaattttttaagaatacctatactatacaactaa

SEQ ID NO: 127372 - DNA, 612 bp, Homo sapiens
ggcttggaaaggcttcctgagatgatgatgtctaatctgaatcttgcctaaagaattatttatttagtatccattaaaactgtggaatctttgcttcatgctgggaaattaaaggagaaggcagtgtctatctttgagggggattgttgtctaatttaagaaacaggttataaaacacaccatgtacacacaaagtggaatagggtatagactataacagaggtctaaaatttgttttaggaaaccaaaggaggaatccagatccttttggagggagttaagaaaggtggcctacccaagctgctattaagtgtattagcactgtgaatagagagatatgaagatatgtagaggaaggagtgactaattttgcctggaagagggtagaaatttcttaagacttcatggaggaggtggcatttgatctgagcactgaaaattaagtggaatgctcccaggtaggaagagtgaaataagaacagaagaaaatcccaagaagatgagatagcatgaaccaatgcttggggttgtgaacagctctggtgtatttagagaaagaaggtctactttggtttggctggaacttgcggggcactgataatggtttggatg

SEQ ID NO: 127373 - DNA, 621 bp, Homo sapiens
tatatgtctgttcttctattgagttggcaaatacaatgtatgtcttcaatgcaggtaaatacggtttaagaataatgttttaagactgaatttatgtttatggttcaaatcctttccctactatttagactaaaattagcaaatggactagaatatcaacatcttatgaaggtgaccaaatttcattttatcttcatctctagtcagtgattaagaacattcccagagtaaagtaattcctagaagaaactgagggtaaaattaaagaataaagggaaaataaaaacagtaatgagaaccctcttcttcacaattccagttcattcaattcttattcccgaaggacaatcaagggtaagcaagatgagtatagtgatgggacataataattggcttacacagattataaatgatgcatcacactaattaaactactaggcacagtggtacatgcctgtagtcccagccaattagaagtctggggcaggaggattacttaagcccaggagtttaaggccagcctgagaaacaaggcaagatcctctctaaaaaaaaaaaaaaaattagccgggcatggtagttactaaggaggctgaaggaaaaagattgtttgaaccagga

SEQ ID NO: 127374 - DNA, 826 bp, Homo sapiens
ccagagggtaactattatttttaacttttaaaaagcatataattgtcaggttgggcaattattatagggttgaggattgcctcatgtgtgaccttcctttcctattctacctacatgtctagttctctgtgttagtcttctgtccacttaaaatatcaattgaacagtaagctccacaaaggcagggcatagtatatacttactgagtatttcttgaacaaatgcacgcacatgtacctgtaattacccagggtttgggaaactagattttaaaaaatattttgaagggaaagggttgttactggctatacttaacttttaattttctccctccttaaatcaacatgttattcttcagcaatgatgtttacaaaaccaaataaaattagaattaaccatttgtttcccacttcagtgagtccgtacccagtggggtgatgtcactgtcatatttaggagaggccagatgatataattgcctttataactttctgttacaatttaaaagagcacagtgacttactaccagaaaagctttgtaccatcatattcttgtttatatgtagggaccacttaaccaagtggatacttttgtttagatttttaaaagttttagtttcatgtcttctaaactttaaaaatatcatcttattatatgatttattgttttgatctctctctatatatatatataattttatttttttgagatgcagtcggagtgcagtggcatgatctcagctcactgcaacctctgcctcctgggttcaagcgatcctcctgcctcagcctcccaagtatctgggattacaggtgtacacaacca

SEQ ID NO: 127375 - DNA, 287 bp, Homo sapiens
cggcctgcctcaggcaggaaggcctgcgtgagcctctccaacaatctgagtgaggcctaagcatgccaaggggctgaaggaatcagcgggtgatgcctgagaccacgcacactgaatcgacatcctgctgaaatcagggctccccgatgtgggccctcatctgggtgccacggaaggttctggtttaaatctacagtgtatgccttgaagctagggagaccccaggcagcatttcccaaagagcagcttccggagccctgagcccatgagatgctgtccatgaagtg

SEQ ID NO: 127376 - DNA, 3245 bp, Homo sapiens
gtggagccatcgaggggcacagagctctccgggattgggggtcagggcagcgatgcagatagatctccagtttgggacagagggagaacgattggatggactctccccccctcccaccccgcccactcacacactcctccccaccattactgggcaccaagactgggcatcagctgccgcgcggaccagcctgggcggagccacagcgcggggactgcttagcacctcatagtggctgctgcgtgctcccgagctcctgctcccagcgcaatcttcctggagctcccctacggtcggtgcctacctccgcccccaccaccccgctaattcccgtgcaaattccaccccagtaaccactttcagcggtcttcccacccagcttgcactccagcccatttcctgaacagtctcccttgcagttcccttgctgggtattttcaatcccatcaactttcgaaaataatctctactcactcttccattccatcaacctttgcgtgaacttctgtcctgagtgcgctgtcagcgggcagtcaagacagcgccctcccagctaaaaaatctgaccctttctggggagctcccttgcactagccttcgtgggggcctgcccagggagccccaagtggaggctggattgggttgggcctgagtgagactggcaacttccactttgctccagagagccggagttgggccccagttgcccactgggaacgccactgaatatatgggagggctgtatacgaaggcggggacccagcatggccagggcagcaaggggcaggtctgggagtgagggaatcccagcagtacatccttccacctcatcccacctgccccggcacttaggcctctggccacctgcctcccacaattccacaaccagggtctccccactaccaccctctctttgtttaaccatttcaacctaaagctcctcctctgggcccagtaacacagatttggggaggaggccaccctagaaatggctgcttaacagttaactgggaaaaaattgaagtgtttgaatctgattttatattgagtgactttttagaagtcacatgacctctctgagcctatttcatgtttataaaatagtgatactaatgtctgtttcaggggggtttaagcaaatcaagcttgatgtaggagaagccagtttgtggggcattgaacaaatgtttggccttttcccacgccacaccacggccatcataataaagccctgtggccagtcagtcccggctccatttctcacttatcagcagctacctaactactcacctttatggaactagctgcttgttaacaagccaaacgtacgtttacattcacaaccttttgctaatatggcatttagatccctaagactgtccgtctcacaattgtctggatcacacataaacataactggaacgtgaaaagcagatgaggcagacaggcctagcttcttaccaactttgtaatggggaaaaagttgtttactcccaatcctctgtttctttgtctgcaaaatgggggaaatagtagtgcttaccttattggactgagtaagaatacacataaatcactttgcagtacatgccagataggagctcaatacttggtagtggtacctagaggactggcaagcctatcccccaacatttgaaaacacaggctcagaagaaaaatgtccctgttctgtaaaatggataggggggacggtagcctaataattgtctagaattatggatcacttcctacgtgccaggggctgggctaggcgctttacacgtgacatcttattgcatcttcacaataaaaccagggagggaacactttttccattttaaagaagtaagtgttgacctaccagaaaacaaaacaaaacaagacaaaacaaaacccagggaaataagtaccattattaccctcattttacatatgaggaaatctaggtaagggaggtaacatagcttacccaagatctcacagctagtaatgggactccaggactttgcactccactgcagctctctaaagccttccagaattggacctaggactgtgacttgcccaggtagcggcagggcagggattaaaaccctcagctccctctactccctcctgcctcaatgctatttctaccaccctttattactttacaacagaaaaccttaagacagtggtttttaatctctccacagaggagttctcttgtaccttgattccatccctactcctctgccctaggtccccagggccctacctctgagactccgtggtccctgggctgccggtacaaggaggtgttgcatacctgtgcactgactgccttctggggctggcagaaggaagctactctgacctgggagttgctgaggaaggagtccaaggggattcctgtccaggggagactgtttgagctgtgtaccctccaggatgctgggagtcctggagcttcccattgtaccccctgatgtctgctggctgccatcgtggctctcatttggcactgatatggacagggctgcctagagcgaggggttagaagtaccctctgagccagacatccctttttcctttcctgtcctcctttaagggttataaactattctgaccatcagctatgtaggagtctccacttttctctctgaatggccagagttcaggtggtgggtgggaaaaagggaggtcaacttcagacacctggagagttaagagatatgccaactcagtagtgggctagtactctcttatctaggtaccttcctttatcctttggaaatagatttcccacattcctaagatcatctgaaaatctctggccaatgctgggcacagtggctcatgcctgtaatcccagcactttgggaggctgaggcgggtggatcacttgagaggccaagagttcgagaccagcctggccaacatgatgaaaccccgtctctatgaaaaatacaaaaattagccaagcatgatggtgccaacctgtaattccagctacttgggaggctgaagtatgagcattgcttgaacccaggaagcagaggttgcagtaagctgagattgggccactgcattccagcctgggtaatgaagtcggagtgaaactctgtttcaaaaaaaaaaaaggccagttgggcttggtggctcacacctgtaaaatcccagcactttgggaggccgaggcaggtggatctcttgagcccaggagttcgagaccagcctgggcaaagtggcaaagccctgtctct

SEQ ID NO: 127377 - DNA, 335 bp, Homo sapiens
tccaggcctccacctcccagctcatcaccccctggagcatctcggccctgcccagtggtattttaccaccttccatttgaggggatgcggtggagcagagattgtgttgtattcctctctgtccccacatttagcagagaagatgactgaggcgatatcgttcctcattcacactcctggcacctggtgatctcttagaggcatgctcagcctggactgaacactggtgatcacactagactcaacaccccacctgtcattcctctagttatctctagtcacttataatgatgtgccccagatccgatcaacttggcattcagtagttcaccata

SEQ ID NO: 127378 - DNA, 296 bp, Homo sapiens
gagccagccctccctgggttcaagcccccttaccagttgggtgtccctgggtatatctcttcaatgacaggacctcactttcctcctctgtaagctgtgggtacaagcatctctccttcctaaatggttattaggattacatgagctacacatggaagctgttcgggctgggacttggaggtgtccgccactgtcccaggcatctcaggtgattccttgctggagagcccagctagatgccctccctgtcgtttgctgtttcctgtaaatggtttctttaaagttctgcggctcag

SEQ ID NO: 127379 - DNA, 333 bp, Homo sapiens
agagtaaaaccctgtctcagttaaaaaaagaatgatctcacgtgcccatcgcccagcttggcaaaggttaatgatgtgtggccagtcatgcttcatctgtgtccccacccttggccaccaaccagatcattgcttctgaagtatttctaccagacagatatcaagacattttatccaatgttacaagtaaggaagctggcctggcgcagttgcctataatcccagcacattgagaggcctaggcaggtgaatcacttgaggtcaggactttgagactagcctggccaacatggtgaaaccccgactctactaaaaatataaaaattacacttt

SEQ ID NO: 127380 - DNA, 453 bp, Homo sapiens
gagccatactcctttcctcctcagggctctgcctggaaagttctctgcatgccttcctcgtctagcctggctgaaacactgcttcctctgagcccacgcgcccccctggctggattcctgttattgtcgacagtctcttagcaccacttactcccccccgcacaaccccccagagagctggcatcaatgggttatttgtgagagtctctcactgtctgtctcccccagtgggacatgggctccgtagccccagggactgtccatcttgtttccactagatccccaggacctggcacatagtaggcccttagcaagtgttagatgaatgtgccaacatatgattgtcattgccctaattaaacactttccatttcctactgcccctgggatgaaatgtaaactcctcagtgtggcaggcagttaaggcctgcaaggtccaacagaaacaattcc

SEQ ID NO: 127381 - DNA, 500 bp, Homo sapiens
ctgtgtgaagacagattctcttctccatatgtaatgccactggcaatacaaagtttttaatcatgggagaagctgacagggactctggcctgaataacatagaggttcctctttagtggtttccaagagacctctggggcctgttcagttcctggaggaaacagtccaataagggattgggaatttgcactcctcctcacttctttagagcgcatcaacccttcaagggatttctgtctgatgccccattttcctggtgatggggagaagatgggactacttgctggtggtgcaggagtgtgtgacactgtgctgctgcttgcctcagacaaaactgcttacaagggactggcagagagacggggctttccttgcttagcatcacccatagagtagagctgaaggaggcttcaaccctgccttttcttgggaagtcttcatgtattcaggaaagttttcactctgaagcaggggaatgtaggggccctgactgtgactga

SEQ ID NO: 127382 - DNA, 280 bp, Homo sapiens
ctcgtgttggtgccaagtcagtgctttcattgtttcttactgagatcgggtctagatgctctgtgaacaattgtgcttatggttatgtagacttttagaatccttggtgattgtcattctataattctctcctgttattttaatttaaagtaagtcttgaggccaggtgtggtggctcatgcctgtaatcccagcactttgagaggccgaggcgggtggatcacctaaggtcaggagtttgagaccagcctgaccaacatggtgaaaccccgtctcaact

SEQ ID NO: 127383 - DNA, 226 bp, Homo sapiens
cgtgagggtcttgttataataaaattaacaattaattactttcttttctccttccttcttgtcttccatccatctccttccatccatctccttccttccttccttccttccttccttccttccttccttccttcttacctatctacagcttagggaaaaagatgggacagattactatttagctttaggaaagtcttattttcttttattttaatttaatatttaa

SEQ ID NO: 127384 - DNA, 182 bp, Homo sapiens
tcctgactcttctctatatgctatctcatctcatgcgggtaccgtagctcgatattctgtgatcactgttcgctcaggcgtgtcaaagcatcccaataggaagcagacggcatgctcaaactaggacagttgtaggaggacctatttttaaaagggcctagttacaaaggggaattgcaaag

SEQ ID NO: 127385 - DNA, 451 bp, Homo sapiens
gatcctgattaagaggaagaggaagggttgatctgaagaacatagtgctgtggtggaggttgtgtagagttccatgaggtcactaagggacctgggaacacaggatattgggagagctgggaaaggggaatagggatgagatgcgggagcatgccaaagacaaaattactttgttgtcaaattttgcccacaaaaagaagagggattccacccctccttcacccagtcttgccctgtctcctttattcagctgcactgctggatgcttgcctggttcccagcctttaaggtttttagtctataagttcaacgttgttggaaacagctggcttcctttgggcaactttaaaccccccttgggggccaaagcgaaagggggttgggggcgcaagcaaacacgcgtcgcgcgcggccaggtcccttcctgctaagcgcagaatgcgcaaagggc

SEQ ID NO: 127386 - DNA, 762 bp, Homo sapiens
cactcatattattctcaaaattagttcatttttattattgagtagtatttcattgtactgtagggaggggaaaaactccctcccatcttctcagggtcccagctggccttgaagattaaattggcataggatagattaacaagagaaaagcatataaatttatgtaatacaaattttatgtggtgcaggagccctcataaagaaataaaaccaaaagaagtagagtcagttacttacatactgaattggacaaagactagtaaactgtgaaaatgtgactgtattttgcgggagccttaaaaaatagttattctaacaaggtctgtacaatattctcctggtctcaaacttctcgtcattgaagataaagatgtttgttgccttttcttccagtatagagagtgtctttcacactggaatccatctcctgctcttaagaaacagcacaaaggtcaatcacctttttgcacctgctgtttttcatgtgtctttaatttaaatagtatgccggaatggcatattttaaccccttcagtatgaatgtactactatacttcttctactgttactagatacttgggttgtttccaagttgtttttatattctcttgttggtaactatttgggttgtgtagatttttgtggtttgcttttgctgttgcatgcgtgttgtcgtgaacatctcctgtaagtgtgccagaatttctccaggagtaaaaatgctgagccatcggttgtgcacatgtttaactttccaaagtg

SEQ ID NO: 127387 - DNA, 881 bp, Homo sapiens
attgaaaaaaaattcagagtaaagtaacattagaagctgaaggtcaaggaaaattcccacaaaataattgtttttggctttaataccttccttaggaattatggttagctatggtttctcctgtgagtcttagaaataatttctatttcctcggaagccaaagatttaccaatattttcaattattctgaaattgtatgtgcaataagatttattggtttttatgatgcagataaataattatatgtcccatctcagccttcaattcaaacttttaaaatgtttggcttaaaaaaagaactctcaagcttctctcttcactgactcattttaaatgccctatataatgtgaacgatctcagttcatctcccgggatcattttaactaacacacattgtgcccttctccattttgatgagtggtaacagccaaagcctcagaagtgcgtttttgttgttacagtcgcttctattctcatcaagtaggtaaggtcaaattatatcgctgtcctgggagtcatccttttcatcacttattgcgtgtctctttgttgggtgagtaactccatttattaaactctggaataatgatttatggaagaaattgtggcattgatgagtgggcattcacttcgagaatcttgatgtgttgggatgttaaaaaggtagcaatcttgttttctcttttgttggcatgtctattcttctgactgctaatgcaactcaggtagaattcacatctcagtgtttaggttctcctttaggaaatactgtgaaaggcctagtggcttgtagtttcttttctttttttttttttcatttttttttaggagaaaaatgaaaaacatctctgatcacttctctagtgtttgtttatgaccc

SEQ ID NO: 127388 - DNA, 703 bp, Homo sapiens
gaaaaaacaatcctaaaatttttacggaaccacaaaagaccctgagtagccaaagcaatcctgatcaaaaagaacaaagctgggggcatcacactacttgacttgaaaatatattacaaagctgtagtaaccaattcagcaaggtattggtataaaaacagacagaccactgggacagaatagagaactcagaaataaatccatgtatttacagccaactgtttcagtaaaggtgccaagagcatacactggtgaaaggacaatctctttaataaatgatgctgggaaagctggatgtccataagcagaagaatgaaactagacccctatttctcactttatgcaaaagtcagctcagaatggattaaagacttaaatgtaaggtctgaaactgtaaaactacttgaagaaaacataagacaagaagctacaagaaaacaagaaagcttaaggacattgatacaggcaaagattttatggttaagacctcgaaagcatggataacaaaaacaaacaatagacaaatgggaatatattaaactaaggagctactgcccaacaaagaaaacaatcagcagaatgaagagacaacctgtagattgggagaaaatatttgcaaactattcatccaacaagggactaatatctagaatgtacaaggaactcaactcaaagacaagaaaaccaaataatcctattaaca

SEQ ID NO: 127389 - DNA, 327 bp, Homo sapiens
gcaggggaatggaatggaatggaatgcaatggaatggaatcatccggaatggaatggaatggaatgcaatggaatggaatggaatggaatcaacccgagtgcaatggaatggagtgaaatggaatggaatggaatggagacaaccagaatggattggaatataatggagtgtaagggaattgaatagaatcaatctgaatgtaatgaaatggaatggaacggaatggaatggaatggaatggaatggaatgaaatggaatggaatgcaatggaatggaatcaacccgagagcaatcgaatggaatcgaatggaatggaatgcaatgg

SEQ ID NO: 127390 - DNA, 193 bp, Homo sapiens
agaagtggcttttctgcagattgctgatagtggctagcgtttgcagagtccttgtagcctggagccaacagaggtgatatggaagcaaccatgtgtgtagggccttgtgtactggagcagtaagggcttccctctccgggggctctccagctcagtgattttatggattccttggcccctttgttccttggtg

SEQ ID NO: 127391 - DNA, 317 bp, Homo sapiens
aagcaaattggaggggccaggggctgggcggggggaatggggagtggctgctgctgggtacccggtctcctttcagagtgaggaaaatgttctgggacgagacagaggtggaggctgcacaatgatgcacgtgcactcaatgccactgttcacttttaaatggttagtttcatgttacatgaatttcacctcaataaattattgtttaaaggggtgaggggtaacaaacaggccccacatacccatcaaaataaaaacagtcgggtgggaggagcaggagaggttccccacccctcagagggagggcctaatgtgag

SEQ ID NO: 127392 - DNA, 631 bp, Homo sapiens
gataagaaaaattaaatctgctaatctttgcttagttactattccaccctaaaggtggaaagaaagctatcctagataaggtatttataaaagttaggccgtcaggtaaaataggcttgcttcttgttccgacctatccatgcgggaggccagccatagaggatgcttttttgactctgttccctaatgggttccaccctgaactcagtaattttaactaagaaacagtggttacattaaaaaggacaccctattgaaataaaatgcacctttctggaatttaattggctaccttgaaactcttttgtaaaggaaatttacatctataaaggaaatctcaatttgtagggatgtctgccaatgtacaatagaaactctaacctttttttaaatttaaataatcagtaatgcctttgtttaaggtgcttttctgtctatcttaagtgaacttttacttgagcagtttttttttttccctgggtttgagcaaatgatgaatcaatacttaggccgagaatcttagctctgtgcttatgaaatatacatggtttttttgtttcacctaagggattgtgtcaatttccctctcatagcaactgggaattgtggcaagttctctctttagaaatgc

SEQ ID NO: 127393 - DNA, 175 bp, Homo sapiens
atatatcttttagtggatatgtggctttctaatatgctaattagtccctgaaatattagtcactagttaatattcaaacaattaatatagagataacaataatctattaattatctgatcccttatgtttctcaagttaatgacagtagcaacttgataagttttgttccaacag

SEQ ID NO: 127394 - DNA, 710 bp, Homo sapiens
gctaactgctcgacttgcctcttaacagctctcacatcccccaaatgacaatactagcagccgtagtggtgaagactgcgtgtctcctgtgggccagccacctgccaggcacttgtttggttctgccagtcttgtcgtcagcctgaaagggaggcttggtggtcactgtttttgcagaagaggatgcttgggcttagggaggttatacaaccagatggtgagttgtggagccagcccccgagttgtgtctgttggattctacagtgcaagctgcaagcttttcccatactccagctagttgtcctttccttttagctcttacttggttctgggctacagaacctgctagtctgctgagtctgctttgttagacagccagcaagtaggtctgttagtgagggtttgggttctgtgcataggtttgtaataactctttgcagtgcttggagtcctttttgattcccttccttgcagctttggggcagtattaagttggtctgtgtgtggcagtgtctctttttttccctttcatggtttaggattatcacaccacatgtcagtaattataaaatgcagggctgagctcaggagccattgtgctctatgtggctgctaatccccatgctaaatggcaccaccaaggggccttttatgttcttgtctgttttcatagttaaacattccccccacccccaggccttcagctgtgt

SEQ ID NO: 127395 - DNA, 365 bp, Homo sapiens
gatttggaaatccccaggtcacataaggttacatactatacgctgcatttttaggtttaagtcttgcaatggctctccgcaccagtaaactcacaccatcaatcctttcgacgcgtacaacaaaggccaaggaatgtttatctggcgattccaaggtgtgaggttttacttctagtcgtctgagacacaccttgtcatgtttctgccgccaggaatcatgtaggaatgattccagtcgtttaaacctgagctcttttccttccctctgctcctcctttgccaaaagtgcctactttgactgggtggctttgaggccttgataagccttctgctttcaggagattttctggagccaaagggatttt

SEQ ID NO: 127396 - DNA, 301 bp, Homo sapiens
ccaaaatgcagctagaactggcttactcctctccaccccattgctacccccacagccactctcttctcttgccttctgtgagtcatcgcagttatctattaaaggaaattgaatagtgtcactcccgacactgttgatactagtcagtcaacagacactttctaaaaaccgagttacaggcactgggaaaacagcagtaaatgccttcgtgaagcttgtattccagcgtggaagagagatgataagcatggaactacgcgcagcagggaattcaggtccagagcaggactacgaagaagac

SEQ ID NO: 127397 - DNA, 281 bp, Homo sapiens
aagttgacggccattgttctgtctggttctctctggactgagggtcctcaaggagacattctacatctttctttcaacaacacacagggacacctgatacctgcctgcactgtgcccatccagggatggactctcggactgacgttccagtggggagacagatgatgaacacagagatgaataaactatcgagatcattgcagaattatatgtgctttggagaaaattaaataagtggggtagagagaatcctgcacgtgtggttggggcagaaggtctgc

SEQ ID NO: 127398 - DNA, 678 bp, Homo sapiens
actctctcaggggactctacaacgtcacgttttcttaactatttaatttgtaatgccttctttattttggggaaattacaaaatagtgacacagtctccccagcccaagaaggaggagattttttttccccagtagggcggttgttttattttgactatatagtcttccctagaattgggggaataaatattggtatggttttttaatattgatttccctgggtagattatatttctgactgtaaaatatattattggatgtgcttctcaaatagattttacataatcagagaaattttgaccatgagcctaatttaatacttttttgctccttctgagtttacataaactttttatttttccatggagtttatcagaatcccaaatcctctgcttcagtcttcctttcatcctgatcttcaggatatttttcctggagttattattgttattttatagtatctatatagctactattttatagtagtatctactattttataatagattgtcctggaaaacctaccggtgcatgagagaaaagttcaaggctaaacttaaaggtactgggtagtcaacagctcatgtctctatcagaaaatgatggagactagaaagtaacatacatgagtggttatcattttaaaactagagaaagagtcatggaagttggtaggg

SEQ ID NO: 127399 - DNA, 186 bp, Homo sapiens
cagtggtgctagaataatgtgtggcacacagcaggtactatgcagcacttgctgttagagctgctccgtattgcccactgaactgtgcatgcaggttgacctggtctgtctctttaacccgtgcacctgcaaagtgactagagcatagtcgttgcacaataaatggctgttgaattattcaaacta

SEQ ID NO: 127400 - DNA, 473 bp, Homo sapiens
caaaggaccaagatgtgtatggttttcaaaagggaaaaaagtgaattttgtaaaaagtgaattttgtagaaagcaagcctgacaagagtttttcctgaagggttttacgtgtgggagagtacacttactttctaacctcagaggatagagctagggccaatatgtaaaagtggtggtcaatatgagaaagcaacacatagagttgctcacaaatgtaagggattattttggggaagaaatgagtttcccattactgatgatgttcaagcagaaacaagattacttacttagtgtgtggtgtgtatatatatatatatatatgtgtgtgtgtgtatgtgtgtgtgtgtatgtctctatatacacacacacttttggggattttttgagatgaagatttgctcttgttgcccaggctggagtgatctcggctcattttgctcttgttgcccagcaatggtgcgatcttggctcta

SEQ ID NO: 127401 - DNA, 882 bp, Homo sapiens
gttctgatctttagttattttccaatgacagaagttggagattaatcatttttcttctactcctaatgttttctcaattggaagattaaagagatgtcaacgaagtatcacctgattatttatcaagtgattgttacagagactgagtgccctcaggattacatatctttttttttctctcccacaattgtcatgattactagccaaatccaattagagagatactagagaagtactgagtatttactgagtacttacacattgtatatgtaatacaggtttcatagataatcacctctttagaaatgactggactataaagaggttggctaatgtattcaagatcacaccaataataaatagtggagtttgattttaaattgatggctgactgactctaaactcatgctttttcacattgcttctttcactcaacctaaggaaattgccaaaagttttggtcagaagctaacctcactttggacttttgagaactccaagctgccagccctgcattgctgagtcaatcaataaagagctttctttggacccattaacaaagagagaaagacaagtcttccacaccagagagcagagagcgcgagccacaacgatacgagcccggcacgggccactggacacacgagaaacaagctctggagggcgccggcgccctcaagagagtcttaagcacccgtgggggcgcggcggcccagagggtcgatagaagccgctgcacaagcgcgttccgcgagaaagcgctgtggaacacacagggcggggagctcccagagaaaaagccgggggggaaaaagcgtgtgtaacaccccagagggagtagggagcgcacgggggtacaccacgggggcatcaggcgcgaaa

SEQ ID NO: 127402 - DNA, 514 bp, Homo sapiens
catacactactactactagatcttgcccagcagacaacaaggagccatcgtgaaggctttccatctggagaatggctatggcagagatatgttttagaaagatggcctagctgggtgcggtggctcacgcctgtaatcccagcactttgggaggctgaggcgggtggatcacctgaggtcaggagttcaacaccagccttcccaacatgatgaaaccccatctctactaaaaatacaaaaattatctgggcattgtggcgggagcctgtaatcccagctacttgggaggctgaggcaagaaaatcgcttgaacctgggaggcagaggttgcagtgagctgagattgcaccattgcactctagcctgggcaacaagagtgaaactccgtctcaaaaaaaaaaaaaaaaaaaagaaagaaagaaagacggcctggcagaaggggtggaaggactggagtacaggaagacaagtagtccagacaactggtattcagggctcaatttaagatactgaa

SEQ ID NO: 127403 - DNA, 116 bp, Homo sapiens
ctaaagggactagcttgggctgaagcctcctcttcacacagaccactccatctttgtagcctagagtttggcacagaaccccaaagccctggagaggaacaagggagggattacag

SEQ ID NO: 127404 - DNA, 1097 bp, Homo sapiens
gcccatggagtgcagtggtgcgatcttggctcactgcaacctctgcctcctacttcaagcagttctcctgcctcagcctcctgagtagctgtgattacaggcgcctgccaccctgcccagctaatttttgtatttttagtagagatggggtttcaccatgttggccaggctggtctcaaactcctgacttcaggtgatccgcccacctcggcctcccaaagtgctgggattacaggcatgaaccactgtacctggcctctctatttttaatcatgtattttttcagcaaatacttaatgaataccaactacatcccaggcattgttctaagtgctcaggatagagtagtgtacaaaacaaaacccctgcctactcagaggaagacagagtaaatagataagagtaacaggaatgtgtgttagatggtacgaaccatcagtttgggaaggggatagagaggaggatggaaggggcatttataggtgggtaggtagctcaaggattctctctgaagaggtgaggccttactgagcagcagaaactgcaagcaggcttttgtggttagatgcgcatgtgtgcagtggagagtaaagaaagatgaggccagagtgtgtcggagcagattgtgtaagattttgtgggacctctgttttagtctgttctcacattgctatgaagaactacctgagactgggtaatttctaaagaaaagaggtttgattgactcatggttctgcaagctgtacaggaagcatggctgggaaggtctcaggaaaccttgaatggcggaaggcgaagaggaaggtggcacgtcttacatggccagagcaggaggaagagagatggggaagtgccccaccctttaaaagaaccagatctcatgagaactcactatcacaacagcagcaagggggaagtccactcccatgatccagtctcctcccagcaggctccttctccaacactcatgaaatttgggcagggacacaaattcaaaccatatcattctgttcctggcccctcccaaatctcatgaccttctcacattgcaaaatataatcagcccttctcagcagtccctcaagtcttaactcatt

SEQ ID NO: 127405 - DNA, 203 bp, Homo sapiens
cgggaagggtgcttgcacccaggaaatcgagtccagcctgggcaagacagtggggccaccatctcactatcttagctggctatggtggtgcacgactgtagttccagctacttgggagactgaggtgggaggcccacctgagccagggaagtcaaggctgcaaggagacatgatcatgccactgcactccagcctgggtgaca

SEQ ID NO: 127406 - DNA, 336 bp, Homo sapiens
gtgctttgtgctttgtgcatgtggtaggcagaacactaccatatgtccccacatacttacactagaccttggagcaagagcaagaacagcaaaagcacagcgcttttgaacccaaaagacaagctcccttcttcctgcgttgtccctccagctgcctctgctgaccaggtttagcatcatgtgctctgtaaaggaggaattctggagagtccagtccattattacagagctagtactgaagggtgagtttggagttaagaggcaataaattgataactggcacagaagccaaatataagagtattgactaaataatagctaagtacaagaacacag

SEQ ID NO: 127407 - DNA, 463 bp, Homo sapiens
cagagggaacagcaagtgcaaaggccctgggatgggaacttaacctcatttattaaaggaacaccaaggaggccagaatggctggagaatagtgagcagggggaatggtaagaggtgatgtcttcatgggtaatgcatgcccagtcactgctgggtttaatgatgatgataatggtgaggtaggcagagctgttaagagttttttgagtagaatggcaggctggcagctgtcactgctttctgcaaccctgtgcagttgtagcttctcttgcttttcactagcaggcccagcccagtatatctcttggtctctgacccattgctgatgtgggcagaggcaccctgacagcttcacacccattagctggcaggtagaaaaccagctgaagccctgagtgagagaaggcatgtgccctgaatgacacccttgtttccaccctcatggtgtttgcttgttccgctg

SEQ ID NO: 127408 - DNA, 234 bp, Homo sapiens
attacagatgtgagccactgcacctgacccctttaatagttcttttagtaaagattcattagcggtaaatttgtctttccttcacacactcttgaaaagcagttaagctgggtatataattcaggactgatggttgttttttgtttgtttgtttctcagaacctggaaaatattatttcgctgtctatggctcccactgtttttgtagcaaagactttatagataacatttcct

SEQ ID NO: 127409 - DNA, 257 bp, Homo sapiens
gaggagatgctccctgtcaagaaactgacttcgtgtctgccagtgctctaggtgtcaagctgaggacaggtttggcgccttctttgattgtctcctctgaaagaatagctgatcagcacacacaccttagtgctgctaagggcgtgcagcagcttctgaggatccgtcgggtccacaaggcaggtcatgcactggcaccccgctctgagctccctgagggcaggggctttgttgttttcttccagttgtcccacccc

SEQ ID NO: 127410 - DNA, 539 bp, Homo sapiens
ctgcagaccctccaggctctcccgggggaaggagccccatcagggccagcactgcgccactcccaacaaagcaggcaacctagcctgccagtggagacctcttttccgcctgggctccagctctagagcaaggccagtcacctcagccccaccatcaaacaccaggctccacatgggcactgcctcgctcaactgcgtggtggcgggtggcctggaacgctgctgtcatcactgcacgtggacacatcatcaacctctcagcgtgacgtgccctcgtgctttcaggtaaaacactacagagaaacttcctgttggcaggtggaccccgcactccctagggcctgatccgctccctctcttctgctttacgggcactgacaggaagtatctgatgcgcactcactcacaccagccacgcacatgttgtgagcaatcctgtgtggcctgctcccccctcctgaccggcccctcctgactggccccagcaccgcgtggaagaacatggaggagctcatctgtctgaggataggaagcagcag

SEQ ID NO: 127411 - DNA, 363 bp, Homo sapiens
acccatggctcttattaaatgcatatctgataggagtgtcccctttaaaaatacataaatgtagacggaaacgtacccggaaatgtaccccattgtagttgaatgtgcattatttcacttaaacatatttgcttaggatgggcaagaccacagctttcttgacagggcagcttttcttgatgaataactttacagtggctcctaaaagtgaattggttttcacatacatattttttcctggactcactttgaaatcagcatgtggttattagaagagaatatgccagttcctgtggaataggaaaaagaacaaaactctgaaggatcatagtgactagaatggagagagaagcactttcattc

SEQ ID NO: 127412 - DNA, 410 bp, Homo sapiens
aatgcctcttcctgagtaagttcactgtcaggaaaggaaaatccaaacgctcgaatattctatttttgtgtccagaggctccagcccctgcacacagactcttcctcactctgaaggaaaggaaactgggcgggagacctccctgtcacagaggccggaattgaggaacctgtgtccctccaaggcctgttctccatacattcggcttccattttaggaaatgaggatatagtgcaggctgctttgggattggcctgagggtggagttagtggtttaaaaaaaaaagtgctcctttgactattctccaggcaagcagcaagcgcggaactagactttaattaaattgggaggtttaaacggctgcattagtattacacttcctctggtcattaaagtttactgccatcac

SEQ ID NO: 127413 - DNA, 456 bp, Homo sapiens
ttaatagggccattccccatccctgggacctctgatgcaggtgtttcacagttttgagatcctctgccctatgtaatgcctgaattccttctatggcaaccccagcacatggctattgactctgcatcctcaatggggctgcaggatgatgagggagtggccagactctggcagccaggttgtccttaacattttgcagaacccacttccccacagaggccacccctgttaagaggctgatgaggcttcatctcaagagaatgttgaggtgggggacatagatggagcttgaggctcaatctaggatgcggttcggcaaaatgagtcagtcatgcatataaatgggatttgcttgatctgaatctaagaccatagagcagttacaatattgagaaattcttatttgtgatattttggggagaaaatcaacttttatgttgctaataaggtctcatg

SEQ ID NO: 127414 - DNA, 343 bp, Homo sapiens
gccccattcttcatcgcaggctctgtccttctttcctcaccctgtcagggaatgtaaggttgccccaccccttgtctcctttagcctcttcctgtgctttccctcaatcctctttcactcttactcttatgcctactttctttcctccacattttctttaacccctcctctttctccttctcctctcccctgttttctcctccagccttctttgtcctaccctttttatagcagctttcccctaggaagcactcccaccccagcctcgggctgccatgttcgcactggtgttgttgccttgtgagtgaaatagctcatctgccccaagtgagaagaaagcagg

SEQ ID NO: 127415 - DNA, 345 bp, Homo sapiens
gtcttttgaaactaaggaaagttttattgtttttctagggataaaacaaggtggggttgttttaatggttaaattacatactgaggatagtgagtaacccttagattaatgtaggttacactctaagcctagccacaattgcaaagattagagaactaaaaaattatgatttggggaagaactgtgctttaagaattctctatcatggaaattcagttggcatctcctttcctagagatgccctctgcccctcataatagaaaaattattttcagtaccatgttccattgccttactcactgtcttacttgctgctgtattttcagcacctagtttagtgcctgg

SEQ ID NO: 127416 - DNA, 458 bp, Homo sapiens
gagtcgtaccctagtttactttggagctaagttttgagtgtttttttcatcattagaccagccctgtgagataggtagttttatggccccattttacagataaggaaagttgatgcttgatttacttgccagtgctcacacagctggcaggtggctgagctattatttgaatccgtacagtttgcccagtactgaaattacccaaggcaaactattaaaagaaacattacaagaaataagagcctgggaaatccaaaaaactggaaataatctgccctttaataacagagaattgactgtacacactaattaattacaacgattgagactgcagcagtctttaacttgtcaagggagcatgaattaaactctgtactgccatcaagtgtgccccatggaggagtgaggtgtatgagtgctgactagccacaagtacattaagagaacctttgttggga

SEQ ID NO: 127417 - DNA, 255 bp, Homo sapiens
attaaggggcaacaagggggagaaatcataaaaatggtgattcttttgattgagggaagactctaaggtcaaatgtctctcagttgagagctgattttgggtggaatgaggtgcttaaaagggtaaaggagggtttgcaaaggggctgcaatttcttcttttatggagaagctttgatacaaataataatatttttatgtgcctggggacctaatgaatttctaaaggtatcaagtttatctaatgcatcttgcc

SEQ ID NO: 127418 - DNA, 709 bp, Homo sapiens
gaaaactgagaccaagaggattaatacttctccatggctaatcactggtatgactaagcctaaaaatgatttcttcttatttcatatccagtgttctttcccttcatttggtgttgcttcatgtttctacattatctgatgagctgttggatttctttcatatctggtatctaggttaccaaaaatactagatacattcatttaaaactaatgtaatgccagttctacttttttaaacatctcatcttgttcttcccattgctaatcttattggtaattatattttaatcctaatgttggttgaaattaatttactataattacagatagggaaattgtgtgactgtggattgagaggaggtagggttaagtcttaattccaccattgactagttacataagctttggcaagtcactttacctttctgagcatgtttcttggacctgtaaagtgagagtggtaaaaacctcttactatacttgtgagaattaagtgaaatcaaatgtgtgagagtgcctagcacatctttagactccatagatcaaagatttagaattagtaacagagacagacagtcaaggggctctgtgataactacaatttatccatttggaccattttaatttatattggaaaaacagctttttatggaatcataaagcactattcagtctagaaaataggcaaaaatacaagaaaatagatata

SEQ ID NO: 127419 - DNA, 619 bp, Homo sapiens
gtaacaactactacaacacagagatcaattctgctcaaacttaaagtgaccaagataactcatgactccaggactactgggttggtaacaatgtgtagtaagagcgtttctgttttaataatggagcgcagtgagattatggggtaactcgtggtatcaaatgtgaaccttttatagactcctggctccaagtcctttcactactcccatctccttttccaccccatcaaggtgagatcattaagctcaggaaggcagctcagccaacggaaaacattcaaccttcaacttttaataaagtacaaaatgcttttattttatattttatttctgaaaataaccacatcagggaaaaaagagcaaatgtggaatgggaacctgacattgcaaactatgggaattttattttttaaacgtttctaataaaagcaaatatagtttagtatgactaaccctaaccccattttgattgcttgttttctcacttttgtttaaaaaaatagtaaaaggaaaccttttatgcactcactataatatactgtgaaattcacataaaatttctcatttaattctcacagttattctgctctgtaagtaatctcatgatcctcacttctac

SEQ ID NO: 127420 - DNA, 417 bp, Homo sapiens
tcaaggaccaagctgaaaaaggcagcttcttgcctcaagtttcaataattgccatgcagggcaaagcgaatgcagcagatttatttcagtcttgctcttagagcttttgcctagaagtgacacacatcatttcttttctcatgacattgaccaaagttaggttatgagatcaagggtgaggaggtgcagtcctacccgtccagagagcagagagtcgaaacgtgtgggaaacaacacaaatgctagccactatcacttactgactctggaactgggcaaggcacttatggctttctgggcctcagttttcacatctgtacaatgagtttagtactacccacctagagaattatgacaaaattactgtagataacacaaattattacattcggcactgtgccaggcataagataccag

SEQ ID NO: 127421 - DNA, 733 bp, Homo sapiens
gtaaaaaccacataggatgagacattgttttgatctgaaaactttgctattttcaactttgctgctgagcaatagaaatagacatattttggtccatactcacaacatacacagagacagacaaattcatttcattttaagtgggttttaaaatttaattgtgttttccctctatttatttacattattggtcatgagtttgcagatggcatgagctacttcagctgagcttatttttcatcagaaactaaaggtctgtacattggtccatacgaacccatcaaggcagttactttagaacccagaagtgaaaacttttcagtaaaacccttttctctcaatttcctagtctgtcttatgagtgcacacaagcattttttgcagggaggtacagatccttccactaggcgtttctaactgtaacttagtcatacacattgagccaagcctatctgatacctcctcatcctaagccctgcttcttgttgcttccttgcctgtaactagttgttagctttcttttggctcctaagaaaaatcaccacttgtttatttgctttccagctgccaaaatgcagatgtctctcatttcctgtcagcttcttttccaatctccttgacttgatggatttgtacttttgaaaaattcatgtactgtagttttaaggaatttttggaagagaacaaagtatttgtggtcaactgccatgttctctgttagattcttcaattt

SEQ ID NO: 127422 - DNA, 289 bp, Homo sapiens
atagcatcaactcgccctttatctttcatgatgcattgagacttccattactttgtagcgcctgactgctagaattgttcccagagttcaggggcttccaaatgacaatgggctgtaccgggctttgtggccttaataagccctctgttactggaattttaaatattggcatacctatcagagtctggccgtgtgtcaggagaatgttggctttagagccaccactgatggatcacatgtttttttctcaagagagcaaacaagcactttttgtttaggcttactaatg

SEQ ID NO: 127423 - DNA, 471 bp, Homo sapiens
tgccacatagaagcacaccacccagcttatacatggcagatgtaggaccctgagtttgatgatgattcctcaaaagagggctttgtctctaaaaattagtttttgtctttcaatactgattgctcatggtatgaactggaggcttccgtcatgtcgttaagtggtaaaaattatgagagtgatttatagagctgtgccttaaatattttatttatcatatcttctaaattattttcatggcaatcagttaataatggaagagcttcaatcttagttattccacagctatcttgaggctaattgatactgtctgcctcttcagcttatggtatcagtgaatgagatttgaaaatgatgctttcaaaagatcaaatgacagtagaactagaaattgaccaatctaggcctctgggtgtcagtgtttcttcgctaccagtgatcatccaagagttgaatattgtaatacttaac

SEQ ID NO: 127424 - DNA, 342 bp, Homo sapiens
tccttaggagcaaagacagaggtttgggtgcatgggatttatttaagaaattgtctctggaggaagggaggaagggaagcagggtagagccggggaagaagccaagtaaggaggtgtgtgttgctgctggagcatgaattgcaccactattgaattggtcccaccaaaggccccttttgagaatggggtagctgtgagtccttgaaagccaacactcagagcatctgggggacattgtaccaactttacaaagtagatctggggctccaacagtatacactccagtgtccttcctctacttggaggagtcaatgaacgcttcctggaagagctgccattaag

SEQ ID NO: 127425 - DNA, 417 bp, Homo sapiens
ccttccagacgtactgttttctcagcctccaggcctcaacctagaatgccatacaccttacttcagtataataacaagatattccctgaccttccaggctcttcaatgccacctctttttttttttcctctttcaagtcaagggttaattctctctgctctaaaattcccaagcacattttatgtccatagtgcatgagctttatcatgtgtcgcctagtgtaataattgtaaacagatttgctctccctgaatggcctgtcgtctctttttcttgttttgttttgagacacggtctcaccctgttgcccaggctggagacagtggtgcgatcttggctcactgcaacctctgccctccaggctcaagcgattctcctgcctcagcctcccaagtagctgggattacaggcacacac

SEQ ID NO: 127426 - DNA, 412 bp, Homo sapiens
agacatcttacatcgatggcagcaggcaaagagagagattgggctgggaaactcccccttatagaaccatcagatctcataagacttactcactatcacaagaacagcacaggaaagacctgcccccatggttcaatgacctcccacaggatccttcccacaattcaagatggatttgggtggggaaaatgttactacttgtttgggggaagctggttaagaaagtcatcatagggaagataacctggcaggggtgtgaaggattatagtcattctggctgagctggggtgatggtggtgatgatggtggtagcggtggtagtgatggtggtggtggcgcggcagtggtggttgttgtgtgagtggtagaaacagcaggagtaacagtagcagcaacacatagaatgaagag

SEQ ID NO: 127427 - DNA, 179 bp, Homo sapiens
ttcctcaatagtgaatccatgtgaaggatcacggaaagagatacgaagggatattgtcttcattttatctgaaaacagtgcttgtttcagtaagctggatttggatcctctcatataactccttacagattttctctggggaaagaatacttctctctgagcttatgcctttctgctat

SEQ ID NO: 127428 - DNA, 777 bp, Homo sapiens
gatttaaaatgccccttttttttgaatttggaattactatatatttgggtctgtgttctagtggtttgtctgtctagttctatagtagaggagccaacattttaattattacagctttctgataatattttaatactagttcccctcttattctgtcttttcaaatttcttgtggctatttttgtgtgtttatcctaccagatggactttaggataattttgtcaggttaaagaatttgagattatgattggacttataaattagcttggggagaattgagatctttatagtattgagtcatcctgtccaagaagctatacatatatttacccccctttttttagttatctcttacatcccttaatagagttttataatatttttaggtcttggccagttcttgctaagaataaatttatattttcagttgctggcattcataatagagtatttctcccatggtatattctaactggttattatttatagaagagctggtggtggctcacgcctgtaatcccagcactttggaaggccgaggtgggcggatcacaaggtcaggagatcgagaccatcctggccaacatggtgaaaccccgtctctactaaaaatacaaaaattatctgggtgtggtggcatgtgcctgtagtcccagctacttgggaggccgaggcaggagaatggcatgaacccataaggtggaggttgcagtgagctgagatcacgccactgaactccagcctgggcaacaagagtgagagtccatctcaaaaaa

SEQ ID NO: 127429 - DNA, 432 bp, Homo sapiens
ttaaaaggagactcactatgaatccctttagtaaggtaaaaatctttttgtactgcaattaacttatctcaaattatttagttttaagatcacattttatatgcccacttctcctaaaatacagcactcctccacttggcttcaactcccaaataagaatgtaacaaaccttctatttacactgcacttacttcagatctcctctttcctctacccccaggagatcagccatagtgaggagccctctttctagcaactcacacatttggaggcatcaaactaagtcactttgcatttttcctgacttgtgtatctacccaattgctcttctactctgtttttcttcaaaagacctttgatattcacccagcagctcccctacaaggtaatctcccgttcaggccaaatgaatgggtttccccttccaagtta

SEQ ID NO: 127430 - DNA, 531 bp, Homo sapiens
ttttttcccacaggcgtaataccctcttttgatcagacgatcatgaagaggtttgcacagatagatttttttaaataaataatgattacagcaacctaaaagaagtgttgttgggggttagaagctcctgcaaattccgaagtatcagggccagatgatgtggtcttagcttaggaaaagagttagtcttgtccttgaacttggctaaagacattcatgtctggttttacttacatgtgaagagagtaccaagcagtaggggtatttccttgttagtactaactaatgtgatgcttaccaagtagtgctgatgggtgacagaccagagcacccagcaaaggccagagaagtccagaacctggcgaggagatgaggcttacactgactgaaggcagaaggcagcagggaggagaggaatgtgccggagcaatggcacaagtgctcctaggccagtgctgtgatgagctgatcagcactcccattgcctggcttgctcctcctgctcagatgccttctctcacctgacccctg

SEQ ID NO: 127431 - DNA, 372 bp, Homo sapiens
tcaatactcactggatggaacaccgatatacatgactcaaaacagcatcaattattttggggatggcagtttccacattcctacttatattttgaatgtaataaaacttacagcaatttaattttgcatatactgctcattactgtataagatagtctaaagttgtactgggtagcagagagcagcttaggatatacaattttcttctcataattcacagttttcagagaatatattctgacagagactgaatgtagtgaaaaacacatctttcaatgcttaatttcatctaaagaagctctgacaaatacatgaattgaaatttagtgtatcaagtagaacacttagacaatgggcatccagggtgtcaga

SEQ ID NO: 127432 - DNA, 272 bp, Homo sapiens
agaaccacacacgctttaccacgagtctccttggtagctggaggaaagcaaggccatcgaaggtggagcctggggtgcctccatccaagccctcatcttgcagacaggcggctctcctgggctcacctgtgagcccacacgcagagccacctgcggcgtttgcgcagagcctctgcggccaccaggaagtcacacagcccttggtgggtccgcagtggatcaacacagacacggctgcacctgagattcagaagaacgggcggacggtgctt

SEQ ID NO: 127433 - DNA, 540 bp, Homo sapiens
ctcattcagctgggatttgtgtttcatagaactggtagtattggaggtagaggagatactgtgatatcatatctctctctctgtctgtctctctctctctctcccactgaagaagagaagacaaaatttagagaatttgagacttgctcaaagttgtgtagctagttagcgataaagctggaattgcaccagatttgatttccatgacattgctttagcctggtggttctcaaagcatggttattggaccagcagcatcccttgggaatttgttagatatgcaaattcatgagatccccattcccttatcagaaattttaatacgctgtgtagggtgattctaatgcctgctaaaacttgggaaccactactgtggtctttacactattgggcagggagatgggagactacaggtagatttgctgaatttcatgggcaacactaggttttcattttaccttattgttctgccatttagatgtctcctcttaaaacatttttacttgcagtgatggcttccttagactcgtgtgtgattgt

SEQ ID NO: 127434 - DNA, 403 bp, Homo sapiens
acaggggccaccctcctacaccagcctccaccaccccatggctccctgaacccagtcacaacatcgggagcagcccaggtggggtggggaggaggtggggatcgcgagagggcttcggagaggcactccctctcccaccagttctgggacagaacaggacccggctgtttgttcttgatgtacgttaaggagatgcagacagactgggaaagaacggaggttctttctccaactggctatggggagaaggtcagagtagcttaccagaccaactcaaagctacaaacttctttttctagtgcttatatgcattctaagctccacgcctatgtgcggagtgcacctgcaagacagcgtgtttcattcttatcaatatctaatctttaactagtgtccagggtct

SEQ ID NO: 127435 - DNA, 376 bp, Homo sapiens
aggtaacccagctgtcttttccagccagagtggtcggtgaaggaggacaggacagggaggccggcagagggaggctcggatgtgtagagacagcacgtgtgactcgcagcctgccccgttggtgaggctggtcgagacttgccctttgagtcatggggtcacttctccaaagcctgctctcctgggaccctccacaggcagcatcttgtcctctctgctgttgatgggggctgtcctgcagaagggatgctcacaggagctgcctccggtccctggcttagaggcctgggtttaacaggctcccttctttaccctacaggtgcatcaagagcctctctctgtccagcgctgcactgtgtgctgggcccctaaaggg

SEQ ID NO: 127436 - DNA, 120 bp, Homo sapiens
ctgcaggcgactcttgaggaccccacagggaaaaatcaattcagcctggctagtatcttgaggaaaacaccacagaaagtgaaaatctcaacctcagtctttaagtttgaatagaaattt

SEQ ID NO: 127437 - DNA, 435 bp, Homo sapiens
gaagaagaggatggggatggaataagccatataaatacgttggataataagaatcccggttgaaggaatggccaatggcaaggtctggagggaggagcccacctgacgtgcctgagcaggccagtggagttggaatggagtgagtgagcagaacagtccagaatgactttagaaaagtagggaccaaccacgtatgggattgtggaaattttaaggagtttgtcttttactttttgagagacagagaaaaaaaatcggtgctggagggttcttctcttctctggtgtgtttttaaagaattcattaggctgcggtatcaggaacaacccataagagatagtattggagaccaaattttggaaattgaaggtagagccaacagcattggctggtagctaaagaatgactccaaattaactttcatggggaagacta

SEQ ID NO: 127438 - DNA, 759 bp, Homo sapiens
cacagtggctaatgcctgtaatcccagcaatttggaaggctgaggcaggcggaccacctgaggtcaggagtttgagaacagcctgaccaacacggagaaaccccatctctactaaaaatacaaaaattagctggctgtggtggtgcatgcctgtaatcccagctactcgggaggctgaggcaggagaatcgcttgaacccaggaggcagaggttgtggtgagccgagattgcgccattgcactccatcctgggcaacaagagcaaaactccatctcaaaaaatagtaataataaaattaaataaaaaattaaaaataaataaaaagaggagcaatggaacaaatatttagggaaagagatgctttgagccccaaatcactccaggtggatagcaccctaatcttaatttaaatgttactgcttataacagaagagctcattctagctaggcatggtggctcatgcctgtaatcccagcactttgggaggatgaggtgaggggatttcttgggatcaggagttcaataccagcctgggcaacatagcgagagcatgtctttgaaaaaaaaatttttttaattagccaggcatggtggcacttacctgtagtcccagctactcaggaggctgaggtgggacgattacttgagcccaggaggtcaaagctgcagtaagccataattgcaccactgcactccagcctgggcgacatagtgagacccagtctcaaaaacaaaacaaagcaatacaaaaaaaaaa

SEQ ID NO: 127439 - DNA, 297 bp, Homo sapiens
gactgaggatcctctccataatgtgtgcccaataaaaattgattttggcacatattgatggctttcccatgtgcctttttcggttctgttctgatatttttctatacagtaattaaatttgtggttttgttctgaactaaaaaacagtgtagtctcacaacacttgagtggtgagcactgggactcttcccaaagtccttcgacttttttttatgcaaacaaggctggctgtggaataggacaagtgattaggaaggagcatttggtgtgccctctgcagtgggcagcatgctggct

SEQ ID NO: 127440 - DNA, 526 bp, Homo sapiens
cgaaatcaggcaggcacaattaacaaaaaataacttacctgagatctttgtaacacctttattatccctattattacctcatcttctattaatgtccttctggctcactccagccacactggcctctggttaagaatcaaagagccaagcatgttcccatctcacacagactttgtactgtctgttccctctaatcaaggcagtcttaccccagatggctcactcccttgtgtgcttcagtctttagcttagatatctccttcttaacaaggcatccttgactaccatttaaaagtacaatcagaccttcatactccctaatcaccatccaatgatatattttatgtatgtgttatatttattatgtctaacccaaccagaatataaacacaatgaaggcaggaatttttgttttactcaaggctatatatcctgcccatagaaaagtggctgatgcacaacaaatatttgttgaatgactaaatgaactttgtgaccaggcacagtggctcatgtgtatcatctc

SEQ ID NO: 127441 - DNA, 494 bp, Homo sapiens
gagtcagtttccaggccgctgacaacctctgataaacacacaaaattggatttctgtttataagcgccaccctgtgaagccaccagttggcctgtgacataagtggtttgaccaaggccaaaagcacaccattagggcatagtcggtcagatctcggggttctggagctgcttgggctgcggaagtacagggacatttttactccctgatactctgccaaaggacctttctctcacttgcaaacatccatgaaaatcttacaaagatatacaacttgcatcatccaatgacacacttaataaatctcccttctggaaagaagaaagccatatacacaatcctcctgagcgcagagcatctggtccgcacacatgtatgggatcagatggtaatctgccctcttctgcacccagcagggctgaggtaattggctacaggcaagcagctgctgcgcacggctcagctcacagctcacctggtgcacatgggccatg

SEQ ID NO: 127442 - DNA, 465 bp, Homo sapiens
tatttccacaggcaggacctgaacagggaagctctcaggtacctttgggagcatagaacccaatgtagcagaaagagggctacattcctagtcctagtcctacctctaattcattgtgtgaccatggacaaggtactttcccactttaaacattagtttccacatctgaaaagtggtagtggaggttagacttgatgagattaaactttatcttcaggcttctaatcctctactgcctgtcatgattgtagcaaccttccctgagctttttctttggtgaattcttatagcctcctagtactcattttagcaatatcatatccttgtatgttctctcctaaatgacacagatataaaagtcttgcctcagctacaagagcatctgcttctctcctggcatgccttacctataacagagtcctaataaatgtgtcctcagtccttccttgctgtgttccctgtttt

SEQ ID NO: 127443 - DNA, 481 bp, Homo sapiens
gtccaaagggagatcgccccgtggatctcctctgtgctctgttcccagcggagtctgtgctcggttaccagtgtgggcatcagattataagatgcaccggcaaattacttttatcttctcagacttttaaaagaaaaactggaactgacccaactgtgcatcaacaggtgaatggataaatctgttatattcatattcagtaataaaagagagcaggccactgatatgtccaacaacatgatgagtctcaaaaacatgttggatgaaagaagctagacacagaagagcatatactatgtgattcaatttataggaaattagaaaacagaaaaaaagaaattaacttatagtgatagagtatagatgaggagttgcctgggttttagggtaggaggaggggattgacttcaaatgggtatgagaggtcttttggggactataaaaatgctctatatcttgattaggatggtggttacgtggg

SEQ ID NO: 127444 - DNA, 404 bp, Homo sapiens
tgaagtttaaaagggagagtggcttaaccacactaacagcaagagtatggatgagaatgacacagtacaacatttaaaccaattaaggcaaatattcagtgagtgagttcaattattattattttttgagacaaggtctcactctgttacccaggctagagtgcagtggtgtgatcttggctcactgtagcctcaacttcttcagactcaggcaatcctcccacctcagcctcctgagtagctgggactataggcgtgtgccaccatgcctggctaattattttattttattattttatgagatggagtttcattcttgttgcccaggctggagcgcagtggtgcaacctcggctcactgcaacctccgcctcctggattcaagcgattctcctgacttagcct

SEQ ID NO: 127445 - DNA, 691 bp, Homo sapiens
tatacagagtcatgaagacactgaaaagtgatgaatccacataaccatgacactggaaatgaagtttgagtggcagtcagaatctgggaggaagcattgctaagtgaaaatcttatggagcttgactaaaaatccctgtcaggaaccgtcaaaagctgtgtccctgacatgaaaaatcttgctggaagttgagagaggtttatgcctactccgtgatccgggaacacaagacctttaccaaccaaaaaagtggatagctgttcttctgctgtgaaggttaataaaggtaaacattataatggccagggctggggttgaggcagaaagaaggaagaaggaaagaaagaaagagacaaaggtaataatattagtaaaggtaaataatgttagtgtctctcaaaacaaaaataatttgacagaaaaaagaatcattttatattgataaaagatgtaatccataaaatagatgtaaaattcatgagcttctatagtattacaatctttaaatggaaaattgacagaaatataattgttataaaagacattaaaatatttttctcaagatttgggaaagactaaaaagtaaaacaagattgaatgagtaggcagatcttgaattttgtattttaaaagtggagaatataccttttcatgcaaccatggatcatttgcagtagctgatcataccact

SEQ ID NO: 127446 - DNA, 762 bp, Homo sapiens
tagtcctaaaagagttgagttgaaggacaaacatttttgtcacgtttgtagttagtccataagtatttattgagccatgaaatagcatccttgtcaaagcatgttgggacagtagtgcaggatattaattcagtaccatggctgtatcttggtgaggcacataaattttactatgctgcccaaatcacttaactcatctatctgaccagaaatgaagcaagcttccagaaattgcacaagagcagtatagaatgtagcatgactacacaatattttatttgcaaatctgctgtgtcaagacatcttacactctcaggcagtatctttctttagtaacatttttctccaaaataaaattttcagaatcttatgtttctggttttttgtacaatagaggcttcattatctatagtgcatcatggcatattgtgtttgttgaatgctcctttctccttcctatataggaaattcaatgaacaagagagacaattatgcaatccataaaaattcatacatttgcttgcaatgatattaaactggaaggtcttatgcttcttattctctctgcatctggataaaatggaaacatttcaaatttcttgaagcatctttgaaagtgtttttccacactgggaaacagggagacacagtctctacaaaagataaagaaaattagctgaacatggtgtcacgtgcctgtcctagctactcctacttgggaggctgaggtgggaggattgtttgagccctggaagttgaggc

SEQ ID NO: 127447 - DNA, 253 bp, Homo sapiens
cttaattgagaaaggctgctccagagtcagtgacttcaattccttatcacttccagttttttaaaatgacatatttagatatatggcgatatcccctccccattcccatcctaatgcgatttgaagtatagtttactcatttcctattacagaagatgggagtttaggttttttgtaccaactcctacctttaaacactgcatttcacttcccctctcccctctatattcccaaattagttacatgttaactt

SEQ ID NO: 127448 - DNA, 158 bp, Homo sapiens
tctaatgtacagggattaactctggaataaagagaaatactgatggtatttaagggcataggactagatgcgatcacctgaaatgtgagtataaaaagagagttcaaagactgagccctgagacatttgaacatttagcagtaggaaaaaggaggata

SEQ ID NO: 127449 - DNA, 654 bp, Homo sapiens
catctgctgttttcttagctcctgctgtttatcagctattgttaggggcctaagtgactatgactcttattaccaccctaaacaccctcacatgagtgtgactttgactctcattatctcagtaaacaccctcagatgaaaggggtggaaaggataatggaggctgaaatactaatcttttgtgtgacttgccagtcacctacaggccaccctacaatcataagcatgggataaattctttccttgtatgttaattgtaatcttcaagatctaaacttgaatctatcacattgccctacatcagaaaaaggaaaaaaaaaaaaaaaaaaaaaaacatgtgtgtggggcgcggcttggggccctcggaaaaggtttttaaaaaccaatccgtgttggggcggcggggggcccatgaagggtagagtgaacaatggggcaaaacagtggttccctaaggagaaaaccccgggagcaagagaacaagagggagggagtttctacacaagtagaaaaagaggccgggggaggaaacagcaaagggttgtgggaaaaaacccccaaaggggagcctacagagggacaatcaggggggcacttatacaagggggggctcaagaagaaagccgaataacaaaattagcccgcagcgggggc

SEQ ID NO: 127450 - DNA, 1793 bp, Homo sapiens
gttgtagtatcctgaggaaaagctgattgtatcacttatgactgagattttcatctttagccgcttctgtgtgatacatgaattaatgggtcataacataggagttagctaattttcattttaaaatattactcagaagatatttttatcttaattgtacatttcaacaacataaataagctgttcaagactgtctcccatgcctccaaaacaaataaaaaccccccacaactcaaatgcatataagctgttactatagtataatggtgagttatagccagtgtatgatgggattgttgatagaataatgcatattagagcttttagttcaaaaatttgagatagtgattcagaaagaaaaaaaaaaaaaaaaaaaaaattttgtggggggttgggctcggaaaaggtttttaaacacattgggtttggggggggggccaggtggttatggacatgggcacacagtgggccaaaggaaacccgtggcacagggcaaagcggcgtggtctcccccaaataaaaaaacgccgggggggaccgagggtgttttgcccaatcccagagggggttttcgaggccaacggggtctacaccgggggccaggggagccggatatacgaccgccccgcgcgcgggaccacctaccaaaaagcgaagcgagagaaggaggaaaaagagggagaagaaaagagaagggacaaacgagaagcgaaaggaggaagaagagaaaacaagaaagaagaagagaaaacgagcaaaacacaggacacagatacacgaatccccacaagcacgaagccaggactaggaatcgcagaagaagcgcacacaaccagcaaagaggaaaaaaaaaaatagagacaacaaggcagagagaggaagcaggagaggagaggaagaagcaagaagaagaaaaaaaagaggagagagacagcaggagaggtagagaggaaaagaaagcacagagaggggaaacatgaggcaagagcggagagaaagagagagaagacatgagagagacgaacagaaggaaggagcagcaagaggaggccagagggagcgagagagagacggagcagacgagagcaaaaagagaggaaatagagagcgagagagggagagaagagggcgagacaatacgggagagacagacgagtggcacagagagacagcagagtcaggcaagacagcgacacgagcaagacgacgtgatagagccgagacaggccgggcagagacacatgaggcgtcgagagcgaacgcaagaagcaacgccgcggcgagaggctagaccacggacagcacatgacagaggaccacgagggcgcgcagagatacggaagaacgcgagagagaagaaggagaggaccggacaggacgagagacgaggacacgagatgggagaacgaacgcccaggtcaggaggaagacgggagaaggagagagagaaagagaactacaggggaggtagacaacgagacgacggacggggagaagacagaagaagagacggcgaagagaaagagggacgaagaagcgaggaacgacgaagataggaagaggaagaaggcagacagaggaccgaccggggagagccgaagggcgagagccagacggaacgacggagagagggagacaacgcgggaagcgacggcgagagagtagaggcgagcggacaagagcgagaagaagggtaccgatgcggaggagacggacagagaggagagggaacagacagggcaggaagagggagagcagagagagaagacgacagagcgagcggacagaagcgg

SEQ ID NO: 127451 - DNA, 284 bp, Homo sapiens
ccaaatttcaaatacggaattcgtcttccctaccaggaactgagataccaaaaatcagcctctaaataccatcctctgggcttgtaagatgaaaaaactttttcagatttgtccatcacaggggtagaaaaatacctatttatgagacccagtcacattaacagagcagccgacatggtgttcacactcaggcaccctttgaaaaccggccactaaggctaaaatgtgacattttgtatttctctaggctgtagccaaacctgttaatttatgttagagagaag

SEQ ID NO: 127452 - DNA, 363 bp, Homo sapiens
ctcagcctccctcctgagtagctgggactacagcgcctgccaacacgcccggctaattttttgtatttttagtagagacggggtttcaccattttagtcagaatggtcttgatctgacctcgtgatccgcccgtctcggcctcccaaagtgctgggattacaggcgtgagccactgtgcccggcccaaattttttttttttagtctctttaatgggagagaaattgtcttcatgtcttacacatagtatgtattcagtaaatgctggtttaagtttttgttggttgtgctgttttgttagccatggacagaagcccagtgcaccgaaataacatgacagattgaaggacctcaataaacagtg

SEQ ID NO: 127453 - DNA, 317 bp, Homo sapiens
gttgtaaaggaagtagaggtgcatgatggttctattgggggcggggccagttttcttttgtttctattggtgtctctctctggattgagatctgaccttggccttggctctctcacctcctattttaggtggacgtgtgaccagaaatggacatgtgagctaatttttattagctcctgtctgttcaccacattctcgtagattatctgggcaaaatatctggcaaattggacttgggggtggtaatttgatgatgggctgaattattttggcgaaagatcgtttatattcagtttcacagtggagactcttattac

SEQ ID NO: 127454 - DNA, 780 bp, Homo sapiens
aaagtttcagaatacaaagtcaatgtccaatagtcagtagtatttctatatagcaataatattcaagctgagaacaaaatcaagaactcaatctcatttacaatacacacacacacacacacacacacacatataactgagaaatacgtttaaccaaggaggtaaaatatttctacaataagaactacaaaagatgggtggaagaaacctgaaataaaacaaactaatggaaaaatatcccatgttcatggattaaaaaaaattaaaaatgaccatggtgtccaaagcaatctaaagattcagtgcaatttctatcaaactaccaatgtcatttttcacagaattagaaaacaacaatcccaaagtgtatatgaaattctgaattgaaaaaatgacccagatagccaaagcaattctaagcaaaaagaacaaagctggagtcagcacttcaccccatttcaaattatactacaaacctatagtaacaacaacagcatggtaccaatacaaaaacagatacatagtttaataaaattaaatagagaaccaagaaataaagccacatacctacaaccaactaatcttcaacaaagcgtgcacaaataaacaatgtggaaaggatacctttttcaataaattgtactagaaaaaatggatatccgtatacacaagaataaaactggattcctatatctcaccatatataaaaattaactcaagattgattaaatactcaaatgtaaaaacctatacaattcctagaagaaaacctaggaaaac

SEQ ID NO: 127455 - DNA, 249 bp, Homo sapiens
cagtttttcataggatcccatcctttgccctctcttcttgtactacatctacacacatgccttcaactctcacctcattgaagacttgtgaatctgtagctgtagctcacatctctcaccaactccattccaatgtccccaaaactcagtcttctacaaatctcttttccttctgatatttcctaactcagtaagtcattaagctagactagcctagcttaaccattgatatgagaccctgcctctaca

SEQ ID NO: 127456 - DNA, 329 bp, Homo sapiens
gggacaggacaggctgctttctgcaggagggaggaagggggacccactgagggacaggtcttcttgtgttcccagaggccagcaggggggcttgaccccagagacacgcctatccatgagtacccaaaggggatcctgagttgggggctggaagaaggccagtctctccaccaagggaaaggggctgagggaccctgccctttgctgcctttctaagaagcccccaaatgccccccgcttccagcacccaggccctgtgcacagccgcagcctgagtcatcattctcatttgaatggtggccgagaaatcagccagggggctgcccagg

SEQ ID NO: 127457 - DNA, 469 bp, Homo sapiens
ggaattgataagtcttatgctaagtttccatttaattttttaagacactgccaaactgttttccaaagtggctgtttcattttacattcccaccagcaacagatgaaggcaagcattgatttctgaaattgctttagatagtggaattgaaagtcttcagctttggttacatttggtctttgaactgcaaccttgaaagaaaactgtgaaatacctaaatcatactatatactcttaaagacaaagaatgatgggaaattaattgaaataaatgaggtttagataacagaagggatttgtaacaagtaagtgttctcagggatagtattttcagctttcgtttgctaggaaattaaatcaaccaattaaataaaataactctccataaagatcagttagatttgccatatagattgttcatttacgaaaatgcactttgagagttatgtaacaaagacactggtttcat

SEQ ID NO: 127458 - DNA, 440 bp, Homo sapiens
gaacggaacaagcaacaagtagagtatatcacttaggatgaaaaagtgcactgtgcaagcacagaataagaaagaacttttccatgagaaagtgaccagggttgcagaggactgtgtttcagtgaaagtgaccagggttgcagaggactgtgtttcagtgaaactgaccagggttgcagaggactgtgtttcagtatactctaatttccttgtacttaacacacaacaagcagccttccgaaagcctgacaaagtctaatctcatttaattctcataacaaggcacttttattactcctactttatagaccaggagatggaggcattgagaggtcccaaactttgtccaaggcagaaagtgtggagggtgaacctgacgtagcaggtgtgataccaggacccttactccagatccctaggctacattgcttgggcaccac

SEQ ID NO: 127459 - DNA, 750 bp, Homo sapiens
gtcattttagggatatgtttctgtgtctgcaataggtttcatagttttagcattatcttattagtgaggatctatcattagagatcatatttatggtgacatttgtaatttaattaattgctactgatgttctcgtaatttcattttcattgtacttctgtggaatcataaacaaaaggttaagtggcacatcaggttaatttactggtctttgatgtttccatctgtgatcttacattctacacaaagtataaataaaatggctctcatatggttacagtccagaagcatttctctctcttagagggaactgcatttttagtttaatttttgtgcttctcaaaatccacttaatccatagaacattacactgacatggatctctgagtttctgttttatgaaaaattaagtcagctcagagagggaacctgccattctaagaagtgatcagaccagaatataattgaaaagcaagagtgaagtattatttaaaattaataaaaagattttaaaagatttctcatttgtaactgcctgcagactggacttgacaaaatagttctaatctagagataaaattccttaactgtagtagtgtagtaaccattttccaaaatagtccacactgaactaaaaaaaaatgtttaccactatagatttatttttctgaattacctgttgcataccttttgcagaagtagcagcttaatattaccaatgaaaagacttatacattataaggtcagctg

SEQ ID NO: 127460 - DNA, 767 bp, Homo sapiens
caggtgacccgcctgcctcagcctcccacagtactgggatgacaggcatgagccaccgtgcccggccgtagaattgtttttataagtttctacaaatagcactgttttcatagtaacttctttgcctgtgaacaatggataactgttcgtgctgaagactcaatggtgtttacctaaagaacagcgtagaagtacagtttttcttgcccacccccgggtcttatttctgaaatggctgccaacacctcaaactggtagatctgggaaattcaaggataccaatacaggcatgtttttctttccttgccaaaaactttagttgttttgggcttgcctctctgtgtcctctacctggagagaggcagggtgggatggatcttccgaaggaatgttaatcaagtttcttgctcactaaccttgatgttcctgttgtgttggtatgttgcaatcaatctagatctgttcaagttagtaaatgcttactggggtgaagagattgttgtggtttgtgacaaggccaaattcaggttttggaccccagacaatcacatggcattcggatttattcatgtattccttgttctgttttaagaacatatcagtgatctagagttttgatatcacacatacagatagctagggctgtttggagttgtggttccaggaatgtcccatgtaatttgaaggttttaatgactacttactatgttttgaagtattgcatgatataaagtgaatctataaactgtccccttattaatatataa

SEQ ID NO: 127461 - DNA, 356 bp, Homo sapiens
actatccaactgtacccttaaaataaaccctatcaatgggtgtcttttccttgtaaccactcatctctaagatcatgggttttgacgtcagaccagcctggaatcaaatcttggtcctggcacttcctgtgttatcctttcacatataacctctccaggctttggctgcctcatctgtaaaatggggctaaagccaatcatttcatggagttatgtgagcattcagtgagtcaccattggtgaaagaacctgcttcacaacaataaagaaactgctgaatgcacaaatgctctaaagcagtggtgcaatggcgtgatctcggctcactgcaacctccgccttccgggttcaagcaa

SEQ ID NO: 127462 - DNA, 264 bp, Homo sapiens
aaaggcaggctttctgttcattgcaagagttattattgagagcctatcctttgagaaaatataatgtttgcagaaatagatttgatattctagctatgtaaagaaatgaaactttaaaatgtgagatagaaaaattataaccagaataattagaacaaattacattccacatcaaggcaccttactgtttagacttaagcaattatttaatgtctgcagtattgtcatctgaaaacattctatgacttagagaaaatataccat

SEQ ID NO: 127463 - DNA, 376 bp, Homo sapiens
gaatgcttttttggctccatttattctccaaggtccagctcataagtcacctcctctgggaagccctcctctgcttcctttacttccctaggcacttacggaaggtctcacttccggggtatcccaggatatcatacagtatcctgcaccctcttgtgcaattactcatgacccccagtggtccgtgtgtacccccttaccaggctccgtgtcctattcagctcctcagggctccagcacggaatgggtgagcagtaactattggctaaatggaagttgaattgttgttttgaggcctgctgttatctgcaaggctctcagaaactgctgtgcctcctagcaaaaagccatggaggccacatgaggttaataggca

SEQ ID NO: 127464 - DNA, 921 bp, Homo sapiens
agatgtttccatgtcagtatatataaagggcattctcattagtttggatgcttgcatattattccattgtatggatgtactgtagttttggagtttttaaaaccagggtcctaaaaccaggacattagcttgcttttacttttgttttaaatgctacttcaagtaatttagcaatgattaacttgtgccatgaattcctgaaagaattgcagtatcaaagtatatctgtgcatttataatttttagagctgttgccaaatatctaaccctaaagaggttgtatcaaattacatttccaccaccaattaagaaagtggtgatagaattaaaagccgatgctctagtcacccatatagttacttttggcatgtttctagtaagcgggcattgcctatgactggacgttttcagtgatggacattcattacttttcaagatagcccagtgcatctttaggtggtttggctcttggtacttccttatatagaataaaaatattcttcaagccttctacctgttggtcttgtttcttcttttgatgatttcttttataaaataattttaatatttgaaggcagctgtcacgtcttcccttcgccattctattcatcatgctttttttttcttccataggttattgcatgaggatctctttaatttcctggttgtcccatttattctagtgctatcccctattatccatactctgaaaatgtgttatctacaatgtggcatttccaagtgtcatttcacctgtgctttttaaagtagggtgtcatatctactcaaataggacaacatctgctgttgtcctatttatgcagggtagaaaagtaatgtaattaaattttccatttctctgaatgtaacatgaatgtgcttttagtagaaactaatttctcagagctgctctgtgtatgc

SEQ ID NO: 127465 - DNA, 409 bp, Homo sapiens
gacaacttgagtcactgaagagttggacctaatgttgcttaccccaggctatataagtgaaattgagtgaaatgtgaaatgtttgatttagaatatagtgattgtatttgttcttttaaatttatatttcttgataatcatactgaatactttcatgaatggtgtgccagatactcttttcagactatgcatcttttgctgttattaaatttattaaattttcataagggtaaaacaagttgacacatttataaagttataaattaagaagtactgtatatttggtaaacaaaaatgactggcttttcaaccaccccctagtcaaatccaccacagactttcctggtagatttaagaaacccagtcttaaactgctgtttgcatatgtcttttgatgttgattattaaa

SEQ ID NO: 127466 - DNA, 1777 bp, Homo sapiens
  misc_feature (13)..(13): n is a, c, g, or t
  misc_feature (1765)..(1765): n is a, c, g, or t
  misc_feature (1775)..(1775): n is a, c, g, or t
gctaggtagaggngggtgtgtgaatcggccgaggaccccacgaggggcctggagctctaaggcccttgggtcctccccaggtcaggccaagtccatgagccatcgctgagcagcccccagggagggaggggtgtgagcgtgggtgggctcccggcacctggcccagcatccacgcctggtgtgtgggcatctgcctgcagaccctcgtccgagggccccgtctctctggacccctcactgcaggtgaatagccacagtccctcccccaggccctgccctgcgtgttggaaacaccacctcctgggccttccccgtttgctcattcgggatccttgtctgggcactgaggacgatgagctccgcctctgttctcgcgtcagggctcggctcctccgtgtgtggggagacaggctgggatagcatgctgggcgactgtggtgagggcaaagacgcagagggcatgagtggggggctgggggggcacctggatgttcagaggccagaaggcaggactacccgcaggtgcccaagggagacccagggccgcccagaagtccagggggagtcctggggcctcggagggatctgagcagggctgcggcctgacccaggatctctctggcctccctggcgtcttcccaggtggcccaggaccgcagtaccagactgagctggactggcattgaccaggccgaggccaccggccatcctcctccggccagaagctgcagtgataggggacatccctagcagttcacaaagctgtggggagaccccgagggggaagggtttccatgctgagccacaggcccggccacggtgcaaagctgtggggggactccgaggaagaagggttttcatgctgagccacagtcccggccatggtgcagggatttggcacgaagcctctcctagggccggtacacgacctagagggctccctggtgtaccctgggacctggcagagtgcagcttctcatccagcaggggtgggtagggccctggactctcctagggcagcactgtttaataggagtgctatgtgagccacatacagagttaagaagaaataagtaaaattcattttaatgaagtattgcgtttcactccatgtactttgaaaatagtatttcaacaatgtaatctatataaaaattgtcacatcttttttactcttttttttgtagagtctgggaaagccagcaggtgttttacatttacaacacttgagtttagactggcagcttctgcgcccaataaccacaaggctgacagcagggaggtgtggggggtccagaacaatataccctctgtgagtgcttatctcatgcccatgctgttcccaggcgcctgctgtctgtctcctcatcctctacctcatcggctctatggtttgaggccagacctcatgcatcaggccagagtgtcctgccgagacccaggatgcacccctcacttggcacagacaaaccagacacaccagcttctgtctttccccatttcagtgggtgaacctggaaccacccagatgactgggctagaagttgacagtcattctcctctcctcactcccctgtcctcccacccagcacacccagccaggcaggtccttagcttccacctcctgaatctctgacctgaatttcactagaaaataaggaatactacgtcaaaatttatgggatgcagctaaagcaatccttaaaggaaaactagcttgtgcttatatgggaaaagaagaaaggtctagaatcttaaggttttnccttaagaancc

SEQ ID NO: 127467 - DNA, 278 bp, Homo sapiens
tgagaatccgtctcaaaaaataaaataaaaaaaaaagaagtggaatcacacggtatttttctttttggacacacatttctaaggggaaaatgctgagaaagacaggcaggggaaggtacagtatctgatatctccacttaaatgtctcaaagatacctgtaactcaatctgtccaagtcaaactcatgatccccccatctagtcccaatacccaccagccctagctcagcaaatggtcaagcatcaccatctatccatggaaatctcaaattccaaaa

SEQ ID NO: 127468 - DNA, 157 bp, Homo sapiens
ccggaacatgaccttttcaacctcaatgtttccactaggtggagctactgctccttcatcatgtgagtctaatataaatcatccaccttccctgaattgagcatttggggaagtaagttaagaagcaggtttaagagacaggagtatacagccacac

SEQ ID NO: 127469 - DNA, 176 bp, Homo sapiens
acagtgagactctgtctcaaaaaaaataaataaataaataaataaaaaagaagagcttctgttctaagcactaaatgtacaatcaggtttacagaaaaattggttggggtaaaatactggaaacaactaaatgttaaacagtatgggggggtgggttaagtactttgagtggatta

SEQ ID NO: 127470 - DNA, 470 bp, Homo sapiens
ccacatgttgttcctaattcgatttgttcctcagttgccaaaacttcacaggcagacagaagtgtttctttaaaactttgtcggttgctaccagaaggaaaactgtatttctagatcaactgtctcatccttgacaaatacctgccatggagatgttattactcctatattacagatgaaaaactggggtgggggcaaagagaactgacttgcttaaagtctcacagctagtaagtggtggactctagaactgaaaatcaggttgaactgatcctagatctcattttttataaagctccagtcactcagagtttttcagtccaaatcctagggccagagtgtctagacttttgtagatttgaacagatattgaaagggtaaatgaccaaaggatgaatagaagagagagccaggagcagaatctagtagatctctttgctggggccccataagattcagtagatttaaag

SEQ ID NO: 127471 - DNA, 137 bp, Homo sapiens
tagtgtatataaagtacctaatttagagtccggcatataaaaaacattctaagttagcaaaaattgtgtacctccgctagtaaaacaaattcttcaagtgaaaagctgaactcgctcaatttttaagtgtattatac

SEQ ID NO: 127472 - DNA, 606 bp, Homo sapiens
gtagcgataaggtcttcctatgttgcccaggttggtcttgaacttccgggctcaagcgatcctcctacttcggcctcccaaagtgctggaattacaggtgtgagccaccacgcgtggtctataatttttttttataataaacactttacacgctttagaggagagttccacccgccatgggttggaaactcctgacctctgaaggcactgctgttgcatgacacagtgcttattgttacctcctctgaatctacagatttggaatttagaatatctgaccctccttttttgctccagccctcagactttctggtagtcatgtttgctgagtgaatcttaccagcctcccagattcttggagtcctccatccactgaatggactttttttttttttggccccagatatttcttctagaacaaaaatatctgggtccctacctagtgaagtattggtgtctgatccaatgaattcttaaccagttctcagggcttttatcttaggcatacacagtattcttatctaaattgggaatgatatttcctcccgcacagggtggcagtgaggattaaatgaaataatcagagtgagcatccctaatccaaaa

SEQ ID NO: 127473 - DNA, 532 bp, Homo sapiens
ctgagcccctcaaaagaaaaggagaagcagaagttggaagtgcgtctatcgctttagggacactccagtgctctgaatgagtgagtcttggaatgtgaggcagttcgtctctatgcctctgctcctagaacacacccttcaaaggaaaactttgactttgatccaactttaatcaggggaaggtcattttggtcctaatttcagggttttcagtttctcctggtgtgttgtatgttctcaaactaaacgaggtctccctttgtagtgactgtgatttcaaccacagccactgaatgcaggcctcctgtgcctgctggagtgccaagctgataatatttgtcagtactggtcctgttgagtgatgtgagggttccatagcccctgttaggacaagtaacgggtcactattaagctaggaacttgtctctcattcttttcactgtcgttttgtgtaaccaaagggagtcgttgggggcagagacttctaaaagacctcgcaaaaatcatgaccatccccttccaacgtggagtg

SEQ ID NO: 127474 - DNA, 442 bp, Homo sapiens
ctgctcccacttaacatatacacactcttctcttactccaactcaaaataagaaaagaaggtttctttcccctcaagctaatttcttggtgtacagcaatctttgttcagctattctgcaaccatatgtaaaggaaaggtcattttagagcaggttttcacactctgatctacctggagaagtgaaaagtattgtctggtcattaagtaaaaaaatgacagggtttagaatcccaaaatgtgtaccagtattaagagtttaaaagaatactgtatataggattcaaggataacactaaaaacaacagtgaaactgtcttccaaacaattggaaagaccgtggataatgcagtcactatgtgaagagaaaaaggagattcctaaccgatttctcttcaaaggaagagagagggatatcaatttctcatactaagtgaattagt

SEQ ID NO: 127475 - DNA, 464 bp, Homo sapiens
tagtgttgaactctaaattattcaaattgaaaacaaattattcaatgtactgttattactgtaatcaagatattctgagtggtcattttataaaattttgttttccttttgaagcatggatttttcaaatctactgtcgtatttcccacttgtctgtatcagttattcccataaaacatggctatttctcttagatatagagaccaataatttagactcttaatattgtatattgatagctaaccaagaaaactcttagtttctattggcttatatttatgcaagccatcctgtcattatgaaacatatttgggtgtgccttacttttggcaaatgttgactttgtagtgaattgagtttcacataaaagagagccaccttgtagtcatacactttgaggcatatattaatactgagaagtaagacaagtgttaatgtgtactgaaatttgaaatattctcttg

SEQ ID NO: 127476 - DNA, 759 bp, Homo sapiens
cgccgtggtgcatgcctgtaatcccagcactttgcggggccgaggcaggaggatcacctgaggtcaggagttcaaggcctgcctgaccaacatggtgatactccatctctcctaaaaatagaaatatgagccaggtatgccggcaggcacctgtaatctcagctactcgggaggctgaggcaggagaattgcttgaatccaggaggcagaggttgaagtaagccaagatcatgccattgcactccagcctgggcaacaagattgggagactccatctcaaaaaacaaaaattagccaggtgtggctgggcacggtggctcatgcctgtactcctagcactttgggaggccaaggtgggcagatcacgaggtcaggagttcgagaccagcctggccaacagagaccccccatctctattaaaaatacaaaaaacttcactgggcagggtaacagatgcctgtaatcccagctattcagaaggctgaggcaggaaaatcacttgaacccaaaaggcggaggctgcagtgagccaagatcgcaacactgcactccagcctgggcgacaagaacgagactcagtcttgaaaaataaataaataaataataaataaatattcatgtatgagtttagtcaacagcttatttcattttctctgacaatgctaaatgtatagcctttcctcacccataaaaagttaaccaagggcaggcatgatagctcatgcctataatcctagcactttcagacactgaagtggg

SEQ ID NO: 127477 - DNA, 449 bp, Homo sapiens
atataaatatgtaatcttgcaactgtaaaggcttcttctattactgcaaaatgaagagataagaaatagaagtgatatcaaaagaaatgaaacaaaaaaaggtgatgatgaccaaataagtataaagctcagcttcttgcatccactccatagccagatgaagaaaatactcatgttaatcatttttcttactgtaacacagagatggtgtgaaattcatttcaaaacactaatatttgaaaatacatttgagaaccctatttgtgccaagaaatacattctagcaactttctgcagctagcaaaaagttagaggagcagagcctataaaataatcttaaaataagtaggacattatcttgtcattaaatacttttcagatagaattgtaaaatgtctgagctttaattgcttccactcactatgtcatcctctaggatgcagatcctc

SEQ ID NO: 127478 - DNA, 852 bp, Homo sapiens
agatgatgatcatgggaggtcctgtcctttcaaatatgcgtgtgagttgatcagagcaggggctctgggtacatctctcagtgtcctaaacatcatgtttcagtcatccctttgcagctctgaatgctctgagctttgtcaagcctcactgactaatacatttcattaggttcatttcaaatgacatgcatttgtatacattttaccaggttggttgtatgaatttattttagctgggtgtggtgatggatgcctgtaatcccagctactcgggaggctgagacaggagaatcacttgaacccaggaggtggaagctgcagtaagctgagattgcaccattgtactgcagcctgggcaacgagcaaaactctgtctcaaaaaaacaaaaaaagagcagcagcaactgactggttggatcaggaaagactctgagaaaggactcctgacctggctcttccagaatgaggatggattttccatatgaaggagccgggggcaggaccttctgggtagagcgtgaaaagaacacagtatgtgtggagagcgggaaattgtgttgaactgtctagaaaacagagccacaggaatgcgtgttgagggcttgggctgtacagtggagagtgccctccctggccagggagttggacattcatcccaccacaagaccccatgaagagttcctcaacagctctgtgtcctcatcaaacctgtgtttgcagaacagtggaggaagagagctgaaggaggggagaggccctgcacctgccaggccctggcctagactacaagggtgagcactgagccatgctctcggggaaccttcactggagttgagggcagtgagaatgttt

SEQ ID NO: 127479 - DNA, 309 bp, Homo sapiens
atatttactgaatctggcaatcctaaccaggtatgatcccagaaagaagccactgaaatggggctttggtgctggatcactcaccatccttccttcattgaggaccccaggttggtaatagataaagcacaaatatcacctgggacaaggaattggtctaattgctcaaactttcattggtgatcaactggcatggtatagcggtagaaaggaaggcattagctgatgtgatgtgtcagatgtttgagatttgggcgaaatagggactgaaaggataataaaatcaggtggctactgctaagcttgatt

SEQ ID NO: 127480 - DNA, 620 bp, Homo sapiens
gacaccgtggctgtgggggatcagctctgtgtgagccacacggaaaggggaggccaggattatgaagcggtttgtaattggtggcacatcacgtgatctgactttaaacatactttaggtgactgtccacatcaagtgtggatggcactggcatccatgcaggaagaattgcaaattgcatggctcatacataaatatcgaacggggaagggtctgcgagacgataggacaaactagaggaaagaattgcttatagaaagaatcaaacctgaagttacttgttagcagctctaacaaagccatttgattgaatagggatatttgtgacattttattctaaaaatatggtttcctcttggatttgtgtcaaaggtgggaagatttttaaatagcactcctcaacaatgaataggaacaggcatcttaaatgtacaataatttggtggcatatatgaaggtgtttttatatgagctaacgcccaattttttattagggaggatcagggggttcttgactaccttataaagaaggcagatctgggtaagaaactagagtgtgtcccttgtgggctccttgtttctgcgtgtccctttcatgctggttttacaagattttgctc

SEQ ID NO: 127481 - DNA, 614 bp, Homo sapiens
aaaattggttagggtggggagatgaacaaagataggttaacaggtacagatacaattagataaaagttataataagttctatcgttctacagcagagcagagtgactatagttagcaacaatgtattgtatatttcaaagtagctggaagtgaggactggaattgttctcaacacataaaaataataaatgcacaaagtgatagactcttcaaataccctgacttaatcattacacattctatgcatgtaacaaactaccacatgcaccctgtaagtatgtaaaatataatatatcaataaaaagccaaatattttaaaaattacatgccaattttttttatgtgtgttaaaacaaaagtcaaaagacaagcgaaaacctaggggataatttgtaactcataggagacataggactgttttccaaaatatatagaactcctataaatcaatatttttaaaaatcagcaggtctgacacagtggctcatgtctgtaatcccggcacttcaggaggctgagacaggtagattgcttgagtccaggggttcgagaccagcctgggcaacatgacaaaaccccatctctacaaaaaatacaaaaattagccaggtatg

SEQ ID NO: 127482 - DNA, 289 bp, Homo sapiens
ttatgtgtctggggctgatacttgctgtggctcatcctcagctgtgactgctaactggaacacagactctccatatggtctgaacttgttactcatatagcagctagttccaagagcaagcatcccaaaagcaagagtgaaacaggcagaagctgtaaagccatttagtaccttgtctcgaagtcacaaagtcaaactctaatggttgaggaattacaaaagactgttcaaactcaagggcagtgaacattgatgctatctcttgatggaagaattggtgaggtcacat

SEQ ID NO: 127483 - DNA, 281 bp, Homo sapiens
agtgtccagcacattgaggagagtctctggatagttacctgaggccttccgaagtcatagagtctagaattgtgcatgacttccttccaggctatttaagatcaaaaacatccaatctagcttctcctgtatgcttcttttcttgactggtgcatggacaaagtcccttttgtgtgtctttcaatctgccatattgcaaatatgtacacaaagtcaatcgtgttctcaaggagaaaggggacatagctttcttctcttttttttttttttttttttttgag

SEQ ID NO: 127484 - DNA, 320 bp, Homo sapiens
tgccacccccacaggggtggtgtgatattctgcctctcctaggccctcagtctttgtgggattattgttaaattcacttgggtataagatgaggcaagagattgtagaggaattggcaaaaactcttcaaagtgttcacttttaagtgtttttatagagctctgaatcagtatcagttttactggccttttacaaaaataaagacaggaagttatgttccttcgtatggcaaaatcctattatcgtaggtttttacctattttgttctggtgaaaacgtaatatgtgtgtttaattgtgagtacggtgtgcccattttta

SEQ ID NO: 127485 - DNA, 216 bp, Homo sapiens
taacccttctcttaactaaccataatcccttgcagcattctgacacaagtaaagtgtgcgaacggcatttccctttctcgtgtgcttgaaagtctaataaagaatactaaaaatggtcccacgtttcactttcatgtaattaactaaacactaacatccattggaaagggcctttctgaatgtaatatactcccaaagcacttcagaggcagctat

SEQ ID NO: 127486 - DNA, 733 bp, Homo sapiens
caggtttccaaagatctaatattcacagctgccaggtgaacatggttctggttaacttaggaagaggtaggagagagccttggggggatttgaaaagatcaaaagaactaaaatgacaatctcaaattactataccctcctttttgaaagtgcaaaggctatttttttcatcaatggattaatctgaactaatgtggagaacaaaggaacctctgtacctttctctcccacatggttctgtagctagttttatttcgttttgttcacctcagagaaaactgaaagaccaatgtatgatctttcaactctgttgaatgtgtgtgagatttttttcttttttctttttctttcttttttttttttaaagacagagtcttgctcttgttgcctagcctggagtgcagtggcatgatctcgactcactgcaacttccacctccccggttcaagcgattctcctgctccagcctcccaagcagctgggattacaggcgcccaccaccacaccaggctaattttttgtatttttagtagagacagggtttcaccatgttggccaggctggtctcgaactcctgacctcatgatctacccacctcagcctcccaaagtgctgggattacaggcgtgagccaccgcacctggccaagtgtgtgtgagatcttttattaagtttttacaactcccttaaataatcctcctcattggggaaaaataaaaaataaaaaataaat

SEQ ID NO: 127487 - DNA, 1081 bp, Homo sapiens
  misc_feature (1081)..(1081): n is a, c, g, or t
ggaggcagcatagcagcggggtaacaagtataaacccttggtttgtacctcgaatcttgcgcctgtttcttccccttactgccgtttgggttatctattgctgggtaatgagcccaaattatagtggcttaaaacagtaccattttggccaggtatggtggctcacgcctgtaatcccagcactttggaaggccgaggcaggtggatcacaaggtcaggagattgagaccatcctgaccaacatggtgaaactccatctctactaaaaaaaaaaaaaaaaaaaaaaaaaaaaaaaaaaataccgcgcgggggtggcacggcggaggtggcgccgtgtgtacaaccccaactctacccaggagagagcgggagaggagccaggagaagaatccctgttggaaccccggggagagggggcgaggcgtcggcaggtgagaacctaccaaagagacgcgcgccccactggggagagacgcagccacgccgtgcggagcgcaggaaagagcggagagaacagcgcggctcgccagacaaacacacaacagaactcaaagggtggcgcgccaccgttgctgtggttcaaatcacacgaggcaaacacacccggggagagctacagagcacatgttgggggcagaacgaggacacaaaatatggcggggcaccacacgatgcgtcaagcccacagcggatcgacgcacaagagacaaatacctacactctcagaaggggccgaacacacgcgctctcgcagagaagaaaaaacacacgatggccatcacaacaacgaccggaagagcagaaactaacacgaagacgagccccccaaacgaagaaaaaacaagggacggcgggacaccacagacatagtgagtacgaagaagtagcggcactagaacgacagaacaaacaacaacggacacacaaccagagcggggaagaaataaaaccacactattatttagcagagaagacacccacgaaagggagtctgactcacacacaagaagagacaagacccgcaccaacggagtgggaaccacacacaaacgaataaacaatgtggggcgaccaccccaan

SEQ ID NO: 127488 - DNA, 718 bp, Homo sapiens
gtagggaaggctgcctctttgcctccatgaactgagactttctactgcccacactgtagcctcctttattctcccctctgcagactgctaagagagagctctttggcatacaaaataggcctcggacttccttatcagggtgctttctttcatttcatagagccctccccggccagatattcatgtcgcagatgtatgagctcctgcagtcattatcaatcactgaatgcttaacaaatatttaatgaatggcttctatgagcaagcgagacgtgacattctgtaatggtggttggggcggggggtgggggtgcatgcatttttggtttcgtttatttcatttttggagtttatgaaatgtcttaactgttaagtcacagaaaaggtttcccacataaaaaacataaaaatctgttctatctgatctgcttttatgcatttttctaagcccctggttttctaattagggggaaagaagaggaagttttattctcatacccattatggcatgtgaccatggttcaattatatttttcttttggctggataagggtaatgaatagatctttatcaaataatttgatagacattgttatatccagcaacttttgctaatacaatgcacttggaatctcatctgtgtttgaagtttgcaccgacatctgcagaaactcagagagaagctccctagggatcatctctggtatttatgacctgc

SEQ ID NO: 127489 - DNA, 477 bp, Homo sapiens
atattttactaatatttttactaattgctaatcttttgaattgtagattcagggaagcagagccctacaaagaagtctcccttcgaagaccctggcctgactccatttgagagagaaaattggcccacatgtgggaggactgtcctgaggctcctgtgaggccaggccaagaaaccttgagatggccaagaacccttgagatggcaaagaatgctttctcctgtctgctaagattgccctcagagttctggtttcctgtctgaggacctacatcttcttccagccattggctggacagatgtggtctacccacagggctgtggtctcagccttgcaagcctctatggaacaaccacattagaacatgatgtgcataggaaaaattatcagtgcatataatggtgataatatcattttgaagtccctcaactcgctgccttcttttacattttcttgtacttacctttcccccaatct

SEQ ID NO: 127490 - DNA, 231 bp, Homo sapiens
agctctagggcagcccctaccctcagcctggggatacccaacaaacgcttccaagccctgagactccatgactcgctgggagtgtggaattggtaaggagcttaattctgctttgtgtagtctgtttgtgtagcctgacttatctctccactacacacatacacatacacacacacacatacatacacacgcacgcacacgcacacagaacctgggctttctttttttttt

SEQ ID NO: 127491 - DNA, 737 bp, Homo sapiens
aacatagggagaccctgtctctacaaaaaattttttaaaaattagctgggcatggcggtgtgcgcttgtagtcccagctactcaggaggctgaggcaggaggatcacttgagcccaggaaattgaggctgcagcgagccatgatggcaccactgcactgcagcctgggcgtcagaacgagacctgctctcaaaaaaacaaacaaacaacaaaaaaaaaggctttcttaaagagacttgagaacagaaaggggaacagatacataacttatatatttatttgttcatctttccaccttcctggagggtggaggggaacaggtctgtatttggagttttgaatgctaaaagtgggaatacatgtactgtttgccatgatctgttcaaaagttaagccaaatgccttagattctcctgaaaactggaatgccactgtaaactataagccccacttcaaagataaaagatcttgatgaacagggctgggtctgtggactgggcctctccccaccacacaaggaagggtggtgccagttgaaggaaaatcacttaaatccttgctgtctcctaataaggtgtggtcccaggtagggctgtcagaattagcaaattaaaacacagggcatctgtgaaaattagaatttcagataacaacaaataattggcataggctgcataatgtccctcaaagatatcaggtcctaatctccagaacctgtaaatgtgatcttatttggaa

SEQ ID NO: 127492 - DNA, 378 bp, Homo sapiens
tcatcctgactgttgcagttaagccattgtcatctcatttactaaattggtattgacgacctcctgtgccccagacgttattccaggtgctggagatacagtgacaaagagccctctcggagggctcaagtaaaggaactaggatgaaaagtgctgagtgtcatgctaagggaagcgctggctgtggaagtgtccctcacctagcctgggatcggggtggtggttgcaggaggcatccaaggaaatgacatttacacggaggtctgaggggcagcgaggtggtgggaaggtggctccaggtaggaggtgagaagagagcgcacaaagtcaggttgtagcacagtctggctgggaagagaagtcggctggtcaggtggg

SEQ ID NO: 127493 - DNA, 279 bp, Homo sapiens
acttttctcatccataaaatagaaataataaccataggtacttcaaatgttgtcaggattacattagataattaatgcaaaaacctcagcactattttcagaacatacctaatctttcaaaaaaaatgttaagcgattttaattattatccccactgcattagtgcctctctctccttttctgggagaaagtcctcacattatagcatccccctcctcccatcaaaataggcttttaaaggccgggcgcggtagctcacgtctgtaatcccagcacttt

SEQ ID NO: 127494 - DNA, 199 bp, Homo sapiens
aggaacccagtgacctcaaataatggcagcaagtgcctttgaaggagcagaagcagcaggcagagtagctatctctcagggacagcataactgggactcttgagggcaggcggctggactgaacatatgctgcaagttgccacgggattctacttggaagcaggatactcagcactgacctgcacgcaccatgccctag

SEQ ID NO: 127495 - DNA, 410 bp, Homo sapiens
cgtgagtcagatatatcttacgcagataaagccactaaacttctcctttctttctttgtgctagtcaccgctgcatttctcataaaggttatggaaggaaaaaaaggaaccatgacttgacttcctttgtatgtttctaagtttctgagtatgataagccagtctggctaataattcccatggtgaattgaattccagtcattttcaggaagctggctattttcaaagttcattttatactaggacgtgattgccaattcctgaatgggaggctacaaggttgtggaaaaaagattgagctagatgtagcagtcctgaaaatcatgaaactttcttcatgtgaatgaggtctggttacttacagtttaaatgtaatttttctgttttttaataagagagctgttatagac

SEQ ID NO: 127496 - DNA, 645 bp, Homo sapiens
gtagagacggggtttcaccatgttagccaggatgatcttgatctcctgaccttgtgatccgcccgcctcggcctcccaaagtgctgggattacaggtatggtggcatattcctgtagtcccagatactcaggaagctgagatgcaagggtctcttgatccctgaaggttgaggctacggtgagccatgatgatgccactgcattttagcctgtgcaacagaatcagagcctgtttcattataactttaaattttttaagcaactggaaaagtgttccttgctctcttggggggatttggctggtgccgaagtgtttctgaagtctcaagaactgccataaaatctcacgctgccatttccctgaacagatacatacatagagagagacagttttccaaactgtgtcacgcaggctgagtgcactggcaggatcacagctcacggcagcctcaagctccctggctcaagcgatccctcccctcagcctcctgagtagctgagactacaggtgagtgccaccacactcagctaatttttaaatttctggtagacagggtctccctatgttgcccaggctggtcttgaactcctagactcaagtgatcctcctgtcttggcctcccaaagtgctgagattacaggtgg

SEQ ID NO: 127497 - DNA, 393 bp, Homo sapiens
cacctactgaaaccaccaccaacctcaggcgcttcccctggtgtccgcctgggatgtgaatgctccctcccctaagcgccatggaccatgtgtttcttttgcaacccctgaaataggctgcctctcatgcctgcttgctgctgcttccttctaagcagccacggcaatgataggctgcatgccctgctctgttcctcagtctcctgagcagtgagactccctagcaatacagagcaagtcctctggcaaggtaacactttccttgaaattccaaaaattcctattgctcattaaatgactaaaaagccatctgaatccctacatttcaatgtacttattttgcatggttgcacagcattcacaatggcattatactgacaagctaggaagtat

SEQ ID NO: 127498 - DNA, 384 bp, Homo sapiens
gtactgggaatgggttgcttttcctgctgttaaccaggcttttacctccgtcctagggtgcagacccttgaagtattgagagagtcaggtcacgtgaatagcatgcagattgtagactccccacaaaccaaggggtgctcctgacccagcttcatctggagctattgccctcacaaggacagaagcaattaaattgtttgttctgctacagagtaaatggtctactgagaacttgtttgtacttttatatgtttttatggttaatgttttcagtgacccatgttataaagtaaaccataactacttctgtaagcatgttatagtagtaaagcaaaactgtatattcctagatatttatatcacttcactcaaaccctcggagta

SEQ ID NO: 127499 - DNA, 717 bp, Homo sapiens
gcactggggagctccacacacgcggctccgcagctttgcgcgcccttctaccgcgagcggctgagtatccgcctggctcccctgcggggttcctccgtggtcttccggagattctttctgaagcagctttagaatagtcaagcctatttttctactccatttctttttgtaatgtggggtcacctttccgctctagaaattgcttttcttacgcgattcccaccccaactctcgccaagggccctggttctcatctccccagtcttagcttctgacaagcctccaagaaactgcgcttttttcttttctggagatgcagagtatgaaaatgattttgcaagacttttccaggtcatgaggtgctctctgagaaatctcttctgttccctaaagtagtaagtgactcaactgaagcgaagcaataattattaaatggatctctagtggcctaggggcattaacacatttttttcctttgaagttattatacaattaaataactttagagtggtagttcccaaaatgtgtgactttaggcactagtttgcctaaatgctgctctagcaagtcattcacttcaaaaatattgagccacttctatatgccctggctggcactctaggaacagtggtgaagaagacagatatatttacctgtcctgatagaagttacagtttggtgaaaacgataaattagtaacaagtgcaaataagattt

SEQ ID NO: 127500 - DNA, 483 bp, Homo sapiens
tgagataaaacatttaaaagctagcagatgtctcagcacttagtaaacattcaattttgtatttatataaaagtgatatttgtaaaatcacaaatttaagtcaaagaagcaggatgtgcacttgctctgctgccttgtatatcaaagtgacattccagaaaaggagatgctgtgcatactggtacgtgggtccgtcggggaaagtctgatggctaatagcttttaattagttacactgcccttaaggccagaaataatgtgaataagggccgtatgcagtttttcttgtttcaaacaacagtgtatataaggttatagtgtttgagctattcagatgctggatggtttaagaaggtagatttatttctgagatgtgcttcagaaaagaagtgtgattttcacatgggtcttcaaataagacagctaacctttgaaaggattttaagaataaacatcatgtaactgtttttttttttttttttt

SEQ ID NO: 127501 - DNA, 496 bp, Homo sapiens
cccaatctgtaagcaggggtggactccagcgctagctggtgtccccgtctacaggcctttgttcaataaacctgtgttgccatagagccatctccattccgttccttctcccttccttgctctcagttctgaaacccgggacgacgcttgggttcacttggaggaatccctttttgcaacctgggaagcagtgagcagcggcagctcatcccaggtgaattcccagatcctaattagacccttcactcccagccccgtcttcctaccactttcccttttctctccttcttccactaggaggctccagcaaggatcactccaattactggacatcatatccaacaccagtctccgatttctgggtgagttccccctttccccctctggattcctctcatatttccagaaaagcccagtgccaggtgagagaactccccagtcaccactgggtaaccctgacctgccttctcaggggatgtcctcagaatgctcactg

SEQ ID NO: 127502 - DNA, 476 bp, Homo sapiens
ctttagggatggactaaatggctgacattgtcacttataaaagtgtcttaaacttgacagagcttatgttgaaaaataaagtttatattttttctttttatcttttaattccattttcccgtgacctttttgaagttcccttaatgtaagagagagagctaatacataatgatcaaactggtttatttcagaaatggaaagttaatttaaccttcaaaacttcaattagtaatgcaactaatctgtagtgacagaaagtagatcaggtgtggagcaggggtaggagggaaggggctggagacagggattacaggagggataagaaaatgtttggggccaggcatgttggctcacacctgtaatcccagcactttgggaggccaaggtgggcagatcactttgagctcaggagttcaagaccaacctgaggaaatggtgaaaccccatttctacaaaaaatgcaaaaattagccagg

SEQ ID NO: 127503 - DNA, 448 bp, Homo sapiens
attggggaacattctttccccagacaaaacggtttccctacaagacccttattatatgtcattgtacacaggcatttacaaatattgtcttaaatgtagaattaaaatctatactccagctctaactaagttagcaagcattactttttgagtttgaccaaagtagttcattccaaaacatgaaaagccacaaacatttaatcttaggttcctatttttaacaacaatatacagaaatcttcgcaatagcgaaatattactgaaccaccagtgttgttaaacacaaaaataaattagttaggcttgatatacttttccttccctccctcagattccccacctgtttttcagtttcaggaaaaggcagccactgatctccacagcactcaccggaattacctctcttctgggatgataaaggggccatgcctttatttatttatttatt

SEQ ID NO: 127504 - DNA, 329 bp, Homo sapiens
ttcactcagtcagcctcactatttcttaaactacataggaaaaaaaaaatccctctattgttacagataaacaaagctggacactgtttagagtagtcagaacatactttaatcaataatatgtttttgcaataaggaagagattccagcatgaactgaactcaactttgatttgtatagaggttactgggtcttttaaaaggagaatgaaggagtgggggtggggggttcaatggaggctcagtagagtcaggaaaatgaaaaattacaaaagcttggtcagtgtaaatgcaattaggcccttgtgtttggtagctggcaagtaacga

SEQ ID NO: 127505 - DNA, 285 bp, Homo sapiens
cacttagttgtaagtggcctgtacggcttgggatggtggggtctggcttagggaatcagttagaaggattccttcttctccacttcttttggacaaggagaattaaaaaatcacctgtcaccttttcactattaccatgtacgtcagatatttttagttctgcaggtggaattgttaaggtgattgagaatgaggtcttttttttctttttggagcagcaatagagcagaatgaaaggtgagatggtcttaaggaatctgttaagggaagaaggtggcctaggct

SEQ ID NO: 127506 - DNA, 370 bp, Homo sapiens
caaaatggattaaaaaacaggatgcaactacatactgtctacaagagatcacgttaactcatagaaaacacacaggttaaaagtgaaaaaaaaaatgaagaaagacattccatgcaaataatcaccaaaagagagcagggatgcctgtaacaaaaacagccaaaatagactgcaaatcaaaaactgttacaagcaataaagaaggacattacataatgataatgaaagtataacttcaccaagaagacataacaattataaacatatatgtgccaaacatcagagttcaaaaatatataaagcaagcactgacacaattaagaagaagaaacagacagttccttgataataataggagacttcaatatct

SEQ ID NO: 127507 - DNA, 464 bp, Homo sapiens
gaagaaaccaatggataggtgagtagaagagagagtacatgagatcattcaaaagacagtcacctagaccagagactaaggtagggaccatattaaataatagatgggtaaataggtatatagatagacagaaagatacataggtataaacaaaaccatcttaattcttctgagagttgctggcaagtgaaaagaatcagttttggctccagatgtaaatatggggaaaaagagaaattatgtgttgaaactgacagattgctcacttcaaaaagatgaaatttgttatattgtaacccaatgagagagaagtcagtctctggagaggtcaattctatttgttctcaagaaattcactgagatttgaaggattagtgtagaaaggagtgttattcatgacaggaagcttttggtattcttcctaatacctgaggaacagaccaaatcttcttgcttgttccaag

SEQ ID NO: 127508 - DNA, 378 bp, Homo sapiens
aatacacttacaaaaataagaaaagtcaagctgcagatgtcaatccaagtagaaatgtcctataagtactctgaaaaataggactagaacataagcctgagatcatgtatacaaatacaggagtctcctgactagaatggacagctaggtaagatcaaatgtacctagatagcgagtataggggaaaaaggaagactaaaacacagcagctttttaatctactgtaaatataatctgttccatctaaaagaaatgttatatccctctaagaagaaaattacaggtaataaaaataaagacattcggaggccaaggtgggaggatcatttgagcccaggagtttgacaccagccaacaaagcaagaccctgtctctact

SEQ ID NO: 127509 - DNA, 705 bp, Homo sapiens
agggttttttttgtcttgttttgttttgggttttttttgagacagagtctcgctctgtcaccaggctggagtgcagtggcacgatcttggctcactgcaacctctgcctcccaggttcaagcgattctcctgcctcagcctcccgagtagctaggataacagacacatgccaccacgcccagctaacttttgtatttttagtagagatggggtttcaccatgttggccaggatggtctcaatctcttgacctcgtgatccacccaccttggcctcccaaagtgctgggattataggtatgagccactgcaccgggctggttttttttttttttaattctgcgtcatttttttcatataactcaatactttgagtttatttcatacttgatatcttccacaacaaggactagcattattcccatttcacagatgaagtaagtgaggcccagttatgtgactttctcagagtggcaaaggcagatgttaccccagccctatttctacctctgccaccaccaatctctaactcagccctcgggccacgttcccacacactcttaagactgtgttcaaatcctaattctgtttcctgccaacatgtggccttggatatatcacttgccctttctgagcttctggagaacatcttgccttcatgatagtgttgttatgaggactaaatttaaggactaggattcttgagt

SEQ ID NO: 127510 - DNA, 359 bp, Homo sapiens
agcaggtgtaggatacacggataccaaagcctggccaacatggtgaaacccaacctctactaaaaatacaaaaacctagtgggaagcggtggttcacgcctgtaatcccagcaactctgaggctcaggtgggaggatggcttgaaccccggaggcagaggctacagtcacccagatcacactgctgcactccagctggacagagtgagacttaagaaaaataaaatctccaacctggccaacatggcgaaatcctgtctccactaaaaacacaaaaaaaagctgggtgtggtggtgcacgcctgtgatctcagctactggggaggccaaggctggagaattgctggaacctgggaggca

SEQ ID NO: 127511 - DNA, 517 bp, Homo sapiens
tttcccacagcagtcagactgaaatttctacaaagaaagtaggctctatcgttttctcgttgatgtgcttcccatttcaaccagaatccagggcccctgccccctcattcattgtgatcagtcacagtgatcttttttttctgtactttaaacacccaagcttgctccatcacagtgcttttatatttgctgttctgtgtctggagcagttttgccccagagcttcaatcactgtctcttcgtcattctggtctaaactcagacatgaccctctcagagaggcctttcctgaccacacttcatattgtcatattttaactgaatagcatttgtcagtgggtctacttcatcactgtctctttcctagaacacagttttcttgcaggcagggactggtggccatgtgtccccagtgcctagaaggtgctttgggggactgactggctgactttgcaggatgaaccccctgcttgctgcttcagtgcctttttcatggttgtgccttctcttccctaca

SEQ ID NO: 127512 - DNA, 219 bp, Homo sapiens
tcccaaagtgctgggaatacaggcctgagccaccgtgcccggctagagtccttaaaaatatttttttggttgttgaaggagtcatcgggactggggactgcctgggaccccttctaatttccttctcctctgtgttacacacagcggtgctctttttattgatacataattgtacatatttatggggtacagagtgatacttccatgcatgtatacaat

SEQ ID NO: 127513 - DNA, 699 bp, Homo sapiens
gggccgggagggacctgagtagtgttacggcgctgttagttttctccttacttggcacgagttttgtaatacctcctcgccccaggcgctctgccgtctggttacgagcctcactgggatcagaattcattcctttcttagacaaatacttcttgattgcttattatttgccagagagtgttctaggttctggggatatggcagtgaacaaaacagacaaaaatttctgcctttgaagctgggcatggtggcgcgcgctgtactcccagctactctggcggctgaggtggaaggattgttggaaacctggagtccagcctggtcaacatggcgagaccctgtctcttaaaaaataaatctgccttggagcttacattttggcaggatgagacaggcaataaagatgtttagtaacgatattgtattagaaggcaataattacgagaaatagtagagcatggatgggacaggatgatgtaatagagagaaagcagtgagtgtaaggaacttgagcttttacagtaggaaggccccaaaagccttctcccccagctccccttcccttaaaaaaaaaaactactgatgtggaaagtggcatctatgggaaggttatctcctaactggcagagcaaggtcacgcagtgagtcagcctctgcgctcactctccagactcttctaaacaaatctcaaggatctgt

SEQ ID NO: 127514 - DNA, 711 bp, Homo sapiens
gatttttgttgtagagtaaggcaaacatatttcattgaataaggtgcattgtatctcgctgtgaccaggtgattattttttgttgtaagtacagaaataagcactctcctataatgaccaaaattacaatgattttcacagttatgggcttacctgtgtcctgctgttaatcagtcatgtcatgctaatcatgtctttaactctttttgaattaaacccatttactaagtacagcaagaacaaggcacagggtgaaacttaaaagcacatgtctctttgcttttcttcagttagtggaaaccacacattattctaacttggtttttgttatatttcaaaggcagtcatgttcagaaaagaggcttattccctagatttccctttagtttgattacaacttcatttacaaaatgtaaatggattttcacacaaaaaaagccattcttcgagaaaataaacatttcttcgtgaaactggttaatgttgtaatgtactgttagggtactctgtaagttagagaaaatatcaactgtaccttgagcttaattagaataatcatttcatgtatgatcagtgtaagctaaatatcctagatagtgacaagatgcatttataaacattttcttatatgcagaattaataaaatgcaatgatagggcaatactgccacctagagaggaaaatgtaataagccttattaagaattaaatc

SEQ ID NO: 127515 - DNA, 718 bp, Homo sapiens
gggattccctctgcccttctggcatctgaaggctgtgattcaaagatcccccctgcaaccttcccacaaatgaaccaactgattctcacaaccgaagggagaattgacacctcccattgagggacaaaaaaaagtcacactctggcctgctggcaagtcacctgtcatttccagctcatcttcatagttccatagttagtcctattctttagtaaatataaagactattaaaagcttctatgaggtgcactatgtgtgtctctggggtcagtcttgtgcttgacacagcgaaagctcattttagttcagtgtgaaaaaccagacctcaccaattcatcacaactaactccatcggaagcagaggattgctcctcatctgactcctcctgtgtgagacctgattctcagtcagaggctgatgccggaactgagaccatcagccatagagagatccttccagaataaccccgcagttcactactgcactttgccatgattcaggactggaactcttgtcatcgactttaaagatcctggttgagagaaaaggcaatctgaatgctgggcgcatctattgaattagaaatgatcggaatggctcctaagtcagggtgttatgtcctgaaaataggtgacaacggcaaaccatccaccctggtgttgactgactttaacaaggttcagttcacagagattgagggcagaaaaaggaaacggc

SEQ ID NO: 127516 - DNA, 549 bp, Homo sapiens
atattactacagggtaaaatattggacctgaaatgaaagctcttcttcaggttgaattgctaagtatgagtctaggcttcttggaggaagaagaaatatgcactttaaccaggaagtgaatggagccattggaagagtgttgtgtagatgggtaatgatttcacacacacaaatcttatttattcatttttatgaaatcagatctctgtgttaatatatttagagaggaaaagacttggactcaggcagttaagaaagaaagttctaatggtactttagttgcgaaaagaaagacaagagaagcataaggttagagagggagaaattaatttgtaatggacgtgtaggatttcctgtgcagcacccctttctctgattcttctgataaaaccaacttctccatttagggattaaatacttgccctccaccatgccaacagtgtggttctaacaggggctactatgtggatggatcaaatctgtcagttccttctatcttcttattctccagcccaccacactaactggggccaagcaggggagacataa

SEQ ID NO: 127517 - DNA, 424 bp, Homo sapiens
ctgaaactcaagtcctgtagagacctaggaaactactcccctccacaagatctcatcacttccttgccaaagagctgttcttaacacgaaggccccatatccctaaggggcccatagatagaattcaggaggcctgtgaatttggatgggaatgaaattacatctttgttttcaatattctcttactgaaagttagcatttccttcaattacatatggagcaaccaaccacaataatattagcaataactgtgattttgtcatcaatagaaatcaacagatgttttcatatcacattacattgctacagatatctcaaagtattatttacactcatcattacttctaaattacggtaaaaaatagaggccaggcgcggtggctcacgcctgtaatcccacactttgggaggccgaggcaggcag

SEQ ID NO: 127518 - DNA, 335 bp, Homo sapiens
tgcagttaaggtggaagggtctgtttgttttcagaaaaaaaaaactaggattaatagcaaggcgaaaaacacttgatgtcaaatctctcagaaaaccaaataattttttggtttgatttgttagttttggctgccgtttaattccttaagaagctagggtaatagttgtgtactttcaggccatttccaccccttctattgtgaagatggagctccccacactagtcggtgtagtgtttctctgctaggccagccaagtagaaaactccaattagccgacaactggttaaagtgctgctgagactagacacagggggagaaaatggctcttgtca

SEQ ID NO: 127519 - DNA, 156 bp, Homo sapiens
gattactgattgagcctccttactcatattagtatgttcagattttctatttcttcttcatgatacagtcttggtaagctgtatatgtctagaaattcatccatttttttctagattatccaatttgttgatgtatagttgttcatagtagtctct

SEQ ID NO: 127520 - DNA, 171 bp, Homo sapiens
agaagaatgttttctatgaaacaggagaaacatgttgaaaaagaaatacagaggattagaagaaggggttgactgaaaataattcacaatgagcagatccttgcaaacatgcccctaaaggtcgaggatgctgagaggctgaataaagggactgacaaacccagtttctca

SEQ ID NO: 127521 - DNA, 707 bp, Homo sapiens
ttttcatttaccagtaataaggaatgaacgaaaattactcaaatttggctttggaacatgtaaaagtacccacttaattctgatgtacatttgggttaagattcactctgttggtctctcaggttctatgaggtcaaggagcttgcttgtcttgttcactatgaaactcccaaatgttcagcatattgcctggttctcaatgaatacaaaggaaggcactgttctgagatggtatgaggactggaccaaggaaaggaatctggcaacttcataacctttggagtgtgggcactggagaggcttctagcgaacaaacctgcagagaaatgcagcatacaattctcatgggcttctgtcttgggctcatgaatgaaactgataatcttcaatcttaaaatttcccaaaggcacacctttttaactctgcctacagtaattgctcatgtacatattaacagctctcaaaaacgtgggcctcattgactaattgaaacaatctgtcttgatatgtggatgtaatggttgttaatataagagctacactctggaagaacagaccttaaaaagatcattttctgagccgggcgcggttgtcacgcctgtaatcccagcactttgggaggccgaggcgggcggatcacgaggtcaggagatcgagaccatcctggctaacacggtgaaaccccgtctctactaaaaaaaaaaaa

SEQ ID NO: 127522 - DNA, 340 bp, Homo sapiens
cagctaagtgggcacacaggagagcagtgaggccatttgaggcctgagcctggtcctcaggactcgactctctctccctgccatcaagcagcctgccccagccctgccagccatctccacactcctgacagaatgaatgccctcgatggtgttcctttcaagttgcccaagggctttgtgataggcacagagcctctccctgggccagaactcagcgtcccggcctgcggggaagttctgctgggttctatgcacgacttcagcctggagaggacggcactcttctgggtggaggccgccggccagggacccagcccgtaccagtgcggtgacccgggga

SEQ ID NO: 127523 - DNA, 616 bp, Homo sapiens
tatgtttttttgtgtatgtgttatctctttacattgcctctctgcaacaggagctactaagaattacatacaaacacacataagtatgtgaatatatatgtatatattataggtgttcatttttgtttgggtataatttcagacttacagaaaagttacaagaatagtgcagagaattcctgaatacccttcatctagattccccaaatggtagcattgggctacatttgctttattctttctttccctccctgtctcctatgtgtatatgtatccatatgtgcatgtgtgtacattatgcatgtatggtgtgtctatgtgtacatataaaatattttcttccaaaaccatttaagagaaagttgtaggcacaataatatatctttcaccctaaatactccatatagttcatttttgtgttcaaaaattgcttgttggtggttatgctcttcatttgaaataagttaggttcattgtagtgatacctgttttctaaattagtaaattgataatttgcacagtagaacacataatgtggcctggtagttagataaacaaaaaagctgcttaataaaaatggatatattctggaggccagggttggttaaaatatggt

SEQ ID NO: 127524 - DNA, 289 bp, Homo sapiens
gacaaccatgctgaccgctctctttgcattcacagccgcggactccagggaggccctagggctgcatcaatcctactcaatctccccagtccacgcactcttccacccccaagtgaccagtcacatcttttcttctttcaaatctccaacacctccttccctctctcctcattctcaactgaggaccttccttcctacaacacggagaagatgggaagactcagaagagactctccatgtacttctgccacaccagctaccaccctacctgtacctacagagcctgccc

SEQ ID NO: 127525 - DNA, 420 bp, Homo sapiens
  misc_feature (13)..(13): n is a, c, g, or t
ggcatggtcccgnacgtcacgttcgccatgcacccctttaacgtgatctctcctgctgctcccgcacactgcagaccccgggtgaggtgggcgtaggtgtcccgagagaagataccggggcagaagcaggggtgcttccatgggcagtgagggagctggtcaggaaccgtgtggtaggcgacaaggtgggaccaggttgcctggtggtaaggttggtgactggagaggtggggatacccgtcacccccgaggtgagtgacacaaagcctgatgtgggaactcgggtggtgagagaagtggaccgcgaggtggtggatgaggggctgccaagttagcaatgaatgtttcccatttcttcttagtttatggactttccataaactcaggatggcagtttggttggttggagaaggatatggt

SEQ ID NO: 127526 - DNA, 737 bp, Homo sapiens
caatgaggggcagagaattatggtcatttttgaaatcagtctacctcagtcaacaaaagcaggttcttttaaaacacttttgaagacagatcaagagaaaggaagatacaggtaaccagtcaagaataaaaaaatgagacatcgtttcagatcttattggtattaaaaataaattaggcatctattttaaatcaacaaatttgaaaatttagacaaaatggatacaacttaaaaattgacatacgaaggaatagaaagtctgaatccataatttaaaactttctgtagtgaaatctctaggctcaggtagcttcaccagtgaattttattcattatttaaggaagaaataacagccatatacaagcctatctggagagtggaaaaaggaggaatacattccaacatgttttgctaccagaataaccttgataccaaaacctgagacgtgtattatgagaaagaaaaattgtgggccagttctatttatgaatggacatttcttaaaaaaaaaaatcaccagaatgccaggaaacaatttgctcaagttgattttgcattaaattggtttaacatttgaagttgaaattgaatttgaaattaaatttgaagttgaagttggttaacatttgcagttgaaatccactgcaataacagaattaaggagaaatgttgttttaatagatagtgaaaaatgataaatttagatatccacttgtagttgggaactcttagcaaa

SEQ ID NO: 127527 - DNA, 744 bp, Homo sapiens
tatcttaggttcattgtctggaacccctgtaacaaaagacagattaagaagaagaaagcatactaatttatttaatgtaagttatacatgaaaaaaaatgaagacctgaagaagtaattaaacctgggtggggttttgctgctgtttgtggtggtggtggtgatggtgttttcgaggcagggtctcgctgtatcgcccagcctggtctctcacaggagggtcttaggcctgcttcaggggaaggtcagaaaagtcttcctaggttttaggacctgctgcagaggggaaagaagaggaatggccaggggaggtcagagaaaccttcctgaacatgctgtttctcaaattccttctgcttaaactgttcgctatgctaaggtgccagatttgggagtagcgtgtcctgaagaccatcaactttgcaggtggtttgatgtggttacaagtgcttaaaaatgccctctgttgcctcatctttgaaatgggataacagtgatactaatagctcctgtccaacagaggcattcagtgcctggcatgtcattagtattatatatacataacaaataatatcctgtctgtttctttgaggagtttcagacacactatcaagaaagcctgctgtgttgaagtgtaagagtgcagccccgcttacagcgcttcttggttagaaaggcccaggctaggctgggcatggtagctcatgcctgtaatcctggcactttgggaggccgaggcaggtgg

SEQ ID NO: 127528 - DNA, 746 bp, Homo sapiens
ggcataagagtatggacatacagagatgtgaattagagaatgattgcaagaagcagtgaggcaaaaaggattaatgaaacattgatctgtcttacatacacagctattgacagtaccttgtgtgtgcatagcactattctagattcacctaatcttcaatgataatactgtatttaccatttaacaagcctgtaataagtgtcaggcacttctctgattacatcacatacatatgtgataagttccatattaactctagaaggtggggaaacataatcatctaaatttaccagatgaatatgtagaggtacagggagattaagtaatttgcttaaggtagctcagctggtacgtggtagagtcaggattttaatggtggcagcatgacagtaggattaaagattcttaaccagtcagttgtcacgatctctcagattttaatagaattctaaaaaggatagaacaaaatataaaatggcaggaatcatagtatcttctaacaagaactagacatgtcccattgaggatgctctttaaaaataaaacccattaaaattttgggttgtttactcaaagcctatagacattggcatattatattttcttagataaaaactgagatatcctaaataactcatgcccattctctagacttgcatagggagctgtctatgataatatccataacagttatcttgtttcacaattttattactatctcactcttcttactttgtgaagatgaa

SEQ ID NO: 127529 - DNA, 728 bp, Homo sapiens
aggaacttaatgaagaacataatcattgccagtggccagtttaaatattgacttgcagatattttttcaaaccttagaatttgaaattcagaaacaagtgaaacctgagtaagagacgtgatagaaaaccaaagaatgtcacgaccatggtcagtgttttctgtgatagatttgttactgaaaaaattgtggttaaggaacatctggtaagtcaatcaggttttaaatgtattgagaaagcataagaaaagttgctaaattattttttaaaatgacttaaactaccttctaattcatttggtaaaattcagaagtttatgtactatgttgttatccctgcaaggctatacctatgaccaattcattaagtacaaaattaaggcaagttgtttagggtcaagtagatgaaacttttgttggttttatatatatatatatttggagatagggtcttgctttatcacccaggcacagtcatggctcactgcagcctcgacctcctgggctcaggtgattctcctgcctcagcctcctgaatagctgggactataggcacataccaccacacccagctaatgtttgtattttttgtagagatggggtttcaccttgttgcccaggctggtctcgactcctggattcaagcatttcgcccatctcggcctcccgaagtgctgggattacaggcatgagccgctgagtccagcccttttttttttgggggggga

SEQ ID NO: 127530 - DNA, 433 bp, Homo sapiens
tgggtccatttatatgaaattctgcaacagactaaactatagtacaaaaacttcaaaacagttgttgctatggggatgagaatgagagtgtggactgaaaaggggcatgatgaaagtatctggggtgacaagttctatatcttgacagggatttgggttgtacaggtgtatgcatttttctaaactcatagaatgtacacttaagatttctgtatttcaatagatataaattttatatcaaaagaaaaattacatatatttatttgcatgctgacatatttagttggaaaactactaatgtctgcaatttactttgaaatgcatcaaaaagtaagccagataaatagatggatagagggacacacagatgatggatgtcagataaaaacaaggaagtagggtaaaacgttaatggaaaaattctgatggtgga

SEQ ID NO: 127531 - DNA, 421 bp, Homo sapiens
ctatgggcggggactgggggtcgggaaaagccttttcactgagagtgtccggctcctgggtctcactccatggcttgcctcagtgccccgcagaagtccctgagaaggcaggcctgcggggcaggggggctgtctgaggggctcagtcaccaaacaagccccagttccatggcaaccattatacccattcatcaaggagatgtagagggaggtgcttcctggttcaccccaccctcagcagagacagaccccagatctgggcccaggactttgtgcagggaggggaaatgcaggtgaccagcccctattcctccatcaaaccaggcttgaagatgggttaaatcagagcttttcattccacaaaagagaaattttaatggggtcagaacattgatcttctaatatttgaaagcctgttaac

SEQ ID NO: 127532 - DNA, 474 bp, Homo sapiens
  misc_feature (16)..(16): n is a, c, g, or t
aacgctctctctgtgnggggacgctcctcggtggggacgctctctctgtggggttggctcatacacccactgaaggaatgtttttaaattaactctgaagccaaaagccctccagggttaagtcccaattttggggttcacctgtgtcagcctggtgaccctgaaggaaggaaccatcaaaatgaagagaccatgaagggagcatcaagatgagcgggttgaccatcaagataaagtttggagttgtgatactgtaatgctatatactagccaaaggctcttttcagagccatgttttcttggtgactaactggttgtacactgaagctttggaaacctttgcctggacccaaattaatggccaattggcaccatgtggtttctgtgatttccctgtcatattgacctttctgggtaaaccaggaaatgaaagtggggcctccagctagtcccatgttcagattatgtccccat

SEQ ID NO: 127533 - DNA, 448 bp, Homo sapiens
gaacagtaagtgcatcctgcacaggggaggagctggtagtgtgtctgtcttaggagattaacaagaagactgtacttcacaggagaagaatagaaagtgtgtgcttcacaagagaagaacaagaagtgtgtcctgcaaaaaggagacacagaaagtatgtcctgcacaggggaggaagaaaaagtgtgccctgcacagaggataaacatgaagttgtcctgtacaagggagacacaggaagtatgttccacacagaggagaaataggaaatgtgtcctgcacaggggaggaacaggaagtgtgtccttcaaagaagagaaaccagaagtgtgttcttcacagaaaagaaacaaaatgtgtgctgcacaggggaggaacagaaagtatgtgctgcacagggaaggaacaggaactgtgtcctgcataggagagaaacaggaagtgtgtc

SEQ ID NO: 127534 - DNA, 455 bp, Homo sapiens
aaataggggagactgccaatacctgtgacctggcacagtgaattggcaagcagatcagaaagagatcttaatacattgtgaataagtcctgatttctagagagatctccaaggttgaattattaaaaccctcacatttacctcctcttggagctctgttggagttaaaagtctctactgaatcttaaaaaggacgcaaatgtcaaaaagagacaaatcccagccaagtgatgggaaatgtgatttcaggataatagcatctgctcattggtcattaaaatacattatttccaatgaatgcccttaactctgcaggatgggaacatagctttaatcagacaggttcccagatcagagtacatcaaaacacaagcagcagattctgtgctgcctgatcaacagaggaaagaaattcagaacattttcttttacatttaaaatgctttatgagggaaa

SEQ ID NO: 127535 - DNA, 108 bp, Homo sapiens
atcgcaagagaccgattatgagggtgtccaattttcaaccatttgggagaaatacagcagaacattggtacagcagtgtgttagtaagacgtaatctatcactgctcc

SEQ ID NO: 127536 - DNA, 348 bp, Homo sapiens
aaaagaaaagatgactgaacaaagatgggtcaataaacaggatggctggaagtagaaatcttttaaaataaaatgccttaccacttaatgctaataagttttattgagaacttgtaaggtgtggctcacgcctgcaatcccagcactttgggaggccaactatgttttaaaaatatccatacaataatttggaggctgaaggggaaggatcatttgagccccagagttcaagcctagcctgggcaccacagcgagaccccatctctaaaaaaattagccaagcatgatggtacacacctgtagtatcagacacatgagaagctgaggtgggaggatcacttgagccca

SEQ ID NO: 127537 - DNA, 350 bp, Homo sapiens
atgaaatgcagttagacatccaggccaggtacatctatgggaagccagtgcagggggtggcatatgtgcgctttgggctcctagatgaggatggtaagaagactttctttcgggggctggagagtcagaccaagctggtgaatggacagagccacatttccctctcaaaggcagagttccaggacgccctggagaagctgaatatgggcattactgacctccaggggctgcgcctctacgttgctgcagccatcattgagtctccaggcggcgagacggacgagacggagcggtggtgcgccctcggcggactggagaggcctcgggaaaacaagcaaagaccccaaaag

SEQ ID NO: 127538 - DNA, 485 bp, Homo sapiens
cgtcctgtggtttccgggatcttcagacgcaaacggcttgcaaagtttgccactgcagcacctctccaaagactggaaataactgacatgtccagcaagaggggactggctaaattaatgatggtacatccaggcaacagaatactacacagctatcaaaaagaatggaaaagttggccaggtgcagtggctcatgcctgtaatcctagcactttgggaggctgaagcagggggattgcttgagcccaggagttcaagatcagcctgggtaacctagcaagaccctatccctacaaaaaggaaaaaaacagacaaaaagaatgtttatataatgatgtggaaagacctccaagatctagggtgaggccaggcgtggtggctcacgcctgtaatcccagcactttgggaggccaaggaaggtggatcacttgaagtcaggagttcaagcccagactggccaacatagtgaaaccccgtctctacta

SEQ ID NO: 127539 - DNA, 637 bp, Homo sapiens
tgagaagtggctggatttgggctatattttgaaggtggaggcaaagagctctgcagatggattgtatgttgtgggtgagaaaagagtcaagcatgactctgcagcagggttttcgccaagcagccggagtggagagatagaacagtcactggaggagacaaggcattctgggagtagtggtttcagtgggaagaccaggagttggatgttgggcaggtgacattttcaacgtacagtggtatctgagcaaacatgctgggtgagccaacacaacacaccactggcacagggaagatgtccagcaaagcttggctctcctctctcaagctactgcccagacaaaaagagtcctcatataaacttcatcaaacatccctgcagacttccttattgcaaggtgcttttggatcccaggatggaagagggccaggagacagggagcaggatcatctcttggcaggtgtgagggggagaagggccagggaggcagggtcccccctacttagacaactgcagggccacgcagggtggggcccgtgcaaggcagggaaccccggctactggcagacaagccccatcttctctcttaggaggaaagaaagctccacagagcaggccaggccagccccagggcccc

SEQ ID NO: 127540 - DNA, 456 bp, Homo sapiens
ttttattcccaaatgctgttcgagctctcagaaataacagctgctcactataaatgcaaaatcatttgcagtcataattaagttaaggatctcaagcccatcttggatcattgagggggactctaactccagcaacaagtgtccttgtaagagacacacagggaggagaggagagggccgtgtgaagagggaagcagaaattagacgatgcagctgcaaactaagaagagcctggagccaccagaaacgggaagaagcaaggaaagattctccccaagaggcttcagagaaagcacagccctgctgtcaccttgattttggatttctggcctccagaactgtgagagaatacatttctgttttaagccatcaagtctgcagtaatttattttggcagccccagggaactaatctgaaaaagtatgcatagtctcagctcctgggaggctgaggcag

SEQ ID NO: 127541 - DNA, 308 bp, Homo sapiens
aaaatcagagacagacaccattttctgaatccccagactgggttccttccagaaccagagccccaaatggcagacatgaggcaggctaggggagtgggcagggcacgacatgccctcgcagtcacccgcggcccaggtagtggccttctcaaaagctgccttggccttgcccaccaatgaaccttccgacccggaccccctgaagatgtagcggtgacctctgcttctgacagctcgccaccacctcagtctctcctgcaccccaacctcaggcctgcccggaagggaggtccgagccacaggggcct

SEQ ID NO: 127542 - DNA, 342 bp, Homo sapiens
ttgtaataagccaagtttatagtttacccctgtgaattaattcaacatacataattcaactgatgtaaaaaataagtaaataacttacttgtcatttttcttatgcagtctagtttctgagaatattttaaatttatctgctgtagcttttgatacttacttcctggtcacaaaagatttataacctttaattatcaattactcacactttaaaagtttcttatttctttgaaagattggaacagactatcaaatcatggctgttatgttcctttcttaaaattcaatgtagtcattacagaaactttctgcatttttagtattttttaagaataagctgac

SEQ ID NO: 127543 - DNA, 811 bp, Homo sapiens
acagccaccagtcccagaacccgccaatgctggggaacggaaaatgagggagttcaactctggccctcacaatccagtggaggagacgaaactcatctgcctctgtccctctgggcacgcctcatgccaggtgcatctgtggacaggggccatgctcctgggcttccaaagttggagaaagctgccaggctcaggtctgaaggccagaattctacagtaagtcctactgagtcaaggtgggagcagggtcggtagcttccgaggctctgcgggagaatctgtttcctggccgtagaggtggcctgcactcctcagcctgtgctgcccgtctcgaatgactggagtttcctgcttctgtcactacacctcccaccctctccatcacctgctctgctcttacaaggatccgaagaaatggaatcatcgtatcgctgatctacgtaaacaaactgaagaattgtctgaaagaaaatatgaccatgaactttatgaattcaaccaggtgaaagattacaaattgataaatcaactttgtcagctcgagctgtaaaagccaaaggtaccggtgatgatcccataccctttaatacagtctcatgttgaagatttcatgtagaaggccttctcaaagaacaacacaacggggggtacacctgcaggcgaggccacgagtacccagctggcgacgaaccggagatcccagaaatagaagacagctagaacaaaccgagacggcatcacacagcaacatagggcccaaaaagacacacagacaaaaccacgaggggaatgaagagagatggcgcaaaat

SEQ ID NO: 127544 - DNA, 315 bp, Homo sapiens
tatataaatctacctaggtctatagtctctacaacacctaaggaaggtgtccaaagtttaattcctgagcaatgatacatatactgatcctggatcagagacttctgagggcctaatggagacccaattttatgaaccataaaagtcttccagctgttactgcatccccaggaaccaccatagagagacttttgttttgactgtgtatcaataagtaatttggctcagaatagtttttcgccagtccttttctataagtcaacaaataaccacttgcaagaaataagtgctctctgctctttatcccagtgattt

SEQ ID NO: 127545 - DNA, 573 bp, Homo sapiens
tagggggctttccctccaatcccttcagaaataaccaccagctactatgtacagagttcccgctctgtacagcacttcagacacgttatcatatcttatcctcaaaacgccactctggggaggcatgactgtgcttccatcacgcagatgaggacgctggagtcccaggaggccgagtgacctcgaggggatggtatgtgacagtgcctttgttggaaggaacaggacatcggcccttagaagctgagccctcatccaaagcaagttcagccagagaaagaataaccaggggcgctgagccatggtggtacaggcttggcccgcccacagtgccccgctgtgggccacacgggtgccagacggaacccagtgagagctgaggatggcctcggccagggcccaccaagactctgtcatgaccccagacctctaatctcccactggtgggtgggcaaaaagccctggcagtgttacggtcactcaggaccatccctgggtactgagggcaagaaacaggccaggccactgattctccagaacttgatttctggagaccagatgcacagtggaaga

SEQ ID NO: 127546 - DNA, 697 bp, Homo sapiens
cagtgagccaagattgtgccactgcactccagcccgggcgacagagtgagactctgtctcgaaaaaaactaatgccaagataagttctaaagaagttttaaaattgctgtttaaaaatatacacaggccagccgccatggcttatgcccctaatcccaaaactttaggagtccaaagtgggaggatcgcttgagcccagtagtttgagaccagcctgggtaacatacagagaccctgtctctacaaaaattagaaaattagccgggcatgatggcgcacgtctgtggtctcaatcacttgagaagctgaggtggatcacctgaggccaggggttcgagaccagcctggtcaacatggtaaaaaccccatctctactaaaaatacaaaaattagttgggcgtggtggtgcacgtctgtagtcccagctactcgggaggctgaggcacgagaatcgcttgaacctgggacagaggttgcagtgagccaagatcgtgccactgcactccagcctgggtgacaagagtgaaactccatctcaaaaaaaaaaaacttttgcgtttagtttgagatacttgtggaagacagggtctctgaaagtccaaagagtggcaggtatctgcccctgtaagtgggatcttcactctaatagtggccttaaatgtcattagtctttctttttttttttaagatgcccatt

SEQ ID NO: 127547 - DNA, 274 bp, Homo sapiens
aaaaaacaaaaacaaagcaaaacaaaacagaatggatgacagacataagagctaaaactataaaacttttagaagaaaatatagcagtaaattgtcatgatcttgggtttggaaagaccttgggcaaaagtcttcttaggtaggatactgctgtggtttggatatggccccaaaagctcatgtgccgggagcttgacccccatgtggaagtgttgggaggtgggacctttaagaggtgtttagcttatggaggctctgccctcacgaagagatg

SEQ ID NO: 127548 - DNA, 518 bp, Homo sapiens
cctcttcaccctaccaacatatctaaatagttaaatgatgtataagaaatcaaattcagcacataaaagtatgctcaaaggtgtcaagacacacaatgcaaaaatacagttcctattgaagctaaacctatgcaaagtcaaggggtgtctcttaaagtgcgctaaatagtttcattactcagggagtggcattacaaacaaatcaaataaaaagttaaaataaaaacaaatgtgaaaattaagtccaaaaaacaacttaactcttactacttaatttacctgcaagaaaaagtttagtaaatatttttaatagtcattatgttacagaaaagcaagctaggataaatgggttctaggcaaaatcaatggtgcacccaaggaaagaaacaacttaaaaattgttattttatcattcctatctaatgtttcatttgtaactatgagtaaacaggtgtttgagaacaaattctaaaactaacctttgggtcacattcaactctgaaagcttagtataaata

SEQ ID NO: 127549 - DNA, 458 bp, Homo sapiens
tcccaatacgcacacattctctctctctcacttttctagttgtatcagctgaagagcgtagaagctgtgccatcccagccattatgagcatctctcatgcccagatcttcgtttctgaatttctctttccactagaagaaaccatgagagaaatggcgagcctgagatcctttattgcaccaaaagcaaggaagtatggaaggagagctgagggcttgccaggacattggctgacatggtctctcactggtcaaacttgggatggttggaacatcaataaagaatattaatgatcatggattataagtacattaaaaaaacccatatgagtccacagtgatgagagttgggctggagcagggaggggaaagctctgctttataggaacatgccagataacaaatatagaaggagttagagaattagaaactcctcatgttataaccttaatgtaatca

SEQ ID NO: 127550 - DNA, 130 bp, Homo sapiens
cgagaccagactgggcaacatagtgagaatctgcctctttaaaaaaatgttaaaattagctgggcaaggtagggtagtgtgtgcctatagtcctaactactgaggagactgaggtgggaggatcacttga

SEQ ID NO: 127551 - DNA, 748 bp, Homo sapiens
gcccttgccatgtgctgggcactatttactctatgaactttatatgtattagcttatttaaaccccgcacaaacctatgaggtagttactattatcaccctccatcactgacaggtgagtaaaatgaagccccgagagcagaggtaggctgcttaagggaggtggctgggggcagagctgggatatcataggtgggaataattaagctcgacctagagctgaattaattgctggtgcactctggcccccccttctgctgcgtgactgtctcttgttctctgccccctgctccccatacttccattaaaaagcccatataaaacagggctatgtagcccattataaaacagggctaatcacagctcctcttttccttccctcctctattgctcactcccctcctcaacagggctgagtctccaaggagaggacggcacaggcaaggcttgggtgctgggggccgagggcgaggtcgaaggtgtcactggcgctctggctgcctgcacgggcaggaaggcttctttgccggcctgggagtcaatctccttcctcttttccctctcacgctcttctaggttttgggttctcttcctataaaacagggaggagtttctcaggctctggtgtgagggagagaatagagaagttacatgaaagtatgtctgtttctggtaatatggtggtctgtgcccacttcagcttaaaaacaacaacaaatgctgcatagaattaaatcttttcaaagcat

SEQ ID NO: 127552 - DNA, 587 bp, Homo sapiens
gcggcacgaggacaggcccacgctgggcgcagggggactcatctggctgatgggctgctctgggaccggtctccccctctctgctgcacctgggcatgggcacctgtgaccccctccattccctactcaacacgacaatctgagacaccttgcgggagctaaagcaggtcgtctgggccagggcttcccaggagtgtgggactctgctgacaaataagtggatttgagtcacatcccaaacacagcactgagcaccatcaagtcatcaagtcaccccggaagaggactggtttgcagtggcctttcaattctatgaactgcacccaggagcaagtcttggtttggtactactgtgtctttcacgtctctctaacatttgctaagcttccttatcaacggaaagggaaggcaggaagcccagagcttgaggagacaatagtctccagctaggctttaataccattgtacagcttgttgtgtttatttttgttactctctatttatggcaagtgatactgctttttttcatttacaatgggatatagagtttctttataaattaaattttaaaaattgaaaaaatagtg

SEQ ID NO: 127553 - DNA, 443 bp, Homo sapiens
cagggtaggcacacccacccgtgcctgtggtggcccgccctaagactctatccaggacagccacctcagcctcactatcccctggccacgtcctggccgttcagtcccaccgtgacgcagcttacaagctgcagaaccgtctgcctctcaagccagtgttcctcccactgtaccacagttgcttccgttgggtccagactcttctgaaaactccccttttcaattttactcaaacagattttggccatggaaatggtttgtgactttaacgggcaagctgtgatataaaaagtaaaccatgggttacataacttcaggggcaggttaacttttccagaattctggtctcaaagtaaagatttagatttagttgaggctataaaaattcaggaaaaaataataaagcatttctacacctccctccttccccttgcgagcccccc

SEQ ID NO: 127554 - DNA, 587 bp, Homo sapiens
atagatgcaattgttcccagatgttttgcttttaggcaaaaccttgtatagatgactgtataccctcttacagttgatgcttaataaaacaaaactaccatggttttataatggaatggtaagctcaaacattttgctggtagtataaaaaccaagtgcctgtgattacctatacattaactcctgaagaatcaattataatctcagcaaccttgctctttgaccattcattctaaagcttggcgaagttaatgagaacagataataggagtgctaatgcaattggaagacttttttttttttaaacaaagtaaggaagggatacatttttaaataaaacattgcattttggtaaaaaacacagattatgagaacacattgagttagaggaacatcatattgattccaagaacaaaaagcatggtggagaaattttgtaaccatgcaaatccagtgtgctctgttctcatgagttaaaaagaattttcctcctatagaaacttgttatttaaatgtgtgtcacatgtaaataacagtctaatgagagcaatatagagggagaaatatgtaagcaagggaaagtgggc

SEQ ID NO: 127555 - DNA, 237 bp, Homo sapiens
gggccaaacagaggagtgagatcacctgacttaggtttaacaagctcatcctggacgctgtgttaagaattgacttccatcataaatgtagcagcaggaagaccaggcagaaggcaaaaaaatgatagtggcttggactaactgtgtgacagttgaggaggtaagagataatcaggggccaggtgtggtggttcacgcctgtaatcccagcagtttgggagaccaaagtgggaggat

SEQ ID NO: 127556 - DNA, 498 bp, Homo sapiens
tgaggatgtactgggatactaggtgagttttgcatcctgtcttgaccgaggctatctgaatattatatatagtttggggagaactactatcttcccaagttgatagaaaaccttgaatagcagggcatcatggctcaaattctgaggtccccaagatgcttcttagaattggaattagagtgaggcaaacaaggtgcccagaggacaaactctaaggaggtgaatgcccagagtcatgtgagtgcagggctggtacccgagagtgagcacttgcttagggtttgcatcctggacacccactttcctgtccttagccctagttttggtacccacaatggctctcaaactattttttcccatgattcccagtaagaaatacattttacattcaacatgtagtacacagagacacacatgcatgtacacaagcacaaacacacacacagacataactgaaacaaggattacaagtgacagtgctaacaatactaaccttta

SEQ ID NO: 127557 - DNA, 687 bp, Homo sapiens
ggtggaggcggggaggcgggcaggcgaggtttgagaacaatgacacaaagtgaaattatatatagacttatttaaaggcttattttactataaaattaaaagtgcattcttctaatttttaataaagtataaaacagaaaaaagcatatactatatgataatactagcatttactcaatagtaataagaaattcagatttttagaagtctgacttagttatacattaacatacacctagcaatcacattaaaatacacaaggctttcctaatagaagttttcttataaaacaaaagtgcttttccttagataatagccattatgttcaatttcagtactacataataacataccattaatgtatacaccataaataaaaaacttagaagttctcaagtagaaaatggtaaaatatcacttgcagtttaacataaatatgtactaagttattattaattaataacaatcttagggcatagttgcttctttaaaaatgtttaaacatcagaacaattcattcctattaagtaggttttgctttttgctttcaaacttcttggcatttgcgatttctcatttgcgactgtgaaagtggcactggcccctattacaaacctgcatttaaaagctgatttagaggaagcaagttgattatgaaattgggcctctttcaaggttttgaattaa

SEQ ID NO: 127558 - DNA, 1454 bp, Homo sapiens
  misc_feature (2)..(3): n is a, c, g, or t
  misc_feature (545)..(545): n is a, c, g, or t
  misc_feature (690)..(690): n is a, c, g, or t
  misc_feature (927)..(927): n is a, c, g, or t
gnngctttagaattagtcattatgtgagttggaagaccatttgattctttattagaagttagcaagtgtgccagattagaccttcacccaagaacgtcatgagggttaatgagaggtttttaaaagataatagttatctttgtttcatgtttaacaactttatgcattggctggtcattccagctccacagaaagctcttcagttgagtttcaattacagcccgcaattccagatgctacaacattttaactgtggctgccagatatcagtgagattcacaggcctggagtacaacattctttacaatgtgtgcttcatattttgaaggccatctgtctcattttcatctacaattggctctgccgaagttttgcatgccaaatgatattttttaaaataagcttttgtgctactttaaaaatgtttcaaaaatatcttcgagatacaattcacacaccatgaaattcagccatttaaagtgtacaagtcagtggtttttagtagattcacaaagttgtgcaactatcactacagtctaaatttngaacactttcattactccataaagaaaccccatgcccattagcagtcactccagttcctctcctagtcctgggcaaccactaatgtaatttctgtctctaaagatttgcctgttcttatgaggagtggcggtgtacacctgtagncccagctacttgaggaggccaaggcaggaggatcatttaagcccaggagtttcaggctgcagtgaattatgatactgctactgcactcccatctgggtgacagagtgagaacccatcctctaaaaaataaagatttgcctattctagacatttcttataaacagaaatatacagtattttgggactgctttttttcacttagcataatgtttttaaggttcatccatgttgtagcangtataagtatttcatttcttttttgtccaaatcatattccattagaagtataaccatatttgatttatccatttatcgtttgataggcatttgggttgtttccacatttgcctactataaataatgctgctataaatattcacatacaagtttttctgtgaacacatgttttcatttctctccattattattataggctgaactgtggctccaccaaattcataatttgaagtcccaacccctagtatctcaggatgtaactgtatttaaagataaggtgtgtatagaggtggttatgctaaagtaaagctgctaggatgggggctctaatcccgtatgaatagtgtccttataaaaagccatcaggggcctgtccgcacagggaaacaccatgtgaggatacagaaaacaaccatctgcaagaaaggagagagatcttagaagaaaacagacctgccagcactgtaatcttcaactgccaggctccaaaactgtaataaataaatttctgttgtttaatttactca

SEQ ID NO: 127559 - DNA, 271 bp, Homo sapiens
ggttttgggaagatacttgggtgggcggttcaggctgagacaatgaaatcaaccagtggaggccactcagtgtggctgtggtagagccatgcatagacacaggccatgcactccagtgctgccacgcctgcctgccctggaagaggtctgacaagactcaaggcatttggcctggcatgatggctcatgcctgtaatcccagtgctttgggaggccgaggcaggagaattgcttgagcccaggagttcaagaccagcctgagcaaccatag

SEQ ID NO: 127560 - DNA, 214 bp, Homo sapiens
agtgcttgaataagttatatgcatcatcaattttccttaaatattttgttgctgtcggtttgggatattttcttttcaggaaggcaagactcaatgaagcaaacaattattgtcttccaacctgaaagaaaaaaaagtgactttcctcagagtgaaatgtagttaaataaataagttctcaggaagatactttagctagaaaatccagtttgta

SEQ ID NO: 127561 - DNA, 332 bp, Homo sapiens
aattccaatgattgtgctgtaaatgattatttaaaaatctcatttgctcctatagtataaatttgtgttaaatcagcataaacacaccaaaaagtcttaaataattagaatgatttttcttatcttcaatgatgatggaaagagaaagatacaaaggcattgttaaaaggaattaatgaaaagtaaaacaacttcagggatctggcctgaaattagtataaatctagtctagtttcctttagacaggaaatacaggggcaggatcataaggcaatatcaggtggatgataagctggaaagaatagatcagaccaaattaaatatagatggag

SEQ ID NO: 127562 - DNA, 344 bp, Homo sapiens
cagcaatggcttcatgagttttcttgttttttttttcccacaattattcttacgctgtattcatttatcttgagatagcaggcagccacagttacagacctcaatctgtggtgtatatcaagcaattcaactttttcttgtaatgtcatgatttttctctaggtgggagcacttccggcatcactagtggctcttcaaatgagtctcatgggtgttattcaaagtttgcattaaacactatgaaattgtactaaacactatgaaaaatatgcaaaacccacaaaagatcactttttaccatgatgagcagtttgccggagagacaaactgctcacacagagatg

SEQ ID NO: 127563 - DNA, 1396 bp, Homo sapiens
aagctggaatatatgatatttgtaatgtactttcctttttaacagcaatctaaacttttaaacatgtagcagttatttttgtctatttgctatacctgaaatttataaaatgtcataaggatttatttgtgtagctcttcctacgtttctgtctctagcaatatggttgattagataatctgaaaacctttcttcttcaaatcacctagaaattatagctaaaatataatgaacatccagttaaatgaacagctgagctttcaagaaagtaggggaaacaaccaagatacaaaagtgaagaaaaaactgaaaaacaggagtttgtgagctgacactatggctgctccatgggtggggataagagttactgttctgggcattgcagggatttgagtcttaatgcccatatgagaacaggttacaaggcctggagactgtacaaagtgaggagttggattcaacatctaagcataaaaccaggattcttaaaggactgtaccttcagcaaagaggtagatgaggagaaaaaccaatctaccagcacatggagacttcaaagaagcttgtttgtgttattgtgggctctgaataaggctaaaaataagactcctttaagaatacataaccatggtcctgcctcttgttgtcttggggttcaaattaatactcctttcagataattaaactgtcatacagcgactacaaaataattatgtttaaaatgatgagaaagttaaaataaggaaatgaaaacataagaaaataagagagttggaaagaaatctggtaaaacttatgcaaataaaaaatacagtcattaaatttttaagaaatcagtgaatgggttaaaggaggaatgtgaatggaagctaaaggagaaataagtgagtggaagaaatatgtgaagaaattacccagaatgcaggaaagagagaggaaaaaaagaaaaaacaggaaatcttgagagacacagatgttgaaatgggaaggtctaacttaatgtctaatggaagttgacaagagaaaaagcaatatggagatgaagcaatatttgaagagagaatggctgaaaatactgaagaattaatgaagggtagaagtccttagatttagaaagcctaggccagatgtggtggctcatgcctataatcccagcacttttggaggccgaggcgagaggattgcttgaggccaggaatttgagacaagcctgggcaacatagcgagacctcatctctataaaaaataaaaataaaaaaaaaaattgaaagcctaatgagtcctaagcagaataaataaaaaattacttttcacctggacacatcacgataacaaagtatagcagaatttttatgtgtagcattctactactaagatgttgaaatagagtcacctg

SEQ ID NO: 127564 - DNA, 392 bp, Homo sapiens
  misc_feature (57)..(57): n is a, c, g, or t
catttcatcatcacctgtatgcatcgactgctcctactgcaggcaggggattcacanatgcaagcaaggcagccaagacccagctcctgacacgccattttcagaataaattaaaggggcctggcacagtggttcacacctataatcccagcacttttggaggccgaggcgagaggattgcttgaggccaggaatttgagacaagcctgggcaacatagcgagacctcatctctataaaaaataaaaataaaaaaaaaaattgaaagcctaatgagtcctaagcagaataaataaaaaattacttttcacctggacacatcacgataacaaagtatagcagaatttttatgtgtagcattctactactaagatgttgaaatagagtcacctg

SEQ ID NO: 127565 - DNA, 398 bp, Homo sapiens
gaattcatctagtctaggagttcttaagagtcctcctttgggcttaagaagcttatgaattacgttaagttttacacaaaattttgtgatgtgcagatccttcttaaaaaagaatccaggccagactgggcacggtggctcacacctgtaatcccagcactttgggaggctcaggcaggtggatcacaaggtcaggagatcgagactatcctagccaacctggtgaaaccccttctgtactaaaaatccaaaaattagccgggtgtggtggcgcgtgcctgtcgtcccagctacttgggaggctgaggcaggagaattcaacccgggaggcagagttttcagtgagccgagatcacgccactgcactccagcctggcgacagagtgagactccatctt

SEQ ID NO: 127566 - DNA, 195 bp, Homo sapiens
gctgctggattttgtaaaacgttctgtatcagggctttcctgtagggtgccagagagacaagagtgaaactagggttcatttaaaaaccgctgttggtaatctgtaagtaaatcagatattcccgacatagaccctggctgggtcatgttgggctttgcattaaatattaagactgtagaacaatattttatgca

SEQ ID NO: 127567 - DNA, 412 bp, Homo sapiens
tgttacaggtagctctgcatcccccagtgatgacagcccctgatgctggccctgggcaggcagggaggggacgaggagctgtgcgtaacaccagctttggagcagcagtctgtgatcaagccagtcaaaaggaagagtatggaaaagcatgccccttcgcctgcctggggtgtgttgttagcatctggaagtcagactgagttcggtgctgagcatctatggatttagacaccaactaaagtcatgtttgtattccttagaccagcgctaagatctccctatcccatagatgccctaacattacatccagtgttaccgcctgggaagggaaataaacataggcaatcatctgttaccaaaggtggaagccaatgtctcttgtgctttccatataaaacaaactcaggacttg

SEQ ID NO: 127568 - DNA, 943 bp, Homo sapiens
agcggtggtggaaaaagtactacaccaaggtgtggtgaatgggaaggtggaatattccctgaagcggaaaggatttacacttgctgacaataattgagaacctgaagaaaacttagattttcctgagttcattgaactatttcttaatcctcaaaaaaactggtaaaggaaaagatagtacaaaaagaaaatctttatccgagagtgaatctgatgacagcaaatgaaagggatgctgctgaaaaaccaggagactttgccagaactcttgatcctaagcaaagaattggtgccacagactgcagtgaagaattaatgtttctaatggaatgcaaagactcagacgaggctgacttggtgctggcaaagaggcaaacgcaaaggggcaaacacgaagtgtcctcaaattgcaaattatttttatgaagagagactaacttggcattcctgtccagaaaatgaaactcaaaaattgttgcactgcagtatactgccatatagtgtgtgtgtgtgtaaaacctaggtcttgattttcttattagtgtgaaatactctatttttaaaaaaatagagatagagtctcactatgttgcccaggttggtctcaaactctgggctcaagtgatcctcctgccttggcttcccaaaagtgctgggactacagacgtgagccaccctgcctggccagctattttctaatgaaatctattttctactgcaaaatcttgttttgaagtagaatcaaaagagtttttggggtttgtttgttttgggtatttgttggggtttttttcatcaatagcacttgttacttttgaacaagtaggaaaagctttctgtagctgcttcatttaccagaaaagaatatttggttccatggtatattatttcctcttttctaaatgttgggaacattttccataatcattactcaatcataact

SEQ ID NO: 127569 - DNA, 350 bp, Homo sapiens
ctgagccagggagaccacgaacccaccggaaggaagaaactccgaacacatccgaacatcagaaggaacaaactccagaggcgccaccttaagagctgtaacactcaccgcaagtgtcaccggcttcattcttgatgagaaggcttccactgcactactggaagaaaccattgctttgggaattttctatcctgcagccctcagcaaccctctgctggaatgctgccactatgactgctagagacacttcatggaagcccacaggacatgtcaccttttctcatgggctcatttcatgggccaggcacgagcttctgttcattccacctatgggtttgaaggtcaactct

SEQ ID NO: 127570 - DNA, 419 bp, Homo sapiens
acccaagatgttctgggttattaagatgagagataatatatgttaaagtacctagcacagagtccaaccatgacaggcactcaataaatggtagccagttatcatcatcaccatcatcatcatcatcatctcaaggaatgggctaaagaaacgtgacctcatccatactgcccctacttcatagcctgtcctaccaagtaacctccataggggtatcatgtgcaaatgcttgttcagctcctgtccacttcagtactgtgggtcccatcacaatttccttgagctcccttccatgcagacaaaaatctcatctaggagtgttcaggggaggtcactacaggcaaacatggcaaggatgaccataccatgttatggagctcacctctccagcctggccaaaagcagaacacaccacaccg

SEQ ID NO: 127571 - DNA, 449 bp, Homo sapiens
atagaaactatatgtttgccaaattctagcacatgaaccaagcatagaaactcagagagaagttcaaaggcagttagaaggtggggtagggggaaatgttaactttgaaaatagtatcctaaatgtgagagagaacagtccagaaaactcctctgaaataatttataatgaagaggtaacatttaatgagaacacagaggagaagtgctgtaaatggaaaataacagataggaagcagtggagaatcttaaacttggaggaaccttagtggtcctctggggttattcttctaacctatggtcaaacaccttttaccaatgcatgctaggaaggtgtttgaccgtggattagaagaataagcccagacgaccattaagagaaagcgaaagagagagagagagagagaaagaaagaaaaagagaaagatatatatatctgtaattacataa

SEQ ID NO: 127572 - DNA, 654 bp, Homo sapiens
tgcatagaaaccgtgtcctaggattctgattcaattggaccaaggttgttttttgcaatttgacttttaaatactgcagagtcaatttggctgtgctaacagaattgagatctgctataataacagtagcaagcttattgagcacttaggctctttacatatagtaactcaatcaatcctctatgaaatacatgccttttaatgcccaatttgcagatgaggaaactaaatacagagaaggtgagtcaattgcccaaggtgacatagcgagccagtgggagaaccaggatcagaatgcagactgtctgactccagagttttgctgaaatagaatttctaaagcttggtattttgttttattatttgctttgaagataacatccaattaaattaaccagtgtttcccataattattttttatctgtagaacttgaaagtcacgtacaggacttaaggtgtgtgctgaaaatattaaattacgggaaaaaattatttattttaaaattattttattctgcttcctgagccagcccagcatgcttttcctggcttgttttctttctactgctaccagaggaagaacagagaaatgatgtcatttgatttttccccctcctgagtcaatgaaagaataaaataaaatatatctctcat

SEQ ID NO: 127573 - DNA, 308 bp, Homo sapiens
cagaactgtgtggggaggtccacttatccatagggttggtgctgaaatgttaggttgtgcagaccccaacctccctgacttccttcagtaactgacagtgtagcattgttcttgattagtttggcactccattacgtggaggcagcacagtgcagacagacctaatggctctgccacttactagctggtttgggcaaatgaattttcccttctgtgcttcagtttcttcatctttaaaatgagaataataatttataccacatagagtagctactattatgatattgtctgtggccacatccttctct

SEQ ID NO: 127574 - DNA, 281 bp, Homo sapiens
cacttaaattattcttaactatttttataccattaaaattttacttttaaatgtattctcaattgtttatttctagtatttagaaattccattaattttacatattgtattttatgtattgaccttgcattctacacattctgcaccattattgaatttgattcttattattcacagctttttaaataaatgtattaggattttcttcatacacaatatacatacataagttctgtgaataaaaatattttttcttttcacttttcaatttttatgctttt

SEQ ID NO: 127575 - DNA, 202 bp, Homo sapiens
ctatccttactacatgtgcacctatgattattactaaataaaaatcttcattaaacttatgtatactctcaaattcaccttagaatttgattgattttttttccttctcttctttttccttttgagacagggtcttgcttgctctgtcccccaggctggagttcagtgacacaatcatggctcactgtagccttgaactccg

SEQ ID NO: 127576 - DNA, 542 bp, Homo sapiens
tccttctttcctggtagaatcacaaaactcttttagatattgaatttatttctttcaaaccttttattctaataaaggctgaaagaaaatacaatagacccatatatcctttgctcaggttcaatggttgtttgttaacattttaccatatttgctttctctttctctctctctgtctctctctttctctctttctgtctctctctctctctctctctctctctgtgtgtgtgtgtgtgtgtgtgtgtgtgtgtgtgtgtgtgtgtgtgtgtatgtctatgtgtctgtctgtctatatttggctgagccttttgaaagtacattgtagaagtcatgacacttgccaagcgtggtggctcacacctttaatcccagcactttgggaggccgaggcaggcagatcacgaggtcaagaaatcgagaccatcctggccaacccacacggtgaaaccccgtctctcctaaaaatacaaaaattagctgggcgtagtggcacatgcctgtagtcccagccacttgggaggctgaggcaggagaatcgc

SEQ ID NO: 127577 - DNA, 339 bp, Homo sapiens
aggtgggtgtctgtacttccctgagtatggccaggagagaacgtttcctgttccttctggttctttctccagttccttttcaagactccattgtggagtcctcttcctgaagattttcacaatttttttctctctgaatccctttgtggcgttatcaattcctatagctacgcttttcctaaagctttaaataaaatctctttgccgattacttctaaatgttttcagcctcagaaccacatttgtggctgcatgttaaacatctccacatgaataatctgtggacaaaccaaaataatgcatcttctacgtaccctaagtcgacttctctttctgcgt

SEQ ID NO: 127578 - DNA, 456 bp, Homo sapiens
agctgcttttgcagatagacagaaccctggagttctctactttgccattttcagcccatgttatgcattatagtggacataattttggttgttgaataacattctaactagcagatgtactgtaatttatttatcatttttctaatgttgaacattttgtttgtttataattttttgcttttttagataaggctacaatgaaaatctttctacatatagcttttaccatttcccagattctttaggatgcgttcccagaaatatagttactaggtctgagaatatgaccattttaagattcctgatactatgatcaaattgtcaaaaagattttacggatttttatttcaacctcacgagtaatcttaaacttagaatttttctgaaatagttttgtcactggcaaaagtctgtgagaagtgatacatattttaacttccttttaatgttttaaag

SEQ ID NO: 127579 - DNA, 708 bp, Homo sapiens
gatattagaaatctttgtggtttcttctgatttcagccattggagtcaaagtttccaattcagtattacgattaacaccaggtggacatttatagacctattgaccatctagataaaacaggtatggtttatatggagcaactggaccccattgtcttttaacaatcacatgatgcattatatagaagacatgcctttggggtgtgcttgaataccatcactgaactccagaagaatggattgaaaccgagttttttcatttttgagttgtactactcaagccaatgtagaaaatagtgagccagcctcataagtaatatatttgtgattagaaaagtaatgggtgacagtcctgtggatgcaacaataaagtattcgccagagcctatgtttgcactctttgatgacttgtgtacagtgtgttctgatttcagaatcgtttggcaaattttacactaaaccagaaaggggagtagcattttttttaggtgtaacattgaagtaagtatgagttgaaactttagaaacaagaaattaaatttctaaattagttatatcagatataataaatttctggtatattcagttcctaccgatgtctatacaggtttctttcttttctttttttctttctttgtctctctcttttttattctctttcttcctttcttttttgtctctttctttctttccttttcttttctttgc

SEQ ID NO: 127580 - DNA, 597 bp, Homo sapiens
tgtctgggtataaatctctgagttcatcctacttagaaagtgttttttctgcttctttcactttctcttctcctttgggacccgcattatgcatatgcttaggggtatcacatatttctctttattctgtatttgatgatatcctgtatttgatgagacaatgtcatcataacttccttttttttttaagagatagggtctctctctgtcacccaggctagagtgcagtggcatgatcctagctcactgcagcctcgaactcctgaactcaagcaatcctcccacctcagcctcctaagtacctgacactacaggcatgagccactgtacccagctaatttttattttttgtagagatggggtctaagttgcccaggctggtctcaaactcctgggctcaagtgatcctccctgctcaggctcccaaagtgctgggattacaggcatgaaccactggacccagcctcctttatttctttaaccatggtggggttttttattatttgtttgtttgttttaacctgtttgaatatatttataataggtaccttcaggtctttgtctgctaagtctgacatctgggccctctcaaagaca

SEQ ID NO: 127581 - DNA, 331 bp, Homo sapiens
agaaagagcaagcaagagtagggaaaactgccttggaaaaccatcagatatcctgagaactcactcactatcacgagaacagcatggaggaaccgcccccatgatccaatcacctcccacctggtccctccctcgacacacaggaattatagggattacaattagagatgagatttaggtggggacacagccaaaccatatcacctactaaaacaaaaatggagtgggagaacttaaggggctgggagagcctcctgcaatgttacctgcccttcaggtgcttctaattcacactaaagttggagaaccactgagctactgtcttaaagca

SEQ ID NO: 127582 - DNA, 405 bp, Homo sapiens
tccctacataagagataaaataagaagaaattccagtaagaaggaagaaaatggtcaacagaagagcaattctgacgtccacgtttggtcttcctcagaagattgactaactgcgccaggcacggtggctcacgcctataatcccagcactttgggaggccaaggcgggtggatcacttaaggccaggagttcaagaccagcctggccaacatggcaagacctcgtctctattaaaaatacaaaaattagccaggcatggtggtacatgcctgtaatctcagctactcgagaggttgaggcatgagtactgcttgatcccaggaggcagaggttacagtgggctgaaatcacaccactgcactccagcagggagaacagagcaagactctgtctacaaaaaaaga

SEQ ID NO: 127583 - DNA, 132 bp, Homo sapiens
ccagggcacttctggcccttgtgtcacacagacttactgtcttactaggtgattcgcttttttctcttcactcctaaaacatacagtccctgaaaatagggatctttgtttcatgaagccagacaaaaagca

SEQ ID NO: 127584 - DNA, 532 bp, Homo sapiens
gctggagtgacctcagtggtaggcctgggaggggacacctggtttgctctggggcagtcgtagaaggctcagcacagtgctggactgcaggtaggactaagcttggattataaggcctgggatcttctcataatgctggtctgcagccactgtgtggcctgtgacaggcctttccctgggtctcagtctttgaaaataatgatacaccccccaccacacccggtcatgggttgcaccttgggtttcaactcaatgactgcttttcaggaggtccctctggggctccttagggttatggctgctccaggctggcaaatccagatcatgcaagaggtggcttaaccctctccctctcagggacacgaagaagatctgttgcttccagattgcaccaacacacatgcctagaaccccagtaatgaagctggaacctctgctgtgtggtcagacaaacccaaggataaattgcccctgcttcttgggatgacactaggaattcgccattcttcacgaggcagtccctggggcctag

SEQ ID NO: 127585 - DNA, 597 bp, Homo sapiens
tgacaaattctttgtttatctggcaatgtcttcatttctccattaattctgaaaaagggtttaactagatagaacatttttggctaaccatctatttcatcctctcttctggcatccatgttttctgctgagaagtcaacagctaattttactgaagttcattcgatagatgattttcagtttgtggtgaaattccagtttattatcagaattctaaaattggtttattttagatgtattgcgcatattttcattgttttagagggagacagagttcactgaggcccccactctgccgttttggaactgatctcatttcattttaattatttaggtagcatattttaatataaaccaactttcacttaatagttattttttctaaaatttcttaactattgtctgtttggctaatttttcagttgaatgttagaatcattttcttaagctccaaaaagaaattctgatagaacttgggatgttattttgccaacagatcaccttcttagaacattcaggtttcccattctctcccacttttatactgttcagcaaacttaatgaatgttttcatgtagattgcattgtattttcctt

SEQ ID NO: 127586 - DNA, 493 bp, Homo sapiens
tgtgtccctcgaggttcctgtgttgaagccctaacccctgggtgtgtttggagctggggcctctaagggaataattcatgtaaatgggcttgtaagggtggggtcctgatctgatgggatcagagtccttatgagaggagatgccagcgagcctgctctctccctgccttgtgaggacacagtgagaaggcccctgtctgccaaccaggaagagaggcctccccagaaaccagatcagctggaacctgatctcagacttccagcccagggacaggggatagaggtcagttgctcaagccacctggcctagggtattctgttgtgacggctgagcagactaagatacccatggcgttcaaggcttcattctttccttgtgttcccaactgccagcattgccacccgtgcagctgctggggctggggccacctctcctgccgggattcacccacaaggccctgctcattctgtttcctaaacagtcctctaatct

SEQ ID NO: 127587 - DNA, 571 bp, Homo sapiens
gaaacagaaatggcaactgcctagagtggtgtacaacctgtgtcatggcaatggcccttgtccgtgtccagcccacattgcctttatcacgtcttttcatttgtctattttttcccttccttcaagaccaagttccaggttcaccttctccataaacatgtggctcacatgatcacctgccatgctcaccttctccgatcacccactgtccttaactgacttgactatgtagccattgtcccatagtcaagttgtctttgagatggtcttcccattagaagtgcaggtccctcaaatgcagatccatgtgttaaatacttctgtacatacagtccatgcatgtagtactcaatcaatgttgataaaagttttaatataatgaaataacatattttcttttttcatttttttctttttttttttggagacagagttttgctcttgttgcccaggatggagtgtaatggcgtgatctctgctcactgcaacccctgcctcctgggttcaagcgattctcctgcctcagcatcccaagtagctgggattacaggtgcccaccaccatgcccggc

SEQ ID NO: 127588 - DNA, 266 bp, Homo sapiens
ctacagggtcaatccagaagttcctcagaaaagcacaataattcaatccgctggaggagaggatgacaacaggggcctctgcaaagagcaagtgatcctttgaagaaaacaaagcttcagtttcctcaagaagttcttcagagaaaagcaaaacaataacaacaaactttcctttagctcttcccaggcagcgggaatttcagacagaagatcagcatatttgccctcaaaagccacagcttgggtgtgcccatgtgaccagctcc

SEQ ID NO: 127589 - DNA, 1051 bp, Homo sapiens
ggatactgtctttattatatacaaagggtatttacaaattgatcgtaaaaatttcagagccatttgagtaaattagtcaatgaaattaaggcacagtgttcaagaggaaacacggcaaaaaattaatatggaaaaatgtatttcctagctgggtgtgttagctcatgcatgtaatcccagcactttgggaggctgaggtgggaggattgcttgagtccaggagtttgagaccagcctgggcaactagtgaaaccctgtctctacaaaacacacaaaaattagctgagtatggtggcgcatacctgtagtcctggctactcgagaggctgaggtgggaggattgtttgagcctgggcggtcgaggctgcagtgagctgagattgtgctgctgcactccagtctagatgacaaagtgagatgctgtctcaaaaaaaaaaagtatttccttactagtaaaaagcaaaacattttagaaataagtaaaatttggtatcatttttacctattagacagttaagaaacttaaaaaatgagaattttttttaagtaaaagggaatattgtagatattcatatttagtgataatttaaggtgttaacaacctttttggaatcagtttgccaatatgaatgcagtactcatacacattcaatacttaatgaaagtgtttaggctgttagatccaagaatccctctgtactgaaggaatatgaagaaactgtttacacaaaaataaatagtggctatttttaatagaaaagactgtaaactaaatgttcaaaatttatataatagtgttaaacaggaaaatttcatggtgtgagtattatgtatcatctaattaagagatagaatttgaatacaggctctgtaatttattagcttggtgatcttagtagactgacttaactatcgctcagtatcttcacttgtaaatttgagataataaaacccacctcataggttttgttgtgtgggttaaatgaattatgtttttaaagtacataaaaaggttactgctcatgatggctcagtatacgagagagagata

SEQ ID NO: 127590 - DNA, 628 bp, Homo sapiens
gagcatttggatgagcaaagaggaggaaagcaagcattctgtgcaacgatgttgactgaaacagaagtatgtagaaaggaagcaccaaacttactgcaagaacagtgagtggacccatttagctggagtgaaggctttgtttagggaagtaagtaaacataatgttttgaggtgatcgcttccaccatatcgaggtttaaagaccagctagggaatgtgtatcttgtagttagagggaagcgactcggtttcttcagtgagggagttacatgatgacagcattccttttaggagataattagggtggtgtgcctgattcagagaagctaggaatgtttggactctagccctatcttttccaagttgatgtcatggtagacaactgcattctctccccagacactcttagatgttaatattggcaacactggaagaatctgttgagcagtttttatgaaatgtaatacgagatgtacttgcttttcaccttcagcaattttttcaaagaagagtgaggaaaagtttgaaaatatgtcacattggacctctacattttatggtcataataataaaaatcccacattttctaaatgaaataaagcaatgagttagagttgagaaaatagga

SEQ ID NO: 127591 - DNA, 570 bp, Homo sapiens
tataaaattacttttcttttaagctttcttaccaaaaatacctctttataactttctttacatctcttatttcctggtcctttttacctcattttatatataatccttaaataacctctgaattagacaaaaataatttacctttgaataagaacactttagaccttaagaagaatctgcccatgactcttgaaactccacagagaaagaaagggtgagtgatgcctttgttctgagtgttttaaggggttcaagtcatttgatggcttctctagattttttttggtaccagacagtgaagggggaaggagaaatagtgtggaagaaaagaaaatgaaagaacaattgtgtttttaagacaggaagctgcaacagaaaccaagcgcataatttgtttgttttctttttttcagttatgaggaattttagcagcttcagaggtctggctgctcataatttggaattctcatttgaatttggccaagttgggtacagttggtcaaatctgatgggagaaacaccagaacaacaaaaaaccccaacaatatgattactgagcactctaatgct

SEQ ID NO: 127592 - DNA, 618 bp, Homo sapiens
ggctagttatatataataattacctgagtatactttaatctttccataaacaaataaaaataaaaatagccttgctatcatgttttccctgaacatagagtagcagttatattactgtgtgaagttagcacatcatatacttaatatattctggaaccagtagtacttggaaattttcatattctcccacttattgtttgtatgtgtaattacatttcatgttatttgtgtatttgcattcaccttgtgtttttggtgcttgtaaaatgtttattccattttccagattattcctctcgccattctgtttctgaatgacaaagaaacacataactattgacttcagacaaacctaagcacatgaacgagggactctgctgccctgggatattggataattaggatgatcattcctgttgtcttgaaatggcgcatagatattccctccatagcagcttttccccaagacagaggattttctagctcttttgttttgaataaaccggtgaaacagtgcagggtgtatttggttcccagggactgaaacatgaatctaaattttacaatcctagtaactggaaaacttgtttttaagaaagccagcaagttagacatcta

SEQ ID NO: 127593 - DNA, 506 bp, Homo sapiens
ttcacatgtcctgggagggacccagtgggaggtaattgaatcatgggggcggttaccccaatgctgctgttctcatgatagtaagtgagttctcacaagatatctgatggctttataagcggcttttccctctttgcttgtcacttctccttcctggcatcatgtgaagaaggatatgttcgcttccccttcttccacaattgtaagtttcttgaggcctccccagccctgtgaaactttgagtcaattaaacctctgatctttataaattacccaatctcaggcgcttctgtatagcagcacaagaatggactaatacaataccctacagcctgaggaggaggtagataggtgctgaaaagttggattgacctgattccccatgaaattgcatcacactctgcaaacaaatacattagtgcctttgagggctctagaccctggctcacatcagctccatctttacgtgatatttgcgttaatcacagaagcagaacactatgttg

SEQ ID NO: 127594 - DNA, 532 bp, Homo sapiens
cattaagttaccacttgttttgctttgctgtagttatcagagaatagtcaatcattcaaaaaggctactaaagcattcctcctgtttttttcagtatatctctgtaagattggttttttcatattttaattaaaattacactgcagctgactgaatgcacaagcaggtatgaagtcttctattacaacagacaataaagaaatttacaaaaatgtaaagcaatgccattcctctcaatacacttttggaaaataattattttttatacaacattacttggaaaataattattttttatacaacattaccatgtgctggtttattgtttttccacagcactcccccccccaacacacacacacacagggtctcactcttatcacccaggccgaagtacagtggtgccatctcggctcactgcaacctcgcctggggtgagacactggccccaatactgtccatcatgtagaaatgaaatgcagacagattaatatgtaaaaaaaccagccatacagaaagaaagacccaaaag

SEQ ID NO: 127595 - DNA, 667 bp, Homo sapiens
ggggaaggcaaagttttcaagcttaaacattaatggtggagataatatgaaagctttgattatatttgcatttttctttgaaagtctctgcactaaaatcacatttgaaagtaatatgtaaaaagaaataatacgtttaaaataatacaaaataatatgtaacaagaataaaattccagttaaaagccttactgggtttactttatttttggaaaaataaattttttcttagtcttcttgtggccatatattctctggctgtgtcagtcaaagcccagccttcacctgcgaacctgctggaccatgctgtacacacaggtgagatgcagcaactctagagaagccacttgaaagaaagaaagcacgccagggggtggtgaaggtcttcattcctattgatctctagtcccataccagtgcagctggcaaataaatttggaaaaaaataagttttaggggtcagcagtcccctgaagagcagaatggagcggaatggagaaaggaaaggcaaaaaatagatctgtgagcaaactcgtaaatgagcagcatacttccctatcattataaaattactgttctgatcaatacgtgctcatgatagtaataatctgcatgtacctagaactttacaaagcataattacattttcattaatttgtcctgataa

SEQ ID NO: 127596 - DNA, 492 bp, Homo sapiens
atttttatcttctctatgctatactctatagccaaagcagctctgtataaagcacagatctattcatatcattctccagttgggccacatttaattgttcttattattaagaaagaaaaaaaaaaaatatcacccaaggcatttcagccctgcagccaaatctttgaaacacctcaggcaaccttctaaaagtggagaaaatgagaaggcttgccttcacctcaattcattttcccttcagatatctgagtcctgtaagactcattaccattcccgtgtggcctctcaccttgctgacttggcctctgccatctcttctgcctggaacaccatcagtctccgccagctgcacttctgtcacttaccacagcccagattctacctcttcaaggttagtctggggtcttcagtgatattttctaacactcaacacattaaacaaattatttttctaacgtttagagttagaaacagtctccctcataagtgcgt

SEQ ID NO: 127597 - DNA, 154 bp, Homo sapiens
aatgcaagtaactctaaggaggctagggttatccctaaattattcccctgagacagacttctatcaagaaagcttctttatcatctgtaatattgaacctctgtcctctctttgggggaatataagtaataattgactatgcatcttattggca

SEQ ID NO: 127598 - DNA, 295 bp, Homo sapiens
ctagtgattcgtagccagggcagttgtgtcttaacacccccagagaacatttggtaatatctggagacatttttggttgtgacaactgggtacttggtgcttagtggtatttagtgggaggatagagatgctgctaaacatcctacaatgcacaagacagccccccacaagaaagaattatccaaagtcagtagtactgaagttgagaaaccctaacctagactactgccagagtccactaatttgtcgacctatttccacttttactccctcctcatcctcttccttagcctac

SEQ ID NO: 127599 - DNA, 692 bp, Homo sapiens
cggtacttcagtgaggattgattttgtagctcagataggatggttgtttttactggtcattccccatgttcatttatcctaatcttaccaattatgcacttctgggtaccaattgaactgtggaaggagcaagtgggatgcaagggaagaggaaagggccatatagaagttataggacacaataactcatggtgggtcacaactttatttcaagcagcttcttctctgaaatctggtatgcaaattctagatttattcctagatttaaaccttaaattctagatttaaaccttaaactatatacagtgaaagcagctgatggtggtaaaacaaactgtaatccaagatgaatttcagaatgagaaaatttagaagaaattaggatataattccttaggtttctgtgaaaaataagcaaggcaggagtgatgaagaaatatttggtaatgaaagtcaagagaattacaataaaataaattacttaggacatgagtttagttactgcagttttatgtggatgtttacatttttaactatttcacctgttatattgttttattaaaagggttccttttttcagctttattgaggtgtaattggtaaatggatatgttaattagcttgattatggcgattatttcacaatgtatacatagatctaaatatcaatttatataccttaaacatataca

SEQ ID NO: 127600 - DNA, 464 bp, Homo sapiens
gcctcagtttcctcttctgtgaaattagattaatagtatcttgcatgtaatattctgaaataaaattagaaaatacatggaaagtactaagaaaatagttggcacaagataaatgatcaatcagtaaatgttgctgtcatctttaacattttatatacgaatccacataactggacaactgtacttgtttttagttcatcaaatattgtgcaatatgaaaatatattctctgcatttaagtgatttacaacctagtaaatagaaatattcataaataactatagtatgaacccaaatgaaagaaatctttataagatcattacccctgaaattattgaccctagagggaagacgttacttctaacttggagaatgatggaatactttatgaagataggggcttttgagctgggcttcataaagatataaagggtttcagaagtctaaagacaaagggaaaggaa

SEQ ID NO: 127601 - DNA, 183 bp, Homo sapiens
ctgcctggccttccaaaggttaggattacaggtatgagccacttcaaccagcctatctgatttatcgtacttcacatcatgttttcatgcttcatctatgtcatagcatgtgtcaatagtttgttcttctttattgttgttatttatttctttttaatttattttttgagatatgggctttct

SEQ ID NO: 127602 - DNA, 867 bp, Homo sapiens
cccacaggcagtgcactgccctgagagccctggcatcccattagttgccagtgctccaagatactagcctaggatcatgtgcccggagggaggcaggtgggcggatacatgcgcacactgcatacctgagacaaggagccaggcctgggatgacccagctgccatggttttgagaggcaggccagaaggcccaaggaaggggggtgatgtgatgggggaagcactgggcattgtgaagacacagaccagggacctgacctattgtggcaggtcagggaaggcttctcagaggcagtgacatctcacaagggttctgaaggaagagcaggagtttgccagcagcattgtttctcccgttcgccacctgtctctcataacacactttgttcaaactcaattttgggagctttgttctcccaaataaattctggatcttctgttagagacaggaaggcaaccgagtggcccagacctgggttcgagttctgactgtctcttaccactagccaggtgaccttcctttccttcacggtagcaagccctataagaatgaagccatatatctggccaccagcgggagctcagtgcctgcgaatccctgctcattccctgcgatcagggtctgtgcctgccttcgtacctgcctgagcattgacgtacagggtagtgataagcataggccctgggcttgcgtctctcttccaccgttaactgctgtgtgaccctggtgactaagctgccttctctggaccacagttttcatctgaaaaacagggaaggagttgatgatggtatagtgccctcctcacaagcttgctgatgattcagtgttagacacttataacagggcctggttcacagctctca

SEQ ID NO: 127603 - DNA, 475 bp, Homo sapiens
ttgcctcagcctcccaaagtgctgggattacaggcatgagccactgtgcctgaacaaaactttaggttagtttaaaacttaactacaacagaaccggctataccaggaagagcagcagaaagggtgccatgaccagagggagacagcaaggtgtcagtaaacgccaaacacaggaagtagagcttggctgaaagatgtgcaaggagtctttcatgtattaatagattcaaactccagcaggtgacaatgtctatcagcttcaggatatgaattctctaaatgggtaaaaaggatagagagctgtgaactcagggacattactgaacataattatgattccaataatgtgcagggccagacagttatgagatgaaatggcctcatctcaacctccctactgccacattccacagtagtatgcatcattgaaagtactgggatttttaaagggcacttcaaaaacgctacttttttt

SEQ ID NO: 127604 - DNA, 300 bp, Homo sapiens
cccatgaagcctgccggttggttggtttgtttttggtatatgtgtatgtgcatgtgtatctgtgtatcgtactgatctgtgaaatctaaatgtctgaaaactactgattatgtagaaggatcatgggctttggattcagcaaacctggtttaaattctttctctgctttgttcttatcttcgtcatctttaaaatggggatgtgaatgcttatctcctagggtggttgtgagaattgactaagataatggatatataatggtttagtgccggctgtataatagaagctgaataaatgtat

SEQ ID NO: 127605 - DNA, 398 bp, Homo sapiens
gccaagtgtcacagctactagacacagaagcaggatttgaactaggagcctggactcttactcagtttgctaacctgaattatataatacagataatttccagaataaattggacctcagggtcttctctgtcttgtgttgtaggggcagaaaggttgtgataccttttctcacccctcttaagggtaatagctgacacacctgtaacaaaatacaggttaacaagagaaaagcgtaacaaatgatttaatcaaaattttacgtgaagaggaggcagagcaagatggctgaatggaagcctccaccgatcgtcctctctgcaggaaccccaaatttgaaaactatccacacacacaaaaaaataacttcataaaaatcaaaaatcaggtgaacgatca

SEQ ID NO: 127606 - DNA, 238 bp, Homo sapiens
gggtgacagagtaagactccgtcttaaaaaaataaaaaagaattttgtgcaaaacttcaagatacggaggaaacaatctttaaatgttttggactgggataagttaacgctaatctttctacttggaaatgtgaagtgaaaaacattccagtgcacgtaacactaagtcataaaccatgctgcaaaggtgtgaatgcgtgaggctttatagggtgtccagctgccttgataaaaagcc

SEQ ID NO: 127607 - DNA, 362 bp, Homo sapiens
gtctgtggaaaaattgtcctccagggaacctgtcactgatgccaaaaaggttggggaccactgccttaagacagttgaggttcagagtaatactcttgctggtggtcctgcaagaacctcctagccccagcagttacagaatggcacactcaggttagtacagcaagtcagggagattggttctagccctttaaagaagtggattatcagggaatcagccctttcactgttcctcatactgctaatgggaataatatattcttagcagtttcaattcattgtgaggaagattaaaaacactgaaagaagctaggcatggtggcatatacctgtagtcccagatatgcaggaggctgaggcgg

SEQ ID NO: 127608 - DNA, 610 bp, Homo sapiens
accaacagcattagaaacaaaattcagagccatactctttatctccagaaataatgtctatgaaacctgagtggtgtatgtttgtgtgtgtgcatgcatacgagcatgtgtgtatgtgtgtatgcatgtgagagagagagactgactccgaagcttattttgatgcaaatccttcattgccctcactgatgagctatgaaattataatttcaggcttatctctagctattaataacaaacaataagaataaattaaatttatatcagatcttataattactattatttttcacacaccatctcatttgctctctgacataaccatcctcgaagcatcatatgttcttccaatgagacacacagaggttactggtgttattctggagttagatcccaaactcttagtttagaggtagatattttcactttatatgatcatttgtccatcagatagtgatatatgtcagataagtcagagcacaactctgacacccatggaatccatggagttacggattctgtctccaggcatatacagatctgattacatcactgtagattatcttgctaattctagactcctacaatgtagaaaatcatgcagtaagaa

SEQ ID NO: 127609 - DNA, 379 bp, Homo sapiens
ccacacactagaacaaggtcagaaataggagacacttcctagacaacactgcccattctctgcaggcacgattctctcaggagaccgcctcccctcccccaggtcagagtgcagccgtgcggccactcagccatgccacaggtgggcacgtggcccagggatctgctagtgaaggggagagaaggaagggtgtgcggacacaggccgctactgcgatgacgacggctcttcaggtttccgcagctgaggggcgcagtgcctgacacggctcaatacatgtctttttcttcataggcagaatattttcgcaagctctggaaaactccacctcgagagaatgcaggcttccttcaccacgttcagaagtcggacccggaac

SEQ ID NO: 127610 - DNA, 222 bp, Homo sapiens
tgcttgagatcaggagttcgagaccatcatgggaaacactgcaagaccctgtttctacaatttttttttaatcagccaggcatggtcgcacatgcctctagtcccagcaacttgagaggctgaggtgggaggatcgcttgagcccaggaggtcaaggctacagtgagctatgattgcaccactgcactccagcctgggcgacagacagagatcttgtctcta

SEQ ID NO: 127611 - DNA, 271 bp, Homo sapiens
aaaaaacccatgaataaacaaatgtgtcatttagacctaagaaaaatttaaaagccagaagagtcttctaaattttctctcttttgaggataaagtcctcacatgctccattctcagccttgagagggatagagtaggagtttctagagcttgattgcctgtagtcagtatgaggtggaaaatgtattttctgttagtaagtagaaaggctgctctaccttaatcatgccaattatatattatttaatcatacctgaccagtgattggaat

SEQ ID NO: 127612 - DNA, 2077 bp, Homo sapiens
  misc_feature (1)..(4): n is a, c, g, or t
  misc_feature (7)..(7): n is a, c, g, or t
  misc_feature (10)..(10): n is a, c, g, or t
  misc_feature (747)..(747): n is a, c, g, or t
nnnnacnagntggcacttgcctgcccagcctgagatgctgtatgagggcggtgaggtgggcgtccccaacccggaggcagggacagggagggatgggataattggcatgcttgcgtgggctcctaatctctggatctcgggccttatggctaaacaccttatcctcactgcacccctctgatgggcctgccgagcaggtggggcaaagatgttggtgagatgaaaacacccgcacagtggggcagtatccttcctgcttctttctgggattcattttatctctgaaataggaggcacttaagctcatgctggctttacatactagagaggttatgtaaattaacgggagagtttacagagggctttgatctctttatttattgtttcaattaaagaccagtgtgatagtacagagggctttgatttcagaagaaaagagccatgtaagggtttgtttgcccattttacagataaggaaagttgagtcccaaaacgaacatctggcctccagctatttggcaaagttgggagtaaggtcctgagcactcctcatttgggacatgtttgtctggcacatgccagcagtgccttctgaaatgggagccccatgagcagaggaggtagcagcttggtggaggcctccggtctccttcccagactcagcctccgtgtaggggggactcctggcccgttagaagcttgacatcgtggcaggcactgttttcacatgaatctcccctgccgagntggccagagcttgggcactcgtctcatgagctgtggccgtgacgttccgcctcttggtcttgaccgtatgtgacgctgcctccctctgtgatgtgcattgtcacgtcactgcaaatctgaagcctaaatcctggcatgaagacccctgtcttgtgcacctgggtgtcacctgtcccgccgtgcccacacagagccaagccttaggaagtgcccttggggtcctggtggggactcaccctatagaaaaaacactgcctgcgttctcctcctgcttctgcagtgactgggtgacaaggcccttcctccccctgggtctttgcttttcctctgtcagatggggttgcctccccctgagttcccccagagtgttggggaaaggggaaaataagataatagatgccaaactagtcagacccaggtagcctagttaaaatgaaaacttcattaaaaattaagaattggctgggtgcggtggctcacgcctgtaatcccagcactttgggaggccgaggtgggtggatcaccaggtcaggagatcgagaccatcctggctagcacggtgaaaccccgtgtctactaaaaatataaaaaaattagccgggcgtggtggcggctcctgtagtcccagctactcgggaggctgaggcaggagaatggcgtcaacccaggaaggcggagcttgcagtgagccaagatcgcgccattgcaccccagcctgggcgacagagccagactccgtctcaaaaaaaaaaaaaaaactaagaatcggccgggcgtggtcgctcacgcctgtaatcccagcactttgggaggctgaggcaggtggatcatttgaggtcaggagttcgagaccagcctgaccaacatggagaaactctgtctctactaaaaatacaaaattagctgggcatggtgttgcatgcctgtaatcccagctactggggaggctgacgccggagaatcacttgaacctgggaagcggaggttgccgtgagccaagattgtgccattgcactccagcctgggcaacaagagcgaaactccatctcaaaaaaaaaaaagaattggctgggcacagtggctcacacctgtaatcccagcactgaggcaggtggatcacttgaggtcaggagttcaagatcagcttggccaacatggtgaaacccccgtctctactaaaaatacaaaaattagccaggctagtgtcaggcacctgtaatcctcaagaggctgaggcaggagaattgcttgaacccgggaggtagaggttacagtgagctgagattgtgccactgcactccagcctgggcgacagaacaagactccatct

SEQ ID NO: 127613 - DNA, 388 bp, Homo sapiens
ctcaaaaagaaaaaaaaaggagaccggctttacagttattcaggtgagcccaagcttatggtagagagcagagagcaaagtagatggagcttcagacagtaaggaaatagagcaggcagggcttagttactgatgctggagagggagaaggcaagacagactcaggtttcttgcttgagcaactgggattgatggcagcatccttcactaagatagaaaatacaacaggaagagtttccaggggcagggacgggggtaaagaagtcagtgatggatatatgagtttcacaggattactggacattccaggggattagttgactctgtcagtctggatctctctggaggagaggctgggttgaagatagagaacaaggagttactagga

SEQ ID NO: 127614 - DNA, 525 bp, Homo sapiens
  misc_feature (1)..(1): n is a, c, g, or t
ntgcatcgaagatggacaagggagattattaggtctaaggaacagaatgacgaaaaatgagaaaagtgaacatagctgctataggttaaatgttatcccttggcctcccatagtgctggtattacaggtgtgagccactgcgcctggccaaaatccaaactttttgagcaccaacatgacactcaaaggaaacgctcattgaaacgtttcagattttgaatttcctgatttggcatgctcaaccagtaagtataatgcagttatccccaaatctgaaaaaatcccatatctaaaactcttctggtcccacatttcagataagggatactcttatctataccggcaatgaaaacaaatgccacctcctgtgataagtccctgtaaccaatggtctttgtttcagaacagtttgcgtagactcctcccttgtatctttaaaaacttctccttgccccagcaccctcagttgtacctatggtctgtcatagcacacatatcccacactgtaatcccttgccgttcccg

SEQ ID NO: 127615 - DNA, 592 bp, Homo sapiens
gagttctgatgtgcagtgattgtgtgaagaggcctctgtagaatttcaggagccttttgaccccaccattgcttggccagaccagaataaacccaatgtctagccagtgctagaggaagccctggtctcatcaggcttaaaggtgacagtaactgtgatggttaatattgagtgtcaacttgatgggattgaaggatgcaaagtgttggtcctgggtgtgtctgtgagggtgctgccaaaggagattaacatttgagtcagtgggctggggaaggcagacccacccttaatctgggtaggcaccatttaatcagctcccagcgaatataaagcaggcagaaaaacgtcaaaaggtgagactagcctagcctcccagcctacatccttctcccgtgctggacacttcctgcctcaaacatcggactccacgttcttcagttttgggactcggactggctctccttgctcctcagcttgcagatgagctattgtgggaccttgtgattgtgtgagttaacacttaatattacctcccctttacatatatgtctatcctgttagttctgtccctctggagaaccctgactaatac

SEQ ID NO: 127616 - DNA, 289 bp, Homo sapiens
actgagtcagatattgatataatcctattacctaaacttcagacttcgtctggatttcccaggtctcccacacatgccccgcttctgttccagcatccaacccaggacaccaggtggcatttaatctgtgtctcctactcctgtccaatatgtggtgactcctcagtctgtcaatgtcttttgtgactttgacacttttgaagaacagttattttgttgaatgtcccctaatttaggtttgtctgatgcttgtccatgataagactagggttacaggatttgagggaga

SEQ ID NO: 127617 - DNA, 290 bp, Homo sapiens
aaagagcgtctccccatgctctggagatggagaaggcgtgcctgatcttgccagcttcggtgaggaggaggtggcatagggctctgccttggagagttggagcagcagtttgtcagatggcaacgcaagaacaagtgcagatacaagttcactatcaggctgtggccaggaagcagtcagaacaagacagaaccgcaggggcccgggaaagggcctccctgtcacccctgggaagtcaggcgtccacggaggggccggcaggacgtgagagatagtcagatccgcgtgtt

SEQ ID NO: 127618 - DNA, 258 bp, Homo sapiens
ggttccctttccctgagcggcctggtgacccagcttgctgcatcatcgccctggggtcacactgcatcataaaggaaaggatctttttttgttctggccaaagcaaaatacatgcaataaagcatagacattagccactctgcttagcactcaatatcaaactggcaaggtttagatttaccctcagatgggccctgtcatctttaacccaacctctgactaggagttttaacacatggcttttgggcaagatggcca

SEQ ID NO: 127619 - DNA, 152 bp, Homo sapiens
agatgttgatcaaaagacacaaagtttcagatagacagaagtaataaattttagcgatctattgggcagaatggtgactacaataatgcactgcatattctgatactgacaaaacagtagtttttttgtttgagacagagtcttgctttgtg

SEQ ID NO: 127620 - DNA, 315 bp, Homo sapiens
ttgtgaagtggagtgggggagtaacatacaattttttttttggtatgtcattacttctgttttatctcaacacttccaatttgttcattttagtcaaaataatttgtgaacacagaggtgcaagtgcagaaagtctgaaatgaatctgcattctggggattggctttccattagcaatctttgtcaatgttcaaggaaggaaatttgagtgattattttaatgttctgtcatcgctagcaccagcctggaccttgatctttatgctgttgtctttaattttcagtggcagcgaaccatggcttttctttaaaagg

SEQ ID NO: 127621 - DNA, 740 bp, Homo sapiens
tgaccatctttttttcctggtggaataccatgcaatcaaagagaccagaactagggaaaaggctaagactaggaacaaatcagacttttaaaaaacataacaccatggcaaattataagttctttacctacgaaacctttgaattaagtgacctaatctttatataaattccaaaaaataacttaattgttttatgtctaatatataggttggaataggcactcagaaaattatttttactttatctcagttttcacactatctctgtgaccttaaactcgtgatgtgagcctcagttttcttatctttgaatcacagctctgtcacttattatctgggtggccttaggaaagttatttacattctttgtgcctcagtttctccatctgtgaaatagggattaaaatatatattaagcttacaggtgtcatgagggttaaaataccaagaaaaaaaaaaaaaaaaaaaaaaaaattttggggccccttggcccccgaaaaatttttcaaagacatattcgttgtggggccccggcggcccccagtagtgtgtagtgcagaccatgtgggtcaaaggttgtggtccccaagggaagatcccgggtcagaagagatgggtgggatgtctcccccgtgataaaaaaaggccggggggagcccagcaggttgctgaacaatccagatggtgtcgagagcaaaagcgggtcgtctacagggagttcccaagagccgatagaatac

SEQ ID NO: 127622 - DNA, 350 bp, Homo sapiens
agaatgggagggctttgagttcacaggcctggtccgcctggatcaaggctgaattctccgtgcctaacacacaggctgacacacgatagctactcaatcagtacttattgaaggagtgaaaattctagaaggattttctcttgaacctcaagttacatctacagtccctgtaaccaaggagtgagcacaaaagccctctgatgcctcatcctgactgtatttggtatctaagtaatgaaaactgttaatgtctcaaaacagaaaaataatcaagatgccgcacaaccaatcatcatctacaggaatgcaaccgaagtattcgtttggcccaaaggtgtttttctttctta

SEQ ID NO: 127623 - DNA, 355 bp, Homo sapiens
tagctcggttccccttttggggtctttgcttctaaaaaataattaccggtcaaattaaacctacgctttcctttattttaaagtttggataggcttccagcccccacacctttgacctctggcctagttttcaagagagaaaagaacactctcaggtgacaggctcagaggctgggtcagccatcagatgaggtttgagcccagtccaggagctgtgtgctagaacctcagtcccacctaaccatgtctgggccttgcccccaaaagggctcagagatggctctgactgtcctcttggcactgtggggtcctagagagcaggggccctgcacatccatcagcaaagacccaaaag

SEQ ID NO: 127624 - DNA, 445 bp, Homo sapiens
ctggctcagcccctcactggctccgtgcctagggtggagtctctccccccgggtctcagtttatctgtgaaataaaggcgctgcaccagatggtccaccagattcctcaatctgtcagttgaagcttggagtctcatttaaagaatatcagttaccagaagctggaaaattgatacagccatttttaagggataaaatggcaaaagccacattaaaaaaaaatctcgtatacactattacctttagagaagcctcctatactcaccagggtgcaaggcagtatgcacaggggtgctgaagtcaccaacggataataaaacacgggaaagatagggcaaagggcaaataagttccaaaccagctacactctggaatagttgggaatatagccatcaagaaagggctcatagatccccgtatcctgacacagagaaatgtccatgat

SEQ ID NO: 127625 - DNA, 416 bp, Homo sapiens
gaagtttcattgtctttcttttaaaaggatgttttgaatataattattcaaaaacatggaattttaaaaatattgacaagggtttcataatagtgcatgattcatttaagaagcttagagaatgcaatgataggcatagtcactttttaaagcatatgaaggatttagatgggaaaccatggcccttttaattcatgaggtattccatcatcccatcatcagtattcagggggcgactgtcctgaatcagtcacgagctcccctgctgcagatcctgtaatttgaatcatgtgtaataatatattatcctactgggggccttctttcagtaggagaatggtttatacattctgctgtaagagaacttttggcttctagccgactcacagctattactcacataggcaatcacgatc

SEQ ID NO: 127626 - DNA, 428 bp, Homo sapiens
gcatataagcaatatttacaattaacaaaaaggcagcaccgttgcagtatttaggggaagagttagcttggaatgtactgcggccctcttagtcaagctacgtgtcaataccaggctatattttctgagattgcactggacaagccagacggacttctaatgatcgtcaagcaccatatgattatgagagagggcaggaggggagcaccgcgggagagaaggagagagagggaatgagggcgtatgctgagatgaacggcagtttatctcccagtttctgaatatgcttagcattccatcataatctgcatacatgtggaatttaaggccagagagaacactggaaataatgttatccaagtccctgtaaggaatctgaggtccggagatgtgatcatcccaacatctcacaactatccaggaacttt

SEQ ID NO: 127627 - DNA, 522 bp, Homo sapiens
gcgaattcactagtgattgtgagctgagatcgcaccaccgcactccagcctagcagacggagactgtcttttttaaaccaaagacaggcgagatacagtgactcacacctataatcccagcactttgggaggccgaggtgggtggatcacttgaggtcaggagtttgagaccagcctggccaacatggcaaaaccatctctaataaaaatacaaaaattacctggtcgtggtagtgcgcacctgtaatcccagctactcaggaggctgagatgggagaatcacttgaacctggggggcaggggctgcagtgagcccagatcacaccactgcactccagcctgagtgataagagtaagactctgtctcaaaacaaaaaaatccatttgtttaacgttcaaattaggtactctctaccaacactggtggccatttacagtaatggagattaaatgaccttcaggtaaaaagttatcattcttggctgggtgcggtggctcacacctgtaatcccagcactttgg

SEQ ID NO: 127628 - DNA, 621 bp, Homo sapiens
actaacagaaatcttcatgtgagaactacactgaaagtttgaatttttcacttttttgcatttgttttttcttaaagaatttactcagaaagtattgatttttttaattgcgaaaaaatttgctgaatgcacttttggtttgaacttcattttaacattaatactgctgatttagattataaggaaagagattaagtctcatatgaaggaaatactgtcttcaaaatgaaaccttggtttcaatgactttcagataccattttcaccaacttaagtttgtaaacgttctcaaagtttccgtggacttgccaactggttttcattgtttcagaagaattaaatcaaagttcctggtgtcagatcagctcagcactgaagtttgttaatttcagccaagcttattctacctcttatttaattttttatgtttacctaaagtataacactggaaattaagaaatcatatcaaatatggtattcattatatgaaaacaatgaaagcgagcaggaattaaaattttgctagtaatttccttcttttcagtcctttaaaaataatgaaagttggaattgttttattactctcagatactttttagtatagaaggaaatttcttcaga

SEQ ID NO: 127629 - DNA, 621 bp, Homo sapiens
ttcaaacaaattcctaaacacgtactgaaaactgccaaacacatctctgttgggtttactataggttcactccagaaggaaggtaatgtatgctgtttgtttatttgtttgtttgggggagagtttacttcctgctccagccttgccccctacacatgtgccacatgctttccttactctgtgctcacctctccactgcagtcctagggcacatctggacaccaaggtgtggtgagcctccagaagataacctggcctcctcaccccaggcaatgacccaggagtagcggaattactagaagaaccacagcccagcagagaagtcatcctcttcgcttattatgttattccatagtagtaactgaggcactgcagagaaaaagtctcaagattaaaacctcaaaaactcaggagtgaaaagtggaacaagcgaattatagaaaagcctggcttgaaacacactccaatcagacatttccgttttaccaagagtggtacatcacagtactctatggatgccagctaccgtagttctttttcctttaggagagactaagatactgggaaatgaacgttgtttggtcaggaataaaatggtgaaagatactgggtctgtctggg

SEQ ID NO: 127630 - DNA, 237 bp, Homo sapiens
ctttaaacaatgcctgtaccatacataaccctttgtaaagatgcttagctaaccccctccccaagtggctatgagttttgcattaaaatcggagatatggccacctgcacatgttttaccctaaaagcttgctacataaaagtactttctgcagggcagatgtggggatctaccattttgtggcagcccggaacatcgcttctgctcctaagtccctattaaatatttctttacaag

SEQ ID NO: 127631 - DNA, 364 bp, Homo sapiens
ggtaggcagtaccttgcttgcaatatgaactcctctgactagagaatactatatgagataattgatggttaaagagtttatgaaggaggccaggcactgtgtcttatgcctgtaatctcagcactttgggtgggggccaaggtggttgagtttctttgagcccaagagtttgagactagcctggggaacatggggaaaccccatccatacaaaaattagccaggcatggtggcgcgtgcctgtagtcccagctacttgggaggctgaggtgggagaatcacttgagtttcggaagtcaaggctgcagtcagccatgatcacgtcactgcactccaccttgggtgacaaagtgggaccctgtctc

SEQ ID NO: 127632 - DNA, 153 bp, Homo sapiens
tctaatgaattatgcaagtcttaaaatgtctcaagaaaaagattactcattaggattttcgaatgaataaattcaacataattgttggtgcaactgctctctcatgtaataggtaccaaaatctgattcatgttttatattggagggacgggt

SEQ ID NO: 127633 - DNA, 375 bp, Homo sapiens
gtccctaccccttctcccataaattcatatgctgaagtgctgaccccccagcacctcagaatgtgaccttatttgggcataaggtcattgtagatgtagttagtaaagatgaggtcatactggagtagagtgggctcctattccaatgtgactagtgaccttataaaaaggaaaaattgtacagagaacatgaaggcagagactgcatgatgcctgtacaagccaaggaatgccagagattgccagcaaaccacctgaagcttggagagaagcctggaacagattctctctcacagccctcagaaggaaccaatcttgtcacaacttgatttggggctcaattccatgagctcctacaaatccatcacccacgta

SEQ ID NO: 127634 - DNA, 215 bp, Homo sapiens
aagctttatcacatctcattactggttcagaaactacaaccacgtagtattttctaaagggaagtcactgttcaaaaatgcctccggcagttgctcacaggtggaaaccgtgtgtgcatcgctgtgtgtgtgtgcatgcgcgcacgcgcgcatggaggcaactgtgcatgccggcctgtgcacgtgtgtgcaagtacacgagacacaggactttc

SEQ ID NO: 127635 - DNA, 376 bp, Homo sapiens
agtcttgctgtctcaggggtggcagaggcagaaaagatagagaaggtaggaagggaggtgggagaagcaggcacactcagtataccttttattgaaaaaaaaatccatgtataaaattcatgtataaatggacccaggaagttaaaacctgcattgtttaaaggtgaacggtgtcactgtaactattttgcatcaacacacttataaacacaaatgcaacatgagcactgaagttgagagcctgtattcttatatatctagatgatacagaataaacttttgctttttacttttagcttatttccaaaatataaatatagaatcaaaacactttaatggtaaattgtcttttttttttttttgagatggagtattg

SEQ ID NO: 127636 - DNA, 784 bp, Homo sapiens
ggaaaagctgtattttattcaccttatactttttacagtcgaaaactttttcttttcttattttagaggatcttaagttttaacctgagcatttaatgttttcttttttcagacaatccaagaaggttcatgtattgtactttgttgtaaacaaggaattctgcaggcttttctaaaaatgctagattagctgtttttttttttcctctgtgggtttttagttgtaaaatacaacttactttgttacctttcttttctgtgcagttgaaattacgtagtgttaggctagtaaaacttgtgttattcaggttgactttccacagctcactgatgtcctttaaaaatttagtaatcttaacttattaatctttcttttcgcctcaatataaaatgtcctgccttgaggagatgccttggaacccagagtcgatagaacattttttgtaacctgtgacttccattttaaagtagaaagttatgaaaagagattctgccaaaattcttcaccttacctcatatttgaggtttagcgttttaggaaaaaaaaaaaaatcatggaacatgtggctatcacaggctaataaaaatctagccccacccatagcattaaatgctcattctttgttcttttttatgaaaatcatcttaacttgattttacacaggaaactggttttaaaaaccttgagaaatcaggataatcacagattaagactacttactccatacctgattcttatctacctctatgagagaccgggatagtggacatcagaatccacaaa

SEQ ID NO: 127637 - DNA, 272 bp, Homo sapiens
tgcagggacctctctgatgagctctgattttgaagacatgcccaggagaggaaaggagacatcctaacggaggatgagtccagaaatgggaagcacatctgatgcggggaatgcggcccatgggaagcctcctgaaaacttacaagtagcattaaaaggttctaagtttggctgttggcaacgggcatctcaaacaacagctccttcaccaagttacaaattcactggtctttcacataaaccccacgctatggtggccgctgtatgccatg

SEQ ID NO: 127638 - DNA, 348 bp, Homo sapiens
ctagttggaaggttgctaggtctctttgggcaccatctaaactccatcttgtctaagccaagcactctttctgctggtttttgtcttgctccccaaaactgtctaattagggtatcttcctggttaggtgacatggatacagttatatgagtggcatattctttacaaacaatagaaatctccataggaggggatggggggattaagtggggagcgtttctttctttttttttttttttaagatggagtcttactctgtcgctcaggctgaagtgcagtggcgcgctcttgactcactgcaagctccacctcccaggttcacaccattctcctgcctcagcctcccca

SEQ ID NO: 127639 - DNA, 427 bp, Homo sapiens
actataagttcctcctaaagttagtttggcctatgcccaggaatgaacaaggacagcttggaggttagaagcaagatggagtcagttaggtcagatctctttcactgtcatcatgttctcattacaatttttgcaagcgtgctttcaaaactgccaccaggctgtcttttcaattctccattcactccacctcctaaatcagcatcgccttccagaatccaggctacagattcgcatccagggagcagactccttttccagatgaccacatttctccgtgaattgaacgaacgcatctgcagtgagtggagtctgcccatctcttctttttcttggcatcctttgccaaagccctggcacatggacattcttggtctgtgttgatagtgcctggataatttaggggtttgggacatgactacagata

SEQ ID NO: 127640 - DNA, 271 bp, Homo sapiens
gaaaattaatatccctagaagaaataagagaagatattgtattcatgaaacaagagtagtatagtatatgaaaggaactttcagaaaacaagaactcttagaaataaaaaataaagtgaaataaaaatctcagaagatagaactgaagaaatatccatgaaggtggaaaaaaaagacaaaaaagaaaaaggaccctaggaagcagcaggatattccataactgaattttaggtctacagagaaaaaaaggagagaaaatagagagggccat

SEQ ID NO: 127641 - DNA, 711 bp, Homo sapiens
gtcattaagaatgttggagagatttggatttctagcataaaagaaatggtggcaacacttctaaagtggacccatatattaatagggacatatacctgtatttaactttttaaattttgaaatagttgcacttatagaaaagttgcaagaatagtacaaagaaatctcaaaacccttcccctggttttcccagcatgttagcagtttgacacatttgctttatctttccacatatatacataatactatctttctgaaccatttgaaagtatgttgcaaatgtgccctttactcctaaataattgagtgatattttaaaagaacaaagaggttcactttctaactacactgtaattggcaatatctggaagtttcaccataaaatactgttttctaatctatggatgttcaattttgccagttgtcccattagtacagtttatagcaattttccttattctggtctaagatactctagatgtcctgcaagtggttttcatgtctctttactctgttagaaaggttcctcagccttcctttgggtttgatgacattggtgtattttgcaacgagttcacaggccctttctaattttttcccagaactgtcacgtccaacttctgggggtttggtcctggttgttttctctccattggaattaagacttccagggttctatgttattccttggggggggggaaatttttccca

SEQ ID NO: 127642 - DNA, 292 bp, Homo sapiens
ttgatgacaaatgtattgaaagagagatgtgaaaactaacacgaaaccttattaagataatgagataagtaatgtcaacaggaaggccaaggaagagaagtttgccaattatttttaaagttttctcttcagtgcacaaaagcaccacttgtcaatgtcatctaaccaagagctgccatccctaacttcctattcccagtaacactaggctccctaggttaattcatgtgaactctaggcccagatgaaatgaaccactactgactagatgacagctctaaagccaggacat

SEQ ID NO: 127643 - DNA, 297 bp, Homo sapiens
tagaaaagattttatatactctacatacaattctccatacatccacattcagtgacaaattgtaatctttcggcctaacagttctagtgtaattttagataataaaaatattcaccacttacagttctagcttatgctaatagacccacagtcatcagagatgctgagactaagcaacagacttgggactcagaaaagtaacactattgattgcactgccttttgaaaatgaaacttgcaatgaaagactctaacttacaccccagaacttggaaggaggagcaattaccatgaatt

SEQ ID NO: 127644 - DNA, 257 bp, Homo sapiens
tcaactcggttcttcttgactttgtcctgtagtcccgtcagaggtggatggtggatgagatgagagagactcaggggaggtaaaaactgctcctgacctttgcccaggactttcccagagcctcagagcaggatccctgggtctggcttggcacccctgggggatgtgcttgcaggaaggggctgtcaccgtgcctcatagtgacttccactgggtcttctctggctggtggtggcggcagttgacagcggcgggac

SEQ ID NO: 127645 - DNA, 429 bp, Homo sapiens
ttgtgtgtgttccttgtgaccaaccactcatttgaggtcaaccattataaactcatgtaggaagtagagcaacctatacagacataaaatagagagagaatgatgattttcagttttgaatttcatgctatgaatattaaatctggacaaaataatctgcatagtgaaaagaagagggtggagttttgatggcaactatcatggccaccaaggctaccttatagctaactaaacacctctcatgcttttcactattccatataaaatacgcacttttaacttgcaattttgtttcttaagaaattttagtggccaggcggggtggctcacgcctgtaatcccagcactttgggaggccaaggcgggcggatcatgaggtcaggagatcgagaccatcctggctaacacagtgaaaccccatctctacta

SEQ ID NO: 127646 - DNA, 426 bp, Homo sapiens
ttagggggcctgcgctcttttggggcttacagacaagctaaatgacaccatggggcagcaaggagacatatccagaagtttcttgaataagccaatgctatttaaaaaggggtggggggaactgtgctacactggaagacatttaagcaacatatcagccaaatataacgcattgtcctgagttggatactagggtgggccaaatacctgtaaaaaaaatattttgaggataactggggaaaacggaaagtgatctgtgcattagatgaggtacaagtttactgaaacaacaatttcctgaaatggggttgggaatggtggctcatgcctgtaatcctagcactttgggaggccaaggtgggaggactgcttgaagccaggagttcaagaccagcctgggcaacatagcaagaaccccatttttac

SEQ ID NO: 127647 - DNA, 697 bp, Homo sapiens
tgcgctggctcacgcctgtaatcccagcattttgggaggccaaggcgggcagatcacaaggtcaggagatcgagaccatcctggctaacacagtgaaaccctgtctctactaaaaatacaaaaaacaattagccgggcgtggtggcgggcgcctgtagtcccagctatttgggaggctgaggcaggagaatgacgtgaacccgggaggcagagcttgcagtgagctgagatagcaccactgcactccagactgggtgacacagcaagactccatctccaaaaaaaaacaaaaaaacaaacaaaaacagaatagagagcccagaaaagaacgcttttgtgtatgatcaaatgatctttcactaagtcaccattaacacatgatagagaaaagataatcttttcaaaaaaataacgttgaaatcaggttatctacactgataaagctgaatcctttccttgaactatatacaaagaatatttgaaataaaatatttagaaatttaaaaaataacaatctcttagaaaaaatataggaaaaaaacatgacattggtattggcaccattttcttagatacaacattaaatgcatgagcaacaaagagaagaacagaataactgaactacacagtacttcaaaatttctgcatatcaaagaaaacattcaaaagagtaatgatgcctcctaggaaatgggtg

SEQ ID NO: 127648 - DNA, 354 bp, Homo sapiens
caaagggacaagcaagagcattgagtgtacatcatcgcaaaactaagactaaataaacccaggtttgggggagaaaaaacagaatgtacacgttacctactctgacaatacagaaatgatgcaatagaaaaattaggaggacaaagattatggaataaatgaagtagggtgagtttttgcaggctgtttcatctataataaccgagagttaaaagattatttaaatcacatttaattaacagtgtaagaataatattaagaaaaacaatattgctggctgaaatcagataataggtcaatcatggtggctcacacctgtaatcccagcactctaggaggctgaggcaggcagat

SEQ ID NO: 127649 - DNA, 732 bp, Homo sapiens
gaattaaattagcttttcatggtaacctaggagctatttctggaaccaatttggaaaatgatctttgtatgctgtggcatttatgtttgattatgtttttcttagtaattctcaatggaccagattcactccttgcttcagtcatcaaacttttgtgatttttgtaggcaaattatgtatttcctgctccataattatgcatatttatggatactatattcttcctcctcaaatatagaagttgtaaaaacttcttaattcgataacataataaaattatttaaattttatcatttcaccattctgtgaagtatgttaagactgagataaacagccatatataaatgaacttcttccaaaaaatgtttcatacgatttgacttttgacacttactaaaaaaaaaaggtatttataaaaatggcagataatccaaaacttcttataaatacattgtcttgaaatacagaatatttcaaggcacattaaagattttgtgtatattctaattgcagtctcttgatttacagagccataaagacattgaaaattgctttgagtaactcaattttcaagttttttagctgttaaagtttattctttgtgatcagcatgggatatattttatatgcttggtacaaggactgtaacttaatgtctttatttcttgaatacctcagacttaacagtttaaagagaaaacttaccttctccttaaaaaacaacaacaacaa

SEQ ID NO: 127650 - DNA, 503 bp, Homo sapiens
agagcaaagacctgcagaggggaccactgcatgtggcagctgccccagatgctgtggccctggctgctgtgggagggtaatttttgttaagatgaactaagttgggactgcatctcacacagtggcctttgtataaattcgcttgccttcctcatccggtatctgtcccctctttggttcacaccctggatgcaggtgttcgggggaatgtgcattgccacacttagaacattcaagtttctgccatccctgtgtttctggagtgacagtgatgttcccgggggggaggtgtgggttcatgcagcaagtcccatgcagagtccggggcaaattcaggtcctgagtgaggtcgtagtgggtacctggctactgaagaaggctgaggcaggagaatcgcttgggcccgggaggcggaggttgcagtgagccgagatctcgccactgcactccagcctgggcaacaagagcaaaactcgatctcaacaaaaaaaaaaacagggaag

SEQ ID NO: 127651 - DNA, 356 bp, Homo sapiens
cgtttacaatgattgaaggtcactctaggttcatttactttttattctaaagccaaatatttaggtccattagaggccaacattattattaagagctctttagcacccaatgacatttttctttcaaaaagtcaatattttatagaatctaaattaagtgggaaaagagatttaagattcgctatgaatacattctaattatttttacaacattttataacaagattaaacttttggtgagttctgctaaactatgataactacaaatctggaaacctttttctcccccccaaaataattttatcttttaggttctttcttcttttttgttcctctgtttttgctgatacattgag

SEQ ID NO: 127652 - DNA, 185 bp, Homo sapiens
aggggagaaacatcacttgagaccaggagttcaggacctgcatgggcaatacaatgagaccccttctctaaaaatagaatagaacaggaggtacatatacccaaaggagtattactcagctataaaaagaatgaaatcctgtcatctgcagcaacatgaatggaactggaggtcattatgttaag

SEQ ID NO: 127653 - DNA, 749 bp, Homo sapiens
actatcgagaagcagatgacaggctcaggccttaccagggatgcacttgccacattttggaaagactacataaaaaacctttaaaaattggagccctttgggcctcaggtatccaaagagcacattttttggaaactcaacactcaggaaggtcgcatagagccagtttatgcagatgtcatccatactgtagggccaatagccaggggccatattaatggttcccacaaggaagaccttgcaaattgctataaatcatctctgaagctcgtgaaagaaaataacatccgatcagttgcatttccctgcatctcaacaggcatttatggctttcccaacgagcctgctgcagtcattgccctcaacaccattaaggaatggcttgccaagaatcaccatgaggtggatcggatcattttctgtgtcttcttagaagttgacttcaaaatctacaaaaagaaaatgaatgagtttttctccgtagacgataataatgaagaagaagaggatgttgaaatgaaagaagattcagatgagaacggtccagaggagaagcaaagtgtggaagaaatggaagagcagagccaagatgcagatggtgtcaacactgtcactgtgcccggccctgcttcagaagaggcagttgaagactgtaaagatgacgatttgaaaggatgaaattattacaaagggggtgaagtgaagatcattctgtgcgtgaccaagatcatagcgaaggacaagagaag

SEQ ID NO: 127654 - DNA, 692 bp, Homo sapiens
agaattggggagtctaattttctacattataatacaattggcatttttttccagtagggaagtagattttggagaaatagtactattttatactatatgaatcgaacctacttttgtgaaatgaattacactaaggtatagagaattttgaaaagttgctacttccgtttcctataactacaacctaattctaactctgtggctgagcagatgcctggaaagatggaagtcttgaagaaacctattgctcttatttcgcttataggaggcaactcaaatatgagaatatgagaactgtgttttgaaataagtttctgatactaatgtgttttgtgctgtgctggtttatgcaaatgtacccccaaaagtctgaggaagctgaaaggctgaagaaagaggctgcaagttgaatttagaaagaaacatttaatagggactaatgatcagaagccgtgtgtgcctggggaggttgcaagacaaggtgactccctgcaccgttatcttccagacccagggcttatatatcatagggaaagggcatacgtgatttagaagggatatgtaggacaactgaagtacgatagcatcaaggttgttttgacctaatggcaggatttatggtaagtacctgctcttaaacaaggaataatagataaatgggaaatcttagaggcattcccagaactgggttg

SEQ ID NO: 127655 - DNA, 352 bp, Homo sapiens
gtaaaatggcaacctttatgtagttcactctactgtcacaagatggcaataactctttacctacaaattactctaaaacatttttcttccacttgtgaacttgctaaactgatgagtaaatactttatataacccgaagcttcaaatgtaaggccttttcatactttattactggcctgtccattacatactactgttttagaagccctaaatatggaatcgggaaaagccttggaagttttccatacgtatacgctaggttaaatgaaaaaaatactttacacggaaacaaggagccaataacttataaattggctctctaaccctaactggttacaagaaaggctccaaa

SEQ ID NO: 127656 - DNA, 106 bp, Homo sapiens
gaggtacctatctccctacaacaaattcattcattcattcattcattcttcaatcaaaagtctgtttcttgaagccaaagagtccaaattaatgtaatagttaaac

SEQ ID NO: 127657 - DNA, 203 bp, Homo sapiens
gacacaggtggttcccaagccaaggtcccggcttctctctgtttactctgcttccatccaactgcaaccctccatgcttagaagacaagagttatttgtactacagaaatccagctgtggcatcatttgaggtcaagcccaggaagaaaagagggttggtctgatggtatcaccagtaaaatatcaagggtcaataccacccc

SEQ ID NO: 127658 - DNA, 473 bp, Homo sapiens
aggatccccgtgcactgcttcggatggggagcactccagagtgtttggggtcccggcccttctcccctctgatgccctggggtgggtcttccccatcactgcctgagggctccccatccgcttattattgtcagaggtcatggacgtgctgaacacgtttaagaagactcaagtccactgaaggctgggcacggggtggtgctgcccagaactccataggcccagcttttctggggacttctgcccagggcctcgggtgagctgccccgtgcctgccctggaattcaaggccacatgtagccatttattcagcttttctaaatggcctcttcacggtctgtccccaccagtttccagggccggggggacttacctgccacccccaggcttgctccgtcctggccctgggccactcagtccacactccatgtttataggtgataggaggccatctgtgccccgccccacgacgg

SEQ ID NO: 127659 - DNA, 418 bp, Homo sapiens
agggtcacaggatacagaatcaatccattgaaatcatttgtacttctatatcctagtaacaaaacattggaaattgaaattttaaaatatcacttaaaagtcatttaaaagcataaaatacttaggaataaatttaattaaaagcattcaagatctgtacactgaaaatgactaaatattgctgagatagaggaaatgtaaataaatggagaaatatatgatgttcatggatcagaagagtcagtatcattaaggtcttcattctcccccaaatgatctatagattcaatgcaatgccaagctaaatcttaacagatttttttttggtaagttgacagtcttattctgaaacttatatagcaatgcaaaagatctagagcagccaagcaactttgaaaaagaacaaagttgggacacc

SEQ ID NO: 127660 - DNA, 437 bp, Homo sapiens
aggcctttgcagggtggtctgcttattcctcatccacgatgagaccctgtggtccctgttcctgggcctctgcaaaacctgggggttcccctcgtcaccccacagatgtccaaggcacctgctctgcacagggctggtcgcagccagagaaggcaggtggctggagggaggcatgttgtgctcctcgtggggtgtgatttgaactgtggtcagcaccttgaagacctaggatgggactgggtgcctttcatgaggagcatagcctacccttggaatgcagggcagtcgacagggcctaggcagagagccggaccctagcatggggagggtgctgtgtgtttggtggatagtgaggaagcacggcagaggccgagctacactaagaatccttgtctgtgtcctgtgagctcaggggagccagcaaagcacatggaatt

SEQ ID NO: 127661 - DNA, 206 bp, Homo sapiens
acaattattccccattgctctctctaccagtcccctgtcaactaccattcatttttctgtctctatgaatttgatgaaatgcttcatgtaggtgaaatcatacagtatttgtccatatttgactgtgtataatgtcttttaggttcatccatgttgtagcatgtgtcagaatttcctttttaaggctgaataatattccattgtat

SEQ ID NO: 127662 - DNA, 243 bp, Homo sapiens
cacattcctcgccgggcgctcccaccccaccccagcctgtgcaggtgggacccggccaggcaggcgggcagggcggccaggtgcgccgaggggcgcctccacggggagtgtgctccgcagagaaccccttgctggggcggctctgggcctcctgactcactcctggattttcccaagctgagtctggccccgcggtgatgattaacccaacacctcaaccggcaccgccacgctagctccact

SEQ ID NO: 127663 - DNA, 516 bp, Homo sapiens
tctcaggattggagccgcagcatggactctgctcatggcattctgccctccctagcactgaagagacactgccacacaaatggtccacgtgtccattcccccgtggtgaacatcgatggacgtgtcttcgtgtgggcgcactcctgtttctcttgggtaaacacccaggaatacatggcctttgaggttgtacgtgtgacacccccacctctggagtctggggtgccctcctaccgaccagctccaggggtgtgcggcagcaccccccatggtgggactggggttcccagaggagccctgctgctgaaccctgcacgctccgtgcccgtttgcagacattctcaggctgagccccgcacgctccatgcccgtttgcagacattctcaggctgagccccgcacgctccatgcccgtttgcagacactctctgaggctgagccccacacgctccgtgcccgtttgcagactctcaggctgagccccgcacgctccgtgcccgtttgcagacaccctct

SEQ ID NO: 127664 - DNA, 530 bp, Homo sapiens
ctgtgtagctgttctagaggtacacgtccagtcaggtgtgccagtttcatggggtgtagcagtaatgtagaggacagaatgtacttcatgaagtaggaagtaaagtaggtcacacctgaaggggatgaaaataaggatgaggtggaggtttggaaaggctgctgcaagcatttagcaaaaacaaaaacacgtcggctgtggaagagactctgtgcttcactgaaggccaactgagattaaaggccacaaatttggggtggcacgcatccacttggtggcatgattttttttctagcgttacaagttcaaacataggtacaaataagggaaaatatagtgcactggagaccccacctgaaaaggaaatgtgccattgttgggtatctagtgtaccatagctgtaaagaatgacatgatgctggtattttggtaaagtatacaaattatacacatgccttatctagaagcagcagcagctcttccctcccccgctgtccccactacatcctcccatcagcactccaaagtct

SEQ ID NO: 127665 - DNA, 423 bp, Homo sapiens
cttttggggtctttgcttgcaatggaaactggtgagtgagtggaatgagtgaagactgcaggaattacaatgttttactgcaggaattacaatgttttactgcaggaattacaatgttttactggataacggaaaaaaactataatagaaaactagctgttaagtatgagaatttgatgtactcttagttcaaaatggttgccaagagtgctccaggtaacttatgttgtagattagatttttaaatgtgaaaactatttatactggagaaatttataaccaactaacttttatttagtatacaaaatttaaaaaaattgttcaccagtttcccaaagtaaagcagaatagtgatatgcctttacctgggttccaagtgtcctactctacatagtgaaccagataaatactgctttgcatttc

SEQ ID NO: 127666 - DNA, 440 bp, Homo sapiens
tctcagtgtgggaatgccctgagcagaacgcccacttgcacaggcagctgaacgccgagctccaaagtttcccaaggggtcaagagaactggcaatcagcagttctgtacatggtgatcctggagtttaccttgtaaatcccttcaaaaggagcaatagctaaatgccactggagaaaggccaaactttgcttttatcctaagtcaattcagagagatggtttttgaggctcagtaaacagtaaatgaatatctttctagatgaaaatttcttgagggaatatgctatgtcttatttatgttaagccctatagttcctactctagggtcttacacttagcaagaggtcaggttattaaacaaacattgaagaattatatcctaattttacaaaccagaaagctgagaaatgtagccaatgactcaaaacacggggagaag

SEQ ID NO: 127667 - DNA, 410 bp, Homo sapiens
caggcggatcacctggggtcaggagttcaagaccatcctggccaagatggtgaaaccccgtgtctgctaaaaataacaaaaattagccagatgtggtggcaggtgccttgtagtcccagctactcgggaggctgaggcaagaggattgcttgagcccgggagacaagttacagtgagctgagatggtaccattgtgctccagcctgggcgacagagccagaccctgtctcaaaacaaacacaaaagctcacagaagcgctggggtgggtgtgtagaagtcagacccccgggagcggcaggtggaggacgactcggtgcagcagccactgtggagacgacctggtggctcctcaaagatgcacagatctcccatccgacccagcacgaccactcccagctatgtacccagg

SEQ ID NO: 127668 - DNA, 545 bp, Homo sapiens
taatggagtttttcactccactttcttattcctctacaagttgctcatgatgttgggtggtaaatggctatgaatagagctggcctagagataccatgagatatgatggcggaagcctgacccagaggcataggcatggccagcagccctgtgctcatgcttcccaagtgtcacatgaaagatattaagggatgtgacttaaaatcttatgtaatttaggacaagaaagattaaaaaaatataccattttttagtgggaattctgcctctctctacccctctactcaccgttgaggaggtaaagtgacatctgattggtaaatctggggggaaaggctggtctcaacttgcatatgttcctttatatctttagttataattaatccctagcctttaagtcataggtcctttgagaaggtgatgaaagctatgggtcctctccctcgaaaaatgtacatacatactatacaatgtcagtgtatgcactgtccccttctactccccaaatctacccacataatttatagatccacatatctcaggtt

SEQ ID NO: 127669 - DNA, 560 bp, Homo sapiens
aagaaaatggacacagagagatgtgtgagaccgttgccaagatccagaaaagtgtgcatggtagcttagaccagtggttctcaccagggaaattttactcctctgaggacacttggcaatgtcttgagacattcttggttgtcacaccatgtgtgggaggatgttactggcaactagtagggaaaggtcaaggatgctactaaacatcctacaatatacagggcagttccctcaacaatcatctgacctgaaatatcaatagtgctccaactgagaaatcctggctcagaccaagatggtggctgagagagaaggaagtacatattgcagagacgattaagaggctaaaatcagcagtaattagtgactgattgatcgtgtataatgggggaaagactatcaaaggcaaccctcaggtttctggcttgctcacctggatgagtggggagtgccgagatgagaaatgcttgaggagttgatggtttggtaggggaagataaggagctctgcttgaaaccctgtaaatgtgaggtgcctatatgacacttgaaagatgaaaa

SEQ ID NO: 127670 - DNA, 512 bp, Homo sapiens
taccaggaggtatgcttttttgatcaattgcacctttgttggatttccattggggagtcttttaaaaagaagaaagtttagggaacctaggtgggagaactagaaacggtttgtgggcaatggaaagagaaggaagaatacttaagtcaaacacacctagttagcctttttgcccgaaatttcggtggtaagtgctgccgttcttcagctaatttaggttgtcctgtttgaccatgtagtcaacatttaaacaactcatttggcaaactgtcacgatcaactgatacataagccaaagggtagggttacttagattctgttcacttgatctgtgggataaaaataaccaagaaagatcttagttgctacctttcaagaatttggtgtattagtgagttcatatctgaaaatagtaatatttagaggtgtaagattatgttattagatcctcagtgaccttgttccttctctgccttcccaccttcagttctgtcccaacgtttcaaagcata

SEQ ID NO: 127671 - DNA, 793 bp, Homo sapiens
agtctcgctctgtcgcccaggctggagtgcagtggcacgatcccggctccctgcaagctccgcctcctgggttcacgccattcttctgcctcagcctcctgagtagctgggactacaggcacccgccaccacgcccagctaattttttgtatttttagtagagacggggtttcaccgtgttagccgggatggtctcaatcacctgacctcgtgatcctcccacctcggcctcccaaagtgctgatttcaacatttttaaatgtgaggattagagacatattctaggtttgtcccgttgatagttatagagactttctataacataatgttgattcttcttctattagaattgcttggcttttgagctacatcaagagagcagaatgtttttaaatgtttatatgtaattccatgaactgtgggtttttcaggtgcttgttacccagaatgagggttaaccaagttctcattcctctggttgaccgctccaaccatttcatcacatgtcaacaatccaaccaagtagaaatgaaactcaaaccagacaaaaccattttgtattatgaactacacttattattctaattttttatatttttagttttaagcctaattgtcagcatccagtgtagcctgtccccaccgttacctgggagtccagttcccattctttattactaggtaaccagtacttagctttaattctgacacttgcaggcaacattttatctagtaattttagagaaattggacatagatattaatacactttacagaagagaagtctgagaaa

SEQ ID NO: 127672 - DNA, 425 bp, Homo sapiens
ccgaagtcctcttctccaggctaacaagccacagcttagtttcttctgggcagggatggagggtcaaaagtggccaccaccaagtccttttctctctttctacacaaactgaaacaagcctttccccttcatgcctgatacccagaaagcccttttccctaatcaagagcctgcattttacctttgcccagtaaaggttctaccccagctcccttcccataaccatgcacacgcaccggtgaatccaccagtcaggcgggggctgtgtatggggaagggactcagacctaaagtgaccttaccactatgacatgagatgggccaggtagtcacaagcaaggcccaggcatgacctatgggtatggggcaagagggagactgcgttgggacagagttttgccaactagcaggatctgaggcaaacc

SEQ ID NO: 127673 - DNA, 672 bp, Homo sapiens
cgcggtggctcacgcctgtaatcccaccactttgggaggcccaggcaggcagatcacgaggtcagtagatcgagactatcctggctaacatagtgaaaccccgtctctactaaaaatacaaaaaattagtcaggtgtggtggcaggcgcctgtagtcccagctacttgggaggctgaggcaggagaatggcgtgaacccgggaggcagagcttgcagtgagccaagatcgcaccactgcactccagcctgggaaacagagtgagactgtgtctcaaaaaacaaaacaaaacaaaacaaaaaaactaatgtattcctcctttaatcactcttttcagtaacaaatatttagtaacaaataattactaaagatggcaaaagatacggagaatccctaaagccagcaaaagaaagttaactacaaagccctaatttcatttttagaaaaagctcataccctgaagtatttctctactaggagggatgggaggagggaaggaaaaagaggtgagcaagatttttcatagtttgaagatatgtattagcttatgccaaaaataataataataattgagctgtcatataattttggaactggcatgatataaaatccctaaaccataaaggaaaagactacataaatcaaaccacataaaaattacaactcctgaatc

SEQ ID NO: 127674 - DNA, 463 bp, Homo sapiens
gtaggccccactctgccactgagtgccttagggaccaagggaaatgcaggaggagggaagaggggtcggggagccctgctgttcctgggacacagacatagacaaacacacacactgcacataatacattatacacggacacacatagacacactacacacagatgctatacacacacagacactacacacagacattatacacagatacacatagacacacagagatacagagacacatacacatacactacacacacagacatacacactacacacagacacatacacgccgagcatctgtctcgggtccagagcgagcagtgtggagctcagagagagcaggagagagatatccagtgagggaaaaaacccatatttacactccacaaagaaaagatgtgcgagcccagagggacttacggggggcgggtgtgtgtgagtgtctcggatgaagtgagtga

SEQ ID NO: 127675 - DNA, 283 bp, Homo sapiens
accgcaacatataatggccctcctgcctctcccagcctgtcgcatgagccaccatgcccggcccacgtggggctgtttaaattaaaatcaaattaactgagttcctccattgcattggccacgtttcaagtgtgcagagtgacacatggccagtggctgccatcaccgctgatgtcgccacgtccctcatcacaggaatatccctggcagccctgctcccggccctctgccctcctgacgctcccttgtgacttgttagaaaagcgtaggtacagctaaaaaa

SEQ ID NO: 127676 - DNA, 496 bp, Homo sapiens
gcggcccctactactactaaattcgcccccgctcgacgcgatctcggcttactgcaacttccacctcccgagttcaagcaattctcctgcctcagcctcccgagcagctgggatttcagacgtgcgccaccatgcccagctaatttttgtattttaagtagaaatggagttttgctgtgttagccaggttggtctcaaattcctgacctcaagtgatccacccttctcagcctcccaaagtgctgggattacaggcatgagccaccatgcccggcccacgtggggctgtttaaattaaaatcaaattaactgagttcctccattgcattggccacgtttcaagtgtgcagagtgacacatggccagtggctgccatcaccgctgatgtcgccacgtccctcatcacaggaatatccctggcagccctgctcccggccctctgccctcctgacgctcccttgtgacttgttagaaaagcgtaggtacagctaaaaaa

SEQ ID NO: 127677 - DNA, 906 bp, Homo sapiens
gcagggctcggggttgcgggagcggcagataacctgattcattaacgtgagcccagtgggattggtgggggtgatggggacacagatgggagcactcaactcaggcacaggaccccagcagaacatgcccaggtcctcctagacatgggcccttgcagactttctgaggcctcggtttcgtcatcttaccaaggtgtgaccccaaccatcatctcctgaacttctggccacagagctctgagcaagcttccatcatgaccccattttggagatggggagttggcgcagccacactgctgctcagtggtagaaccagcatctgacccaggccacctgttccagagaccctgcttttagccagcagctcagtccccagtcatgtggggccatttatttatttatttaagatagagtctccctttgtcgcccaggctggagtgcagtggtgcgatctcggcttactgcaacttccacctcccgagttcaagcaattctcctgcctcagcctcccgagcagctgggatttcagacgtgcgccaccatgcccagctaatttttgtattttaagtagaaatggagttttgctgtgttagccaggttggtctcaaattcctgacctcaagtgatccacccttctcagcctcccaaagtgctgggattacaggcatgagccaccatgcccggcccacgtggggctgtttaaattaaaatcaaattaactgagttcctccattgcattggccacgtttcaagtgtgcagagtgacacatggccagtggctgccatcaccgctgatgtcgccacgtccctcatcacaggaatatccctggcagccctgctcccggccctctgccctcctgacgctcccttgtgacttgttagaaaagcgtaggtacagctaaaaaa

SEQ ID NO: 127678 - DNA, 2221 bp, Homo sapiens
ctccttaatatctagcttttatttttagcttttaattgtttataagagaggaaccactggaaagagtttaaaatccttgttccattttcaggttgggaagtgtacgtgtgtgggggtgggtattaaacaagacttgagcattaagcatttcccctcctgagcccagctcctctcctcacttgttgactaagccctgcttcactgagcattttctttttttctgcccacaacctgagtgccccatggaggtgaaggacatagcctgagtctgtgccatcagtcagtagaacaaatgggcttgctctgcctaacatcgggccatctcggattccacctcttttataggaatgagtgatgaagagaggtgggttccgctttgccgctgtattaatacacatcaggggccagctcctagcactaaatcacgctacggcatacatctgttatcggactcttcaccagtgtgatgaacaagactgcagatagaggcttccttgtgtcattctttataggattttcctaaaagaataaatagctcagatctctgccaacactctcccctgtcactgtgatgaattcagcttctttcttaaacatgcagccacaaatcttttccctttttcccctcccccagtggtagaaagttttgagttgcaattgactgaatttaaagatattaataaggctagagaggtgaagagcaggaagaaacagcatgtcttccttgcctttttgtactaatagtaacaaaaggccaaggaaaaagactgtaaatgaccatagggttgttaaatagacccatcttgaaagtgtagcacctttattttctttgtatcttcattctccctcctttacggctttctagcatgcaggtgtctagtgcacagaaccacaccctggatcttagtgagcaagcatgctaacctgcttctcagacttgatacaccagaacagggatttccctgcaagtgtctccctcatgctgaagtgaactagctgaatatgctcttaaagaaagtagtcagaaaagaaaaaaaagattatcttctccaaaatttgagaccaagtagctgtaaaaaacataataaacccagatgaaaaccaggcttcgttttcttgaaatgattttcttcatcagaatggtagatcagagccattggtgtgcagattccaatcctttaaaaagtaaacacatgccttttgataaagcggaattgaggtgatcagaaattctgttgagaacccagctatttgtgtgagtatattttagctatcccaaaaactttttctgacctttctctttctgggataggatatgtgtgcttagagtatcattcagaagggtacctaatagttaatctgttaattagttacatcaggtttcaaatactaggtcagtgatatgagagcgagagagagagatttgaattgtcaaatgtattgtcagatgcattcacaagagcaggactgctttatctgttttgttcactactgtacccctagcatctaaatgaatacctagcccatagaataaacccactggttatttgttgtaagaataaattaatagaatcttaaagttgaaacagagtgattcctaatatattgtaaccacatggttggattcagtagttccattttaggatgtcccttttctcaggagtcatagggcaaattcttattgcccactgtgtctttttaaagtttaaatgttttttaaaattaaacatgtttcttagtaaatattgaaggggtataaaagaacatttatagcagatatgtaaggagtaaataaaatacagcaaatatccacgtacctaccattcactttaagaaaaagttaaaattttcttttataaaaggtttaaaagttttaaaaagttaaaatctttaaaaatcttctccctgctctcctcagaggtaaaagttattctgattgttttttatcgtttgtcattcttttgtttttttcaagtagttttagcagacatatgtatcttcaagcaatacattgtccagttttgtgtttttgaaccttgtgtatatgaaatcaaagtatgtcatattttatgttgcagctttcaccgggttctgtttttgagattcaattatgctttgtcctgccaaaatctatgtttcaactgccatgtatgtggtattctattgtatgaatatgattaatatgttataattaaatgttcttgatgaacatttggattgt

SEQ ID NO: 127679 - DNA, 2821 bp, Homo sapiens
ctccttaatatctagcttttatttttagcttttaattgtttataagagaggaaccactggaaagagtttaaaatccttgttccattttcaggttgggaagtgtacgtgtgtgggggtgggtattaaacaagacttgagcattaagcatttcccctcctgagcccagctcctctcctcacttgttgactaagccctgcttcactgagcattttctttttttctgcccacaacctgagtgccccatggaggtgaaggacatagcctgagtctgtgccatcagtcagtagaacaaatgggcttgctctgcctaacatcgggccatctcggattccacctcttttataggaatgagtgatgaagagaggtgggttccgctttgccgctgtattaatacacatcaggggccagctcctagcactaaatcacgctacggcatacatctgttatcggactcttcaccagtgtgatgaacaagactgcagatagaggcttccttgtgtcattctttataggattttcctaaaagaataaatagctcagatctctgccaacactctcccctgtcactgtgatgaattcagcttctttcttaaacatgcagccacaaatcttttccctttttcccctcccccagtggtagaaagttttgagttgcaattgactgaatttaaagatattaataaggctagagaggtgaagagcaggaagaaacagcatgtcttccttgcctttttgtactaatagtaacaaaaggccaaggaaaaagactgtaaatgaccatagggttgttaaatagacccatcttgaaagtgtagcacctttattttctttgtatcttcattctccctcctttacggctttctagcatgcaggtgtctagtgcacagaaccacaccctggatcttagtgagcaagcatgctaacctgcttctcagacttgatacaccagaacagggatttccctgcaagtgtctccctcatgctgaagtgaactagctgaatatgctcttaaagaaagtagtcagaaaagaaaaaaaagattatcttctccaaaatttgagaccaagtagctgtaaaaaacataataaacccagatgaaaaccaggcttcgttttcttgaaatgattttcttcatcagaatggtagatcagagccattggtgtgcagattccaatcctttaaaaagtaaacacatgccttttgataaagcggaattgaggtgatcagaaattctgttgagaacccagctatttgtgtgagtatattttagctatcccaaaaactttttctgacctttctctttctgggataggatatgtgtgcttagagtatcattcagaagggtacctaatagttaatctgttaattagttacatcaggtttcaaatactaggtcagtgatatgagagcgagagagagagatttgaattgtcaaatgtattgtcagatgcattcacaagagcaggactgctttatctgttttgttcactactgtacccctagcatctaaatgaatacctagcccatagaataaacccactggttatttgttgtaagaataaattaatagaatcttaaagttgaaacagagtgattcctaatatattgtaaccacatggttggattcagtagttccattttaggatgtcccttttctcaggagtcatagggcaaattcttattgcccactgtgtctttttaaagtttaaatgttttttaaaattaaacatgtttcttagtaaatattgaaggggtataaaagaacatttatagcagatatgtaaggagtaaataaaatacagcaaatatccacgtacctaccattcactttaagaaaaagttaaaattttcttttataaaaggtttaaaagttttaaaaagttaaaatctttaaaaatcttctccctgctctcctcagaggtaaaagttattctgattgttttttatcgtttgtcattcttttgtttttttcaagtagttttagcagacatatgtatcttcaagcaatacattgtccagttttgtgtttttgaaccttgtgtatatgaaatcaaagtatgtcatattttatgttgcagctttcaccgggttctgtttttgagattcaattatgctttgtcctgccaaaatctatgtttcaactgccatgtatgtggtattctattgtatgaatatgattaatatgttataattaaatgttcttgatgaacatttggattgtattcctgttttatgctattatggaaaatactgcactgttctctgagagaacaagtgcaaacattcttttaggccacttcctgctcattaggatggctatatcaaaaaacagagaacatcaggtgttggtgcagatgtggagaaattggaacccttgtgtagtgcttgtgggaaggtaaaatcatgcattgctgtggaaaacagcatgtaaaaaaacagttcctcaaaaagttaaacacaaaactaccatatgatccagcagttctgtttctgtgcatatacccaaaagaatgaaaagcagagactcgtggaaacaaatcacatgtccattgctggatgaatggatgaacacaatttgccgtatatatacaatggaatattatgtagcttgaaagcctttcttattcagaatgaaactctgccatgtgctacaaattggatgaagacatttgctaagtcaaataagttagacacaaaaggagaaatattgtgtgattccacttttataagctactagaatagtcaacttcatacaaacagaaaggaacatagtggttgccaggggctaggggaagagggaaatggggggagttattgttta

SEQ ID NO: 127680 - DNA, 240 bp, Homo sapiens
actatttaaaaaaaatgattactgaatagatgactttttttttttatacatcagaagatgtacacccttttctgaaaacaaatggaacaaatggaagccaattaaaatgcgatcagcactaactgacaaaaagccccagaaagcattcttataaaagcactctttcaacttgttaacatacaccaccttaaaatactcaactctctaaaacaaatgcagtgtaagatcaatacagctatg

SEQ ID NO: 127681 - DNA, 2617 bp, Homo sapiens
tccggaggttgcccgggagacgcgggtacacagagaagcggctcccgtcggaggccgagtcgtcgccacgatcgcccccttggtggactcgcaggccgagcggcttccccgcagagctcgaggagggcagacggcggcgggggcgccatgagtcagaggcaggtgctgcaagtgttcgagcaataccagaaggccaggacccagttcgtgcagatggtggcggagctggcgactagaccccaaaacatcgagacgctgcagaacgcgggtgtaatgtctttgctgagaactcttcttctggacgtggtcccaacaattcaacagactgctgctttggctcttgggagactggccaattataatgatgacctagcagaagctgttgtgaagtgcgacattcttccacagcttgtttattcattggcagaacagaatcgcttctacaagaaagcagctgcctttgtgttacgagcagttggtaaacattctccccagctagctcaggcaatagtcgattgtggagcactggatacgctggtcatatgcttggaagattttgaccctggagtcaaggaggctgcagcctgggcacttagatatattgcaagacataatgcagaactgtcacaagctgtggtggatgcaggagctgttcctcttttagtactctgtatccaggagccagaaattgctttgaaaaggattgctgcttcggccctcagtgatattgcaaagcattctccagagttagcacagacagtagtggatgcaggagctgttgctcatttagcccagatgatcctgaaccctgatgctaaattgaagcatcagatcctttcagctctcagtcaggtttcaaaacattccgtggatctggcagaaatggttgttgaagcagagatttttccagttgtacttacctgtctgaaggacaaggatgaatacgtgaagaaaaatgcttctactttaattagagagattgcaaaacatacacccgagctttcacagctggtagttaacgcaggaggggttgctgccgtgattgactgcattgggtcctgcaaagggaacacacggctgcctggcatcatgatgcttggttatgtagcagctcattctgagaacctagcaatggcagtcatcatttctaagggtgtaccccagttgtcagtctgcttgtcagaagaaccggaagatcatattaaggctgcagctgcttgggccttaggacagattggaagacacactcctgaacacgcacgggctgttgcagtcacaaatactttgccagttctgctttctttgtacatgtcaacagaaagttctgaggatctccaagtaaaaagtaaaaaagccataaagaatatcctgcaaaaatgtacctacttaccagcccttgaaccatttctatatgatgctcctcccaatattctgaaacatgtggttggacagttcagtaaggtgctgccgcatgatagcaaagctcgacgactttttgtaacaagtggtggccttaaaaaagttcaagagataaaagcagaacctggttctctccttcaagaatacatcaacagtattaacagttgttaccccgaggaaatagtgaggtattattcccctggatattcagatacacttctgcagagggtggacagctatcaaccacttaataactgagcaaagttatattgtgatactcaaattcacagcagagtagttttgagtaacagtaattaaatccttctaaatatttgaactaagtatattctagatttatttaatgggaaatacctttagataatattttctaaatttatgtaatactttaaacattcgtagcttgaatatgtgaggaactattcatggtcattcgcatgcataggatttgttctacaggtagattttaaaaacacgttaaagggccttaaggcattttgttattctgttaaaaaccacacacactcgtacatgcagacacctccaatgagatatagttaagagatggcattcaaaaaccctaaattattctagccaatttgtcataggcataggcaaggaaagctggccttgctaactatatagtagtatacacaagagaaatctttgaaggaggaaactgatgacagatatacagggcacttgaaggagactctgatgctagttatataagtgcattaacttaagacacggactctgtgggtaacctgttaggttttactaagaatttaggaaaaatttactcctctttatcacaagttttccaaacctccttccccaccctatctaaagtgttccttacctttcatgggcccagcgagggtagaattcagaatagagagttatactcctgcatacatgctctccctctcattgaaaggtttcttagtctagctctgctcatgaatgaacaaagaagcaggcatgtaaaatggatccttgtcctaacgtcactttcccaagtttcaaaagtcacattttcaggtatttaaggaatagtttgaagctaataccatcaggctcagagtttacatgcatttttacttaggaagtggtaaacgggtgaaagagggtttcaataaaattttaaataaaaacagcattagaattgtcaaaaaaa

SEQ ID NO: 127682 - DNA, 448 bp, Homo sapiens
tccggaggttgcccgggagacgcgggtacacagagaagcggctcccgtcggaggccgagtcgtcgccacgatcgcccccttggtggactcgcaggccgagcggcttccccgcagagctcgaggagggcagacggcggcgggggcgccatgagtcagaggcaggtgctgcaagtgttcgagcaataccagaaggccaggacccagttcgtgcagatggtggcggagctggcgactagaccccaaaacatcgagacgctgcagaacgcgggtgtaatgtctttgctgagaactcttcttctggacgtggtcccaacaattcaacagactgctgctttggctcttgggagactggccccctttttaactgatatccctagtcatgaactctcgttgtgtaagtgacgacttttcttcttaacactattctgtatcctcctatctggtcacg

SEQ ID NO: 127683 - DNA, 2551 bp, Homo sapiens
tccggaggttgcccgggagacgcgggtacacagagaagcggctcccgtcggaggccgagtcgtcgccacgatcgcccccttggtggactcgcaggccgagcggcttccccgcagagctcgaggagggcagacggcggcgggggcgccatgagtcagaggcaggtgctgcaagtgttcgagcaataccagaaggccaggacccagttcgtgcagatggtggcggagctggcgactagaccccaaaacatcgagacgctgcagaacgcgggtgtaatgtctttgctgagaactcttcttctggacgtggtcccaacaattcaacagactgctgctttggctcttgggagactggccaattataatgatgacctagcagaagctgttgtgaagtgcgacattcttccacagcttgtttattcattggcagaacagaatcgcttctacaagaaagcagctgcctttgtgttacgagcagttggtaaacattctccccagctagctcaggcaatagtcgattgtggagcactggatacgctggtcatatgcttggaagattttgaccctggagtcaaggaggctgcagcctgggcacttagatatattgcaagacataatgcagaaattgctttgaaaaggattgctgcttcggccctcagtgatattgcaaagcattctccagagttagcacagacagtagtggatgcaggagctgttgctcatttagcccagatgatcctgaaccctgatgctaaattgaagcatcagatcctttcagctctcagtcaggtttcaaaacattccgtggatctggcagaaatggttgttgaagcagagatttttccagttgtacttacctgtctgaaggacaaggatgaatacgtgaagaaaaatgcttctactttaattagagagattgcaaaacatacacccgagctttcacagctggtagttaacgcaggaggggttgctgccgtgattgactgcattgggtcctgcaaagggaacacacggctgcctggcatcatgatgcttggttatgtagcagctcattctgagaacctagcaatggcagtcatcatttctaagggtgtaccccagttgtcagtctgcttgtcagaagaaccggaagatcatattaaggctgcagctgcttgggccttaggacagattggaagacacactcctgaacacgcacgggctgttgcagtcacaaatactttgccagttctgctttctttgtacatgtcaacagaaagttctgaggatctccaagtaaaaagtaaaaaagccataaagaatatcctgcaaaaatgtacctacttaccagcccttgaaccatttctatatgatgctcctcccaatattctgaaacatgtggttggacagttcagtaaggtgctgccgcatgatagcaaagctcgacgactttttgtaacaagtggtggccttaaaaaagttcaagagataaaagcagaacctggttctctccttcaagaatacatcaacagtattaacagttgttaccccgaggaaatagtgaggtattattcccctggatattcagatacacttctgcagagggtggacagctatcaaccacttaataactgagcaaagttatattgtgatactcaaattcacagcagagtagttttgagtaacagtaattaaatccttctaaatatttgaactaagtatattctagatttatttaatgggaaatacctttagataatattttctaaatttatgtaatactttaaacattcgtagcttgaatatgtgaggaactattcatggtcattcgcatgcataggatttgttctacaggtagattttaaaaacacgttaaagggccttaaggcattttgttattctgttaaaaaccacacacactcgtacatgcagacacctccaatgagatatagttaagagatggcattcaaaaaccctaaattattctagccaatttgtcataggcataggcaaggaaagctggccttgctaactatatagtagtatacacaagagaaatctttgaaggaggaaactgatgacagatatacagggcacttgaaggagactctgatgctagttatataagtgcattaacttaagacacggactctgtgggtaacctgttaggttttactaagaatttaggaaaaatttactcctctttatcacaagttttccaaacctccttccccaccctatctaaagtgttccttacctttcatgggcccagcgagggtagaattcagaatagagagttatactcctgcatacatgctctccctctcattgaaaggtttcttagtctagctctgctcatgaatgaacaaagaagcaggcatgtaaaatggatccttgtcctaacgtcactttcccaagtttcaaaagtcacattttcaggtatttaaggaatagtttgaagctaataccatcaggctcagagtttacatgcatttttacttaggaagtggtaaacgggtgaaagagggtttcaataaaattttaaataaaaacagcattagaattgtcaaaaaaa

SEQ ID NO: 127684 - DNA, 2243 bp, Homo sapiens
tccggaggttgcccgggagacgcgggtacacagagaagcggctcccgtcggaggccgagtcgtcgccacgatcgcccccttggtggactcgcaggccgagcggcttccccgcagagctcgaggagggcagacggcggcgggggcgccatgagtcagaggcaggtgctgcaagtgttcgagcaataccagaaggccaggacccagttcgtgcagatggtggcggagctggcgactagaccccaaaacatcgagacgctgcagaacgcgggtgtaatgtctttgctgagaactcttcttctggacgtggtcccaacaattcaacagactgctgctttggctcttgggagactggccaattataatgatgacctagcagaagctgttgtgaagtgcgacattcttccacagcttgtttattcattggcagaacagaatcgcttctacaagaaagcagctgcctttgtgttacgagcagttggtaaacattctccccagctagctcaggcaatagtcgattgtggagcactggatacgctggtcatatgcttggaagattttgaccctggagtcaaggaggctgcagcctgggcacttagatatattgcaagacataatgcagaactgtcacaagctgtggtggatgcaggagctgttcctcttttagtactctgtatccaggagccagaaattgctttgaaaaggattgctgcttcggccctcagtgatattgcaaagcattctccagagttagcacagacagtagtggatgcaggagctgttgctcatttagcccagatgatcctgaaccctgatgctaaattgaagcatcagatcctttcagctctcagtcaggtttcaaaacattccgtggatctggcagaaatggttgttgaagcagagatttttccagttgtacttacctgtctgaaggacaaggatgaatacgtgaagaaaaatgcttctactttaattagagagattgcaaaacatacacccgagctttcacagctggtagttaacgcaggaggggttgctgccgtgattgactgcattgggtcctgcaaagggaacacacggctgcctggcatcatgatgcttggttatgtagcagctcattctgagaacctagcaatggcagtcatcatttctaagggtgtaccccagttgtcagtctgcttgtcagaagaaccggaagatcatattaaggctgcagctgcttgggccttaggacagattggaagacacactcctgaacacgcacgggctgttgcagtcacaaatactttgccagttctgctttctttgtacatgtcaacagaaagttctgaggatctccaagtaaaaagtaaaaaagccataaagaatatcctgcaaaaatgtacctacttaccagcccttgaaccatttctatatgatgctcctcccaatattctgaaacatgtggttggacagttcagtaaggtgctgccgcatgatagcaaagctcgacgactttttgtaacaagtggtggccttaaaaaagttcaagagataaaagcagaacctggttctctccttcaagaatacatcaacagtattaacagttgttaccccgaggaaatagtgaggtggggaaaatggactttgaaacgttcaatattagaatgtagtttttctgttttcacatctaggttttatatccactgtgtcaaaatgtggactttgaaatacgatgtgaggccaatatgtacctttatttctctcttgatctcttccccctgccaaattaattaatgatctgactgacacgcacatttccaattcaaactggaatgtcatttaagacatttttgtactaatttaacatgtgctttactaaagagtacccaaatatagagttcaaagtaaccagtttttaaattgtgaatacctgattataaaaggcctatagattctgagtttcatagttccctgcatattactattctaccttaagctcacatttacattaatgagactatcacaggtagaaaagagatgttgagtaacaacaaaaaagttattatctaaatgcaaaaaaaccccaaaatgatgtttattatttacaggtacttcagagtaatatagcaagatgctattttcaggattaataaaaaagattcatttttaaatgaagttgatttgcagagcattcaacctaagcctcggtccttgtaagcctaatggagaactattccactaaactctaaataaataaaagcaaa

SEQ ID NO: 127685 - DNA, 1733 bp, Homo sapiens
tccggaggttgcccgggagacgcgggtacacagagaagcggctcccgtcggaggccgagtcgtcgccacgatcgcccccttggtggactcgcaggccgagcggcttccccgcagagctcgaggagggcagacggcggcgggggcgccatgagtcagaggcaggtgctgcaagtgttcgagcaataccagaaggccaggacccagttcgtgcagatggtggcggagctggcgactagaccccaaaacatcgagacgctgcagaacgcggggtgtaccccagttgtcagtctgcttgtcagaagaaccggaagatcatattaaggctgcagctgcttgggccttaggacagattggaagacacactcctgaacacgcacgggctgttgcagtcacaaatactttgccagttctgctttctttgtacatgtcaacagaaagttctgaggatctccaagtaaaaagtaaaaaagccataaagaatatcctgcaaaaatgtacctacttaccagcccttgaaccatttctatatgatgctcctcccaatattctgaaacatgtggttggacagttcagtaaggtgctgccgcatgatagcaaagctcgacgactttttgtaacaagtggtggccttaaaaaagttcaagagataaaagcagaacctggttctctccttcaagaatacatcaacagtattaacagttgttaccccgaggaaatagtgaggtattattcccctggatattcagatacacttctgcagagggtggacagctatcaaccacttaataactgagcaaagttatattgtgatactcaaattcacagcagagtagttttgagtaacagtaattaaatccttctaaatatttgaactaagtatattctagatttatttaatgggaaatacctttagataatattttctaaatttatgtaatactttaaacattcgtagcttgaatatgtgaggaactattcatggtcattcgcatgcataggatttgttctacaggtagattttaaaaacacgttaaagggccttaaggcattttgttattctgttaaaaaccacacacactcgtacatgcagacacctccaatgagatatagttaagagatggcattcaaaaaccctaaattattctagccaatttgtcataggcataggcaaggaaagctggccttgctaactatatagtagtatacacaagagaaatctttgaaggaggaaactgatgacagatatacagggcacttgaaggagactctgatgctagttatataagtgcattaacttaagacacggactctgtgggtaacctgttaggttttactaagaatttaggaaaaatttactcctctttatcacaagttttccaaacctccttccccaccctatctaaagtgttccttacctttcatgggcccagcgagggtagaattcagaatagagagttatactcctgcatacatgctctccctctcattgaaaggtttcttagtctagctctgctcatgaatgaacaaagaagcaggcatgtaaaatggatccttgtcctaacgtcactttcccaagtttcaaaagtcacattttcaggtatttaaggaatagtttgaagctaataccatcaggctcagagtttacatgcatttttacttaggaagtggtaaacgggtgaaagagggtttcaataaaattttaaataaaaacagcattagaattgtcaaaaaaa

SEQ ID NO: 127686 - DNA, 1952 bp, Homo sapiens
tccggaggttgcccgggagacgcgggtacacagagaagcggctcccgtcggaggccgagtcgtcgccacgatcgcccccttggtggactcgcaggccgagcggcttccccgcagagctcgaggagggcagacggcggcgggggcgccatgagtcagaggcaggtgctgcaagtgttcgagcaataccagaaggccaggacccagttcgtgcagatggtggcggagctggcgactagaccccaaaacatcgagacgctgcagaacgcgggtgtaatgtctttgctgagaactcttcttctggacgtggtcccaacaattcaacagactgctgctttggctcttgggagactggccaattataatgatgacctagcagaagctgttgtgaagtgcgacattcttccacagcttgtttattcattggcagaacagaatcgcttctacaagaaagcagctgcctttgtgttacgagcagttggtaaacattctccccagctagctcaggcaatagtcgattgtggagcactggatacgctggtcatatgcttggaagattttgaccctggagtcaaggaggctgcagcctgggcacttagatatattgcaagacataatgcagaactgtcacaagctgtggtggatgcaggagctgttcctcttttagtactctgtatccaggagccagaaattgctttgaaaaggattgctgcttcggccctcagtgatattgcaaagcattctccagagttagcacagacagtagtggatgcaggagctgttgctcatttagcccagatgatcctgaaccctgatgctaaattgaagcatcagatcctttcagctctcagtcaggtttcaaaacattccgtggatctggcagaaatggttgttgaagcagagatttttccagttgtacttacctgtctgaaggacaaggatgaatacgtgaagaaaaatgcttctactttaattagagagattgcaaaacatacacccgagctttcacagctggtagttaacgcaggaggggttgctgccgtgattgactgcattgggtcctgcaaagggaacacacggctgcctggcatcatgatgcttggttatgtagcagctcattctgagaacctagcaatggcagtcatcatttctaagggtgtaccccagttgtcagtctgcttgtcagaagaaccggaagatcatattaaggctgcagctgcttgggccttaggacagattggaagacacactcctgaacacgcacgggctgttgcagtcacaaatactttgccagttctgctttctttgtacatgtcaacagaaagttctgaggatctccaagtaaaaagtaaaaaagccataaagaatatcctgcaaaaatgtacctacttaccagcccttgaaccatttctatatgatgctcctcccaatattctgaaacatgtggttggacagttcagtaagaacaagtggagaaactaacaacccgtggaagaaaattcctagaatcctgggatcaagtcaaaacacctgatggttttagaggacagaatttttggagagaaaaacacaaccagatgactctctgcacccctttcccaggccatgggcacctgcctgattcctatggtcatgaaggaacatttttctgatgtggccatattcatggtgtcagtgcaatctcatcagagatgaggctccccactcaagctgccatgtgacttgacagctcttcataccgttcgctcaccagagtggtgtccagtttcaggagcacggaagaaaacacttcttgaggttgaagactgtgttttgtccttgaatggccagctctgaacaatgcccgacacatcgctgatactcattgtctgttgagtaaatggaagatgatttgcagttggtgctgtgttttgtgttactgggggaatcttgtcctgagggatctgagtgtgaat

SEQ ID NO: 127687 - DNA, 2347 bp, Homo sapiens
tccggaggttgcccgggagacgcgggtacacagagaagcggctcccgtcggaggccgagtcgtcgccacgatcgcccccttggtggactcgcaggccgagcggcttccccgcagagctcgaggagggcagacggcggcgggggcgccatgagtcagaggcaggtgctgcaagtgttcgagcaataccagaaggccaggacccagttcgtgcagatggtggcggagctggcgactagaccccaaaacatcgagacgctgcagaacgcgggtgtaatgtctttgctgagaactcttcttctggacgtggtcccaacaattcaacagactgctgctttggctcttgggagactggccaattataatgatgacctagcagaagctgttgtgaagtgcgacattcttccacagcttgtttattcattggcagaacagaatcgcttctacaagaaagcagctgcctttgtgttacgagcagttggtaaacattctccccagctagctcaggcaatagtcgattgtggagcactggatacgctggtcatatgcttggaagattttgaccctggagtcaaggaggctgcagcctgggcacttagatatattgcaagacataatgcagaactgtcacaagctgtggtggatgcaggagctgttcctcttttagtactctgtatccaggagccagaaattgctttgaaaaggattgctgcttcggccctcagtgatattgcaaagcattctccagagttagcacagacagtagtggatgcaggagctgttgctcatttagcccagatgatcctgaaccctgatgctaaattgaagcttggttatgtagcagctcattctgagaacctagcaatggcagtcatcatttctaagggtgtaccccagttgtcagtctgcttgtcagaagaaccggaagatcatattaaggctgcagctgcttgggccttaggacagattggaagacacactcctgaacacgcacgggctgttgcagtcacaaatactttgccagttctgctttctttgtacatgtcaacagaaagttctgaggatctccaagtaaaaagtaaaaaagccataaagaatatcctgcaaaaatgtacctacttaccagcccttgaaccatttctatatgatgctcctcccaatattctgaaacatgtggttggacagttcagtaaggtgctgccgcatgatagcaaagctcgacgactttttgtaacaagtggtggccttaaaaaagttcaagagataaaagcagaacctggttctctccttcaagaatacatcaacagtattaacagttgttaccccgaggaaatagtgaggtattattcccctggatattcagatacacttctgcagagggtggacagctatcaaccacttaataactgagcaaagttatattgtgatactcaaattcacagcagagtagttttgagtaacagtaattaaatccttctaaatatttgaactaagtatattctagatttatttaatgggaaatacctttagataatattttctaaatttatgtaatactttaaacattcgtagcttgaatatgtgaggaactattcatggtcattcgcatgcataggatttgttctacaggtagattttaaaaacacgttaaagggccttaaggcattttgttattctgttaaaaaccacacacactcgtacatgcagacacctccaatgagatatagttaagagatggcattcaaaaaccctaaattattctagccaatttgtcataggcataggcaaggaaagctggccttgctaactatatagtagtatacacaagagaaatctttgaaggaggaaactgatgacagatatacagggcacttgaaggagactctgatgctagttatataagtgcattaacttaagacacggactctgtgggtaacctgttaggttttactaagaatttaggaaaaatttactcctctttatcacaagttttccaaacctccttccccaccctatctaaagtgttccttacctttcatgggcccagcgagggtagaattcagaatagagagttatactcctgcatacatgctctccctctcattgaaaggtttcttagtctagctctgctcatgaatgaacaaagaagcaggcatgtaaaatggatccttgtcctaacgtcactttcccaagtttcaaaagtcacattttcaggtatttaaggaatagtttgaagctaataccatcaggctcagagtttacatgcatttttacttaggaagtggtaaacgggtgaaagagggtttcaataaaattttaaataaaaacagcattagaattgtcaaaaaaa

SEQ ID NO: 127688 - DNA, 2845 bp, Homo sapiens
tccggaggttgcccgggagacgcgggtacacagagaagcggctcccgtcggaggccgagtcgtcgccacgatcgcccccttggtggactcgcaggccgagcggcttccccgcagagctcgaggagggcagacggcggcgggggcgccatgagtcagaggcaggtgctgcaagtgttcgagcaataccagaaggccaggacccagttcgtgcagatggtggcggagctggcgactagaccccaaaacatcgagacgctgcagaacgcgggtgagcccggagcccgaacccccgtcgccccccgcgcactgagtccccgacgcctccgccccgctgccctgcccgtggagctcttggggagccgcagtgtggggaccggagttcgcaaaagcatccattcttttcagcgggtctttgggggtcaggccgagagggtgaagcttccagatggttgtgggaggtgcgcgttgtccctgtttccatcttcattgcacacaggtgtaatgtctttgctgagaactcttcttctggacgtggtcccaacaattcaacagactgctgctttggctcttgggagactggccaattataatgatgacctagcagaagctgttgtgaagtgcgacattcttccacagcttgtttattcattggcagaacagaatcgcttctacaagaaagcagctgcctttgtgttacgagcagttggtaaacattctccccagctagctcaggcaatagtcgattgtggagcactggatacgctggtcatatgcttggaagattttgaccctggagtcaaggaggctgcagcctgggcacttagatatattgcaagacataatgcagaactgtcacaagctgtggtggatgcaggagctgttcctcttttagtactctgtatccaggagccagaaattgctttgaaaaggattgctgcttcggccctcagtgatattgcaaagcattctccagagttagcacagacagtagtggatgcaggagctgttgctcatttagcccagatgatcctgaaccctgatgctaaattgaagcatcagatcctttcagctctcagtcaggtttcaaaacattccgtggatctggcagaaatggttgttgaagcagagatttttccagttgtacttacctgtctgaaggacaaggatgaatacgtgaagaaaaatgcttctactttaattagagagattgcaaaacatacacccgagctttcacagctggtagttaacgcaggaggggttgctgccgtgattgactgcattgggtcctgcaaagggaacacacggctgcctggcatcatgatgcttggttatgtagcagctcattctgagaacctagcaatggcagtcatcatttctaagggtgtaccccagttgtcagtctgcttgtcagaagaaccggaagatcatattaaggctgcagctgcttgggccttaggacagattggaagacacactcctgaacacgcacgggctgttgcagtcacaaatactttgccagttctgctttctttgtacatgtcaacagaaagttctgaggatctccaagtaaaaagtaaaaaagccataaagaatatcctgcaaaaatgtacctacttaccagcccttgaaccatttctatatgatgctcctcccaatattctgaaacatgtggttggacagttcagtaaggtgctgccgcatgatagcaaagctcgacgactttttgtaacaagtggtggccttaaaaaagttcaagagataaaagcagaacctggttctctccttcaagaatacatcaacagtattaacagttgttaccccgaggaaatagtgaggtattattcccctggatattcagatacacttctgcagagggtggacagctatcaaccacttaataactgagcaaagttatattgtgatactcaaattcacagcagagtagttttgagtaacagtaattaaatccttctaaatatttgaactaagtatattctagatttatttaatgggaaatacctttagataatattttctaaatttatgtaatactttaaacattcgtagcttgaatatgtgaggaactattcatggtcattcgcatgcataggatttgttctacaggtagattttaaaaacacgttaaagggccttaaggcattttgttattctgttaaaaaccacacacactcgtacatgcagacacctccaatgagatatagttaagagatggcattcaaaaaccctaaattattctagccaatttgtcataggcataggcaaggaaagctggccttgctaactatatagtagtatacacaagagaaatctttgaaggaggaaactgatgacagatatacagggcacttgaaggagactctgatgctagttatataagtgcattaacttaagacacggactctgtgggtaacctgttaggttttactaagaatttaggaaaaatttactcctctttatcacaagttttccaaacctccttccccaccctatctaaagtgttccttacctttcatgggcccagcgagggtagaattcagaatagagagttatactcctgcatacatgctctccctctcattgaaaggtttcttagtctagctctgctcatgaatgaacaaagaagcaggcatgtaaaatggatccttgtcctaacgtcactttcccaagtttcaaaagtcacattttcaggtatttaaggaatagtttgaagctaataccatcaggctcagagtttacatgcatttttacttaggaagtggtaaacgggtgaaagagggtttcaataaaattttaaataaaaacagcattagaattgtcaaaaaaa

SEQ ID NO: 127689 - DNA, 1900 bp, Homo sapiens
tccggaggttgcccgggagacgcgggtacacagagaagcggctcccgtcggaggccgagtcgtcgccacgatcgcccccttggtggactcgcaggccgagcggcttccccgcagagctcgaggagggcagacggcggcgggggcgccatgagtcagaggcaggtgctgcaagtgttcgagcaataccagaaggccaggacccagttcgtgcagatggtggcggagctggcgactagaccccaaaacatcgagacgctgcagaacgcgggtgtaatgtctttgctgagaactcttcttctggacgtggtcccaacaattcaacagactgctgctttggctcttgggagactggccaattataatgatgacctagcagaagctgttgtgaagtgcgacattcttccacagcttgtttattcattggcagaacagaatggtgtaccccagttgtcagtctgcttgtcagaagaaccggaagatcatattaaggctgcagctgcttgggccttaggacagattggaagacacactcctgaacacgcacgggctgttgcagtcacaaatactttgccagttctgctttctttgtacatgtcaacagaaagttctgaggatctccaagtaaaaagtaaaaaagccataaagaatatcctgcaaaaatgtacctacttaccagcccttgaaccatttctatatgatgctcctcccaatattctgaaacatgtggttggacagttcagtaaggtgctgccgcatgatagcaaagctcgacgactttttgtaacaagtggtggccttaaaaaagttcaagagataaaagcagaacctggttctctccttcaagaatacatcaacagtattaacagttgttaccccgaggaaatagtgaggtattattcccctggatattcagatacacttctgcagagggtggacagctatcaaccacttaataactgagcaaagttatattgtgatactcaaattcacagcagagtagttttgagtaacagtaattaaatccttctaaatatttgaactaagtatattctagatttatttaatgggaaatacctttagataatattttctaaatttatgtaatactttaaacattcgtagcttgaatatgtgaggaactattcatggtcattcgcatgcataggatttgttctacaggtagattttaaaaacacgttaaagggccttaaggcattttgttattctgttaaaaaccacacacactcgtacatgcagacacctccaatgagatatagttaagagatggcattcaaaaaccctaaattattctagccaatttgtcataggcataggcaaggaaagctggccttgctaactatatagtagtatacacaagagaaatctttgaaggaggaaactgatgacagatatacagggcacttgaaggagactctgatgctagttatataagtgcattaacttaagacacggactctgtgggtaacctgttaggttttactaagaatttaggaaaaatttactcctctttatcacaagttttccaaacctccttccccaccctatctaaagtgttccttacctttcatgggcccagcgagggtagaattcagaatagagagttatactcctgcatacatgctctccctctcattgaaaggtttcttagtctagctctgctcatgaatgaacaaagaagcaggcatgtaaaatggatccttgtcctaacgtcactttcccaagtttcaaaagtcacattttcaggtatttaaggaatagtttgaagctaataccatcaggctcagagtttacatgcatttttacttaggaagtggtaaacgggtgaaagagggtttcaataaaattttaaataaaaacagcattagaattgtcaaaaaaa

SEQ ID NO: 127690 - DNA, 1587 bp, Homo sapiens
tccggaggttgcccgggagacgcgggtacacagagaagcggctcccgtcggaggccgagtcgtcgccacgatcgcccccttggtggactcgcaggccgagcggcttccccgcagagctcgaggagggcagacggcggcgggggcgccatgagtcagaggcaggtgctgcaagtgttcgagcaataccagaaggccaggacccagttcgtgcagatggtggcggagctggcgactagaccccaaaacatcgagacgctgcagaacgcggggtgtaccccagttgtcagtctgcttgtcagaagaaccggaagatcatattaaggctgcagctgcttgggccttaggacagattggaagacacactcctgaacacgcacgggctgttgcagtcacaaatactttgccagttctgctttctttgtacatgtcaacagaaagttctgaggatctccaagtaaaaagtaaaaaagccataaagaatatcctgcaaaaatgtacctacttaccagcccttgaaccatttctatatgatgctcctcccaatattctgaaacatgtggttggacagttcagtaaggtattattcccctggatattcagatacacttctgcagagggtggacagctatcaaccacttaataactgagcaaagttatattgtgatactcaaattcacagcagagtagttttgagtaacagtaattaaatccttctaaatatttgaactaagtatattctagatttatttaatgggaaatacctttagataatattttctaaatttatgtaatactttaaacattcgtagcttgaatatgtgaggaactattcatggtcattcgcatgcataggatttgttctacaggtagattttaaaaacacgttaaagggccttaaggcattttgttattctgttaaaaaccacacacactcgtacatgcagacacctccaatgagatatagttaagagatggcattcaaaaaccctaaattattctagccaatttgtcataggcataggcaaggaaagctggccttgctaactatatagtagtatacacaagagaaatctttgaaggaggaaactgatgacagatatacagggcacttgaaggagactctgatgctagttatataagtgcattaacttaagacacggactctgtgggtaacctgttaggttttactaagaatttaggaaaaatttactcctctttatcacaagttttccaaacctccttccccaccctatctaaagtgttccttacctttcatgggcccagcgagggtagaattcagaatagagagttatactcctgcatacatgctctccctctcattgaaaggtttcttagtctagctctgctcatgaatgaacaaagaagcaggcatgtaaaatggatccttgtcctaacgtcactttcccaagtttcaaaagtcacattttcaggtatttaaggaatagtttgaagctaataccatcaggctcagagtttacatgcatttttacttaggaagtggtaaacgggtgaaagagggtttcaataaaattttaaataaaaacagcattagaattgtcaaaaaaa

SEQ ID NO: 127691 - DNA, 353 bp, Homo sapiens
aataaaaaagcaagtatttagcaaactacataacaacattattccaccaaaaaatggattttcaagaaaaataagaattggaaactaatcctatgaacttcattgaaagacagttcttttatatttaaataatggtggagacagcaacattacagtttcccctttctttttattgattagttttagcattattaaatagcaactaattaaactgaataattaagaaatcagacgtgagataagaactcaaatgttattcatattttaaaaaactgaacatctttgttgaacaagtctggtatttctgacaaaatgggattttatatcctttgagagacttaaggtctctcaag

SEQ ID NO: 127692 - DNA, 354 bp, Homo sapiens
tgtcatttctattgcagactctaatacagacaacagcacactggagtggacagggcggtagagcagagatcgggaagcccatgtttcagcccagattctgccataacctatgcggcaaccttccttgtgctgggcctcagcgtccactctgtacgttgagtggacccactagttgccccccagatccctttcagctctcaaatcttacggggtcaggactgactgcagaatggaagattccctctgactttggtctcctctgcctgtttggggtctggctgcacagacaggagcctgtggaggatgtggctttccacgggtcattcaaccagaggctaacatccatcctttccc

SEQ ID NO: 127693 - DNA, 750 bp, Homo sapiens
attctactaagagacataagcagtagtgtactgaagttagctcccactcgctcccaagagttgattgtgagtgtgtctttacagctctgcattcagtgacatcatgttggcaacttgaaactagtcatagctcgagtatctacaacatggaattcagcaaatgctgtaaatcaactttgtcttttcctctagaaagccagtttacaagcacacctaagtccaaataaaagattatatctatatctatgtgtgtgtgtgtgtgtgtgtgtgtgtgtgtgtatatatatatatatgatgagagttgatatagtataatagatagtgatacctacctaggagaaaattgaaacagggaagaggatgagatgtagggcggcagtttaaattttagatgaggtagtcagggaaggccttgctgagtaagataacagtctaatgatatgagggagcacgctgtatgaagcatttttgggcaggggccttcataagtaagaggactctgagataataacttgtctgctgttcttggaagacagtgagaagcacattaagattggagcagagagggagtagttggagggttaaagaaaaggttagagacattaatggggcacagaggttcattcatgtagggtcttgtaggtcacagtaggatagtaagaaattttctctcttctctgagtgtcttgtgaaactactgcaatgattttcagcagagaaatggcatgctctgtctactgtgtgaaaaac

SEQ ID NO: 127694 - DNA, 482 bp, Homo sapiens
tataagcaaaaatatgaatggccgataatcaaatataaacaactgtacttcattaataagtcagaaaatgaaaatcaaaatcacaagaaaatttcatttcataaaaatttgattgcaaaagttgaaaagtcagagagcatcaggtattggcaaggaggaagaacaacaggaaatcttttccactgctactgacaatataaattgatacaaaaaacttgaggactgatatgacactatcctatgaaattaaaactgtgcatatcccatgaaatggcaattccacttgtaagaaaatgctttcacgtgtgaactatggctagctacttcaacacagatgataatcttgagaatacaataccgaacaaaagaaaaacaagattcagaagaatacatatagtataccatttttataaagttgaatcaggcaaatctaagggtattgtttcagaattcacacatacatgtgtttaaaaatccatgct

SEQ ID NO: 127695 - DNA, 1242 bp, Homo sapiens
cacttcactgactttgtcctttacattgacaagctagataagatgatatcgttttaaataatcatttgcgtttaggtatttctctggcagttttgtattacagtttaaaaatagactagcctatgtctatggctcatgttggctatggtattttgaacttgatttctgaggctgctgacagcttttgaaagatttaacaactggcagcaagaaaaacttccatagaatctcttctctgaaattttttctgctggaaaaaagggcatcacttagcaggcgtaaatgtctcagtcactgactataagtacaaagggcccagaagctggaatctgaagacaaacatggctccactacattttactctcattgccttgggaaacattacttaaaccagaagaatctattgccctctttacttcacagtgctacagagaggattacatgagccaatatttattcaagagaaatgacaaaaagactgagaatctctgaggtccttgggtttccagaggtattcctgcaaggaacagtcaagcagcatcaaaccttcagaccttctgaaacagcctggttcctcccagcactgggtctggttctgccgccctcctttccaacatgtcacgtcagtcatcctcccaacaaattcagtagttggttaagcaagccatatacagtgttagttgactgaaatcaaagctctatagctaataccagaggaaagcaaagttctgattttcataaggttttgaatgctgtgctatggattttggactttattttgaaggcaataaagattgtaataaagatagtagcatgagtgaactggttaagagatttgccaaaatgtctagccattcaacttcgtaagtatatgaaattctccatagaagtataatgttaaataagtggccttcagtaaggcaaaaacaaacaaacaaaaaaatagatagctgctctttctatttctgttactattaaagaaaatgtagctttccaaatgacttaattttactcatgaatgaatgaatattgagttaataacactctccatactttcccttttttatatatatataacttgagataataattgctacttaaagtaggatgtttataaatacatggcagtactgtgtatgctttcttctttgtggtttttatatgcttttatacgttctgtgtatgaatgttgaggagaacttcttttagaattagttagaataaacttgttcattctgaaag

SEQ ID NO: 127696 - DNA, 1034 bp, Homo sapiens
cacttcactgactttgtcctttacattgacaagctagataagatgatatcgttttaaataatcatttgcgtttaggtatttctctggcagttttgtattacagtttaaaaatagactagcctatgtctatggctcatgttggctatggtattttgaacttgatttctgaggctgctgacagcttttgaaagatttaacaactggcagcaagaaaaacttccatagaatctcttctctgaaattttttctgctggaaaaaagggcatcacttagcaggcgtaaatgtctcagtcactgactataagtacaaagggcccagaagctggaatctgaagacaaacatggctccactacattttactctcattgccttgggaaacattacttaaaccagaagaatctattgccctctttacttcacagtgctacagagaggattacatgagccaatatttgtgaagacccagagaggacagttgacctgacaagggacatatagctaggaaatgaagctgcaagtgattctaggcctgattccaatgtccttactctttctatttatccacacatatcagtcaggagattatgatttagacaaatggctgttaagagtggatacaacatcaaaagtgcttaagacttaaagatgttttaatatcatcagggcattctttcttgcagctctcacctctgtgaatgataaacaacttatttcttaattttcttaaaatcccttggtaaaaataatcgactttaaattgatatttgcaaacacatgcatttgaaattttttcaggagttaattttcctatgacacctcatttgctaatgcacaatactgcccctatcagcacagagtattacaaggctttccagtcaaatgggagcaagcagctggagggattaaggctagtatttataccttaattccctgggctgcagtgttaacccagaaatatctcatatgaatatcacttggcttcagggcacagtcataccaggcattctcagttaatttcactatttgataaaga

SEQ ID NO: 127697 - DNA, 237 bp, Homo sapiens
tgagccgagatcgtaccactgcactctcgtctgagcgatagagtgagactctgcctcaaaaacaacaataacaaaaagaaaaacctgtgaggttgtaggttctttcccctttttcctttcctttttttttccccctttttcctttttcctttcctttttctctcactctgtcacccaacctggatgggagtggagtatagtggtgtgatcatggcccactgcagccttaacttcctt

SEQ ID NO: 127698 - DNA, 503 bp, Homo sapiens
tacatttcaagtgcttggggagactactgccacataactgaaaattagaaaccgacactgcagaaaaatacttggtccttaaatgtggcatttggatggattaaggacttgccgaaacgtaaaactgacagacttgggggggggggatgtcccaattagcacggcttctgtatgcaacgagtcccatactttgttaaaggaagaaaggaatgtgagttctcctaatctgttaagtatctttcggtgtaagttctgacaccacaatgttaaaaaagtcggatctcaaaaaccaactgctccaagcgaagtgcacagctgtcttgcctaaagaggcctatttatagtagcctcgggtagtctggtctgggctttctcattgggtacaagtaaaggaacgaaatagccaatgaaaaggtagacttttaagtgtcgtttacattggcatttgtgacgacactctaaaattaatccaatcataaacgaaatctgattaacctcatttg

SEQ ID NO: 127699 - DNA, 714 bp, Homo sapiens
gcaatttgtattttttgtactttttttgtgtttttgtttgtttatttttgagacagagtatcactccatcacccaagctgaagtgcagtggcatgatcttggctcactgcaacctctgcctcctgggttcaagtgattctgatgcctcggcctcctgagtagatgggattgcaggcatgcaccaccatgcccggttaatttttgtatttttagtagagacaggggtttcattcaccatgttggccaggctggtcttgaattcctggcctcaagtgattcgcccacctcagcctcccaaagtgtggggattacaggcatgagccactgtacctggcctctttgtgctttttaatgcacaataaaataatcacatagccattaaaatgtaaaatcttcatttgtgcaattcctaaaatcatttcccgtactattctttgagaaatcataaactaagatgatcataattcagtaaacaatagacaatcttatacaaatgaaaatgttgaggtatatattttcaagtattattcaggaagttcatttggggataataatttaaaaacaaaacaaaacaaaaacttccagggccagatatatatgttcatagtttcctgattaactaaggtttgtacatgcatttgttaaacagatacctcatgagcatatagtgtctgttaaacactacatggctcttgaaacacaaaaatgagcaaa

SEQ ID NO: 127700 - DNA, 536 bp, Homo sapiens
tatgtaagatgtcagtcctacatatagagatttgagattcatgtccctagaggtatcaatcgtactcaatttatgggaatgaatgaatcaagggagtttgaaagagagcactcatctgagcatgtaatctagttgcagacaaaagaagaaaggcaggctaataaagaagacacagaatggaggggcaatgcaagatagtacagaggagttcaagaacatgtgtatggtggaaaggtgccataaaacataccaaatagtgcagagagattgaggaggagagcgatgagaaatggtcaggcagtcagatggtggctgcaataagaatgggcagtttcaatggagtgaaaagggtgagaaccagattattaaaggggtgtgtgagtgtgatggaggatacatctaactaacaagcaactagttataaatgaggataggtgcatatcattgctttcatatataaaggtgaaaaaataaaaggtgtatttatatactaaaggctggataattttctccgtggaataaacaatattccattc

SEQ ID NO: 127701 - DNA, 398 bp, Homo sapiens
gttcaggaggcctaaagtccaaaatcaaggtgtgggcagggccttgctccctccaacgctgctgtggaagaaccttccatgcctcttcctggcttctggtggccccagcaatccttggctttatgtggcttgtggctgcatcactccaatctcagcctctgtctttgcgtggacttctcccctgcatatccctgtgtgctgtttctataaggacatcacagtcattgggtttagggttccctctcaacccaggatgatttcatctcaagatccttaactaattacatatgcaaagaccctatttccaaataaggttcccttctgaagtttcaggtaggtgtgaatcttccgggacactgtcccacccggtacaggtgggcaggattgttcctcctcat

SEQ ID NO: 127702 - DNA, 584 bp, Homo sapiens
atccctctctttggagcctagtcatctgtcgggcagtccctgtcagggcgacttccacctttgtaccacagagcccctcctgttctcctttctggggccagtgagagatggagaggccagggagttggaagggaaggcaacagaccgtgtcaccataggacgatgtgactttactctctcccacccagcccagccatcagggcagtttctggccctatagggaaggagcagaatggggtcgtggagcccccacactcttaccccggatcctgaaaggagatagtaggttgtgtgagtacctagagaccttctgaagttagcaatagccatgtggtttctggcaggaagtgagaataccagagagctggaggccacacttccatacgggagaaatcctaagtccacctccgtttaagagccctcctccccctgctgtctccctcccctacttcctggacttggtacttccttgctgcctgtggggaggccacaacagctcttctccgagcccttccctcaccctactccacaatgccttctctcccagcctccctcaagccagagcgaaccagcaatggctgctc

SEQ ID NO: 127703 - DNA, 338 bp, Homo sapiens
ggcggagatcagtgcgagggactgggggggacagagccggggtgagcaggtccccagggggtcaaggacgcatagcaccaggtgggactgactcctgcctctggactgggtgaccagctggctgccctcagtcggggctggacagaggaaaggggcacaatgtgtccgggcctcaaatcgaggtgcgccaggccggaccagaccctgcccgatagcccagggctgggtgaccactgaacatttcacccaagccaggactcgaaggccagtgctggggaagcctccacacacacctcacccctccgtggcaattacgcagacgctgggcctcctaggca

SEQ ID NO: 127704 - DNA, 434 bp, Homo sapiens
atcaactgtctctgactggcaggttatactcattgaactgtgtgttctcaacaatgtcctgcaggcctctctgaaaggctggaaccctcccagccctcccaggaagactcagccttggagctcagattggagcgtgtctgaagccctatattctcaatcgttaactgcaccagcgctcagggcccaggcttctttcctgttcgctcttgctcttcggcacctccaataaccctgctctcacaacagggcccaagccccttgagcacgcaaattgagtgtcactgtggttaagagcaggtgtccagaagtcagagaaacctggattcaagtcctgcctcctccacttattagcttttgacattagacaagttatatccagtcattcaacaatgaatttattgagctccttggctgtgtgttccaggcactgaagg

SEQ ID NO: 127705 - DNA, 148 bp, Homo sapiens
acaatagtatgtattcatcatgaacggcttatgtgcttcaagcatagcacctataggtactgaataaatgtgggttatatgtgaacatgatatattattaaacacatgaaatggactggacctgttttctctggtcactgccacacag

SEQ ID NO: 127706 - DNA, 269 bp, Homo sapiens
cccagctactcaggaggctgaggcaggagaatcgcttgaacccagtaggcggaggttgcagtgagccgagatcgcgccactgcactccagcctggccacagagcgagactccgtctcaaaaaaaacaaaaccaaaaacaaacaaaaaacaaagccatgtaaaagaagagcacagcatatcactgagtggaaaggacaggttgaaaataacacacataatctcatttatgaaaaattatgtttgtatgcatgctgaagcatattgggagc

SEQ ID NO: 127707 - DNA, 698 bp, Homo sapiens
gcttaagagttgactaatgaagagaggaataaacagcctcaaagagcaaatgttgttgatatcttaatatattaaactagggctaagaagtggcttaatgcccagaggaaaaaaataccctgtgattctgattattttatttggagcctttaaaaaatagctccaaataatggtttttaaaaatgattaccatacatttctatcctctaaaatcagagggaaaagattatcctgggtttttcatgaattgggattttcctttgaccatctgcccacttccttcagtggtattagagttgtggaccctgtgtctataggtgtattcatctgaagcatttcttttctgttctgcctgtgtcctaaggagtacaggtcggatatattgctgaaattagcaatgagaaaaactcagaattcatttggagaaagtagaaaatggattataagcactggcatcacttaatggtgaatattaatgtgcatacttaaatatgactgatgaagtaggtataactgaagacatcaccgaatgtgtcacagctagacgagcatagagatttggctagaattaaggaaggaataggggaaacattaaagaagaaggtaaagtggatgggaaaggaaagcagatgtaaagcaaagtagatttaaatgccaaaatggcatgtgtaaagatcacaaaagagaattcacagggg

SEQ ID NO: 127708 - DNA, 722 bp, Homo sapiens
gggcagcttgcttaaccatctccatgttaacgtatgttggatgggaggtgggaagagggatttagactggtggtgaagacttatccatattatatcaaatgggtgtgtgtataattcctagtgagagattttctgaggcagtttattgatgtttagagatggattttgaaaagatccttatactttgtcttaatcagttaccccttcccatctaataaacctccttcattatttcattttaaataatactttcatttgagataaatgctgagaattttaacagaaaagttaaaactgaaacccccaaaccagtagcaaaggtttatgagtgtgcccttctaacctgttctggtagtcactgtacattgatccttggctttctttgacagatactttgctgattatagatggagctctagctctttttgaaagggttctcagagaaattggtttggttctaaagtgtttcttgagttctttgtacctaagaaagcctttcattctgcatagcgtttatcaccatccaacatatatatttctttaccctgtttattgactgtcttacctcatgggaatgtaagatctgtgaggacagacctgtgttgccactgctagaacagttcttgatatgttataagtaagcataccaatatttgttgaatgaatgagagtactgaagcaagaagtgaattttttaagtattagaatttaccttttaaata

SEQ ID NO: 127709 - DNA, 776 bp, Homo sapiens
ggaaaaagatcaactggatgtccttgggattatttctgctaatgcgaaacaattttgaatgaaatcagtacgttttctttcattaagtaccaaaatccaaagagtgtggtagcagaaggctagcacaggatctgtgctcaataaatcaatactgaaatctagctctgagcaggaagaacatcaggaactcatctgcagataatggaagaacatagtttgtttgtcttagctatgttccattctcccgtgcagataaatacttgatgttctcaattattgattatgtttcctgaaggagttaattgcagagcaaaatattggaagtgagcaatctattgtgttcccttgaaccttagttttcccaagaggaaagagtgtttgtctttagagtagtgactgagatggcttaaagacagtgcaggctagaggtgggtaggcacataaacaacaaaaaagcactcactcccctctccccctggagcaggaggaggctgagaagacctgaataaaagaacactgtcctttgtcaagttctagatagtagattctaacgacttgcattttctggaacaactcgaattgtttgctcactcatccagcatgaaactgtcaatatacacaaatagatttacttttagaaatgtgcttgcatttaaatagaaagccattatgtccttgcatgtctcattgaaagcgttctctatgataaattggatttatttctatctcttcagaatcctggagtttgtcagctctggtatctaaaattaaaatgg

SEQ ID NO: 127710 - DNA, 241 bp, Homo sapiens
gcaagcctcctggaagatgagatgcctcccagagaaaggctttgactctgcctgaggagtctcagaccatgactcctctgtagagaacatggccagattggaacctggttccccaggggaacaaggctttgatggttctggcagtcatgctgagggaggggtgtacttgaataaaaagattccttgaaggacaactaggcttcccccacccctctctttttccaacctcctccaccctggc

SEQ ID NO: 127711 - DNA, 309 bp, Homo sapiens
cttataaattttacctttttgtctttcaagagaacttgagaataaacttgtccatctccacaaaaataattccactgggaattttatttggattgcattgaatgtatttgagtagagttgcttttgtgaaagtactgaggtttcaaaacatattaagtggtacagttttaattagactgattttattgcataaaaattaatctttaaaaaactgttaaaattgaggtaccctttccagagtcattatatatgttcatttcttgtagtatcttttataccttttattaaatttttaaaggtttcttcctt

SEQ ID NO: 127712 - DNA, 452 bp, Homo sapiens
ggagcctcttgatctttacgaggaggccaacccttatgggagttacttcaatctctacagggtgagtggtggggaggaaggggaaaaccagagtggaagctctaggtccaggttctaattgtattgcagtgtgaaattcacttgttaatccaacaaacattggtgtttactatgttctgagcactgtgctagagattagggggaaaacatgaagttaaactgggtatgctgtagctggtggggtgaggaggccctgactcatccttcctattgcagggctccagctccctggcaactggggggtcttgtgagtctcatatgcccagagggaagtttggatgaattcttagagaaaaccagagagagactggttgactgttttccctccttttccccctcctcctctttcttcttttttttttttttccctaaatgaacaacagacaccaggg

SEQ ID NO: 127713 - DNA, 416 bp, Homo sapiens
tacattagactatgagtgacaattcataggcgacagagcgagactccatctcaaaaaaaaagtgatataatttgcaccaccttgtggtaacaggaacacatgacattttactagacctttttattttatataaaatgactagaataaaaatataaaaatgcctatagaaagtaaaaaattatagtcaatattattcactaatgtgaacaaactcactttattttccaataaatgataaaatacttacttattttctagtagatgggaaaataacagaaaatcatggtataagactgtggttctagccaggcacagtggctcacgcctataatcccagcactttgggaggccaaggcaggcagatcacctgaggtcaggagttggagatcaacctgaccaacacagaggaaccccat

SEQ ID NO: 127714 - DNA, 401 bp, Homo sapiens
ttttttttttataacaatgcctgctggaatgattggctcacaatcagtgcataataaatattattagcccaataatgtactgagtcaggggctgcaaagcagtatttcatcacgcaatgacccaaggttcacaagaaatctaattagtgcttcaactaaagccaccagtcaagtctgggggaaactggctccaaatcacaatgctgctttagtttcctcagtagctgctgatattatcctattaatgggggaactttatggaagaattattaaataggcttggtctggttgctaggctgtctgcgtgactataacagggattctcagaagccatgttaagcatgttcaaatactcctaaaatggctgctggtgatagagaaagtagaattctccaaagtta

SEQ ID NO: 127715 - DNA, 853 bp, Homo sapiens
tgtgattacaggcattagccactgtgcccagacagaaatacatgtccttaaatcttaacatgataaagaacatccttggctgggtacagtggatcatgcctgtaatcccatcactttgggaggccggggtgggaggattgcttgagcctgggagttcgagagcagtctgggcaacatagcgagaccctcgtctatataaaaaaaaaaaaaaaaaaaaaaaaaaaaaatttttgggcggcctcgggcccgggaaaggtttttaaacccatttggtgggggcgggggccccggggttagggaccggggccaagggggtcccaaaaggagaaccccgggggcaaacgagataaaggtgcgctgggttcctctccccaaataaaaaaaccgggccggggggacacccggacgtggtccctggacccaacacccagagaggcagtgtccgggagcggccatacccggggctctcatccacacgggggtcccaaggcagcggcccggatatcaaattacgtcgcgcgcgctcgggagcaggccaaagcaagcacagcagaacaacgcaccacaaacgacgcagacacagaagggagggagagagcggtgggaaagaggaggggggggagagagacacgagggcagagcagaaaccggggcagggacgcgaggaggccagagaagcagacgagagagagagaggacggagagagaggggcgaggaggaagagaggaggaggaggggaagaagggaagagaaggagaggggggaggtgggggcgagaggcgggggcggaggagaggagaaggcagagagcggcggagagagggaaggagcaggagaagagaaaggggaaga

SEQ ID NO: 127716 - DNA, 269 bp, Homo sapiens
ggctgaggcaggagaatcgcttaaacccgggaggcaaagattgcagtgagccaagatcatgccattgtactccagcctgggtgacagaacgagactctatctcaaagaaaaaaaaaaaaaaggaaaaagaaaaaagaaaagaaacacagggagaaatgaacttgtacaagtggtgccatgcgtcttgtgggaggagttggtggagttaaagatgcctctgggaaatgatctttgtagatataatttgccccattggaaatgcaggcttc

SEQ ID NO: 127717 - DNA, 385 bp, Homo sapiens
gaagaaaagtaaatgggtcagtcttgacatttacaaagcagcatgcccccatccaaagcacagctgaagtatcactctaacctacatctaggaacataggatttttactgaacaactaaagaacacatgtggataagataaataacattggtatctataagctggccaaaacttggctagaattccagattacagaaaaagggccttggattcagtcttagagattctctttggaagtttttcaaatgcttgacttatcaagagctgagaaacttgccaagcatctcccaggtactccatattctagccacacgcaattgagcgtccagagagaaaacaggcccaggttagccagtatgcatgttcttacctctactgtacattc

SEQ ID NO: 127718 - DNA, 567 bp, Homo sapiens
cactgtactacgcctttcagatgtacacctcactcattcccagtttgcaacagctttgtatgggaggttctgtaacatccccactttataggtgagaacactgagtctcagggaggtgaaatattttacacaagattgctcaactagtgacaggtgaagcagagattcaaattccagaagtctgatttcaaagttgtctctcttaaccactgtgttgtatctcaaatcatgacagttctaacttcatgtgtcatggtacttggcataaggacgtttttctccccattcttccccaaattcagtgcaaaaaatatatatgctgagtttttcatgggccaggtctactctattcttagagaaagggtcgggtgcggtggctcatgcctgttatcctagcactttgggaagctgaggcaggtggaccacgaggtcaagagattgagaccatcctggccaacatggtgaaaccccatctctactaaaaatataaaaatttactgggtgtggtggcatgcaactgtagtcccagctactcgggaggctgaagcaggagaatggcttgaatcc

SEQ ID NO: 127719 - DNA, 458 bp, Homo sapiens
ctgtcttccttctgcagtgccctggcattaagtccggccctctggtcactcctctgagctcccaggtgctgaaggctatgtgtccccatctaggaccgtgctaaacgcctatcggctttgccaggccttcttgattaatttgctgctggtgaaacgctacttttctttgtcttcaggtcaccctgactttgcatatttcttctcctaaactagagtataagttccaagggagttgatgcagtcttcacagctttctgttcccttgacaaagcaagtggacgtggtcctgcgtgctggagcgagtggctcagtgaataacaggccctgtgtgagcaggccatacttgctcacgctggaaacccagctccttcccaccagccctgccccatcctgctttgccaaaggagccaacagccccttaatcacctgaccacaggatgtgagccagaggggagcga

SEQ ID NO: 127720 - DNA, 232 bp, Homo sapiens
ccccacagcagctcagtcatgcacagctcaattacagctccccctgggctggctgatttggtggggatggttcacatggcaacaagtggcctatgccatgttgcctggcctctgaaaaacgtaacttatcatttgtattttcacacaggcactgaaaaggggtcagctattcttttttttttttttttttttttttttttttttttttttttttttttcttttttttttttt

SEQ ID NO: 127721 - DNA, 497 bp, Homo sapiens
ctcccagagtgctgggattacaggtgtgagccgccgtgcccagccaagtttttaattttgatgacgtccactttttctagtttttcttttgttgcctgtgcttttgttcatattcaatagatcattgccaaatccagtgtcataaagcctctatgttttcttctgagagttttatagttttagttcttatgtttaggtttttgatccattttgaattaatttttgtattaatttttggtaagggtccaactttattcttttgcatgtggctgtccagttttcccaggactataccctggttgacaaaattgtgctttccctgttgaatgatcttggtacccttgttgaaaatcaattgatcatatatgcgagggtttatatcttgactctgtgttctattccattgatttatatgtccgtttttattaggcattatctttatgtatctttaccccactgttctcattgctgtagctgtgtacagtagtaagttttga

SEQ ID NO: 127722 - DNA, 345 bp, Homo sapiens
cacatggggatctgcagcagcctctcaatgccaagggcaccctgagtttggttatgggagtcgggagttgagccaagaggaagggctggcgtcaaggcagggcgggcatcaggcagggttcccaacaggcccatcaagcccaaccacctcctgagcccaatgcctcacctcctaccctgctgggctctggactggctgccaaagccccaccagccccgctcagtgctagaggctgaacagccaggagaggatgcggaggatgtagctgcgtggaggcgccaatcacattgaactcttgatggggaaagccgggaattccaggtgtaggtgcagccgtgccaacct

SEQ ID NO: 127723 - DNA, 274 bp, Homo sapiens
aataaactagattctaaagcactctaaggtattcctttgaaagctgtcatcttaaagtaggaatgcaaacaaaattgtccaggtacccattgtaagatgacatcagtgggctacctgtttcctggcaattttattttgtggcataaataacctttatttccttgaaaggtcttaaaagttatagaaaacatgtcaaagcagccaaagtttactttcaatttcaacaccctagaatgactataaagataaaaaactgcaacaatttatagattct

SEQ ID NO: 127724 - DNA, 467 bp, Homo sapiens
atgagagtaactactgacttaggattcaaatcttcaggggagattcctcccctctctgcccagttcccaggttgaaacatccaaggctctttgccatccctttctgcatggcgggtttctttgtggccatttggttccctggattcaagtggtccctgatacctgttcagtttaccatcttgggccgggcatggtggctcactcctgtaatcctagcattttgggaggtcaaagtgcgcagatcacttgaggccaggagttcaaaaccagcctggccaacatggcgaaaccccatctctactaaaaatacaaaaaattagctgggcatggtgatgggcgcctgtaatcccagctactcaggaggctgaggcaggagaatcacttgaacccaggaggtgaggttgcagtgagccaagatcatgccaccgcactccagcctgggcaacagggcacaactgtttccaaaa

SEQ ID NO: 127725 - DNA, 256 bp, Homo sapiens
cctgtaagatactgcacaatctggcttctgttcatcttatcctcccctacactccaggccctttagttccttgatggcaccttatttcctcccaccacagggaacctacacatgctctctgcttttaaactgtgtccacttccttgcctagttaattccttgcttgggaaagcctttcctgacccccagaccaggtcaaactctacatgatctcttggacacaattgcagtttgtattgttacatactctaaaatc

SEQ ID NO: 127726 - DNA, 651 bp, Homo sapiens
gggtagaagggtagctctgcttcctttccctctttgttgttgttgttgaggaatcttgaaactgctctccgcagtgtgagacctagtttgcattaccccaagagtgtagctgttttcgcttttatgtactgctacacaaatatgttttgtgtttggacaaatggccattctgactggtgtgtgatggcactggtacctcatctctgatgattagtgatgttgagcattttctcgtgtctgttggtcttttttaggtcttgttttgactagtgtgtttgtatcatttgcccattttttacttgtgttatttttctgcttcttgatttaggtaaggtcctctagattctggctgttagaacttggtcagatgcttggtttgggaacattttctcccatcatgtagtctatgtgtttactgtgttggcaattgctttgctgtgcagcaggtccgtagtttcttaggccagacttgtactttttgttttttcttgcatttcttttgggtactaaattgtcttaagtggtttgcaaaagcctatgttgagaaaggtgtttaataggttgtctgttaggacttttatatttgaagtcttctatttcagtctttggttcatcttgagttaattttccatatgatgacaagcagggctg

SEQ ID NO: 127727 - DNA, 382 bp, Homo sapiens
ttctctagacgatcggtttgactacgggggaagaatccacacaacattaaagagaccatggtgagtatgttctgagaactgaattccattgcctcgggggcctgtccgctgctgccaatttgcttctcatggcagaaccctgtgtgtcagaaccctgactaggctctgccgatggttgtttggaaaagagtccagctggagatgaaaggagttcttcaaagcaatgactccttggaggctatcactttagaattgggaatgattacttatcaaaaaacgacttcactctggaatatactacgggcaagaagctggcctgacctctcgggtattctgttagagtcggcctgagccggagaggccagatgaatttggagtgatg

SEQ ID NO: 127728 - DNA, 396 bp, Homo sapiens
aatctacctggccttccaatccctgtcgcatctctctgccttgagatgtatggcaatgctattttgctagtctgttcttcattctctattacgtgcagagttgaggactgggttgctttcttccttcaaatctctacctaggccttaggaccaagttgttcagggtacgagagaataagctgaccccacagggctgtcaggtgccacaaaagtcttctaacagtccttctcctccctggagtgagctcacccttgttcaccacacaggccttttacacagcacaattacaacattgagctcgacacagagacaggcactgccctgcacttaacctcctgcttattcaaatcctcactctcgttcctatcaaatgagaatgaacatttgggctttcc

SEQ ID NO: 127729 - DNA, 463 bp, Homo sapiens
ggtgtgggtgtcattggattccacaaaactagtgagaagagtgtacagagctttcagttaaaaggtttccctttttccatatatggaaatcttgcagtaaaagattgttgtattaatcctcattctccattgattcgtgtgaccaaatcttccaagcttgaaaaaggttctttacctggaactgactggacagtttttcagattaatcattcagcctatcaaccagtaatatttgccaaagtaaagaccccagaaaacctttctccttccatctctaaaggtgctttttatgccactattatacatgacctggggcttcatgatggaattcaaagggttctttttggcaacaacttgaacttttggctgcacaagctcatcttcatagatgccatctccttcttatcaggggaagaggctgacattgtccttggacaggtacattcttgtggatattgatgat

SEQ ID NO: 127730 - DNA, 100 bp, Homo sapiens
cggcctcagcctccaagtagcggagatgacaggcatgtgccactgtgtccagcttaacccagttttgaggccctggctagcgaccagccagttcgtcttc

SEQ ID NO: 127731 - DNA, 263 bp, Homo sapiens
aatgttcaggaacattaagtccagggcaagaaggcagaaggaaactaagagagcacacattttcataaagaaacagcagcagccccaagaaagggctacaccccagtggtcctctgcagccctcacaaactctatcccatgtctatcccacaaggaatgacacctccaatctgttcagaaaaggcaggacaatttcaaagctaaataagtagagagtgtgcctaggggggccacagcaccttgaaggaagtctggaaagtacc

SEQ ID NO: 127732 - DNA, 488 bp, Homo sapiens
agtgcacggggaagactggggcaggagataccaagagtggaagcaggtaggagccagagtctgtgggagaccctgagagtctgagttgtaaggacctgtgggaaagaggatgagtcaaatcgacgggacttggtgattcaagtgggggtggagtgagaggagaagttgaagtgatccctaggcttttttttctggcttgggccacggggtgaaaggaaggtagtctcattcattagggaacacaggaggaagagctagtttgagaccaacgaggacatcagggttaatcttgaatttgatgtgcctagggagcatggaggtgaaggtgtccaacagcagggactcatactaccattgggaattggtgtcagtcaggggctaacagagggctctggagttctattgctagtttctcctgctttctatctatgtggacttgggcaagtcacttagcttcctgaagcatctatctcctcatctgtaaaata

SEQ ID NO: 127733 - DNA, 449 bp, Homo sapiens
gactctttgtcagctatctttatggacttactatgaaatatgttaagttgcatattattggcttatcattttttcacaagtcccacatagagaggctgaaaacatatattaacaagaacaaagaagaaaggagaaaaatggtagtaagggtattcagtagaatttgagagttgattcaaactagtgactagaggcattctttctgagaaaaataactagcctaagagaggaaagaggaagcttgaaatactaatagtcaggtgcattacttttaaataacaacagattggcaaggatcgccagatatttgaggaaaaacctttatgtgaaagataaaagggagaatatggaagaaaaacaaggcatgaagcagaaggaaactaatttccttctttattgggagagagctttcttgccttcaacatctagctgagttttgtcccactgag

SEQ ID NO: 127734 - DNA, 266 bp, Homo sapiens
gacttacgtactaaaagcaacacatcctacaggtattgtctttcacataaccttagtttctttgcagcacttaccaatactagaaattattttacttatttaagttcccctcttacttgaacatcagctctattgaacacagattcaatcactatagccctaaatgctaaaacaggacctcacagacagttttcatttttattccgtcaaatacatctcttttccttcatgacttaagactagtgcttagcacagaataaatgcta

SEQ ID NO: 127735 - DNA, 471 bp, Homo sapiens
gatctctgggctactgtgtggggaatgggttggggtgggcaagggtagaaggagggtaacctgttaggaggccattgcaaaagtccagatgagagatgatgtgattcacaccagcagtggaagtgatgggagatggatagagtctagctggagtctggaaataacctcactcgtctccagaattgacctaatccaattcagacagtgtggtttctgttctatttttagtggtctcatatcattgcttattaaattaaggtctataaattctacttgacttttctaaattactcttccatgtcttaagtccatgagaaaatgatagttctttacctcagaggccagtggccatagtaccaggcactgtacatgaaatcataggggaagaggtgatccccgattccagtttaatcaggaagacagtgttggcagacattggcagagacagacataaagtcaacaagttcaaaa

SEQ ID NO: 127736 - DNA, 602 bp, Homo sapiens
actttcaggaattcagggattcaaaacttacctccccataagaagtaccagggaatactccaatgaaatgaaaaataaatcttaaaagtagatctgaaatctaagaaataatattgaccaaaaccatgtagtggagcagaaataagtgcaattagcggtgatggtaaaataagaatggaagtaaaatactagatggtttctgcaagtgagacaagaatccaacttaaaaatttatttttatagagacagaatatcactatattgcccaggttggtttcgaactcctagcctcaaacaatcctctcacttttctcccaaagtgctgggattacaggtgtgagccactatgcccagtcaaataaatggctttttctttttctttttctttttttgagacggagtttttctcttgttgcccagactggagtgcaatggtgcgatcttggctcactgcgacctccacctcctgggttcaagtgattctcctacttcagcctcctgtagttccagctacttgggagggtaatatgggaggatcactcgtgccaggagacggaggttgcagtgagccgagattgtgccactgcagtccagcctaggca

SEQ ID NO: 127737 - DNA, 571 bp, Homo sapiens
actttcaggaattcagggattcaaaacttacctccccataagaagtaccagggaatactccaatgaaatgaaaaataaatcttaaaagtagatctgaaatctaagaaataatattgaccaaaaccatgtagtggagcagaaataagtgcaattagcggtgatggtaaaataagaatggaagtaaaatactagatggtttctgcaagtgagacaagaatccaacttaaaaatttatttttatagagacagaatatcactatattgcccaggttggtttcgaactcctagcctcaaacaatcctctcacttttctcccaaagtgctgggattacaggtgtgagccactatgcccagtcaaataaatggctttttctttttctttttctttttttgagacggagtttttctcttgttgcccagactggagtgcaatggtgcgatcttggctcactgcgacctccacctcctgggttcaagtgattctcctacttcagcctcctgagtagatgggattacaggcatgcgcccacacgcccagctaattttgttatttttagtagagatgagattt

SEQ ID NO: 127738 - DNA, 635 bp, Homo sapiens
catccctgtcttattcctgatatttggaagaaaccttcttgttttttagcctagcgtattctgttagctgtggtttttcagaaatgctttttattgtgttgcagcagttctattctagtcctaccatgttaaatgtttgtttttatcatgaaaggatatttttgtcaaatgctttttctgcatcagttgagatgatcgtgtgacttgttttcttcattttattattgtgatatattacactgatttattttcttatggtgagccaccttgcattcctggaaataaattgtacttggtcatggtatatagtactttttatttgttgcaagatttggtttgcgagtattttgttgaaaacttctgcacacatattcagaagggatacatatcatagtttttgggtgatttttttatctggctttggttcaaggtaactcatagaatgagttaggaaatgttcactcatcttctatttttggaagaattagagaaggattggtgttagtttttctttaaatgtttggtagaattcaccaaacatttaaagacagactgacagttggtcttgagcctttctttgttgggaggatttggattactgattcagtcttatatcagtctgttcggatgttctg

SEQ ID NO: 127739 - DNA, 677 bp, Homo sapiens
attatgagaaggagggaccacacgcatggctcctggctgtttgtgtctcagtctgaagtcattctaacaacaccacccagcgggctgcccctccccactgaggagaccccaccccaccccacgcccaaggctgtagtctggagcagcaagagccaaagaggtcctgtgagagcagggggtgcctcttgagaaccccagcaggagtcccaggagagccgcccacccctggatgcggtgcccgagtgtctgtcctacagtagtagctggcaatgcagcagcgagcaccactgcgcctctgtgccatcctactggcctgtcagctcctcgtccacctctgccctcatacctggctccccacggtggagccagagtgggccttttaaaacagaagtcagggctgggtacggtggctcacgcctgtgatcccaacactttgggaggctgaggtcggtggatcacttgaggtcaggagtttgagaccagcctggacaacatggcaaaccctgtctctactaaaaatacaaaaattagtcggttgtgatgattcgcatctgtaattccagctactcaggaggctgaggcaggaggatcgcttgaaccgggaaggtggaggctgcagtgagccaagattgcgccactgcactccagcctggggccacagagcaagactccatctc

SEQ ID NO: 127740 - DNA, 281 bp, Homo sapiens
aaagatgcttctgccaggacccaagcagacagcaatgtgtgcagctgtctagtcacaatcctacatttctcaacttttcagaccaggtacagctgtggcttccaaccaaagtaaccagaaatgagggaaagataatggaatcagtgttctgctgcagacacattaagtgtatattactcagcttttatctgggggttcatattcctattaaaaagaatatccaagctaagttgttaaaggctttaaaggtgctgacagttcaaagctgtgcagggctggaa

SEQ ID NO: 127741 - DNA, 196 bp, Homo sapiens
gcccacctgctctgaccacctctcccttgtagccctgcaccacctcccagcgtgagagaccctcgtcaaaggtccggctcaaatgctgctccctgtgtggcacagctctgaggatacaggccctcccctctccactgggtgggcagcaagggcaccagtccaggccctgtcccttggccagatcctctgccggagg

SEQ ID NO: 127742 - DNA, 371 bp, Homo sapiens
gcaaataaccctgttccaggtctgcagacctcaggtcaggggccaactcctccctttaacttttcacagaaggcgtaataggaaaactcgctgttatttgaaaagtccattgtgagaaatgtcagagtgcagcttataagcataccctggggagcacagctgagagcaattttgaaaaccaagcagttagaaactgatgaagtagaatgcacaggtagaagacagcttggcactgcttcagcatatggggctgcttgcttcaggccagatgccacagactgacccagcaggatgcagattactcaactttctgagatggaagctggctcttcagcttttctctacaaggctgcttcatttattctgattaa

SEQ ID NO: 127743 - DNA, 755 bp, Homo sapiens
atttttagctagaattctatttaaaaaaactccttctactacaatttcttccaaaaaaggcagaataaatgattaattccttcctttaacctctacttttccgaatagacttcagaataagaagctgatgttatacttacttaccacctagttactcctaacctggactttgctgcaatacaggaaaaatagatgaatacagcaggagatgttacaaactttctacaatcagaaaaaataaagctacaaggttttctttttattagagtatttgtagtatgtaaaaaacatgtatattaatgtaatttcaagttaaaagaggtaaacttcttctaaagtttcagaaaggcatttacctttataaagatatttgtcgaatatcaactgtaagatggaagacgggttgaaagtcattaagttgaaatcgatttcttcataacttggaagatatttgaataggctgtttagtctctcctgaatccacgggtgtaagtgatgtgtgaaagccaaacccttttcagacaacagctaaacaaatactcagttaagttcttggatttaaaagacggttgtgtttggaaatcattattttccacaagggaaagaagacatgttacaggaagcaactggaaccagttttacccctttgtttcaaagcctccagttcttcatctctgagcctagaatttcatcttggttcctttttttttaggaagagcaacttttagctggctggcagtttttaattcaccttg

SEQ ID NO: 127744 - DNA, 706 bp, Homo sapiens
atcgttattgttgttaattttagtacttaatattatagcacttaattatcccaaggcaatctcagtgattttttacaaaatgtattttcatttatttgataggtcatcaaagtgactataaataatacgcctttttctttttttaattctgaagagaactgctctagcctctgaaatgttatagagtaagacgtttcagaggattcttttctcaaccattaatttcttaatagctcatatagagctgtgcttgctgtctttcctgagagttcctattccaacagtaagaggtcatggcagattttgaataatgattttttggggggaggctcttaaaattatctttcctttgtcctcctcatctctttatggggttagcaaacttttttcttaagagccagaaagtaaatattttaggttagcaggccatgtagtctattaccactactctactatgttgctttattgagaaaccagccatagatgaaatgcaagtgaatggttatgactgtgttccagtataactgtttacaaaaataggcatggtttgccgatcataagtaaaacagcatcaaaaggaaaatattttatcacaacatactctattattttgtattaggaagaacaagagaagaaagacctaagctgaatatctccccaaaaaatttcttgtagaaaatacagatgagcgaaaatagaatcttaa

SEQ ID NO: 127745 - DNA, 737 bp, Homo sapiens
aacccaagccagaaaaccaggagtcatcctagaatctcccatctccttgagccccacatacactgacacagagacctttcagccccacccccttaacttgttaaatctctctcattgtctctctttccactactactgtcttcaatcagatccacattacttattttatggactaaagcaacttcttgctaactgatgaacctgctttccctcttgccccattccagtacagaattccaaaattctgtttgatagattttgaaaagttttcttaatccatgaaaaattctgtttgattgattttttaaaaaaatcacaacctgatcatgtcatatccttgcttaaaattattcattatgatgaatgtggttcacatagtcttcaggatgaggttcactccttttaatttggtacacagggcctgtctttattatgaaatgtgctatctctttggcttttttttttttgacaatttactacccatgtgcaatgcctgttccacagtcattatgaactttgtgcatttccctgtacctaatcctcttcatacgaaacctccttttctgtgaattatttttccctcactttgtcaccttctgaattcctatttaactttcaagtacttggctcacattgtctcctcttccagagttgcctgatcaatctactcagttggaattatatcttcctcctcttctttaattatgggcaatcttctgggaggccatattgtttgt

SEQ ID NO: 127746 - DNA, 399 bp, Homo sapiens
tgggtagggggatatggaaataactttcactaggaatttcaatttctacaacaccttttaagaacttttactgacagcatatgggaagttaaggatcacctaaaattccagaagacaatgagaacaattaaaggtatataaatgaaagacagcatagtgccctgcagctcttatgggacttcttcctttttaaagagctttcccatgcattagaaccttgtaaaacttctgaataagaagtcagagcagagaaagcttacaaaaggcacacccggagcgcttaagaaagacatcctgtggggcgcggtggctcacatctgtaatccctgcactttaggaggctgagggtggtggatcacttgaggccaggagttcaagaccagcccggccaacatggta

SEQ ID NO: 127747 - DNA, 392 bp, Homo sapiens
acctttccgcttttcctctaccaacacctgctcccctggttgtcttgtcactttattagcacaaaatgaacattttcatctctgagcctttgcttatttctctcattccagattcaaactggaatgtccttcttggcatggatcacccatacccatctgactgacagatgtcttcttttcctaagaaaaatgaatccatacttactctctgctgcattaccacatactgtctgtacctgttcttcctctctcatcgatttcttcattcagcatatgtttattgcttttccatgtgccactttagaaactaggattattgggtaggatagaaccactgcactggaagtgttcatgcttaccacctctttgtcacttgtctttatatttcattg

SEQ ID NO: 127748 - DNA, 487 bp, Homo sapiens
gtgtaaaactgcttcacaaactgcgaagtgcagtgcaaatgcaagttaagtttggttgttcaacaaaacttttagaggccacctctctgtgccagaccctgggctgagcactaagactggttattaagtgatgatgtcagaatctgaactcaggtccgttttactccaagcttgagctcttagtcattacataaattaccttcagtcttccaataccttcactcttcattcccttagtgactcattcattcaacaaaatgtatgttgggcctattacatgcaaaccttgtgccaaacagaagaacaggacacagtccctgctttcaaggaactcacagtggagacagcgaaatagacggcttaagcatgtaggtgctgagagggaagactgaaaggtaggaggggtcaggtctttttgtggatgtgggttggaggctgtcagagaaggtttcctaagggatgtgatggccgctgctgctgaggaata

SEQ ID NO: 127749 - DNA, 505 bp, Homo sapiens
cactgaacatggcagctactagcattcgtgagacatcagggctctgcaaatggctctctgcgcaaagcatgctcacagggcagaggtggccctgtgtgggtggaggacatgccagaagcatgggctctacacccagagccttctttccaccctagtccctgctcccaaaatgcaattgagaactgcatttaattagttacaagaaactgtttgttttcttccatgccagtcaatactatgacggctttaaatcaactgcatctaatcctataaatacatctccgggatggagcctcctcaagatgtcccatcagttttgttcatttacttctattcctgagattcagttctatgtcctctactcttcaatgagacatgagtccatcaacaaaatagcactgggaaaggaattctagtttctgacattgagacctggcttccagtttaagctcctccacttccaagctgtgcaaccctgggccaaccacttaacctctctgagctg

SEQ ID NO: 127750 - DNA, 426 bp, Homo sapiens
ctgttcaagtcatgtcctttctcaaaaatcttccacggttccctactgatgccagattaaatgccaaaccccatagcctcgtactcagggcctctcaaggccgcaccccaacctgattggagtcactaaactcctcaccctaccttgaccttgacaagtgtttttattgcctctccagccctataaaggaagctcggaggagaataaaaacaaaacattttgtaaacatggatgtgtttcccaaaagttaacattaaaattccaactctctccttctccttggagtcttccttggtgtttaggtggagatggtcacttccattcggtgtctttcctctccccagggagcactgagtgcacctatggagttttgctgtgcttccctctgcagcactgagaaaggcgctggcatgtggtaaatgctca

SEQ ID NO: 127751 - DNA, 581 bp, Homo sapiens
ggctaaagacaaatcacttggagataacaataaaaaaacagaacaattatctaattcaagattagactggcatgtaaggaagaatggctctagaagtagtgtttttccctataatatttacgaggatagcttttagtgcaaatttaggacatttgctcatggactgtccatgagtcagaatggctactggacttcttgttaagcacaaaagataaggactggctctagaccagacacttttgtcacctttagtttgtttttggggccagtacctcgaacactgtagatatttaacaatttcctatatagttctctcttctataacactgcaataattcttgagactatagttgtacttcctcaaaatctattgacttttatgggtcaaaacttgaagagcgaaaggttcctagaaaattggtaaagacaatagtcaggctgggcgcagtggttcatgctttattcctagcactttgggaggctgaggagggcagatcatcagtggtcgggagtttgagaccagcctggccaacatggtgaaaccctgtctctattaaaaatacaaaaattagccgggcatg

SEQ ID NO: 127752 - DNA, 494 bp, Homo sapiens
cgacctttgtgagccctctcctgctcctagaggtggggtttctccatgttgcccaggctggtctcgaactcctgggctcaagtcagccagcaatctcggcctcccaaagtgctgggattacaggcatgagccactgtgcccagcctgaattttcattgaaactaatcttcaagcttgatggaacctttatctactgttgacataccacctgtatttctaatgaagacatctatctcgtcttttcagaagtctccatttgtgtatatgattcaatatattggcctttcctttaaaaatatcagagaacaacaggttaaaactaagcacagctctagtttgtggggcattaacaagagaacagatttcaaattaccaagttttctcttccttttgttccactctgttgtcaggttatcatgcagcttggaattgaccaagtggctcagtttaggatcgttgatagtactgtgataagactttctcttttagcaatc

SEQ ID NO: 127753 - DNA, 459 bp, Homo sapiens
catgtgttggtttgcgcagtttctgttctgaggtatgtcagtgaggatactcagtggtgttgtcaggacaaggttaggacactgtatttaaaagttgaataatttcctaaatatcttttaatctctccttgatccatattaagctcactaatattttcagtctatatcaatctcttgagtactaggttccataaggttactgcttcattcactttctacatttttgtgtatcctgaagttactttagctacatttctagagaagccctcatgctctaccattctcagatttaataaattggctgatagaaacaagatccccccaaaaatctcaacagactggaatgataaaaaggattaagaataaattaggaattttgaactgaggttcagtaatcagccagttaactatggaatgatggtaaaaaaaagatggatgctgccacttaatggtcaacca

SEQ ID NO: 127754 - DNA, 349 bp, Homo sapiens
ctgcaaactcccagctccgccacgaggaaacagcgttgggttgctttctagtacctgtttccccacttagagaacctcaaaacgtgttcaaagaaccagacacaaaaggccatatagggccgggcgtggtggctcacgcctgtaatcccagcactttgggaggccaaggccggtggatcacttgagaaaagaatttcgagatcagcctggaccacatagggagacccccccacaccatctctactacggaggcgcgcgccggtaatcccagctacttgggaggctgaggcaggagaatctcttgaacttgggacgtggaggttgcagtaagccaagatcgcggcactgc

SEQ ID NO: 127755 - DNA, 449 bp, Homo sapiens
gcggacagatctctgggtgctgggcggtcatggcgctactagatgtatgcggagccccccgagggcagcggccggaatcggctctcccggttgcgggaagcgggcgtcgctcggacccaggacactacagtttctctatgcgatctccagagctcgctttaccccggggaatgcagcccacagaattcttccagtccctgggtggggacggagaaaggaacgttcagattgagatggcccatggcaccaccacgctcgccttcaagttccagcatggagtgattgcagcagtggattctcgggcctcagctgggtcctacattagtgccttacgggtgaacaaggtgattgagattaacccttacctgcttggcaccatgtctggctgtgcagcagactgtcagtactgggagcgcctgctggccaaggaatgcaggtaagcgaggcct

SEQ ID NO: 127756 - DNA, 544 bp, Homo sapiens
cttcggcgcttcatggctcactatctggttttcttatttcagacttggcaccaacaatgtcttgtgatgtttttgccaaagtaaatgagtgttataactactttgtgaaggtttggttttattctcattccatttgtggtggaatgaaattcttaaaaattttaaattagacagacacagtgatgtgcacctatagtcccagctactcaggaggctaaggtgggaggatttcttgagcccaggagtttgagttcagcctgggcaacatagtgagacccctatctctcaaaaaaattaaaaattaaatcaatacaattccaaattatgtgttacacattttggcctgcttcacagactaatagttctaagaatcacattgattgagtgagtgagtgattgacagtgtctccttctgttgcccaggctggagtgcagtggcgcattcacagcttacctcagccttgatctgccaggcaccatcatgcatggctaattctttgtttttttgtagagtcggggtctttacagtgatttatttattttt

SEQ ID NO: 127757 - DNA, 673 bp, Homo sapiens
tagaaggagctcaggaaatatttactgaatgaatgaatctacagataaccttctctttatgtttctggagtcagtatgtcaataactacgtgctgaggctgtaagggctgacaaatctctgccctcaaggtgcttattatgtctattggagaaaatccacaggagtgcaatttatgataatattttaattggttattatatgcttttctagacaatgagtgccttgagggcagacactttgtcttatctttgtgtgtttttgtgtgcttagcccaatatcgacatatagtaattgttacttatttagtgttaagtgaagtagaaaattttaatagccttcatataccaaattcaagttagtgtttatgttatacatttatcttttacaatgaactctctccccatggttcttggtcttagagaactcattggtttattttggacgttagtaatgagggaaaccttttacagaaactttgttttttgactttttgatttgagttataggccaaggtaaaattttcatcacatctgtgtttattgcacttctgatataatccagtggtgatgtacaggtgaagtagtgtgactgtattttttaaacattatgagcaccttcatgtgttgtcttgtgtacctgttgggctgctaattcattctgctctggtaagtc

SEQ ID NO: 127758 - DNA, 371 bp, Homo sapiens
gaacttgcaagcttcccaataaagttttctctgagatcaatggtaatattaatgaatatgatgttttaataatgtataatgaaatatgtcaacatttggaagatctgaagtcagtgaaccattattgtttgtatgatcaatgaataacattaattttcaagacagaccaatggaatgtcatggagtaagaaaattgcactgcaggttcagattccacataacaaatagtctttaaggaaccaccatttgttgagttttagtgtagtatcaaagaagactatactaaattgtttctccttttctcaattacaaatctgtaggaggttggattttcttcacgtatttcaaccaaaacatgacattgcagcagg

SEQ ID NO: 127759 - DNA, 568 bp, Homo sapiens
acctgttcagttttaattcaaattccttgacttctcaaccgtctgattaagccattgctttgttcattgtcatttgaacataaagtgtaatctggcacgtatatgtttgtgcttctgctgcaaaggagatgctaagcataccagagaactaaacaaatatcagctccacttccctttctctgtgatatatctcctctagctaccttgtactgtcattaaacattgccttgttactgaatcttgtttatttccttctccaattatacattaaacacttggaaataagtaccagtatcacaagagttttatgttccccagagcggcccatccccattccaaatgcttatatacaatttcatttcttgttctaaagatacctcttttgaaccccatgctgaagagctggtagcggacaggacctagcagcaggaggcagagtcagctgtcagcgttctttcatgtgtgctatgtgtggaagtctctgacaggcacacccacctgctccccaagactgctctccctgcacttggaaagctgtgggcatgcctccccatttcagcttagggga

SEQ ID NO: 127760 - DNA, 194 bp, Homo sapiens
aaaatcaacagtgcaagaatatggccagggacaatggctcctgcctgttaaatccagctattcaagaggctgagggaggaggatcgctcgaggccaggagttcaagaccagcctggacaacatggcaaaaccctgtttctacaaaaaatacaaacattagccaggcatggtggtgcatgcctgtaatcccggct

SEQ ID NO: 127761 - DNA, 348 bp, Homo sapiens
acccacaacgaaaccatggcaagcggtggatgcaggtacggccaatagtctatctatcccggtgagtgaggagacctgctttgagggttgcacaacctggatctgcttttacagtggtgtctgtcactatgaagactccaccatgggtcgccatcaggtcagggaccctgacaaggcaagaactgcatcttcctctgcacacagctctgctcccttccccgccatgcctaacaccaagcctagccctgagggatgactcaggaatattactgagagcattttaggccattccttcattatccccatgtgacttgttatgaaatatagactgacttcctgaagatcagc

SEQ ID NO: 127762 - DNA, 219 bp, Homo sapiens
tgtgacaagcgcaagtctaaaacacaagctactgaaacctagtatgaatgaacgcaaagtatctaatactttacaatacaatttcttatactgattccatgaaaataacattccatcagtgttaagataccttgtgagacttttagcctcaaagtgaaatactttctaacctgacagaaaaacactggtggcggcagaagtgcagtcaccccctttgcc

SEQ ID NO: 127763 - DNA, 546 bp, Homo sapiens
cccttccaggacacagagctcgatgggctgtgcgatgctgggcaagtgtctctccctagctgagctggttctgttctgtacagtaagagaggcggccccgggatctccacggtgcttccagctgtgccgtcctggggtttttctccgcagagtccctctttccctctccattctctttgttgtctctcttcctccttattttcttcttcaatctcgatccccttcccgagccctccttccctaaagaaggctgactcagtcctgggaatgtgctgctccgggtttggggcgggagcactcagagaccctggtcaggtgtcagaagacggtgagaaaaatatctttgaaaaaccgacgcaggagtccagccgcagggaagtacctgcatggggacactgttcaggaggggccacaaggaacctcaggcaggctgggggccttctgtctgcggctggctcatccccacctcatcgggaaggtctggtcttcattcccaggcctccgtgaggcacttctcaacttcacgctggatgtggatgtggggaa

SEQ ID NO: 127764 - DNA, 491 bp, Homo sapiens
taggcttaaggatgatacacacacacacacacgcaatgcaattctattattgcccaaagaaaatagacccattaaggaagtccaacttctgctgcgtggaccagtgctgccacatcacacatagaccaaaggcttaggtttttgtggttttggttatttattttatctttttattttattttatcttattttattttattttattttattatttgagatggagtctcactctgtcacccaggctggggtgcaatggcgcaatctcagctcactgcaacctccaactcctggggctcaaatgatcctccagcctcagcctcccgaatagctgggactacagatgcgtaccaccatgcctggctaatttttttattttttgtagagacagggtctcaagcatcctcccgccttagcctcccaaagtgctgggataacaggcatgagctgctgcactcagccatgtttttgatttttaacaaaattgtaacacc

SEQ ID NO: 127765 - DNA, 193 bp, Homo sapiens
tgattgggtaatgaaattacaaaggaatgaacgaatgagtgaaggaatgaatcaaaattgaattaatggccaggtgcggtggctcatgcctgtaatcccagcactttgggaggccaaggcaggcggataacctgaggtcaggagttcgagaccagcctgaccaacatggtgaaacaccgtctgtactaaaaaa

SEQ ID NO: 127766 - DNA, 782 bp, Homo sapiens
ttaaagtacagaatctgaaataaaaaatgatttgttggagaatcttaacagcagattgtgggtggcagatgagaaaatgggacagaaatgatatttgaggaaatcatagctgaaaatgtccaaaatttgctgagaaaaaacacaaaaatatgcaaagaaaatcacatgtaggcactgtattcaaacttctgtacaccaaagatacaaagaaaaatctcaaaggcagccctaagggtggaaacaatagatcacctacaggggaataatcaaacatcgactcattcctcatactaaatgtaatgccatttcttaatgattgaaaagaaaaacaactgcaaaaccagaattttatgtagagcaatgtgatcttgcaataatgaagaaatgaattttctgttgtcagtggaattcctataagtagtgtgaaaggcagtgagtgcttcagggtgaagggaaatgacactatgaaccaagatagaaacttgtttttacagaaaattttcactaaaaattttaaagtatctatttacatgtaaaagaatatccttttattcttttaatttctttaaaagaaaaactgactaatgcataaattatagtattttctcatgagtctatagtacttgcagatatgaagtatgtaaaaatactacaaagtactgggtggcagtaaatgaaattatacttataagatactcacatttgcataaagtggtaaaatattaactctgtgtaaacagtgataattaaagaggcatattgtaatccttagaacaactgct

SEQ ID NO: 127767 - DNA, 651 bp, Homo sapiens
gtatacaatattgagcttcagtcacaggactcattttcaaagaaagtcctgatgtctgaatgaacgtttatatttttaaattaaaatgttcaggatgcaaatgtgtgtatatgtttaatagtttccctgttttactacctgtctttagccattcagatagtgtttttgatcacattggttaaaaggtattctcctgtctctggtgcttttctgtacaatatatacttatatgtagaacttagaaaaatcaaatgtgtaaaatagtttaagcaataatagtgattatttttataataaaagggattcttgttggtttttgaattattaaatttatgctagtttttattatgtacatattgttctgtgctgagaagtaaaacacgattagttatgacagtaggaaaaggttgggcctggaggtcatgtgagatgaaagaggaggtttacaggcggtggctcacacctgtaatcccagcactttgggaggccgaggtgggtggatcacgaggttaggagatggagaccatcctggcccacatggtgaaaccccgtctctactaaaaatacaaaaattagccaggcatggtggcgggtgcctgtaatcccagctacttgggcggctgaggcaggagaatcacttgaacctgggag

SEQ ID NO: 127768 - DNA, 378 bp, Homo sapiens
ggttgtctagaggatcccagactcggcaccgttcgggagggcagaggaccaaggctgaaaggagtagagagcctgagagagagatgagactgaggggagctagtggtgactcaggctaaccagtcagcgggagagacctagaccggggggcagagaaggcgggagaactggagagaggacctagcctaggaggagagggagcaggctgagaaggaaatgctctgggtaggagagacagactccaaggaaaaatccaacaagtagaggaggatttgggattggaaaagctgaggtccagctgggagagctgaagagggatagaacagaagaggttgagccatggggtttcaagtacgcggaaaggagcaaagatgttag

SEQ ID NO: 127769 - DNA, 554 bp, Homo sapiens
caatttgatgtgagagtaagttagaagagtgaatgatgatccttagattgctaggaaagagggcccagcgggtcagctgtgttagtgtgtggagactagggctagtgacacctccgggtcagctctgtgcccaggaagcacttcaacctgtgtggcaggagggatagcaataggaagcacttcaattccccacaactcagacacccagacgggagggcagaggaccaaggctgaaaggagtagagagcctgagagagagatgagactgaggggagctagtggtgactcaggctaaccagtcagcgggagagacctagaccggggggcagagaaggcgggagaactggagagaggacctagcctaggaggagagggagcaggctgagaaggaaatgctctgggtaggagagacagactccaaggaaaaatccaacaagtagaggaggatttgggattggaaaagctgaggtccagctgggagagctgaagagggatagaacagaagaggttgagccatggggtttcaagtacgcggaaaggagcaaagatgttag

SEQ ID NO: 127770 - DNA, 595 bp, Homo sapiens
caagctttgatgcatgaaaaaaatggtttcataagtataaaacattaaggaatctttctgagaagctagaataaaattgtcaatcatttatttaataacttatgtcagcacaattttcttgtagtatgcaatgagcatttacatttggttgtatgtaccaaaaaaaaattttagggttgctctgaagttatcaaggagacactgatcatttttttcctgttataaaaagttgcctagagctctagtagaagaagcatcacagctttcgtaaggcaagtgactgaagacttgatccaagactggacttttatctttttttaaaaaaattatggacctatggatgctaggcaagaccaggcactttatatatattattccaaattcttaatttgaatctgttacatcatgactttaccattttatgtgtgaaataacagaattcatgaagttatgaaacttgtccaatgtcacactaccaccgagtagcattgtgtgatagtcaacatgtattcctcccatactgggtagcagtgcttttctaagtgctttctatttatggcttgtttaatctcacaacacatttatgagataagtg

SEQ ID NO: 127771 - DNA, 735 bp, Homo sapiens
ctcaataccaaaatctatggatgctcaaatttcttatataaaatggggtagtatttgcacataaactgcacacataattctgtatactttaaataatctctaggttacttataacacctaatacaatgtaagtaagcattacgtaagtagttgttatactgtattgtgttttttatttcaggatattttcaatctatggttggttgaatttgcagatgtggaacctacagattcggagatccgtattccttttcatagcaaattgtcaagtggatcaaataaaacccaaacagtcatgttttaaaaacaaaaaacaaaaaaaaaaaacgaaaacaaaaaaaaacaaagcacaaaaaaagaaaagaaaacaaaacaacaaagaacgaagcagcgagacgcaggcgcgcgcgcggggacgaccgggagaggccacagaccagagggcggaggagagggcgcggggcgcgagaggcggtgcgacaaaaagatggaagaagagagggggcccaagggggaggagggcggaaaaaacaaggggggagagagaaatcgccgaagagaaaaacagccgcgagagggagaaacagccagagggggaggacaaaaacagacgccaagaggaagagccagacagcagggacgacagcggggggcaataaaaggagggagcgcacaggagaggacgggcagcgagcgaagagagcgacacacggagggagggcgcgcggagggagg

SEQ ID NO: 127772 - DNA, 466 bp, Homo sapiens
gtctaaatacatgcccatttaaattttaattaaaagtaaataaaattaaaattcagctccctcagttgcatttgtcacatttccaagtgcctcaaaagtcacatatgggccagtggctactgtattagtgcaaaaatagaattattccatctccacaggaagttctactggacagtgctgttctagttgcctacttaatgttccctggcccttaattttgttttccttcactatacacagaacactatgttagaagctgcaaagagttcagaaaacacttcatccactccttctactatgtgcaagaaataaaaaaaaccttaaccaactttaaatgagttacacggagcagcacatacagccctgagcaaatacatcaagagtacccttgcctctggggagatgagattcttatttaaagctgtagaacagtgctgatgtaccttcagaacagttaaaaaaaaaa

SEQ ID NO: 127773 - DNA, 722 bp, Homo sapiens
aacagtggctcatgcctataatcccggcactttgggaggccaaggcaggaggatcatttcatgccaggagcttgagaccagcctgggcaacatagcgagaccctcatctctataaaagaaacaaaaaaccagttaattccccgtttcttttcagtggtactactgaaggctgtttcagaaccgcaaagctgttgggagatccgaagtgtattttgtaggttatcctccatatgacatttatacagcaacacagcacttcagagataacctaagtccaaaaatgtaactggtcacagaacactgccccaagaaaatggggcagaggtttaaacttttagctcatacaactataaacttgttaagatttaaaaactacaaagtaagagtcacactgcacttcccaatccaacaactataaacgtggtaaaaagagagaactcaccacaatgaatactaagaataatgaatatggtaaagagtggtctatgtggttaaaaatttaaaaacctctttttgtggaaacttaccaatccagaaacagtgttaaccacatctaatgatttaatcttggaggtcgaattttttttaattaaaaaattgcttaaaatgtttgcatatttcataataaaatcttctttaaaagatctacttagtaaatcatgaaaacactcctccaaatgatttatggcaataatgaatccaaatgactcattagaagacgg

SEQ ID NO: 127774 - DNA, 481 bp, Homo sapiens
ttttattttgtctataattactatttcatggttactatcatttcttatctctctaaagatattcatggtaatcattttaaagatttttccccctccctgcagagtctttttttctccaggctttttactttcttttcccctctgttttgatctccattttcccgtgaaaggctttcctccaatctctgataatattcagttgttgttcatctgtaagagggactacaaagctgtttggacgctttgatgtgtgggtggggctagttgacactgagcttcactgtagggtgatctggctgggctgtttgattaagaatcagtgttggtatcttcaggtctttcctcttaggcttctcagacttcagagaagatgcttatcatctgccacctgtagagtgaatggccagctgccatttttactgggagccagcgaagatgagagggttgtgtttgtgtgtggtggggtgtgtgtcttggcatc

SEQ ID NO: 127775 - DNA, 336 bp, Homo sapiens
ctggcatttgactctctgaggcaccttagggaagttgctgaacctgttaaacaaaaaggccttgtgacaaggcggaaagcaaaatagaaagtaacaaatatgcacctgaagcggcagcaggggccaggcagcgaaggaccttggaggccaaggagaagattcgctctttattgtaagagcaaagagaaaccactggcttacagggtagaggatggaagaggggcaggggaagctgcaggaacatcagttaggaggttgttgtgattatccagcggagatatgatgagggcctaagctagggtggttgcagaagagacagaaagaggtggacagact

SEQ ID NO: 127776 - DNA, 520 bp, Homo sapiens
atgtgaatttctgcatcagcattgcgttggtgctgttcaccttataagcatctacaaaactggggatgtttaaatactttttcatacaccgacatcctctaaggatccctcaatctctgcagtgttttttttttttttttgtcatcactgtgcttgcctgtgagttggcatttctcctccatgtgtgaatccagtgtttctgcaagctgcttttcgtgtgttacatggagtcgattcctaacaggttgactaaggaaatgaaagccacgaaagttaggatagtagttccctgtgatgggggagaaggtgtaccaaacaactgggcacaccagagctcccaatcttcaatatgttaacctgggtagtgggtacacaggtgtttgtttaatttttatgttagaaactatgtatatatggtttataaactcttctgtatgtgtgacagatttcaaaatataaacaacatcaaaaaagttttgaataaagaattacctagggaacttgttaagaaaaaaaattc

SEQ ID NO: 127777 - DNA, 377 bp, Homo sapiens
aagaagggaaaggggaaggctccgcaggcttctagggcggttgcgagccattccctgtctcccgggagagaaacggattattgcgagtcctagggtcttgttccgattgtagtagaataaaaccagcagagctcttcagtcagggtgcaaatcctgcccgtcccttaagtagctgtgagattgttaaagcttctattaaatcagttttctcatggtaaaatgtacataataccaccttactttcagaaatactgaaaagtgttttgtataaatataccaaagtctgtggaatagctgggtcaactgtaaattgcaagtatttggttatcattattagttgttcagatatccgcttttgctaaaaaaaaaaaaaaaag

SEQ ID NO: 127778 - DNA, 2416 bp, Homo sapiens
ggcagcgggaagcatcagcagcctgatcacatgctggcccagtctgtaatgcagacgggataggggtgtgtgtgtgaggggagggggcctgtatggcaactgctcttgccccagcgtccccaaaagtgcagaggcagcggctgcagcatccagccagcttggatgtctggcctacttccaggactctgaagaaacagttacaagcaggatgcttttcccaacctctgcgcaagaatcttcccgtggcctcccagatgcaaatgacttgtgccttggcctgcagtccctcagtctgacaggctgggaccgaccctggagcacccaggactcagattcctcagcccagagcagcacacactcggtactgagcatgctccataacccactgggaaatgtcctaggaaaaccccccttgagcttcctgcctctggatccccttgggtctgacttggtggacaagtttccagcaccctcagttagaggatcacgcctggacacccggcccatcctggactctcgatctagcagcccctctgactcagacaccagtggcttcagctctggatcagatcatctctcagatttgatttcaagccttcgcatttctccacctctgcccttcctgtctctgtcagggggtggtcccagagaccctttaaagatgggggtagggtctcggatggaccaagagcaagctgctcttgctgcagtcactccctccccaaccagtgcttcaaagagatggccaggagcttctgtgtggccatcctgggacctcctcgaagctcccaaagaccccttcagcatagagagagaggccaggctgcaccgacaagctgcagctgtgaatgaagccacctgtacctggagtggccagcttcctccccggaactataagaaccccatctactcttgcaaggtgtttctaggaggtgttccttgggatattacagaagctggattagttaacaccttccgtgtttttggctctttgagtgtggagtggcctggtaaggatggcaagcatccccggtgtcctcccaaaggtaatatgggtatgtgtatctggtcttcgaactagagaagtctgtccgatccttgcttcaggcttgctctcatgacccgctgagcccagatggcctgagtgaatattatttcaagatgtccagccgaaggatgcgctgcaaggaggtgcaggtgatcccctgggtattagccgacagtaactttgtccggagcccatctcagaggcttgaccccagcaggacggtgtttgtcggtgctctgcatggaatgctaaatgctgaggccctggcagccatcttgaacgacctatttggtggagtggtgtatgccgggattgacacagataagcacaagtatcccattggttctggtcgtgtgactttcaataaccaacggagttacctgaaagcagtcagcgctgcttttgtggagatcaaaaccaccaagttcacaaagaaggttcagattgacccctacctagaagattctctgtgtcatatctgcagttctcagcctggtcctttcttctgtcgagatcaggtctgcttcaaatacttctgccggagctgctggcactggcggcacagcatggagggcctgcgccaccacagccccctgatgcggaaccagaagaaccgagattccagctagaggagctggccttgcccagtggcctgtggcgcccaaagctggcaggtcaggcaagcagcctgcaccaccctgccactggcgaccagggagctggcttcccaaggacaagggaaaattgtagtcacctttgcacttgctgaatctgtctttgtttctgcactaattaatgcacattgagttttgtcaggttttgttttcagggggtgtaccaagggcaaggaccctctggcttaccctccaagcgactctgtagttttcccagattttagttcctcattttgcagatgaaaagcggggaaaaaaaaaaaaaaaaaaattcctgaaggtattgacacggatgcctacacctaggtttatttattaaaagcgcttttttacattccttgcaatactgatggtgatgatgcgcaggtctcattggtttcattcttgcagttgccatacagtgcctttccatttatttaacccccacctgaacggcataaactgagtgttcagctggtgttttttactgtaaacaataaggagactttgctcttcatttaaaccaaaatcatatttcatattttacgctcgagggtttttaccggttcctttttacactccttaaaacagtttttaagtcgtttggaacaaaatattttttctttcctggcagcttttaacattatagcaaatttgtgtctgggggactgctggtcactgtttctcacagttgcaaatcaaggcatttgcaacc

SEQ ID NO: 127779 - DNA, 888 bp, Homo sapiens
ggcccagtctgtaatgcagacgggataggggtgtgtgtgtgaggggagggggcctgtatggcaactgctcttgccccagcgtccccaaaagtgcagaggcagcggctgcagcatccagccagcttggatgtctggcctgtgagcctggggaaactattattaataatatttactgttgataatattggggaaaacagcccttaactctgaggtttctgctgtgctcctgtccaaaacagacttccaggactctgaagaaacagttacaagcaggatgcttttcccaacctctgcgcaagaatcttcccgtggcctcccagatgcaaatgacttgtgccttggcctgcagtccctcagtctgacaggctgggaccgaccctggagcacccaggactcagattcctcagcccagagcagcacacactcggtactgagcatgctccataacccactgggaaatgtcctaggaaaaccccccttgagcttcctgcctctggatccccttgggtctgacttggtggacaagtttccagcaccctcagttagaggatcacgcctggacacccggcccatcctggactctcgatctagcagcccctctgactcagacaccagtggcttcagctctggatcagatcatctctcagatttgatttcaagccttcgcatttctccacctctgcccttcctgtctctgtcagggggtggtgccagagaccctttaagatggggggaagggtctcggatggatcaggagcaaagcaggctcttgcctgcagtcactccctccccaaccagtgcttcaagagatggccaggagcttctgtgtggccatcctgggaactcctcgaagctcccaaagaccccttagcagcatagagagagagg

SEQ ID NO: 127780 - DNA, 2716 bp, Homo sapiens
ctctttagcacccggcgcgcggtgggggcgcccgggcgggacggggcggggctgctgacggcgtagaccccgtgctctgtggagagccccacgacggcggcggtcgcggcacctttaaggtggagggctcaagcccctcgtgcggcttcccaatcctgggcaggtcacgtggcttcacaccttcgcttggcgccggagagggagtctcgggggcggggctggccaggtagtgtggcgcgagggcggaagactggcggggcttcgtgcccgggagacccgccgggctggcggcattgaggaagaagaagcaggaaggataaaagattgctgggacaaccaggaagcacctgctctctccacgtgtagtaatgccaatatctttcgaaggataaatgccatattggataattctctggatttcagtagagtctgcactacacctataaaccgaggaattcatgatcatttgccagacttccaggactctgaagaaacagttacaagcaggatgcttttcccaacctctgcgcaagaatcttcccgtggcctcccagatgcaaatgacttgtgccttggcctgcagtccctcagtctgacaggctgggaccgaccctggagcacccaggactcagattcctcagcccagagcagcacacactcggtactgagcatgctccataacccactgggaaatgtcctaggaaaaccccccttgagcttcctgcctctggatccccttgggtctgacttggtggacaagtttccagcaccctcagttagaggatcacgcctggacacccggcccatcctggactctcgatctagcagcccctctgactcagacaccagtggcttcagctctggatcagatcatctctcagatttgatttcaagccttcgcatttctccacctctgcccttcctgtctctgtcagggggtggtcccagagaccctttaaagatgggggtagggtctcggatggaccaagagcaagctgctcttgctgcagtcactccctccccaaccagtgcttcaaagagatggccaggagcttctgtgtggccatcctgggacctcctcgaagctcccaaagaccccttcagcatagagagagaggccaggctgcaccgacaagctgcagctgtgaatgaagccacctgtacctggagtggccagcttcctccccggaactataagaaccccatctactcttgcaaggtgtttctaggaggtgttccttgggatattacagaagctggattagttaacaccttccgtgtttttggctctttgagtgtggagtggcctggtaaggatggcaagcatccccggtgtcctcccaaaggtaatatgggtatgtgtatctggtcttcgaactagagaagtctgtccgatccttgcttcaggcttgctctcatgacccgctgagcccagatggcctgagtgaatattatttcaagatgtccagccgaaggatgcgctgcaaggaggtgcaggtgatcccctgggtattagccgacagtaactttgtccggagcccatctcagaggcttgaccccagcaggacggtgtttgtcggtgctctgcatggaatgctaaatgctgaggccctggcagccatcttgaacgacctatttggtggagtggtgtatgccgggattgacacagataagcacaagtatcccattggttctggtcgtgtgactttcaataaccaacggagttacctgaaagcagtcagcgctgcttttgtggagatcaaaaccaccaagttcacaaagaaggttcagattgacccctacctagaagattctctgtgtcatatctgcagttctcagcctggtcctttcttctgtcgagatcaggtctgcttcaaatacttctgccggagctgctggcactggcggcacagcatggagggcctgcgccaccacagccccctgatgcggaaccagaagaaccgagattccagctagaggagctggccttgcccagtggcctgtggcgcccaaagctggcaggtcaggcaagcagcctgcaccaccctgccactggcgaccagggagctggcttcccaaggacaagggaaaattgtagtcacctttgcacttgctgaatctgtctttgtttctgcactaattaatgcacattgagttttgtcaggttttgttttcagggggtgtaccaagggcaaggaccctctggcttaccctccaagcgactctgtagttttcccagattttagttcctcattttgcagatgaaaagcggggaaaaaaaaaaaaaaaaaaattcctgaaggtattgacacggatgcctacacctaggtttatttattaaaagcgcttttttacattccttgcaatactgatggtgatgatgcgcaggtctcattggtttcattcttgcagttgccatacagtgcctttccatttatttaacccccacctgaacggcataaactgagtgttcagctggtgttttttactgtaaacaataaggagactttgctcttcatttaaaccaaaatcatatttcatattttacgctcgagggtttttaccggttcctttttacactccttaaaacagtttttaagtcgtttggaacaaaatattttttctttcctggcagcttttaacattatagcaaatttgtgtctgggggactgctggtcactgtttctcacagttgcaaatcaaggcatttgcaacc

SEQ ID NO: 127781 - DNA, 3282 bp, Homo sapiens
ctctttagcacccggcgcgcggtgggggcgcccgggcgggacggggcggggctgctgacggcgtagaccccgtgctctgtggagagccccacgacggcggcggtcgcggcacctttaaggtggagggctcaagcccctcgtgcggcttcccaatcctgggcaggtcacgtggcttcacaccttcgcttggcgccggagagggagtctcgggggcggggctggccaggtagtgtggcgcgagggcggaagactggcggggcttcgtgcccgggagacccgccgggctggcggcattgagcattgccaagtaattcttcctgttgactcctgattttcggtagtattaaggccgaggaagaggaaggattgattggtcttgctctctcaggggtggcaaaggtggaaggatgtggagcggatgtaaggagaagcaggcacagtcagttttcagtgcctgtgtaatagaagggtctgtattgtaaaagaagtcaaaagcagccttgaataatcggaacccttttgccagatcatctaatgtcaatatgttttctggcattgctacttcaacatcgtcttccatgtctggcactggtttggagcactcatctctatcagattgtcttctgctaattcctctggtatgttaactcttggatttctccaaggtccatgtcttggaaatcttcactcccaacctttttttgtcatatctacagtttctttcatgatttcctgtattggctctgtggtaaatctgtgaagtcatgtacaacatctggaaacagtttttttaagcaggaatttattattttgggcatgatggctttcatggatttttctgtaacaatgatggcattgtcactggaagaagaagcaggaaggataaaagattgctgggacaaccaggaagcacctgctctctccacgtgtagtaatgccaatatctttcgaaggataaatgccatattggataattctctggatttcagtagagtctgcactacacctataaaccgaggaattcatgatcatttgccagacttccaggactctgaagaaacagttacaagcaggatgcttttcccaacctctgcgcaagaatcttcccgtggcctcccagatgcaaatgacttgtgccttggcctgcagtccctcagtctgacaggctgggaccgaccctggagcacccaggactcagattcctcagcccagagcagcacacactcggtactgagcatgctccataacccactgggaaatgtcctaggaaaaccccccttgagcttcctgcctctggatccccttgggtctgacttggtggacaagtttccagcaccctcagttagaggatcacgcctggacacccggcccatcctggactctcgatctagcagcccctctgactcagacaccagtggcttcagctctggatcagatcatctctcagatttgatttcaagccttcgcatttctccacctctgcccttcctgtctctgtcagggggtggtcccagagaccctttaaagatgggggtagggtctcggatggaccaagagcaagctgctcttgctgcagtcactccctccccaaccagtgcttcaaagagatggccaggagcttctgtgtggccatcctgggacctcctcgaagctcccaaagaccccttcagcatagagagagaggccaggctgcaccgacaagctgcagctgtgaatgaagccacctgtacctggagtggccagcttcctccccggaactataagaaccccatctactcttgcaaggtgtttctaggaggtgttccttgggatattacagaagctggattagttaacaccttccgtgtttttggctctttgagtgtggagtggcctggtaaggatggcaagcatccccggtgtcctcccaaaggtaatatgggtatgtgtatctggtcttcgaactagagaagtctgtccgatccttgcttcaggcttgctctcatgacccgctgagcccagatggcctgagtgaatattatttcaagatgtccagccgaaggatgcgctgcaaggaggtgcaggtgatcccctgggtattagccgacagtaactttgtccggagcccatctcagaggcttgaccccagcaggacggtgtttgtcggtgctctgcatggaatgctaaatgctgaggccctggcagccatcttgaacgacctatttggtggagtggtgtatgccgggattgacacagataagcacaagtatcccattggttctggtcgtgtgactttcaataaccaacggagttacctgaaagcagtcagcgctgcttttgtggagatcaaaaccaccaagttcacaaagaaggttcagattgacccctacctagaagattctctgtgtcatatctgcagttctcagcctggtcctttcttctgtcgagatcaggtctgcttcaaatacttctgccggagctgctggcactggcggcacagcatggagggcctgcgccaccacagccccctgatgcggaaccagaagaaccgagattccagctagaggagctggccttgcccagtggcctgtggcgcccaaagctggcaggtcaggcaagcagcctgcaccaccctgccactggcgaccagggagctggcttcccaaggacaagggaaaattgtagtcacctttgcacttgctgaatctgtctttgtttctgcactaattaatgcacattgagttttgtcaggttttgttttcagggggtgtaccaagggcaaggaccctctggcttaccctccaagcgactctgtagttttcccagattttagttcctcattttgcagatgaaaagcggggaaaaaaaaaaaaaaaaaaattcctgaaggtattgacacggatgcctacacctaggtttatttattaaaagcgcttttttacattccttgcaatactgatggtgatgatgcgcaggtctcattggtttcattcttgcagttgccatacagtgcctttccatttatttaacccccacctgaacggcataaactgagtgttcagctggtgttttttactgtaaacaataaggagactttgctcttcatttaaaccaaaatcatatttcatattttacgctcgagggtttttaccggttcctttttacactccttaaaacagtttttaagtcgtttggaacaaaatattttttctttcctggcagcttttaacattatagcaaatttgtgtctgggggactgctggtcactgtttctcacagttgcaaatcaaggcatttgcaacc

SEQ ID NO: 127782 - DNA, 136 bp, Homo sapiens
ttcgtatgacccttcatctgctgtaggagattctctatttttctctttttgtgtgaaaaaagatgaggatgaaagactatggagttggtagctacaaagaagagagttggtagttcctaggtgtatgagagaggct

SEQ ID NO: 127783 - DNA, 545 bp, Homo sapiens
ggctctctggatgcaaagtgtcaaaagcatgccttgagtcagtatagatgtttactgactttcctttggctaagagcaatgctctagtgagagctattagctcagctctttgggccaaagttccgactggcagagggcgggcttcggctactgaattcagtgttaccactgcacatccagcccgtctgacaccttcagatatgaagctgcttccatcagtaaagtatttaacatctgggtctcttaagggctagtccgttaagtttttttggcttgataaaacctcatccactgtttccacacaacagtgataccctgggccacacaatggggctttccgtgctccacccattctgttggcagcagtgtggctggatttagagtgttcacagtctccagggttatgtaggggttttcacacaaaagcccttgatatcttaacatcttagggttagatagccagtgatgccccctctgctccatcagggtgacacgagcatgtggggcacccgaattattaacctttgtccaaatgtgagcttgtt

SEQ ID NO: 127784 - DNA, 102 bp, Homo sapiens
atagcaccagcgtctgcttctgggaaggcctcgggaagcttacaatcatggtgaaagagaagcaggcatctcacatggtagaagcagaaacaagaaagatgg

SEQ ID NO: 127785 - DNA, 100 bp, Homo sapiens
ttgttcaaagcttatagttgttatctactgtaagattgtcagccataccagaagcagaaattccatctcattgttttataaatatggtcaagtatctctt

SEQ ID NO: 127786 - DNA, 3183 bp, Homo sapiens
ccggtcccttggcgacgggtcttgcatgtgacactcttgccctctagtgcctcaccagcttggtagcagtttgatggctaatattaataagatgttacataacatgagagtactgggccaggactggtgttgctaccacttgtaaagtcaaaaagcctgagccgatggtaacgagtggtactgtttccgtttcttttccatctattgcaactttctcaagcattttcagctctgaactttaattccagactgtattttctgtgagtcctgatcaagtgatacaaatgagctgcaatggtgacataaactcttgacagagattggaaaagtagctggaacaccatcttttcttttaactttttatggtgcttctgttggcatagttggggaaagcacctacaacatgagttttatcatgaagcttcacagacactttcaaagaacagtcattctgcttgccactttttgtatggtgagcattatcatttctgcttactacctgtacagtggctacaaacaggaaaatgaactctctgagacggcttcagaagttgactgtggcgacctccaacacctaccatatcaactaatggaagtgaaagcaatgaagctttttgatgcctcaaggacagaccccacagtcctagtatttgtagagagccagtactcatctcttggtcaagacatcattatgattctagaatcaagtagattccagtatcacattgaaattgcccctggaaagggagatctcccagtgcttatagacaaaatgaaaggcaaatacattctcattatttatgagaatattttaaagtatataaatatggattcctggaatcgaagccttctagataaatactgtgtagaatatggtgtgggtgtcattggattccacaaaactagtgagaagagtgtacagagctttcagttaaaaggtttccctttttccatatatggaaatcttgcagtaaaagattgttgtattaatcctcattctccattgattcgtgtgaccaaatcttccaagcttgaaaaaggttctttacctggaactgactggacagtttttcagattaatcattcagcctatcaaccagtaatatttgccaaagtaaagaccccagaaaacctttctccttccatctctaaaggtgctttttatgccactattatacatgacctggggcttcatgatggaattcaaagggttctttttggcaacaacttgaacttttggctgcacaagctcatcttcatagatgccatctccttcttatcagggaagaggctgacattgtccttggacaggtacattcttgtggatattgatgatatatttgtgggaaaagagggaacaagaatgaacaccaatgatgtaaaggccctgcttgatactcagaatcttttgcgtgcacaaatcacaaattttacattcaacctgggattttcagggaaattttaccatacaggaactgaagaggaagatgaaggagatgactgtctgttggggtctgtggatgagttctggtggtttcctcacatgtggagccatatgcagccccacctcttccacaatgagtcatctttggtggagcagatgattctcaacaaaaaatttgccttagagcacggcattccaacggacatgggctacgctgtggcccctcaccattcgggcgtctaccctgtacatgttcagctttatgaggcctggaagaaggtctggaatattaaaatcaccagcactgaagaatatccacatctgaagccagctagataccggaggggttttatccacaaaaacatcatggttctcccaagacaaacctgtgggcttttcactcacaccattttctacaaagaatatccagggggtcctaaagagctggataagagtatccaaggaggagaacttttcttcactgtcgtcctcaaccctatcagcattttcatgacccatttgtccaactatgggaatgaccgactgggattatatacatttgttaatctggccaactttgtgaagagctggaccaacctgcgacttcagactctgcctccagtacaactggcccacaagtattttgagctgtttcctgatcagaaagaccctctctggcagaatccttgcgatgacaaacgccacagagacatttggtctaaagaaaaaacttgtgatcgcttaccaaaattcttggtaataggaccccagaaaactggtaccactgctttgtatttgttcctggttatgcatccttccatccttagtaactcccccagcccaaaaacctttgaggaggtacagttctttaatagaaataactaccacagggggattgattggtatatggatttcttcccagtcccatctaatgtcactaccgactttttgtttgagaagagtgccaattacttccactcagaggaagcccctaaaagagctgcttctctggttcccaaagccaagattatcaccattctcattgacccttcagaccgagcatactcctggtaccagcatcagcgatcacatgaagaccctgcagctctgaagtttagcttctacgaagtgatctcagcagggccccgtgcaccctcggagctcagagccttgcagaagagatgtttggtcccggggtggtatgccagccacatcgagagatggcttgtttatttccccccatttcagttgctaattattgatgggcaacaactaagaactgatcctgctacagtgatggatgaagtacagaagtttctaggagtcttgcctcattataattactcagaagctttaacgtttgattctcataaaggtttctggtgtcagttactggaagaaggtaaaacaaaatgccttggaaagagcaaaggaagaaaataccctccaatggattctgatagcaggacatttctgtcaagctactatcgagatcacaacgtggaactctcaaagctgctgcacaaactgggtcagcctctgccatcctggctgagacaggagctgcagaaagtaagatagcactgagagaaaacttgagacttcatcgtccatgtagaacacaccttttccaaagcttccagaagctaccaaaaggcagttgaaaaatatacctcttcaaatgagaaaaaagaacagtttcttccatgtgctggcacgtggatgattagaaaaaaaga

SEQ ID NO: 127787 - DNA, 339 bp, Homo sapiens
tatttctcatttacattaagatgaaagaggttaagtgagttgcttaaaaatcactagcttgtggcctggtgtggtggctcacacctgtaatcgcagcactttgggaggccaaggtgggaggattgcttgaggtcaggagttcaagaccagcctgaccaccatggtgaaaccccgtctctactaaaaatacaaaaattagccagacatggtagtgggcacctgtagtcccagctactcaggaggctgatgcaggaaaatcactgaaaccggggaggcagaggttgcagtgagccaagattacaccactgcactccagcctgagtgacagagtgagactcc

SEQ ID NO: 127788 - DNA, 232 bp, Homo sapiens
ctttcccttgttaatcttatttggtctcatcatttaaaatactacttgctaacatatacatgcagactcatttatccaactgcttattccatatctctacttggttatctaacgggtatctccaacttagcataaccaaactgaatccccaactctctctctctaaaccctgttcttcctgcagtcttccccatctcagttagaggaatctccaaacttctagtcgctcagc

SEQ ID NO: 127789 - DNA, 447 bp, Homo sapiens
atattaataatgatatacatacctagtctaataaaaactcactgctgagcaatgaggcctgtttcctcagacacagtattttacgattggcttaaacagttggcccttcaacaacatggctttgaattacctgggtctacttataagcaaattgttttgaaccaaaaaaacatcttggaatggaaaatccatgtacacagtgggccaacttttcgtttacacagatgtgggacttcagtattgcgcagggttgggtatatacaagggtcctggaaccaatcctccgtgtatactgagggatgactgtaattaaaattgtggtgaagagtttatgcctgtttttaaaaaatgcatatctgattaggaacactggacttttctaacaggtctacctaacccaaatagcaaagtaataaagtataaccatcactggtagaatagatttac

SEQ ID NO: 127790 - DNA, 148 bp, Homo sapiens
cctcctggaggtggaagcatacccccagatttgtggcgtgggaatttggggaaaagtttctgcggtgttttagttgtttatgtggtggtgggggtggatttctagccctatacatgctgggtctcatagctggataaaagctatgtaa

SEQ ID NO: 127791 - DNA, 638 bp, Homo sapiens
tcaccaggctggagtacagggagcgatatggactcactgcaatctcagcctcctaggttcaagagattctcgtgccttagcctcccgagtagctggaattacaggcttgagccaccacgcctggctaatttttgtatttttagtagagatgggagtctcgccatgttggccaggttggtctcgaactgttgacctcaggtgatccacctgcctcggcctcccaaagtgctgggattacaggcgtaagccaccgtgcccggccagctttgagctgttaacagaatgtctgaaacatcataatcttccttcctatccctgaccaggcagggtggctctgggacagaagacttacatgaaaaatgaccaaggccaggatggatgccgcctcccacctcttgtccaagctcattctaaccccgcctgctcctatgtcctcagagccatggcccagtccagaggctcgagtcttcattcttccccctgggggtgcagatgcttttccagaggtgcttagggcgtagggctggagagtagggcagagctggagtcctactttcccggagctcctagtgccccactgcctccaggatgtcctgtggctccctgaggctctgggtcctggaaggcattccccggtg

SEQ ID NO: 127792 - DNA, 281 bp, Homo sapiens
tccaggctgtgccctggtgtgaagcctctctgtggctctccactgccttcaggagaaattccactcactcaccacagctcttaggacctgcaccacgtggagtcggcctgactgggcagccttgtgtctggtgagtcttgctgtggcccagccatgaagaagtgcacgtgctcttccttctatctagaatgttctgtccctacttcttcctctaaacccagtttctaaacttcctccagaaggcctgcttagactgccctgtccccgggtcccctcccttg

SEQ ID NO: 127793 - DNA, 502 bp, Homo sapiens
gaaggtacaggaaatgggcagccgaccaagcaggagaaaagtgagcctgcagagccctgggctgtactctgaaaacaagggctgtgccaatgaggtcctgacaggtgaattcttgctgcccaggaacctgcctgcttggcctgcaggcaccctgactttgcaccaggcagagcctgctgttgcccagccaggttccactgaagatgtcaggggccatccactgtactgggaagaaggctggagtcatcagctgcagaggggaccagcgtccgcagggggatggttttagtagactgcacaagcagctggggtggctggcctgtctgcaactggtccgactgaccggctgaagagttataaaactccacacatggtacaaaggccccttgtctccacgtccctctggtagccaggtgtcccttcagtgggcctcttggccaactcctgggatcgcccccaggtacagaagtgggtacaatgcaggtccttctccacgaggcct

SEQ ID NO: 127794 - DNA, 675 bp, Homo sapiens
tatcattggttttcaatgatagatacagaaataaatgtagatgtaagtatatgtgtctgtgtgtatatatacatatattccctacctctgtacattgagaggacctggatgcagccacaccccaaaagcaatgagcacacctaatgtatagattttgacttctaaataccattctccactaaaagaatcaggactcagagaaatggccagccccaggtttagggcaaggacattattaggcgataagcccaaaagtatcttgtgctagaaaaccaagaattgctctaagaatgatgagacatgttacaacaaaatacacacacagaagtcaatttgaagggatttccacaggcaaatctaggacaatttgagcatcaaatgttagtaacagattagcccattgagtaaaataagaaaccatgagtgtacacagatatcaatcaactgaaagtcatctgagaagcaggatcttacatagttattaaggaccttcccacaaaatgcatattaatgacaaaagggaaaagagtaactttatagtggaaaagcctggcaaatgccgttttaatcaagttatcaaaatgaacatcatctgtaacgggacaagtcaacattgtgttcctctaataggttacaatgagaatgcaacatcaattctgtaatattcctgcaaaa

SEQ ID NO: 127795 - DNA, 451 bp, Homo sapiens
ggctgggagcctgagatcagtgtgtcggcatggtcaggtggcagtgagggctctctttcaggttgcggatggccaccaccttcttgtgtatcctcacacggtggaaagagcgctctctggggttgctttataagggcctcagtcacattcatgaggctctaccctcatgactaattgcctcccacttcccaataccattaccttcctactttggtttcaacatgtaaattggggggcaggggacacaaatgttcagtccatggcagtgaccctgtgaccccccttctctgctacatcacctctttctttcctttttttttttttttttttttgagatggagtctcactctgtcacccaggctgaagtgcaatggcgccatctcggctcactgcaacatctgcctcctaggttcaagtgattctcctgcctcagcctcccaagtagctggga

SEQ ID NO: 127796 - DNA, 600 bp, Homo sapiens
acacatttcagaataagtgcaactactattaaaaggtgttaacacaatattaaagtggatggatttcaggatggccccataaactccagtgaaatcataggcaaaaatttgtatatatgatatgcatggcactaaagtaatataaaacattttgcattatacaatgacattttagatgtggttggcctttgaccaagcagcccagtccacatatccaatacatcagcaaatcctgttggctctaccttcaaaatgtcagaaatctaaccacttccctcctggctcaactacaaccccagtgattccacgtcaccattgtctttctcctgggcgactctaatggtctccctttatcgctctttcctccttatcatatgttctccataccacagccacagttatcctttcgaaacccaagtgtggcagacagactctcaaggtggccccggtgatgcctgcctgctggtgttcatgccattttgtcgcctcctccccttgttgcatgtgagcaggacctgtgattagcttctaaccaacagaatatggcatgggtgacggggtgattatgtgagtttatgacataagacttcagtgtccatc

SEQ ID NO: 127797 - DNA, 182 bp, Homo sapiens
tcccaaagtgctaagattacaggcgtgagtcactgtggccttgaacagtagttttttttattacattttactgatgggtacagatgaagaaactgaggtcagatcaagcacgccctaggttacacagctaagccttggcagagctgggatttgatcccgggtccagccacttgcaggtggaa

SEQ ID NO: 127798 - DNA, 357 bp, Homo sapiens
gtattccatttttgctatttcccgacccttgcaggattcaggatgaaatcgtaacatctcttgttccagagtgcctttcatgtaactgatacacaaataaattgacatttctttttttatctctcatacacctggaatatcagaggatattccacagtattattccggaaagacatcagagcagtgtggatatgatgttggaactctgatcatctgtttctgttattattttaaaacattcacgataggagactaatcctggatccctcttgccccagtgagaccttctttatattccacatccattaccgaattcagcaccgtcgcacccagggtgctgcttgtgggcttgcttat

SEQ ID NO: 127799 - DNA, 739 bp, Homo sapiens
gtgttgcagttttgccatacataatgataaagatgtcatactacccttccataaattttgctaacaaacttagcttgtttgaagtctgcatgctgcttccaaaagactgtctttctaacataaatttcagattaaaatactcgacttattaacatggaaaatatacttgtaaatctgaagaataaaatgcagaataactcttgtcgtaggagctgtatactgcaagtggatgcctagtgttcttgactgaattgatagtaaatgcaactaagttgcaaaatggtatattctggacaacataattttggttttgatttgacagatagtgcttcaaacaatacattaaattcatatgaagtgaattcatggtaaataagaattttttatatcatgaatttaagaagataggctttcggtgagtgacagagccataatcttttgtggtggtttatttccaaagcaatctcaaatacaactgctttacacattattcatctctcctttgtctttgttgcccattgtgcatgtaacccatccctatgaagaccacaacttattgtttaaatggagatttttgtctccataacttagctaacaaatgactttagatttcataataatggttgttaatttatagggtatgtagaagaatttcattacattattaacattttattgtcccccatgtaatgttccaaaatgtcaatgttaaattactaacttctaaaaatatattact

SEQ ID NO: 127800 - DNA, 496 bp, Homo sapiens
ctgactatgatgacgttgccaacaaaattgggatcatctaaagtgagcccagctggctaacactaaatagacatatttttcaccataaaataaataaataaatcataaaataagttaaacaaaacctctgtaatttttcatgaaaactggaaatatcagtatgaattgaaaatttattcttctctttttttttgagacagggtctcactctatcacccaggctagggtgcagtggcacaatctcaactcactgcagccttgacctccaggctcgggtgatcttcccaagtagttgggatggcaggcgcccgccaccccaccgggctaaatttggtatttttgggtggagatggggtttggccatgtgggccagggggttctcggactccggacctcaagcggttggcccgcctcggcctcccaaagggcggggattacaggtatgagccacggtgccgggcccagagccggtttttcggacagaacaccgtcgaag

SEQ ID NO: 127801 - DNA, 567 bp, Homo sapiens
gtgcaagataaaggagttgaacaaagacagtggttttcaaactggattccgaggaaccctagggttccaagaagacatgatggtgagaagagcaaggcaaaagggaaagaagacaattgttaatgagcaggacccccacttctacccagattgctccttcttgctctgttttgtctaccatgcttccacacaatactacacttaatcaaagggttttggcagggcacagtggctcacatctctaatcccaacgctttgggaggccaaggaagatggatcacttgagctcaggagtttaagaccagcctgggcaacatggtgagacaaaaaatataaaaattagctggacgtggtggtgcatgcctatagtcccagctacttgggaggctgaggtgagaggattgcttgagcctgggaggtcgaggctgcagtgagccgagatttcaccactgcactccagcctaggtaacagagtgagaccctgtttcaaaaagaaacacacatacacgcaccccaaaacaaagggtcctgttgcaaaaaaaaaaaaaaaggaaaaaagaaaaaaaa

SEQ ID NO: 127802 - DNA, 379 bp, Homo sapiens
aagcttaaacattcagatccatgcccactcatgaaattgattgtacagtggaatatgaaagaaccgattatccaaagcaaagtcaggccaaacaccttgtttatctcagtagtttcctttagaagtgacagtttttcctgttattttcatttagtcatgcattcatttatccagcaagtaaaaattatgcccctactgtgtacgcagcacctaatccagaactctgcatttccccttccataaaaagcaggtgcgacctgcctacctcaggggagatcacatagaggtaagttctagcaaggtccctgggtgagttattttaattaaagccccaggaaccaggaaaaaattagcacagtgggatcaaattcaggcacca

SEQ ID NO: 127803 - DNA, 510 bp, Homo sapiens
cagaaatgtgttgtattccctttggtcttgaattcctgcttgcttctcttagagtcaacatctcattgtgctgtaggtaattcaggtgctaaagacttgtgttgttttttgttttttgagacaagtcttggctttgtcttacccaggctggagtgcagtggcacgatctcagctcagctcactgcagcctctgacaaccaggttcaagcaattctcctgcctgagcctcccaagtagctgggactataggcatgtaccaccacacctagctaattttgtatttttagtagagacgaggtttcactatgttggccaggctggtcttgaaatcctgacctcaagtgatctgcccaccttggtctctcaaagtgctgggattataggcgtgagccactgtgcccagctggcttgtgcttttttatacaaagcccctaaatacaagccagtgactccaactagtgctagaaaataaagtcatctgttctaatgctgcaggacaaaatgtctact

SEQ ID NO: 127804 - DNA, 477 bp, Homo sapiens
  misc_feature (177)..(177): n is a, c, g, or t
  misc_feature (218)..(218): n is a, c, g, or t
ggagtgtattgtttatgggattgtctggcattaagctgtggatccattgtaatgagtgtgtgtactgctgtactgtgtctctttgttgggggtattaggtcgctttctgggcctgagttattctgagccattcccagcgaggcggctgtgcccaacttggttgcaatgtggggtgantggtgcccccttggaggacagaagggacaacgacccggccngttagttcttgtactcgacaaccatttattttagagtagggtttctcaatctcagtggacattttgggaagaacaattatttgttgtgtggggttgtcctgtgcactggagggaatttgacatcatccctggcctcgatccactagatgcaagtggcacctcccagttgggaaaatcaaaatggctccagacattgtcaaatgtcctctgtgggtggagtgggagtttgggggacaaaattgcctccttctgttagaac

SEQ ID NO: 127805 - DNA, 768 bp, Homo sapiens
ctagcatttggtggtttgctggcatcattggtattcttgcttctgctgtaccacgcccacctccaccttcgtcttcacaaggcagtctccttgtgtgtgtgtctgtgtccaaatttccctcttttaaaagaacaccagacatattggatcaggggctcaccctactccaggatgacctcatcctaacctaactacatctcaaggaccctattccaaataaggtcacattctgcagtactgggcgttaggacttcaacatataaattttacaggaggggttactattcagcaaggtgagaagctgctgaagcaagcaaggtgagaagctgctgaagagttctgggcagaggaggggcaggtctggtttatgcattctgactgatgggttgaaagaattcttgagtggagttgtttaagaattgtctgtatgtacctaaattacatctcagtgaagttgattttaaaaaacaactttcaagccgggcgcagtggctcatgcctgtaatcccagcactttgggaggctgaggtgggtggatcatttggggtcaggagttcaagaccagactggccaacatggtgaaaccccgtctctgctaaaaatacaaaaattacctgggcgtggtggcacgcgcctgtagtcccagctactcaggaggccgaggcaggagaattgcttgaacccgggaggtggaggctgcactgagccgaagttgtgccactgcattccagcctgggtggcaagcaagactctatctgaaaaaaaaaa

SEQ ID NO: 127806 - DNA, 202 bp, Homo sapiens
ctctgctgtgctatgtcatcgtcatctccactagttcttggtgcctggcaagaggtggcagccataggatgttttctaaatgaaggagcaaatcaatgaagacgtgccgaggtgcctacatctccacctctggtccgtctcattgcaggctgtaatcgggaggtgaaggagattgaatggaaggcatctaccagcatcagtt

SEQ ID NO: 127807 - DNA, 175 bp, Homo sapiens
aaatggcagttggcaaagactagaacaaacgcccaaagagtagagatggacgtttggatagaatcgtggcaaactgcagggcagacagtcagtcctggatccctccttaggggccatacagcgaagcccacctgcatctcagaaagcctcagaactgagacccagcccccaccta

SEQ ID NO: 127808 - DNA, 242 bp, Homo sapiens
ggcacatcttagaatgttgcatttcaagtcttgctaatatggttggtacaggcaagaatttctagttctttcaaaagattcattttggaccttgagagattctattcataactgttaaataaagatgcattatcttaagatggctccttttctgtttaccaaacaaaacaacctttttttttttttttttggagacagagtctagatctgttgcccaggctggagtgcaatggcgcaatctc

SEQ ID NO: 127809 - DNA, 538 bp, Homo sapiens
ctgtaatcccagctcctcgggaggctgagtcaggagaatcgcttgaactggggaggcagaggttgcagtgagccgagatctcaccagggcactccagcctgggggacaagagcagcgggacttcatctcaaaaaataataataataatgaaaaataaactttattttggagtatcttagttgcgcagcaaagtcacaaagatacagtttcttcatacttcccacccagttattagtaacatcttacgttattacagtacatttgttaaaactaagaaactgactttggcactatgaaacgttcgagacttttatttggatttcgccaatttttctttaatgtctttttctgttccagaatccaagttaccacattgtatttagttgtcatgtcttcccagttttctttggtttgtgacagtttctcagtcttcctttgtttttcattaccatcacagtctagaaaagtgctgccagatatctggtagaatactcccctcccctaaacttggggtttacctgatgtttttctcatgatt

SEQ ID NO: 127810 - DNA, 254 bp, Homo sapiens
gattctgatgaaagaggccagtggcaaatgtgtatttaaaaaaaaatgcatttttttgcaggtaccagagtgaatcctagctttgtcctttgctaactttggccagttacttaactttattggttttcttacctttaaaatggggataatgagaatttcaaccttcttgagtccttgtgaatattaaatgagatgtgtgtgcaaagcaccagaaaagcattaggcacacagaactttttttttttttttttttt

SEQ ID NO: 127811 - DNA, 677 bp, Homo sapiens
gtcacttctgtggtagagctagtgattaaatgatattggaacacagagggaaaaaatgactatttgtgtggcaactaacaagatctcaaaagtatttaatagtaacataagggaaatgataggttttacttatttttattatattttaaaaaattaatagatcacttttggaaaatgtgctgtatgcagattgggccaggtttattttaaattcccggtattcctgagtgtataccctatatatgttccccaaaagacatatattagaatgttggtggctgccttgtttgtaattgtcacaaagtgggatctacccacatgcccattaacagtagaataaaaatagcaataagaatgaatgatctgcagctgcacacagcaggtagattaatcttgcagtaatgtcgacaggaaggcgccagatacaaaggaatacatactatgtgattacatttctaaaaagtaccaaaaaaggtgaaactagatgatgatgttagagttgaggaggggggtaggttagtgtctggaaaggttatatggaggcttctgggatactggtaatgttcttttatctaatctggattttctgttggatgctggttatattgagtgtgtgggtaaagattcattagtctttatacttacatgtacatttttccatttgtgtattatgtttc

SEQ ID NO: 127812 - DNA, 413 bp, Homo sapiens
actgtcataaacactgatcttctcactttaggaacctgagctctattattgtctaaaagcatgagtgcccagtaaatgtccaatgattgcttgaataattactatgcgttcagatatacaactctgtgcttttgtgtgtgcacatgtgtgtgaaaaaaggagatataaaagaacttgaacttgccactctgtagtaactaacaaaattaggtacatagtgctcaaaataaaatttcatatttaggattgttagaagaataaacagaaagaaaattattaaattgttaattttgtaataggagacagaataaactcagttttcactatagtacagtattcttttagcagcaatccttacaaaatatcaactgaaaatcaattacataatttttccttcaaggaaagagctcata

SEQ ID NO: 127813 - DNA, 325 bp, Homo sapiens
gctttccaacggagatgctactggatcttgtaaggtgggcaggggtccaacctgcacagatacctggctgagagtatctggcttatttgggaaaaatgcaggcagtgttttttggagaaacagataaattttaagtctggaagagttcataggggttctattatcctgaaatgcatcgctgttatttctttaagtgacagatatctagttaatgaggagaaaaggcaggcacaaaagcacaacgtgatgacagagcaaatgcaaaataacagctgggtggcgtagcacatgcctgtggtcccagctacttgggaggctgaggtgg

SEQ ID NO: 127814 - DNA, 192 bp, Homo sapiens
tcgactctagaggtccccagcgggaacaatcactgtagcggaacaatcacttagcggggaacaatcacttagcggggaactatcacttgacatctgactttatagcttaggaagggcttaacctcacattctgtggcttgcgcctcttacaacattctgcagggctgagtaagcaaggcagggaattttaca

SEQ ID NO: 127815 - DNA, 446 bp, Homo sapiens
tgtcgcacatgcctggtaatatagtatcttagtacacacaggatttcactatacgtgttggtcaggctggtcttgaactcctgacctggtgatcctcctgcctcggcctcccaaagtgctgggattgtaggcgtgagcctctgtgcccagccacatttttgttttattaatttccgtatcctcagcacttagcacagcacttgatgttcagtaaagtgcacaacagatttattgactgagtaggtaaggaggagttttttccttgaactctttccatgaatttttcatcgtgattagttgtccttggaagggtgggatgggttttcactaggaaaacctggttttctaaggtactcattgagagatgttgagatgttttttctggggatgtttctctttggacaaacatctcgtgctttggggccattgaatgaaaatactctgag

SEQ ID NO: 127816 - DNA, 553 bp, Homo sapiens
gtaactttaatgcttatagtttattatagcctaaatcaactcttggtgcttttggggtgaagactctgtatgagttccttggctacagagagtctttgttccttggttatggagagtcttcctcagatgctgattgtagtagcgatgtgatcagtgtgtgagcaagttcactatctcctatcacactggaatggcagaggtcacttgaagcttatctcattcccctgtggtgtgtactttcttatttatttatttttttcccagtgttttacttactgggttgaacagttcagtttatgccaataggggaggtgtccatggataaaagctagctgtagttaaagcaggtgggtaaattcaatggtgggcagaggtcccagccttgacagagatagctgggggagctctcagtgaaacaaactgaagtcgtatcataaggaaggactggatctacctcagctcccctactaggccagcaggaacgccatcccacacccagacacacacctgacccagtgtttcaactattcagatcagacagacacctttttgc

SEQ ID NO: 127817 - DNA, 342 bp, Homo sapiens
gacacatttacagaaaccacttctctgcacaaccaagctcctagtagggggtaatcaagtcaagagatgcatagatttcaccatttgggacaggaaagtaggagggagattccccagggaaagggagttgcctgacaagctcagaaaaaattgtggggagaattagtggtaggaagaagagacagggaagggaaggaaactgggtggaaaattctgtattgaagccaactgattgtagagattagtgctggtgttcaggtggagcccattctgtctgaacagacaattctctccatcctttccccacagagctcattggggttgaaagtgttgaatggcagt

SEQ ID NO: 127818 - DNA, 182 bp, Homo sapiens
ttgcccaaagtcaattacaagaaagcagcagaggtggatccaggtctgcctgcctgaagagagggtgaactgaggtccttgcctcccaagaaagcggcagaggtggatccaggtctgcctggctgaagagagggtgaactgaggtccttgcctcccgggtcacagcgtgtgctcagcatgtt

SEQ ID NO: 127819 - DNA, 267 bp, Homo sapiens
tgacatcaagttttctcccgtcaaaagaataaaaatggctatggcagttttaggtctcacatccacacatctctctgcacggaaggagaagagcttatcttctgccaactacccaacattctaggcttcattctattaggacaaacataggttaacaaaaccatctctgatccaatcactatggccagaagaatgccatgttctgactggctatcacctggattacatgcctatccccaaaccatcaatcagagaaagaggacaagg

SEQ ID NO: 127820 - DNA, 665 bp, Homo sapiens
ataatatacttgtttagaaatagcaatggtctagggatctgaagcttttccagccctggttcttctactttctaagttatgatccctggtcaagaaacctaacctcttgaaaactcatgttttttgtctgtgaaattcctgccctgtgtatttcacagaatgattatgtgaatcagattagataatgtatatcaaaatgctttggcattcatcaaatttgatggggctgtaagataatatattattgcaaactcagatttccaaacagaaccccttagagagatggaacaaaatcttctaaaaagcaagtattttgttttgctcactttatttcagggtatttttttggctttgacctgtcctattctggaattcaagagtcatataggattaagtataggctacttaaattattgcacaaggtgttcatggcctctgaaatgaatgagttgtttaaaataagattatttttttaaaaggcaattaatgggaagccatacaagtcccatttaacccactgctctgtcatagacttttgcaaattgcgatacttccgttactataatatttgcctagattcaaatctaccctgtggtctttctgtttatgaattttcacatagtcatagaaagttgatttaaaaacttttttaatcattaaagagc

SEQ ID NO: 127821 - DNA, 304 bp, Homo sapiens
tatggtggctcacacctggaatcccaatattttgggaggctgaggtgagaggattatttaaggccagaaattcaagacctgggcaacaagcaagacttggtctctacaaaaacatttaaaaaaattagctgggcatgttggcatgtgtctgtggtcccagctacttgggaggctgaggcagaaggatcccttgagcccagaggttcgagttgatcatgccagcttacgcaacagagcagagaccctgtctctttaacaaaaagaaaaaagcaaatttgatattgggaggtatggatagaaaatg

SEQ ID NO: 127822 - DNA, 510 bp, Homo sapiens
ttagcccctacaacagctctgcagaggagcattttagagatgagggaattaaaactcagaaaggttagataacttgctctaggtcacacagctgggtaagtggtagagtcaggatttgaacccagagtttttggagctccaagtctcagactcatcccactaggtcctttgggtgaacttggcactatctctagaaacccaccctgctcttgaaggacaaggatttgtatttcctgaaggttcaggctcaggaaaatgggagatacttggaaatggagtacggaaagcccacagctttggaagcaaacagacctgggttcaaatcccagctctacaagtggttccaggctatatgcccttgagcgcattattgtcactcttggagcctcagtttcctcgtctgtaaaaatggggctcgtgatgtgaacctcccaggactgttgcaagaactagaacatatatcaagtgtctggcaaacaccagcaatgggaacatggtggtgattattgt

SEQ ID NO: 127823 - DNA, 491 bp, Homo sapiens
gtttgttgtgacatagcaagaggagttaaaggatgggggattgtttcgtagggagaaagagaggctaagaggtagaggtggggacaggatacctgggtgcctttctgggagaggaagtctttttctttgtcctgtggctcagagcaagtctctgagagtggaggtttcaaggaggcagatctctgttagggaagggcgagttgcctggccctagacctgcttgaagtgggaagaatgtagatttggcagtcaggcctgctagtctagggccttgttcctcagacggtggttagaggatcagcagcacaggttccacccaaacctcctgggcatgaatctagatgcgtccggatgtgcacacagaagactgaggagtgctattctagaacagagcttctcaagccaggagccattctccccaatccatggctgagaagcctaaggctagaaacatgggccttgagcactggatctcaaagctctagtttcct

SEQ ID NO: 127824 - DNA, 124 bp, Homo sapiens
tgttgatcgagctcgggcccgacttagctacaaaacttttttttcatcccaaatattctcaatgaaagttctcttgtcaaccaggagagagtcaaaaacaaccacaaacactagcagaatgatc

SEQ ID NO: 127825 - DNA, 198 bp, Homo sapiens
atggagcttacaatcttgcacaaagaaacataataatcaaagtaagtaaattatgtattatgtcctaaagtcttaagtgcttcttaaaaagtaggagaaaaagcatcaggagtgccagaggtgaaaagaatttcaatttcaaataggacagcaaggtacgacttaagagaaaaaggcatttaaccaaagtcttacaag

SEQ ID NO: 127826 - DNA, 109 bp, Homo sapiens
ccaagctgctggcattacaggcatgagccaccatgcctggatgacaaagactttaaagtaatcatcttatagatgctcagagaacttaaagaaagatgtggagacagct

SEQ ID NO: 127827 - DNA, 344 bp, Homo sapiens
cgtcaatagtgagtttgtgagtagaaggtgtgggtgtcatacagttggtgtctgtgcgcctggaagcacacacctgtttctgcttccagagttgtctctggcctgcagttctgtgcttcctagcttgatccgttcctctccaggaatctcctctccctccccaccctgacccacctgttggtgagagatgcaactgactgtttctgccacactttttacttacaggtggtacctgtattattccctccacctcttcagggaagagggtgaagagatgagaggctaggggttccaaacacaaacttgacccattttaccattttgttagcaacagtcttgagaga

SEQ ID NO: 127828 - DNA, 386 bp, Homo sapiens
ctggcaggatgagcatgtatgggtaggctgtgcactatacaagcccaggggaggctgtggcatggataacacagacatcgtaggtagttaagtttatgacaaccatgttccagcagattggaggcacggtcttgtaccaacaaaaccaatgtattgtgacaattttctgacatatgaggactgggtacctatctctaatttacatggagtcaccgtatagtggtagttccagacaacggatttagctcaggtgggtcacttcagtggtatcttgtaagtttctgtctacaaagaacttctggctctgtgataaaagtatttctctacataactcagtaaatgtaacacctccactccacttatatactacaatcacagttgagagt

SEQ ID NO: 127829 - DNA, 387 bp, Homo sapiens
gacttctccttcctcaaggcccagctcaatctcacctccacctaaaacctccggggcattcctgtagtatttggaggctgaactgctcaggagggaagggtgttaatgagctggtgtctcgccctcatcctgactcccggtgagaatgtaagttctctgcaggcaaggactatatctcattaccatttctgtacccactcagacttggccatgtgtgcccagcacataaagtgtcttcgatgactgtctatagacccacggtacttgagattgccccaacacatccttctaaaatctttctccttttcagaggctcacgaatgttcaaaccaggtctaccgggaacaacattatggtcattccgtttattctgaagcccacatacag

SEQ ID NO: 127830 - DNA, 833 bp, Homo sapiens
ggccaattttaaattttacctgattacaacattaaagtctattcagggatgcttgctcagtcttgtaagtttgatgcacttatagtgagatgatctgcttgcatctttagaaacagtgcaatgaacgttattggttattgtgttggatacctcacaactttatcatgttggccagctctgcctaggtgtagtgagacagtgccttgcctcagctgccctacctgtgtcttgctttctgccaagggcacttgggaaaatctatttactgcctacacatgtacagcttggaagtatggttgggcatgatgcccaggagaataacccatgaccaatggtggcaaggagctgaaagataaatggtcttcctttccatctctaaagtgggtaattgtgaggtgtactccaagcagcttaaaatccaaggtggtcactaatttgataatgccccatttactggtatacttttcttccctgtttcatttttcccagtctcttatgccaatgctggctagagtgatcctagagttatattgctccctgagataagttcttatcttagtgtgaatttccccataactgtgcctgaagcagagatttgagtccaattaatttatctggggaatgatactaggaaaggccattaggggaatgtttaaacagagacctgaaggtggggatggaacaagcacgaggctatggagaaagcacatttctggcagatcaaacagtcatcacaggactatacttggtagactcgctgttcaaggatagtgaggaggtcagtgagatgagtggagtgaacaaggggcagagtggtaggaactgagggcaaa

SEQ ID NO: 127831 - DNA, 238 bp, Homo sapiens
ggaggttgaggctgcaataagccatgatcgcaccactgcactccagcctgggcaacaagtgagaccctgtctctaaaaaatgaaacaaaaaaaataaaatcatgactgagagcaaaactctggagcatctgaaacaaagggtctcctgtggcctaaacaactggggcacctcaggtggagccccagacccgtcacgaactcttacttcagcagaaccataggtggaagcaaacacagg

SEQ ID NO: 127832 - DNA, 243 bp, Homo sapiens
gtgattctaagaatcaaatgagataatataaaaacattatttaaattaagtgtttatgttggaggatcaaatttcttctgcaagactctttcaaagaatatcactataggtcacagccacagagacaaactgcagctccataaaattcaaggcttatcaaaaatggaatgagttgaacccagtaagcctatgtgtgaacacctctcatactgggttcaactcattccatttttgataagcctt

SEQ ID NO: 127833 - DNA, 653 bp, Homo sapiens
ggtgctgaggaaatgagaacagtagaattagtctatacaaaatttgcctttttcgcagaatctggggattggaccagagccccgatataacttgaacagaagttatttgtgtatgtagataaatgattttcaccgttctgaagcttaacagaaatattttcaatagggaaaaaaccttgccgttgcagttctttattttccacagcgatagcaagccacaagtgagagaatgtttttaattgaaatcacataacttcatctcagccaacttccaattgcttcccctttgcagcgttttgccagagtttcaaacaagactgtacaagaaaggaaaagaatgtggtattcacagatactaaaacattgtaaaaacaacgctcatatctccagccaatttcgtcaccacgtgactctcacccttccaccgaggatgaacagaaatgtcatccatacactttctctgagctcccagtctctggtctgggcctgcatggtggattcctcatcattggaaagaccaccctgggctattttgctcttccttttgtgtggcgtcatcttttattttttccttgtctctggattgttttggttagagaggaatagtctttatgttgggctctgcgttgcaagtagtataaatgctcttgagc

SEQ ID NO: 127834 - DNA, 793 bp, Homo sapiens
tgcatcactccagtctctgcctctgtagtctcatggtgttttccctgtgtgtctctgtcttcatataaagataccagtcatattggattggggcccaccctactccagtattgcttcatcataaatgatcatatctgcaatgactttattttcaaataaggtcacattctgaggtacttggggttacaacttcaacttatctttttaggagacacaattcaacccataacagacaataaagtcaaaactgtgcttagtttactacctaagggtctataggatattgccactggtgagataggaaacacaggtataagagctagaagatgaattcgattttctaaaggacatacaggaagagctgttttaggaatcagttctacaggtttgaagtgcatctctttaagatagaaacaagctgttatgacttacgggtagcatcagtaattggcttcatgttttcatcgttgagaacatgagatgaaggttcacaaaagagttttatagcaactgttattctggcagcgctggtgatctctattttgagctgttatcctatcattctcagtaattttagaaccatcagtcgggaagtgttctttatcaaaactgagtcattttaataccaacccacaaaaataaaaactaaaaaaaaaattgtgggggtggccggagaaagtttaacaatgggggggggggcccagtaggaatggggggcggagactggggagagggggttccaaaaaggcggggggggttggaaaccaggttggttggttaaggcaggaaagga

SEQ ID NO: 127835 - DNA, 402 bp, Homo sapiens
  misc_feature (209)..(209): n is a, c, g, or t
  misc_feature (243)..(244): n is a, c, g, or t
atccagagcatacccctcagtgagctgttaggcacattgcactccagcctgggcacaagagcgaaactccatctcaaaaaaaataaaaatgtaaagaacagaactaaagtagaaatagacagcaacaaattatatcattttctgtgacatagtttgaaggggtggcctgcccctccacacttgtgggcatttctcgacaggtgggacgnacagactgggaaaacgaacagagaacacagaganncaaagtatagagaaacaaaagtgggcccaggggaccggcactcagcatacaaggccccctgctgaggccccgggcggcgcccctggtctctgagttccctcagtatttattgatcattatctctaccatctcagagagggggatatggcaggacagta

SEQ ID NO: 127836 - DNA, 204 bp, Homo sapiens
tggggaggaattctgccatcacattcaacttaccccacttcaattaaatgcaattaactgcaggtaacaaaatgtggaagttacagctcctacattctgccaggtttgaaggacaaagggcctagcactcgtcagactcgcgtctatgcagagggctgctctgaccatcccttctagcaattgtctagtagcttctttcttacc

SEQ ID NO: 127837 - DNA, 666 bp, Homo sapiens
ctctaccttgcagcaacgcaaacacaatgcgttcctgttcttcctcaaacccaccaagcccatttccacctcaggctgtctccccagcctagaatgcccagtcacttcctggtacattgttccctgggtcttcatatagtttataccatctcttaatccagtctcccctccattgtcacccttcagagaattactcctggcaaaattaggcccaccagttcccaggtctccagcctccactctctaatctcttactctgctttattcatagtacttacctaacccaaaggcatccttcatgtctatttactgttaaatcacagtaaagacaccataagaccagggcctttgttctcttctaagtacctgaggcctagaataggacctagcccacagaaagctctcagatatttgaaggactaattgatttaaaaaacaacaacaacaacaaaacccactaaagcatggctgctttctgaaaatcttctctcatagcacacattctcttgacactgctttgcctttgtgattcttaaaggatcatttcattgttgaattagtatcttaaaatgttttctccgtgctactgaagcaggtaagaaacaagtgatctcataaaggtaaactacttaaggagcacaggtgcttctcatgatagatttctag

SEQ ID NO: 127838 - DNA, 252 bp, Homo sapiens
cattaggtatatttgctgctgttgtattacaggaattttatattacattaattgaaatgacatttccaggctatatgactagctgaacccatagtagttagggaattaacaagttaaaaattctagatgggtgcagtggctcatgcctgtaatcccagcactttagggggcagaggcaggaggatcatgtgaggtcaggagttcaagaccagcctgaccaaggtggcgaaaccccatctctactaaaaatac

SEQ ID NO: 127839 - DNA, 4068 bp, Homo sapiens
cactggcggagaaaatccccttcttttttttctctctctttttttctttttgagacggaatctcactctttcacccagactggagggcagcggcgagatctcggctcactgcaacctccacctcccaggttcaagcaattctcctgcctcagccttccgagtagctgggattacaggtgcccgccaccacgcccagctaatttttgtatttttagtagagacaggattttaccatgttggccatgctggtctcaaactcctgacctcgtgtgatccccctgcttcagcctctcaaactgctgggattataggcatgagccactgcgcctggccaacaatccccttctaaaggcaggtggtgtctccagcaccagggccatacggctgcaacacccctacaagtgccgggtctgccagacaaccacgaccaactagtcccagataaccttgaggcctgggcactggctgggccccgagggctcttcccaaagcgtaccctggtcatctggaagaggatcggagctggcctggtggtgacagtggccttgcttcctaggatggatggcagatggcaatgttcctgctgggcctggttcctgctggttctggcagttgtagctggggacacagtgtcaaccgggtccacggacaacagcccaacatccaatagcctggaggggggcaccgacgccacggccttctggtggggggagtggaccaagtggacggcgtgttcccgcagttgcgggggtggggtgacatcccaggagcggcactgcctgcagcagaggaggaagtccgtcccgggccccgggaacaggacctgcacgggcacgtccaagcggtaccagctctgcagagtgcaggagtgtccgccggacgggaggagcttccgcgaggagcagtgcgtctccttcaactcccacgtgtacaacgggcggacgcaccagtggaagcctctgtacccggatgactatgtccacatctccagcaaaccgtgtgacctgcactgtaccaccgtggacggccagcggcagctcatggtccccgcccgcgacggcacatcctgcaagctcactgacctgcgaggggtttgcgtgtctggaaaatgtgagcccatcggctgtgacggggtgcttttctccacccacacactggacaagtgtggcatctgccagggggacggtagcagctgcacccacgtgacgggcaactatcgcaaggggaatgcccaccttggttactctctggtgacccacatcccggctggtgcccgagacatccagattgtagagaggaagaagtccgctgacgtgctagctcttgcagatgaagctggctactacttcttcaacggcaactacaaggtggacagccccaagaacttcaacatcgctggcacggtggtcaagtaccggcggcccatggatgtctatgagaccggaatcgagtacatcgtggcacaggggcccaccaaccagggcctgaatgtcatggtgtggaaccagaacggcaaaagcccctccatcaccttcgagtacacgctgctgcagccgccacacgagagccgcccccagcccatctactatggcttctccgagagcgctgagagccagggcctggacggggccgggctgatgggcttcatcccgcacaacggctccctctacggccaggcctcctcagagcggctgggcctggacaaccggctgttcggccacccgggcctggacatggagctgggccccagccagggccaggagaccaacgaggtgtgcgagcaggccggcggcggggcctgcgaggggccccccaggggcaagggcttccgagaccgcaacgtcacggggactcctctcaccggggacaaggatgacgaagaggttgacacccacttcgcctcccaggagttcttctcggctaacgccatctctgaccagctgctgggcgcaggctctgacttgaaggacttcaccctcaatgagactgtgaacagcatctttgcacagggcgccccaaggagctccctggccgagagcttcttcgtggattatgaggagaacgagggggctggcccttacctgctcaacgggtcctacctggagctgagcagcgacagggttgccaacagctcctccgaggccccattccccaacgttagcaccagcctgctcacctcggccgggaacaggactcacaaggccaggaccaggcccaaggcgcgcaagcaaggcgtgagtcccgcggacatgtaccggtggaagctctcgtcccacgagccctgcagtgccacctgcaccacaggggtcatgtctgcgtacgccatgtgtgtccgctatgatggcgtcgaggtggatgacagctactgtgacgccctgacccgtcccgagcctgtccacgagttctgcgctgggagggagtgccagcccaggtgggagacgagcagctggagcgagtgttcgcgcacctgcggagagggctaccagttccgcgtcgtgcgctgctggaagatgctctcgcccggcttcgacagctccgtgtacagcgacctgtgcgaggcagccgaggccgtgcggcccgaggaacgcaagacctgccggaaccccgcctgcgggccccagtgggagatgtcggagtggtccgagtgcactgccaagtgtggggagcgcagtgtggtgaccagggacatccgctgctcggaggatgagaagctgtgtgaccccaacaccaggcctgtaggggagaagaactgcacgggcccgccctgtgaccggcagtggaccgtctccgactggggaccgtgcagtggaagctgcgggcaaggccgcaccatcaggcacgtgtactgcaagaccagcgacggacgggtagtacctgagtcccagtgccagatggagaccaagcctctggccatccacccctgtggggacaaaaactgtcccgcccactggctggcccaggactgggagcggtgcaacaccacctgcgggcgcggggtcaagaagcggctggtgctctgcatggagctggccaacgggaagccgcagacgcgcagtggccccgagtgcgggctcgccaagaagcctcccgaggagagcacgtgtttcgagaggccctgcttcaagtggtacaccagcccctggtcagagtgcaccaagacctgcggggtgggcgtgaggatgcgagacgtcaagtgctaccaggggaccgacatcgtccgtggttgcgatccgttggtgaagcccgttggcagacaggcctgtgatctgcagccctgccccacggagcccccagatgacagctgccaggaccagccaggcaccaactgtgccctggccatcaaagtgaacctctgcgggcactggtactacagcaaggcgtgctgccgctcctgcaggcccccccactcctaggcccggcagctgcagccccttccagatgaagaccaagcgcccctcctggggctgctgcagcttctggggcctccacagacccccctcctgcggggcacgctggcctaagagacgtggcactgagcctcggctgtcgagaggggacttcccacggcccgtggacctttgtgctcctggggcagagcctccggcacccagtggcctcccccagacagagccacccctgccgtgggaacctgtccgtgttcctgcgtggatcctgtgtttgtggctcccactccccagccccccagcagcccccagccgaggggcccagggcccacagccagcggtggaggtgtcttgctccgggcccgtagcccacgccctctctgggtggcagggccttctgaaggaaacttgcaggcgagcccaacgtggtggggggccttcctccctcagaggccatggggtgagaggggctcaggcagccaaggaggcccaggcgtgctccctcttatggagcccctcccatggagctctcttcccgccgcactttctaccccgggcagaggcgcttgcccacgggacgtttggggatggacctcggcccccgcccctgcagtcagcgtcagtgctcatctacgttaataaagtggtcctatttatggcggca

SEQ ID NO: 127840 - DNA, 3933 bp, Homo sapiens
tgagtgttcctccccgtctgcctgacagctataaaggcggccgccggcgcagagccgccactgggctgcgccctcccgggaaccccctctcttggatgctctttgaagtgggagagggaggcggcgcgggggaggaggggaaggggagagggaggccgggccgcagcctctgcactcacgccgcccccgcacgcacagcgcacctggcgccgtctgccctccgcagcgctcgcccctttctctgggaggacaacctgctgacccgaagccagggtctgccagacaaccacgaccaactagtcccagataaccttgaggcctgggcactggctgggccccgagggctcttcccaaagcgtaccctggtcatctggaagaggatcggagctggcctggtggtgacagtggccttgcttcctaggatggatggcagatggcaatgttcctgctgggcctggttcctgctggttctggcagttgtagctggggacacagtgtcaaccgggtccacggacaacagcccaacatccaatagcctggaggggggcaccgacgccacggccttctggtggggggagtggaccaagtggacggcgtgttcccgcagttgcgggggtggggtgacatcccaggagcggcactgcctgcagcagaggaggaagtccgtcccgggccccgggaacaggacctgcacgggcacgtccaagcggtaccagctctgcagagtgcaggagtgtccgccggacgggaggagcttccgcgaggagcagtgcgtctccttcaactcccacgtgtacaacgggcggacgcaccagtggaagcctctgtacccggatgactatgtccacatctccagcaaaccgtgtgacctgcactgtaccaccgtggacggccagcggcagctcatggtccccgcccgcgacggcacatcctgcaagctcactgacctgcgaggggtttgcgtgtctggaaaatgtgagcccatcggctgtgacggggtgcttttctccacccacacactggacaagtgtggcatctgccagggggacggtagcagctgcacccacgtgacgggcaactatcgcaaggggaatgcccaccttggttactctctggtgacccacatcccggctggtgcccgagacatccagattgtagagaggaagaagtccgctgacgtgctagctcttgcagatgaagctggctactacttcttcaacggcaactacaaggtggacagccccaagaacttcaacatcgctggcacggtggtcaagtaccggcggcccatggatgtctatgagaccggaatcgagtacatcgtggcacaggggcccaccaaccagggcctgaatgtcatggtgtggaaccagaacggcaaaagcccctccatcaccttcgagtacacgctgctgcagccgccacacgagagccgcccccagcccatctactatggcttctccgagagcgctgagagccagggcctggacggggccgggctgatgggcttcatcccgcacaacggctccctctacggccaggcctcctcagagcggctgggcctggacaaccggctgttcggccacccgggcctggacatggagctgggccccagccagggccaggagaccaacgaggtgtgcgagcaggccggcggcggggcctgcgaggggccccccaggggcaagggcttccgagaccgcaacgtcacggggactcctctcaccggggacaaggatgacgaagaggttgacacccacttcgcctcccaggagttcttctcggctaacgccatctctgaccagctgctgggcgcaggctctgacttgaaggacttcaccctcaatgagactgtgaacagcatctttgcacagggcgccccaaggagctccctggccgagagcttcttcgtggattatgaggagaacgagggggctggcccttacctgctcaacgggtcctacctggagctgagcagcgacagggttgccaacagctcctccgaggccccattccccaacgttagcaccagcctgctcacctcggccgggaacaggactcacaaggccaggaccaggcccaaggcgcgcaagcaaggcgtgagtcccgcggacatgtaccggtggaagctctcgtcccacgagccctgcagtgccacctgcaccacaggggtcatgtctgcgtacgccatgtgtgtccgctatgatggcgtcgaggtggatgacagctactgtgacgccctgacccgtcccgagcctgtccacgagttctgcgctgggagggagtgccagcccaggtgggagacgagcagctggagcgagtgttcgcgcacctgcggagagggctaccagttccgcgtcgtgcgctgctggaagatgctctcgcccggcttcgacagctccgtgtacagcgacctgtgcgaggcagccgaggccgtgcggcccgaggaacgcaagacctgccggaaccccgcctgcgggccccagtgggagatgtcggagtggtccgagtgcactgccaagtgtggggagcgcagtgtggtgaccagggacatccgctgctcggaggatgagaagctgtgtgaccccaacaccaggcctgtaggggagaagaactgcacgggcccgccctgtgaccggcagtggaccgtctccgactggggaccgtgcagtggaagctgcgggcaaggccgcaccatcaggcacgtgtactgcaagaccagcgacggacgggtagtacctgagtcccagtgccagatggagaccaagcctctggccatccacccctgtggggacaaaaactgtcccgcccactggctggcccaggactgggagcggtgcaacaccacctgcgggcgcggggtcaagaagcggctggtgctctgcatggagctggccaacgggaagccgcagacgcgcagtggccccgagtgcgggctcgccaagaagcctcccgaggagagcacgtgtttcgagaggccctgcttcaagtggtacaccagcccctggtcagagtgcaccaagacctgcggggtgggcgtgaggatgcgagacgtcaagtgctaccaggggaccgacatcgtccgtggttgcgatccgttggtgaagcccgttggcagacaggcctgtgatctgcagccctgccccacggagcccccagatgacagctgccaggaccagccaggcaccaactgtgccctggccatcaaagtgaacctctgcgggcactggtactacagcaaggcgtgctgccgctcctgcaggcccccccactcctaggcccggcagctgcagccccttccagatgaagaccaagcgcccctcctggggctgctgcagcttctggggcctccacagacccccctcctgcggggcacgctggcctaagagacgtggcactgagcctcggctgtcgagaggggacttcccacggcccgtggacctttgtgctcctggggcagagcctccggcacccagtggcctcccccagacagagccacccctgccgtgggaacctgtccgtgttcctgcgtggatcctgtgtttgtggctcccactccccagccccccagcagcccccagccgaggggcccagggcccacagccagcggtggaggtgtcttgctccgggcccgtagcccacgccctctctgggtggcagggccttctgaaggaaacttgcaggcgagcccaacgtggtggggggccttcctccctcagaggccatggggtgagaggggctcaggcagccaaggaggcccaggcgtgctccctcttatggagcccctcccatggagctctcttcccgccgcactttctaccccgggcagaggcgcttgcccacgggacgtttggggatggacctcggcccccgcccctgcagtcagcgtcagtgctcatctacgttaataaagtggtcctatttatggcggca

SEQ ID NO: 127841 - DNA, 1641 bp, Homo sapiens
tgactgggaaacccgggcgctggggagagggtcatacactccctagtgacttctactctatgctccagccttccaccaggacctcctgccctgtccccaactgtaacgaccacaaccaccccatccccttggttacacacaaatatcaccagtctttacatgtactttactgacttctcagataataccctccaacaagataactgcaggacttgccaccatgacctgagaaatacaccaagatattattgtccaatttttttgagatatatatatatatttctcatacttttaacatactctgcaatcctccaagatattggtggaaaccctggaaatttcaaatctatttcgtctgctaatgccatgtgaatgggaaacttagatacacgctggcctacagcacatgccggcatgtgctgtaggccagcgacggacgggtagtacctgagtcccagtgccagatggagaccaagcctctggccatccacccctgtggggacaaaaactgtcccgcccactggctggcccaggactgggagcggtgcaacaccacctgcgggcgcggggtcaagaagcggctggtgctctgcatggagctggccaacgggaagccgcagacgcgcagtggccccgagtgcgggctcgccaagaagcctcccgaggagagcacgtgtttcgagaggccctgcttcaagtggtacaccagcccctggtcagagtgcaccaagacctgcggggtgggcgtgaggatgcgagacgtcaagtgctaccaggggaccgacatcgtccgtggttgcgatccgttggtgaagcccgttggcagacaggcctgtgatctgcagccctgccccacggagcccccagatgacagctgccaggaccagccaggcaccaactgtgccctggccatcaaagtgaacctctgcgggcactggtactacagcaaggcgtgctgccgctcctgcaggcccccccactcctaggcccggcagctgcagccccttccagatgaagaccaagcgcccctcctggggctgctgcagcttctggggcctccacagacccccctcctgcggggcacgctggcctaagagacgtggcactgagcctcggctgtcgagaggggacttcccacggcccgtggacctttgtgctcctggggcagagcctccggcacccagtggcctcccccagacagagccacccctgccgtgggaacctgtccgtgttcctgcgtggatcctgtgtttgtggctcccactccccagccccccagcagcccccagccgaggggcccagggcccacagccagcggtggaggtgtcttgctccgggcccgtagcccacgccctctctgggtggcagggccttctgaaggaaacttgcaggcgagcccaacgtggtggggggccttcctccctcagaggccatggggtgagaggggctcaggcagccaaggaggcccaggcgtgctccctcttatggagcccctcccatggagctctcttcccgccgcactttctaccccgggcagaggcgcttgcccacgggacgtttggggatggacctcggcccccgcccctgcagtcagcgtcagtgctcatctacgttaataaagtggtcctatttatggcggca

SEQ ID NO: 127842 - DNA, 4491 bp, Homo sapiens
tgagtgttcctccccgtctgcctgacagctataaaggcggccgccggcgcagagccgccactgggctgcgccctcccgggaaccccctctcttggatgctctttgaagtgggagagggaggcggcgcgggggaggaggggaaggggagagggaggccgggccgcagcctctgcactcacgccgcccccgcacgcacagcgcacctggcgccgtctgccctccgcagcgctcgcccctttctctgggaggacaacctgctgacccgaagccagggtctgccagacaaccacgaccaactagtcccagataaccttgaggcctgggcactggctgggccccgagggctcttcccaaagcgtaccctggtcatctggaagaggatcggagctggcctggtggtgacagtggccttgcttcctaggatggatggcagatggcaatgttcctgctgggcctggttcctgctggttctggcagttgtagctggggacacagtgtcaaccgggtccacggacaacagcccaacatccaatagcctggaggggggcaccgacgccacggccttctggtggggggagtggaccaagtggacggcgtgttcccgcagttgcgggggtggggtgacatcccaggagcggcactgcctgcagcagaggaggaagtccgtcccgggccccgggaacaggacctgcacgggcacgtccaagcggtaccagctctgcagagtgcaggagtgtccgccggacgggaggagcttccgcgaggagcagtgcgtctccttcaactcccacgtgtacaacgggcggacgcaccagtggaagcctctgtacccggatgactatgtccacatctccagcaaaccgtgtgacctgcactgtaccaccgtggacggccagcggcagctcatggtccccgcccgcgacggcacatcctgcaagctcactgacctgcgaggggtttgcgtgtctggaaaatgtgagcccatcggctgtgacggggtgcttttctccacccacacactggacaagtgtggcatctgccagggggacggtagcagctgcacccacgtgacgggcaactatcgcaaggggaatgcccaccttggttactctctggtgacccacatcccggctggtgcccgagacatccagattgtagagaggaagaagtccgctgacgtgctagctcttgcagatgaagctggctactacttcttcaacggcaactacaaggtggacagccccaagaacttcaacatcgctggcacggtggtcaagtaccggcggcccatggatgtctatgagaccggaatcgagtacatcgtggcacaggggcccaccaaccagggcctgaatgtcatggtgtggaaccagaacggcaaaagcccctccatcaccttcgagtacacgctgctgcagccgccacacgagagccgcccccagcccatctactatggcttctccgagagcgctgagagccagggcctggacggggccgggctgatgggcttcatcccgcacaacggctccctctacggccaggcctcctcagagcggctgggcctggacaaccggctgttcggccacccgggcctggacatggagctgggccccagccagggccaggagaccaacgaggtgtgcgagcaggccggcggcggggcctgcgaggggccccccaggggcaagggcttccgagaccgcaacgtcacggggactcctctcaccggggacaaggatgacgaagaggttgacacccacttcgcctcccaggagttcttctcggctaacgccatctctgaccagctgctgggcgcaggctctgacttgaaggacttcaccctcaatgagactgtgaacagcatctttgcacagggcgccccaaggagctccctggccgagagcttcttcgtggattatgaggagaacgagggggctggcccttacctgctcaacgggtcctacctggagctgagcagcgacagggttgccaacagctcctccgaggccccattccccaacgttagcaccagcctgctcacctcggccgggaacaggactcacaaggccaggaccaggcccaaggcgcgcaagcaaggcgtgagtcccgcggacatgtaccggtggaagctctcgtcccacgagccctgcagtgccacctgcaccacaggggtcatgtctgcgtacgccatgtgtgtccgctatgatggcgtcgaggtggatgacagctactgtgacgccctgacccgtcccgagcctgtccacgagttctgcgctgggagggagtgccagcccaggtgggagacgagcagctggagcgagtgttcgcgcacctgcggagagggctaccagttccgcgtcgtgcgctgctggaagatgctctcgcccggcttcgacagctccgtgtacagcgacctgtgcgaggcagccgaggccgtgcggcccgaggaacgcaagacctgccggaaccccgcctgcgggccccagtgggagatgtcggagtggtccgagtgcactgccaagtgtggggagcgcagtgtggtgaccagggacatccgctgctcggaggatgagaagctgtgtgaccccaacaccaggcctgtaggggagaagaactgcacgggcccgccctgtgaccggcagtggaccgtctccgactggggaccgtgcagtggaagctgcgggcaaggccgcaccatcaggcacgtgtactgcaagaccagcgacggacgggtagtacctgagtcccagtgccagatggagaccaagcctctggccatccacccctgtggggacaaaaactgtcccgcccactggctggcccaggactgggagcggtgcaacaccacctgcgggcgcggggtcaagaagcggctggtgctctgcatggagctggccaacgggaagccgcagacgcgcagtggccccgagtgcgggctcgccaagaagcctcccgaggagagcacgtgtttcgagaggccctgcttcaagtggtacaccagcccctggtcagagtgcaccaagacctgcggggtgggcgtgaggatgcgagacgtcaagtgctaccaggggaccgacatcgtccgtggttgcgatccgttggtgaagcccgttggcagacaggcctgtgatctgcagccctgccccacggagcccccagatgacagctgccaggaccagccaggcaccaactgtgccctggccatcaaagtgaacctctgcgggcactggtactacagcaaggcgtgctgccgctcctgcaggcccccccactcctaggcccggcagctgcagccccttccagatgaagaccaagcgcccctcctggggctgctgcagcttctggggcctccacagacccccctcctgcggggcacgctggcctaagagacgtggcactgagcctcggctgtcgagaggggacttcccacggcccgtggacctttgtgctcctggggcagagcctccggcacccagtggcctcccccagacagagccacccctgccgtgggaacctgtccgtgttcctgcgtggatcctgtgtttgtggctcccactccccagccccccagcagcccccagccgaggggcccagggcccacagccagcggtggaggtgtcttgctccgggcccgtagcccacgccctctctgggtggcagggccttctgaaggaaacttgcaggcgagcccaacgtggtggggggccttcctccctcagaggccatggggtgagaggggctcaggcagccaaggaggcccaggcgtgctccctcttatggagcccctcccatggagctctcttcccgccgcactttctaccccgggcagaggcgcttgcccacgggacgtttggggatggacctcggcccccgcccctgcagtcagcgtcagtgctcatctacgttaataaagtggtcctatttatggcggcaaaaaaaaaaaaaaaaaaaaaaaaaaaaaaaaaaaaaaaaaaaaaaaaaaaaaaaaaaaaaaaaaaaaaaaaaaaaaaggggggggcggcgcaaaaaaagactccccacaggggggggccacaaatgatactagcacaacaccaagttttgtggtgaagcgagaggggccccccaaattagtaggaccgataaattacaacacgaagacagcggcggacgacaatatacacagacgtcgtcgagaaagagagacacacgtgaactacgtggtgtgctccttttgtgtgagggaggcacacccaccccaaactaccgcggaggaggagagcacacacattatgtggggacgaacaaccaaccaccacaacaaaaaaataattaacacccccccgaaggaggagaaaccacaaaatcaacacgacgcgagagcatatacaaaaagagcgatgtaacaacacacagccaccgaactaataatcttggccactgcatgaagaaaaaaagatgtagcaacacacaggaaagtagtacttaccaagaacaaaatattctaacacg

SEQ ID NO: 127843 - DNA, 410 bp, Homo sapiens
ggtggttcagcttctgacccagcagccgctcagagtgccagtgagtgtgcacatgcccctcggtgtctgacctttttctgtaaacaatgaggggtagaatttttgtgtatcttcacgtctgagcatggctcttcgaattcatacgtaaagaggcaggcacagatatgttaactggcttgtcgaaaagcccgcagagagccagccccagaaagcagtctcctgatttcctgtcctggtgcctgttaccctggcacaggcccgtggggcattggtgcccctcattttctctggctggtcttgaaggaattcttatctccagctcagtggttggggggcactaggggaggagaggccctctctttccttctctccacattctccctgccccgctagttgtgcctgccggaatt

SEQ ID NO: 127844 - DNA, 244 bp, Homo sapiens
tgacttagcttgaggaagcttggccgtttatttcattacagagaaacttttggtactggcttttgaataatacattgctttggagtgtgaaagacttgaatctctcatcttgaatttaattgatagttttctgttatttcacttacatgaccttttttttcagaacagattttctttagtttgatttccttttgttgttcttgcagaagtgttttctgaaaaccttattaaatagcatccccca

SEQ ID NO: 127845 - DNA, 472 bp, Homo sapiens
tcaccagctaataggaaaacgtaattttcatctgtgcagacttggctgtgagttgggggagctgtctctttccaagccctacctttccttccaccctccacccctgtcgagacacccccagggctcactctcctgatcaaatctgctctttccgaggggtttgctgtaagtcatttcactcttcttcctcaagtgaaggcttggagaggggcactgcttacccggcctgacttcagtgtccttatacgtgaaaaggcagagggtcgaagttagtgtttctaaaatatatttcagcctaacactatttaattcaatttacatcttaatatgagttaaagccaatatattacctctcccagggttgtatatacttcaaatctaatttgcaattgtgggatataaagttttcttcttggctgaagagacttacagtgcgagtgtcagccctccatccgtcggcctaggaacagtt

SEQ ID NO: 127846 - DNA, 541 bp, Homo sapiens
ccacagagaggtaggattggtggagcacacttcttcaagacccgaaagaaaggcaggcccaggcagccattcacgtccccatctagtgtgatgggaatggtgacaaccaaggaccagtgacaggagctgagcatttgagccacggggttaaaactgtccaatctagctctcccagccagggctccaaagccggtagcttttcaccagctctcgtccgaaaccctaactactactactgtcttctacaccgcagaagacaacacccatgtgattttaatgactggccactgttccaccagagtatatggcaaccaagatacccagactcttccttctctaagatgtgagcagccattaatgacccctgtatggatgcttcatttatccttatcctacatgggatccctcaggggatggtggtgtctttggaccaaattcaatctactgagtgtttttctaacagcttaaaatgaggttgaaaaaaacttccaccttctcggcaacccaacacacagaacatctggtggggttattatacttg

SEQ ID NO: 127847 - DNA, 545 bp, Homo sapiens
tcgaactgtggggctcaaggcatcctcttgcctcagcctctggatcagctgggattataggcatgtgccaccactagccagctagttttttaacaacatttttctgtagagatgggggtctcgttgtgttgcccaagctggtctcgaactcctgggctcaagcagtcctcccacctcagtcccctaaagtgctgctttgtgttttcaggggttcattgtggcttctgtgtagaaaacaaatggtgggagatggaattggtagaccagttaagacgcaagagagaggactagagtggggatatagagaggacggatggaggcttactgagaaagtacaatggctggacttggtggtcgagtggatatcagagatgagaagatgtaagtgaggtgagagaagtcaaggctgacttccacatttctggcttgaaagaatcaacactgcgggaggtacagaagggaatgatgtgtaaatgcttggcatggtactggtgaggatgatattggagccgagtcatggaatagaactataagcttaccaggtg

SEQ ID NO: 127848 - DNA, 455 bp, Homo sapiens
caaccaacaacatggataaatctcaaaactattatgcaaaggggacgtagccaaccacaaaagaatacatactacatgaatccatttgtatgaagtccaacagactgaacgaatgcttggttgtctctggagtggggatgtacactggggatgatattcattgggaaaggacataaggggactctccagtgataaaagctgtcctctatcttgactgtgctgttgaaatatggagatatacacttgagatctgtgtactctatgtatgagaaccctttccgctgttcaatggctccatccaatctatctcacttatgtcaacagattggtatcaaataaaacagcacctgttattttatgattaaatgctttacagttcaggagcctcctctccaacttattttgtgcaagcctttccctggccctgatgttccagctgcactggcctccctgaa

SEQ ID NO: 127849 - DNA, 291 bp, Homo sapiens
tcattcttcgttgacgggggctgtcccctgcattgcaggatatttacatgccagcaacacccccaacacccagatgtggcaaccaaaaatgtctccagatattgctcagcgggccctgaggggcagaatggccctgggttgagaaccgttgcattttaaattccctcatttagtacaatcctccccactcgcctgtgaaggaagattatatgtctccagttgtttgttttggagacagaggtttttttttttttttttttttaaagacaggatcccactctgttgcccagg

SEQ ID NO: 127850 - DNA, 499 bp, Homo sapiens
ctacacagctcggattccttttggggtctttgctggacttttgaaaattagggaatttctcctactctgaactctaccaggaatcacatatcaagatctcagtaccatcttacctagaccctcttgacctcttctttctccataatctctttctagctcatgtcatccagactcgagggccccattctcagtttgacactgaggacacccacgctattatctctggctgtgacctttcccacgagctccaaattcacaccatcttttgacgtctccacttaacttccccatttcggtgtctcaaacttgacaattcaaaacagaactccctcccacttccaaactggtttcctacccaactttcccaggcccccagtttctcaagtcagaaatctatgagtcatccttgatgtttgccattccctcatccctcccatccaacccattcgtaggctcttgggaatctacctccaaaatgtctctggaatccatcctcttc

SEQ ID NO: 127851 - DNA, 248 bp, Homo sapiens
tcacagggcagaagttatcaaagacaagggttaattttgataaaatcattatgtgtcagacaactggattattttatttaactaagtgagataaaaaatgggtttgccaatgtgcatcctgttattcttataataccgactagatttgtcaaaataataatgaagtacagacacacaaatgcacccatcttaaacattttgtgtttcttcttaaattgaacaagaatgtattgagtactgtttgttag

SEQ ID NO: 127852 - DNA, 303 bp, Homo sapiens
tgctgggattacagacatgagcccctgtgcctagcccagaataccttttaatggacagatttaggactagaaattaaataatttatagattatggatagttgggataattcctccttttacagtttacatatctttattttgagacaaggatttaaatgtttagtcttatatagaggagatctaagaaagtgctacctagagaatttaaatgtagagaatggactgtacctgtgagacctatggaagcgcttcatgttggaatagggaaatcaaacactaaatgctgtagttctctgaccagt

SEQ ID NO: 127853 - DNA, 324 bp, Homo sapiens
tgttggcaaggatctggggcaactggaaccctcatagactattttggttatattatataaccactttggaaaagtatagtagttctttgaaaaattaaacatatgcctaccataggatctagtcattctactcctagacatctacccaggggaaatgaaagatatgcatacaaagactgtgtataatgttcatggcagctttatttttaatagcccaaaaccagaaacaacctaaatgtctatcaatgggtgaaaagatacatgaactggcgtctatcagtacaatggagtattacttaacaataaaaagaaatcagctattga

SEQ ID NO: 127854 - DNA, 436 bp, Homo sapiens
aagaagacgcgaaatgctcaccatccaggggcagagaaactcatgtcaagttccctagcacatcaaaattaccagattaagaaacaaaacaaaatgtgtgcatgcacaagattcagaccctggactcacagacattttcagaagttttcttggaatccaattcaaatccccaagatgcagaactttccagaaacgtctttggaatttaattcatgccctaaccccaagcttcagaattttccagaaatttctagaggatccacaggggaaaggaaacttagacctcacatataaacatatttcaaaaggtcattacatttggaaagagatataaataaacatgggaaaggaggtcaagctgtgagaacccattcattccttctcagcttcaccgaacagccagcactgaatttctctgcttgttgctagttccgtg

SEQ ID NO: 127855 - DNA, 368 bp, Homo sapiens
gctgagacgattcctcagtccatgtcaccctgagaaaatccccctccaataaggcatttgattctgtggagtccgttattgcagaattttacctccactctgtcctaggcgtgttaacattcgaagtctaattctaactcttagacactctcaccacgtccttaacacgagtgagtttactagtctggacacaggagggaggcttctggaagactgggaaaccccaggccttcttagatatgagcagtccttgctgctcgtgatgaatttcatgcatgactttatcactgtccatcggaatcccgccgaggctctggaggcagagatgtcagatctctgatgacagtgaacttccacagagggcagca

SEQ ID NO: 127856 - DNA, 691 bp, Homo sapiens
gggaggaacagggaagaatggctactggatagatgaaagccgatggatctccactacagtttcccttgtggttttctgttgtagaagcagttatttttcttcatagcacttgaccaatttgaaatgtagtgtattttgtgtgttcatttggttaacacctactgtgtgcttctgcagggtggcgatccattctgcagtgttcatggctgtatccccagtgcctgttgcaggcacatagtaggagcttggtaatcatgtgtggaatgaatgacttgaatggtcaaggaaatgagagtgtgtgaaaaggaaggagacggatgtgttgtaaccatatcgttatacccaaagaagctctagaatgcttcttggagaacttggccatttgaatgattggtagaatcatgagttgagggctagaatggggcaggggttgtttgagtgtagtgtctgtaccagcaggaccagcattattagggaaagtgccagaaatggaaactcccaagttccaccccatgcctcctgaatcagaaactctgaggatgggacccagaaatctgtgttttagcccccagagtgattttaatgtatgtaatgtttgagaaccactggagtaggggacgggagaagtgagaaggtcatgcttacatagtcatagcatataaaagttactggcaggaggcagttccttggg

SEQ ID NO: 127857 - DNA, 443 bp, Homo sapiens
gaaggggttggctgaataaacgcggcatatccctgacatggaaggagaacgctgtgcctccatatgcaagcaaagttaatagtgaggagtagaaatcaaggactggggagggagagagaggtgacttgtcattttatactcctctggccgtttttttatttttaactataagcatgtgttacctttatagttaaaaaacaaaaaaataaggcaaaattgcagataactgaggtatttccatcaaagtagtcaaaagaggagatgattgaaaaggttggcatctgaagaggagcagcctggctgggcatggtggctcatgcctataatcccagcatcagacaacgtcagactctcagtatttcagagctggaaggaccttaaaggtcatctagtttaaggtgtggcaaacaatggccttcaggccacatccagtcctccacctg

SEQ ID NO: 127858 - DNA, 196 bp, Homo sapiens
tggagcggaggaatatgggaagccaggagggaagaaagtggtgctagagcctgaggagccagcgcaggccagagctgaaggagtgaggggccacgatggagaggaagaatggcatttttacgtgatcatgcccgactccacagaacgtgtactgtgtagagccaggcccacctctagccctggtaaactgaccatg

SEQ ID NO: 127859 - DNA, 461 bp, Homo sapiens
tgccatttactccatggcacatttcacaaacacacacacacacagatttatactaaaatcacaaaaaccttttaaaatgtcttgtgaaaatatattagctatctttcttagaacaaacataaagaagaatagtaaataaatgtgcagtccagcaccagtgttgacatctgttgtgaaatgtgctacatggagtaaccattgtagagacaatcatcttaggcaccaaaatgacttaggagcttctttctttgttctttcttatcacttactatttttattagtttagctttttccaaacgtgtttactcagagatacctattttagttaggaagaaaaagagaaataacaccaattaaagctaattgaggctgaattcttgtcagtcttaaaagaatcctaattgtttctctttgaactgactaatccataaaagttttctgaagccatggagtaaatggca

SEQ ID NO: 127860 - DNA, 175 bp, Homo sapiens
gtgaggggatgggaggaggcttcagaggccaagtctgctgagcacaggtgtatggacagctggaaggacccttccccacatcccaccacctgcaaggtcccagcagtgtccagcccctgtgatagtgctccccactaagccaagagcacaggtaagaggacttattgccaacttc

SEQ ID NO: 127861 - DNA, 369 bp, Homo sapiens
atgaaataacagaatgccagtgtcaacactgaccatatgatatagttatttcacttagagatgcttcctcaaagagcgtgcctttttcctccatcataaccgctttaggatctctgttttatccatgtatttcccacatagtagaagcattttccatttccatgaatattacaggctgagaaggagcacacatctggcactgataagcacactggcccaggcactcagccttctcatttcattaatctggttggtgaccgtttccatcgggcacacctggaaatgtccatcggacatattgccatctcagttgctgcagtgcagtgaattaccccagagccaccagttcacatgcccaaagatgaactg

SEQ ID NO: 127862 - DNA, 663 bp, Homo sapiens
gtggaatgatatggtttggctctgtgtcccactgaaatctcatctctaattgtaatttccacatgttgagggagaacctttaatccctacgtgttgaaggagaaaggtgattgtatcatagggatagtttactcagtgctgttctcttgatagtgagtgagttcttatgatatctgatggtttttataaatgtttgaaagttcctccttcccacgctgacactctctcctgctgccttgtgaagaaggtgactgcttccccttccaccatgactgtaagtttcctgaggcctctccagccatgggaaactgagtcaattaaacctcttccctttataaactatccagtcttgggcagttctttatagcagcttgagaacagactaatacagtactataactacttatggacaacactaagaatatcttactttgttatttagtgtagatatataattaacttcaatacattactattaatgtcataataaatcctggctctccttctttaatttttttattccttctctcctttcttctaaatattaattaatgtccttaaagtctaagatattcatgaacaaagcacacacaaagataaatcatacactattactgccaaaactacattctatcggaaacctgttagccaattagtggaagt

SEQ ID NO: 127863 - DNA, 730 bp, Homo sapiens
agggctgtatgcatctattcggctctggatcctggtttcttcctatgctcttgcctaaagcccccttcaactgagagtgtttatggaaaacaaagagctttgcttcttctcggaatgttctatggacttcttgccatctggtgcctgcagtggcgtttctccctgtgaggccctggggcacgctgtgctcactacctgaggtccctttgccgcaccagctgcttctgtcaacgtagtggctcagggagagtaactcaatgatcgaggtggacacttaggctaatgaagaggctctcaagggacagaaacaggacacctctgtgctcccagggtgcctctgctgaactcctcggggcaagtagtggaaagctactcctggtggcttgaccaggtggggaacttgtttcagaagccagcagacgaaggcgaggcacagaaatggggacttcaatgtcctctggactctctcatctcccttctctgcctccctctgaagggaaacttgcttctgctctctgcagactgccattctttgccttgctgctgctcaaggcaaacagacaatgtggaaagtgactgtggaatgaaagactacctctatcattgccaattgtaaattccttcgtgggtcaagcatctgtccgggtccaatcagcagagactgcagggtaaaaggatgcctcactgcacaaaatggctgccagggcccacagttctggattgggaggga

SEQ ID NO: 127864 - DNA, 570 bp, Homo sapiens
cgaagagggaaatagggaaggttttagttagaaggcacatcttgaagagtcaatatgccttctcctttaggtggagagtcagtgcaagaaataagcattcaaagcgtaaggaatagcatgtgcaaagctagtttggtatgactggagtgaattatggaaagtgatagaagaggctagaaaaactaggcactggccagattatgaagtctttgattgccatgcttagaagtttggattcattctatcctgaaggcaatacagagttccaaaggaatcttaagcaagggagtgctgtgctcagaattctgtgttacaaagaggagcataagatacattgggtttatgatttggaaatttgagtggctggtagtgcacttaggcaatatagaccaaacatttggaaagcagaattggatgaaaatgacaggtgaggtgcttaattctgatcctgtgagtctgaggcacttgtaggccatcagggagaactgagcaagaaatataagtgtacagtgtagaagacatcagtgtaataatgtctgaaggcttgacttagaaagaagatgtggagtg

SEQ ID NO: 127865 - DNA, 293 bp, Homo sapiens
cttttctgctagtgaggttcttcttttaaatttttttattatggccctgtgcctatcagtgggattcaacaattaacaaggttttgccacatttgtttcatttatcctttatcttttacctttctttgctgaggttttgttttgttttgtttttttgttttttgtttgtttttgagacggagtgagactgtctcagaaaagaaaaaagaaaagaaaaagaaaaattcaaagcattcagttcagaatgcagctgtgacttctgttttctgtgtcttcattttctctatttcaat

SEQ ID NO: 127866 - DNA, 599 bp, Homo sapiens
gggtgtggagggattaaatttattagattaaatgaagtattttgaaaaataaaattatgattatcccataaaattcagaatgtactatccttacagaaataatataaagatattaaataacttgttctttaactcctgagagaaacaattgttcataaagttgcaagcatattctgtgttgaattgttgaatttaaatagctatggttcacacagtccatatttcaatatttcacatacacaccaaaaatgagaatacaaccatgaaatgaaaaactatcataagtcatgcctgttttttaaaagtgcaaaatcactaatttcatataaaaatggataacagaaaaacgcaagtcttaaaaagctacaagtaaaaatgagcagaataacatctatagagacaatcaaagtatgccaaagacatgcaggtaaaacattaaaaagtaacaaatggcagggcatggtggctcacacctataatcccagcactttgagaggccaaggtagttggatcacttgaggtcagtagtttgagaccagcttggccaacatggtgaaaccccatctctactaaaaatacaaaaattagcccggcatgga

SEQ ID NO: 127867 - DNA, 669 bp, Homo sapiens
tgcggtggctcacacctgtaatcccggcactttgggaggctgaggccggcagatcacctgaggtcaggagttcaagaccagcctggtcaacatggtaaaactccaactgtgctaagaatacaaaattagccgggcatggtggtgcatgcctgtaatcccagctacttgggaagctgagacaggagaattgcttgaacccccgaggcggaggttgcagtgagctgacattgagccactgcagtccagcctgagtgacagagtaaaactctgtctcaaaaaattaaaaaaaaaaaaaaagaatgaatgactttacctcctgccactgtgccccttgcacagaaggctctaaccatgcttggcatccttgctattcctggaacagctcaagaatgagtttacctcaaggccttctgaacctgctgttccctttacctgggaacattcttccccgagcaagctcccagccatccctgaaattcttttcaagaccacctcctcaaagtgcacacgttacacatatctgattgttctctgtacctgtaggccacagaaatactctgtaacaatactccatccctaagtatttctcttcacagcacttctcatcaaatgacaccttatgtgaacatgtttgtttgtttgtttctttgcttttgagacacagtctca

SEQ ID NO: 127868 - DNA, 180 bp, Homo sapiens
gaacaacaaaaggcttggcaggtaggttcacatcatcatttctcagatgggagagcagacaagacagaagaagagacctgtctaacatcacagagtggggtcagggagtagatccagggctcctggtacctagtccagagtgtttccaccatcttcaaggtctagatctttgggtgtcca

SEQ ID NO: 127869 - DNA, 740 bp, Homo sapiens
gataaatgaaaacacctctctggtggcatattagaaacttcttgggttcgaatgctttgtattggggtcattttcacaatgtgtttcccccatcacaccactgcacttcagcctggcaacagagggagagaccctgtctcaaaaaaaaaaaaaaaagctgttctgaataaaaactaagtggattagtgaaatgagagtagaaagaaattactatgatgataaagacaatttttcaaagccaacagccaatatcatactacatggtgaaaggctgacacattcagattatcaggaacaacacaagaataccttttatcaccactattattcagcattgctttggaagtcttagctaatgcagtaagctgaaaaaatgaaatgatgtaaacattttagaagaattatctgtatttatgggttatataattgtacaccttgaaaactcgtgagattctcgtacaagaaatacttgaatttataatagaatttgggaagctagctggataaaaaagacagaaaaataacattttctatactgacaatagctagtttaaaatggaaatggaagttatattccctttctactttaatgatacaactataaaaatacttgggaataaacttaacaaaagtgcaaggtccctaaaaaagattttattgatgttataaaacggagtgtaaataaatggagggacatggcaattctaggatattaagacaattttggccaggtgctgtgc

SEQ ID NO: 127870 - DNA, 393 bp, Homo sapiens
actgtgagaaataaatttctgttgtttttaaactacccagtctagcgcattttgttatagtagccctacaaactaagacacacaccccaaaatacttcagcacatatctccaaaatttaaagccattctcctaaataactacaatgccattctcacacctactaaatttaccataatttcttgatatcatctaatattcaatgatattaaaaagttgaccacttaaaatagttccactgtaaccaaggatctaagtgcacaggctagaaaccattggcctatgagtcacatgtcttagggcagaaataatatatataaactccagaactatacttctttcttaaaagaaagagagctcagccaggcgcagtgtttcacgcctgtaatcccagc

SEQ ID NO: 127871 - DNA, 635 bp, Homo sapiens
gccaggcgcggtggctcacccctgaaattccagcaccttgggaggccgaggcaggtggatcacctgaggtcaggagtttgagactagcctggccaacatggtgaaaccccgtctctactaaaaatacaaaaattagctgggtatggtggtgcgcacctgtaatccgagctacttgaggggctgaggtaggaggatcacttgaacccaggaggcaaagactgcaatgagtcttttagaaagcagaagctgagtctgatagaacttagcccgtgaccttaatgggtactcggcagatgcagctgcctggctgattcgagaacaggacaggcatggaccctgctttcggagcagtgctgtggaatagaactttgtgcagtgatggaaatgttctgcatcttcactctcccttatggtgggcactagccacgtgtgaaacgtatctaatgggactgagaaactgaatttttaatttaagtagccacaggtagctagtgattaccatagcaaatgctgcagttccccgggtttttagtcttgattatacctcccagaagttgtctgctccaaaggtcaacagttcagcaggaagcagagcccatgcctttgagaggctggaggtattgcatactcccaaa

SEQ ID NO: 127872 - DNA, 432 bp, Homo sapiens
taatttgatacatctttacacacccaggcctgctttccaaaggaaaaagagctccatagcccacaaagaaatgctcaagccaaaaacctgaattaatcatcatatcatcggtatgaacaattcaagtttattctgtgatgaagacaggatgaattgatcctatcaatcagcatgaaaacccatgttcatactgagaagttaagccaaaaatctcaactcaaggattcatcactcttagcaagttaggatatttttccaacttttttctcctggatataataaaattggtcacattatgataatataaaaactgaccactcaaaaccaaatttactatgaattaaccaaaggccttaggtttctctctctccaggttacctttttggaatcgctatttcattgatatccacgctagctgactggaaaaggtca

SEQ ID NO: 127873 - DNA, 370 bp, Homo sapiens
aggcagaacaggctgggcatcaccactgctggccactacccagccacgccagatttaggtcagggaaactcgcgggaaggaagaccccagggccttccctccccagaggtggagagcacaggccacagtcagtggtggggagagccagggtgtccccagagaaatgggaggatccaaaccacaacggaacaaaaggcaggcggactcggggttgggcaggggggcggggcgcctgggagctacagccagccctctgctggcctgggagggaagttcacagcacccgaacatagtcaaatggggttttctccacccccaaaggaatgcaaaccagggaagggaggagagatcccattaggctgagccctct

SEQ ID NO: 127874 - DNA, 646 bp, Homo sapiens
ggctcactgagctttggattccaggtccctttcccagcacttagtcccatttttaattttcaggaagtattgttccaaaacttggctcagacttatcctctccttggattcctttctccatttgttttctcggttttgctcacttactctttaacttgcacccctctttttccaaggtggtggattagggggtgttaatgctggggcagtgttaggcacagaacctaggagtcatctccctcactccgggaccgcatcaatcatcagtcacagacatgacagttcatttttccctcctgaacgcgcctgcacagatgggtgtatcgctcaagtagccaaatggatgtagctgttgggggacagggcctgaggggcagcagggagagaaaagaacaaagaaagaaagaagaatggttctttgtggggcagcaaactttcttctggttcccagcctgaatgtttctgatctggttttcttctttttgtgatgtttgaacttgtttcctcaactcagatgctgaactcttgtccaaaaaacctaagggcagcatagtgtgagagactgtgggaggcaagtccagcaatccagcaaaaagaattgcagaactgtgaagataaatgtgtgtccgtatcaggactgcgctgg

SEQ ID NO: 127875 - DNA, 279 bp, Homo sapiens
atttcctgtttctaagaaaatgggcctagatgctcagctacattaaccaaacaacatgttgacacaaatgaatctgaagcttgcccgctccaggctctctagaaggtcaggtttgggaatgaaggcatttgggtgactttccaaactctgaatcccaagcccagtgactcaggccaggtattaatttgagggatctgcttccctcctcttcctgcctaagaaggccccactaagtggctagagtcagaggctccctggtcatcttgagtagtgggaatg

SEQ ID NO: 127876 - DNA, 674 bp, Homo sapiens
ctttcaaatttagattttaatatggttccagatataatatgatcatttatattcaggtgtgaaactatttagtaattcttaggacttttggcaagacctgcctcattaagtggtaatgactgattcagctatctgaaaatatttttgttataagatttcaaattcttgccattggaaaaggttcaaagacatttaaaaatctagtgaagtttgaaaaagaggatgaggaaaagtaaaaggctgttaaccttggggtgtagtagtgtagtaagacttcctaataaggcatttggcacaaaatttactctccatctaagtaaatgcaactatgattttataaccaagaatattatgtgtcatgtttagtttaaagcattcattcatttgcagaaatgcgaaaccttgctcttgtcagtcaactccagatgctggtgtgaaatggccccaaatagtgacggccattggaggtgggaaaggtacatgccaagagaaaggcttaggaaatagcatttaataaatactagcctaagggcaaaagcacattgaataagaaaactctgtcattaggccgggcacagtggctcaaacctgtaatcccaacactttgggaggccaaggggggcagatcacaaggtcaagagatcgagaccatcctggccaacatggtgaaaccc

SEQ ID NO: 127877 - DNA, 368 bp, Homo sapiens
ttctgtatttctgacctggccatacctccgtacaaccctaagcaagcccacctgcaaaactacttagagaggggaaaaaagaagaaaaaaataaatgtcaaaaatgttaacagatgggagaaaataaacaactatacgggacactatctcaagcttcaataaagttgaagtcaaacagtatacacaactgaaataccctcctctgattgaagctttcgcttcagagtctttgagaattattcaaattatttagaataaaaagtaagaactcgaggtagaatagaaacttcagcatctaccaagtcaagaagataacttggaaaacaattctgactgacattccaatttaatcacacttaatgaattct

SEQ ID NO: 127878 - DNA, 484 bp, Homo sapiens
tcaaatgttgaagccattcaaattatgtgtgttataccccccaaaatggaaaattaagacaatatggaccaattcttagagacacataacttacaaaaactaactcgaaaagaaatggaaagcctgctcagccctgtgacttaggggaagtcactgccagctacaaaagaaaacccctaacacttcagtggctggacacacaaaatgtattactcacacaacgtccaacttcaggaataacaagagatctcttctaacagaagacaaacagacttcctaatcctgtgatgcagctgcccaggtcactggcagggaagctatcacagtgacgcaccagctcccgctgctctggccctgaaatgactcacctcagtcccacacacaggctgttgctcagtagtcacacggccccagcccaactcagggatatgcagcgtaaaggcaggggggacataaggatggtctgtgtgaacggttctgccac

SEQ ID NO: 127879 - DNA, 314 bp, Homo sapiens
tcaagtgaatggtgtgacttttttcaaatgatcaaatgctgcccaaagattattaactaagtacagaaaaatgtcccatttcattacagacaaggtcttccgaacgtggctccacccagaacacagcagtcccagtacgcatgccatgatgggtttttatgcccagcttataataagaagatattcttaccaggaagtggagaatgcatctaatttctacctctcccttaatgagatgaaatcagttatattaaacagaaaagtacagtcaacctgggctattaattaggaagatctaaacaaatctgccctca

SEQ ID NO: 127880 - DNA, 441 bp, Homo sapiens
atgccaccatgcccagctaatttttgtatttttagtagagacggggtttcaccgtattggccaggatggtctccatctcttgacctcatgatccaccctcatcagcctctcaaagtgctgggattacaagcatgagccactgcatctggccaatgttttaaattttttgtagagatagggtcttgctctgttgcccaggctggtctcaaagtcctatcctcaagtgatcctcctgtttcagccctccaaagtgctgggattacaggtctgagccactgcacttggccagtagctgttctaaagtctttgtctcctaattccatcatctctgcattcctgagtctgtttctatggactgatttttctcctggtagtggcacgcactttcctgctcctttggacgtctggttatttttgaatggccatcgtggtgagtgctac

SEQ ID NO: 127881 - DNA, 296 bp, Homo sapiens
ggggtcacgggaaggcttcctggaagaggggccatattttgtatataaaaaaaattagcaacataaaggaggtgggaaaaattccaaaccacatagcaattgctccttgttcacgggacgcatgaatcagaacagcaacatgcaccaggacagagaggagggcacaatgccagggtgcgggttgcactaccagcctagcctgtggggctgctttttcccctaaccaccaaccctgtctctcaccacaagcagcacctgaaacacactggtcctaaactccaagcaggtggtaacct

SEQ ID NO: 127882 - DNA, 568 bp, Homo sapiens
cggttgctcccagagacaggaactcacagagtacgagaaacatgcctgagagccctccacatctcaggccctaactcagggcctggcttgtcttaggctctgcaaacatagcacagtgacagttgttgaagtgtagcagcagctttttgcagggaaagagggagttgtatttattgcttctccatgacatggttcttttctcattagttcatgggcaagtcaagggaaagagacctaggtagcagctgagtctgtagcctacagatggcctgggctggcttggctcagtcacttcccttagtcacttccacacattccagaaattgtgtttttcttacaggtgacagaggaagttatatatggaaggtagggttaggggcaccaaccccctgtgcaattgacaatccatgcataactttgaccctccaaaacatagctaataataatagcccactgttgactggaagccttaccaataacataaacagactagtaacctgtatatatcttatgtattcatgatgtacctttttctgaaattaaaaaaaaaaaatttctgtgctacaca

SEQ ID NO: 127883 - DNA, 284 bp, Homo sapiens
ctcccaaagtgctgggattacaggcatgagccactgcgcccggcctaaaattcaaaattttaagggagagtcctatgggtccttatggagaattagtttaacagattttattgccagttcctttgtaaggtctggagaagcaagaccccagaagagagaagatggcccaggtggtttcatcccagggccttgccttctgagggtgggggtggaggtgtgtgtgggtatggatggggagtttaatcatctcatgttttgggaggtgaatgtgaacttaatgctgg

SEQ ID NO: 127884 - DNA, 351 bp, Homo sapiens
aatattattgtctgtaatttaatataggagaatgtttctaagcctacaaccttgcatgcagaagcagtttttcaagcattaatacttaaatgggtcatagacaccacatctgtcattctgtcctgaagtctatgaggcaaaaccaagactatgctggcctattgatttttctagcatttgctttaatttacttaaccattgagaaatccatcagtacataaacggcaactgtccattactgcctcatttgcagacattctttcccctcgtttttggtaaatatttcccttaaattgctatgtgtttacagtgtaaaaacgaattaggaaactgctcacacctgtttctgtt

SEQ ID NO: 127885 - DNA, 585 bp, Homo sapiens
gcgaattcactagtgattgtgagctgagatcgcacccacttcaaagtcaccagtctactcttttgctcaagtatccccaagttcattcttcccatttcactgtcactgctcatgaatgcaatgagggtttacttccctccaacctggctggtccctgcctggcactgaaggggacctctaaacaaggacctttcaatgacccttggcagagagcagcaaaggctctgcaatgcccacaaagccctgagtctggtcctaatcccctgcaccttcctccaagcagtccacacatttggcataacacactttattagcccctggatgcggaagttcccataccttctcacaggagtcaattctgcaacttctgggaatttcgttagccagtttactttttgttggtggcttgaagtcagtcatagtgggaagctgacaaaggctacaaatcaaacctcttgcccctggagagccagttgttaagcactgaccaggaggccatcacctggatactctcccctcattctttgttttctttttctttttctttttttgagatggagtctccctctgtcacccaggctggag

SEQ ID NO: 127886 - DNA, 672 bp, Homo sapiens
tgtacatatttgtaaattcttgcattctcaatacagtatgcatcccatgaagaactggtggggaataggttcaaatcagatagtttagttatatcctgttgctgtggaagagattgggtgattgaaattttaatatgagccaagtaatattccagcttttaaaaattaacttttaaagataatctaacctttcagtttggttatacttttggataattgaagttttgtatgttttcattcttacgaatatttgcaaatgaatatagtattgacaagaaccactttgccttgccacataattccactagcttgaagctgggtaaacttgaaaagttcagcatactctgatttatacaacccagacccttttgtaaattacagcgtgagtaataataatctttcctccttactgactgcaggagtgtcccagggaaatttacctagtcggaatcctggactctctgcttaccattccttttgttttggctcctctaactcattttcctaatgctcccaagtattccgtggaataaatcatatgtggatggatacataatgttgtaagccttgtgcctgtaacctaaatttgagacttcagaagttatatgcctttcctctgttatactttctacccgtaatattgcatccattatatcatgctattacatttaa

SEQ ID NO: 127887 - DNA, 803 bp, Homo sapiens
gaactattttaaattcctgtcagcaatgtgtgagaattctagttgtctaccacatctttaccaaaaattgatcttaattagtgcctttaatttaaccatttggttgtagtgtagtggtgtcgcattgtggttttcatttgtatttttctgatgtctaatgatataaacttcctttttcatatgcttatgagtcatttgaaaacactcttttgttgtgtgtctatttccagtatttctccctttttattgaattccttaaatttgtagttctgactaagtcccttgtcatatgtattacctatcttccaaaaatcttctcacagtctgtggcttgccgtttcactctattgtctttgttgaatagttcttaatgaaatccaatttattacgcttttctctttagcactttatatatcttgtttaaaatgttttaacctatctaaaataatgaagattttttttttctagaagtttcattgttttagttttcatatgtaagctatcacaatttttattttggtgtgatgtgaagtagaggattaatgcttctttttattttaatggattccaattgacacaatactgttcaatgagaagactggctcctcttgcactcaattgcaatggcacccttgtcacaaatcaagtgaccaaatgaaaaccatttcttatgcttcatttgtaatttttctttgccatgtttataggttttatatcaagaatgtgctgatctcgtaaaatacgtagagaccagagggtctcctttatatgctctgaaacatctgtactttagaaattatata

SEQ ID NO: 127888 - DNA, 272 bp, Homo sapiens
cagaaaaataaaggggcctctgtccccatgtctgagaggccacaagagcagcctctctccaggtttcttgtacacaggacagaaatgaaattctcccttattttggtgttttgttgtctgcaattgaatgtaatataatctgttaatacagtagcagagtagcagaatgattaaaaagtgagctctggagtcagactgctttcactccattccttacgctgtcacctcttaagcaggagccttaagcaaaggagccaaacctttcagaatcc

SEQ ID NO: 127889 - DNA, 188 bp, Homo sapiens
aaactggagccttccgaaaggaattcactcatcacacagcaagttagagggatcctaaaaccaaaccaaatctagacacagtggctcatgcccgtaatcccagcactttagaaggccgaggtgacagtatggcttgagttcaggatttcaagaccagcctgggcaacatagagagaccctgtctctac

SEQ ID NO: 127890 - DNA, 165 bp, Homo sapiens
atataaatcttcataattcaggtttgtcaattcataaaataacttgctgggattttaatgggatgcatgactatatagatcgacacagtcctttgactcctccagcaaccagtctaaatgtggaggatgacacacacacaggaagagaggtggcatggacgaagt

SEQ ID NO: 127891 - DNA, 357 bp, Homo sapiens
aagtggaaccatgtagggtttatccttctgtgattggttcatttcacttaccataacatcctgtaggttcagtcatgtttttgcatatggcaggattttctgctgtattaaggctaaataatatttgatggtatatatgtgccacattttctttatccattcatctgtcaatgagcatttagatggtttccacatttgggctattatgaataatgctgcaatgaacatggaagtgcagatagttctttgaggtcctgattttaattattttggatacgtacctggaaatgagattgttggattatatggtggttctatttttagtgttttcaggaagcctcatactctattccaaag

SEQ ID NO: 127892 - DNA, 517 bp, Homo sapiens
agaccagctttctccatgtgtctgggaacataagaaacaagtttctgcaataattgttacacagcttttccagagagggaccaaatctctgtcgtgagtgggtatctgcatcatttcgcaggagggaatgtgatgtcctggcttggctcacaccctctgtgggtttaggcacgggttcctgctggatccctcactgtggccagagagggagggctctgtttcaccacagggcaccagaagaggactggatcgtgggaagaccaggtaatcataatgctattaataatagcagtaatcatattgttttatacattgtatatgtcataaggattttaactttcatgtaacataattgctgtaaaagtttccccagtttgttttgtgctatttacctggtgttaaaatgtttaagaatttacatattaggtacgttaggtttattcctttttatatggtttctgtttgaaattttggttttagaagacattcattctcaaggtcataaaacacacacatc

SEQ ID NO: 127893 - DNA, 174 bp, Homo sapiens
tgctgggattacaggcgtgagccaccgtgcccggccagttgttttttttaaatgtccttattggccaataaaattggcagcaatactttgtacttctctttctgtgtctgtctgtctccccgtcctttattacctttcccccttctcccctactcctttgctttgtctgtctgc

SEQ ID NO: 127894 - DNA, 148 bp, Homo sapiens
agtttaaactagtgtcctaaactatagcattcaaaatgagataatatgctaaagtaatacacaaaccaaaaatcccagtggctaacacaaaaagtttttcttattcattttacatatccagggtaagtcagtaatagacgcagacaca

SEQ ID NO: 127895 - DNA, 577 bp, Homo sapiens
taatagttgaggtttctactccacatcactatagatggcagatgtctgctctatatacagtcttggctcatcgtaaggatataaaaatagaactcagttaccaagctttaaaagagacctagatgtaatggattaatttaacttactgctgtgtctatcaaccctgtcggtgtgttagattcagatgggacacataaactgagaaccttaaaaaaggacacccaagtcagagagaagcacagttaaaggatgttctcaagagacctcactaggcagggactgcagactaatacctgttaggttagataatatctgtatcctctaggggcaaagtcatttaagggctatgctgggctccttgtcagaaacctgtttcctcagagtccaaatataaaagttcctgcatctcctggttaattcacatgtatatattttggaggagaaaccctaattttattgtctgtcatattattcaaaaaaatctaggccaggcgcagtggctcacgcctgtaatcccagcactttgggaggccgaggtgggtggatcacgaggtcaggagaaggagactatcctggc

SEQ ID NO: 127896 - DNA, 328 bp, Homo sapiens
ccagaagttcttttttaacccaaaagttagagaattggcatagctactgacattgaaagaggaaatgaagataaggctaaaaacaggaggacttgttaaaagtctgtttaggatatatttaccctcagatttttctctcttacttcatatacctgtgccactgcttctatcagaattgcagctgagcactggagttttagtttctgaaaatggtaaaatagagattccttggactgagggacataagtcatagctgagtgtgagggctgttattctgaaatcaggcaaagtttacattaatgactgctgacacttctgttctttttcc

SEQ ID NO: 127897 - DNA, 382 bp, Homo sapiens
tttgaccacatcttgttctgttgcccaggctggagtgcagtggcacaatctcggctcactgcaacctccgcctcccgggttcaagtgattctcctgcctcagcctcctgagtagctgggactgcaggcgcacaccaccatgcctggctaatttttgtatttttagtagagatggggtttcactatgttggccaggatggtctcgatctcctgacctcaacctcgtgatccacccgcctcggccacccaaagcgctgggattacaggtgcgagccactgtgcctggtcaaacagaatatttcctaagggttcatcctgctccacagtctgaggttgttatttgttaattaaataaatatttgttgggcattgaccatgtgcca

SEQ ID NO: 127898 - DNA, 712 bp, Homo sapiens
gaaaaatgaattttgctgcttagaaaagaaaatcatttaaaagttatcatactagaacattggtaagaaaatggatagagaagaaattttttgggttgtggaaaataagataagcaagaggagagtcaaaaattttgagccctagaagaatatcttaatattgttttgtgctcaataatatataacttatgagaagaaagagaaaagcattatgttcagataggataaggagaaacatttatatgaatatatttttaaacttctagtatgtaatttcagcaccaagttagaagctgtgcctagaattttgtttttgagtatgaaatgaaatgagaaggtagcaattggaaaagactaaatctaagaatcattcctggagaggtatggcagaataagctggccatatgccatgagtacatggatttgtgtatactgctctgtatcctgccattatgctaaactatcaataaatctgctgtccttatctgtattcctcagtacataagattttttattctctctggttgcttttaagaattgttagatggctgggtgcagtggctcacacctgtaatcccagcattttgggaggctgaggcaggtggataacctgaggtcaggagttcgagaccagcctgaccaatatggtgaaaccctgtctctactaaaaatgcaaaaattagctgggcatggtggcaggcgcctgtagtcc

SEQ ID NO: 127899 - DNA, 325 bp, Homo sapiens
atatgatttcctaaatgatcagatgcatcatatgaaaaaagaaagcaaatgagaagagaaaggctgtatagaacaggtttagggggaaggatgaaaagttaagtttcagtttcatgaagtttgagacttcaactctgggcatataaaaaataaccaaggttcaaaccaagactggctttgaaacaagagagaggaactaaaatcattggaaagggggagtttaactttgatgtaggtatgactgcagcagtgagatatcgtattaagatctgatgacatgaaatttggagccacttcctttgtggtgggaggaagtgaggagaat

SEQ ID NO: 127900 - DNA, 203 bp, Homo sapiens
aacagggaagcagcagtgcctggagtgctgagttcagttctggcgccacatgatgaagggaacctggataaactagaccttgggcagacaaaggtgcttgggagagtgaggtgacagaaatttctcataaggaatgatggaaggtatccctttattccaataaaaagaagactaaggaaaggcaatgttttcagtgctcttta

SEQ ID NO: 127901 - DNA, 356 bp, Homo sapiens
tacgggctcactggactgcatggtcaacatggaggtctttctgagttgtgcaaaatgttcttctcaggaagcttgactgctgtttgatgttaacatgattgaggagtttaggcttgactaaagtcctttggtatccctgtgaaataggactttgtgttagtacattctcacactgcaaataaagacatacctgagactgggtaatttataaaggaaagaggtttaatggactcacaattctgcgtggcttgggtggcctcacaatcatggcagaagatgaatgaggagcaaaggcatgtcttacatggtggctggcaaagagagaacttgtgcaggggaactcccatttataaaac

SEQ ID NO: 127902 - DNA, 549 bp, Homo sapiens
agcacagtggtgcgattacggctcactgcagccttgacctcctaggctcaagccatcctcctgcctcagcctcccaaagtgctgagatgataggtgtgagccactgcacccggcctgtatttaaatcttgaaaggtttttggcaaatgtcatttcaggtttagtatggttgatggcaagtggttttgtttttctgacagcggaaggaacggcttttcctgttcttaaaaagcctttctagtttgtgggaatgagagcgccattgacacagatgccactgcgcttcgtgcttgctgcggcggggggcacctggcggagctgctctcggtcacatccccacaccgctgtgtaggcttgctcaaaccttgccctccctccgacattggaggacctgctgagccacatgcagtgtcttgggacacagaaggcagacatggggtccccctgactttctggtggcccggtggggaggacagtcatggaaacaggttgctgcaaggtggtgctcagagggggactgacagtgtgtggagggaccccggagcaggag

SEQ ID NO: 127903 - DNA, 855 bp, Homo sapiens
gactcagcatggtgccagctgcggtggtcaaggcagagcccatattgcctctccccaaactctgggaaacccagcatagagaaagaatccttttgcttggggaaaagagaggaaagagagcaaaagattttgtctaggaacccagagaattctcccttatcttcctaaggtccaccaaggctgtgtttctaggagtctgcaagagtcatagagttcttgggcttagggttcccaatagtgctaaaacagctttagtgaaaacaggcttaggtaaaaacactcagtctcctttggattcctagaaagccctctcaagaagaataggtaaaaacaagtccagactctgaagactggaataaatatctagctcttcaatgtccagacaatgatgaaggtccacaagcatcagaaacatccaagaaaacatgacctcagcaaatgaactaaataaggtaccagtcaccaatcttgaagtaacagagatatgtaacctctccgacaagaaattcaaaacagctgtcttgaggaaatgcaatgaactttaagataacacagagaattaatcagaattatatcagagaaaaaaattttttgagacactctcactagcccaggctggagtgcagtggtgtaatctcggctcagtgcaacctctgcctctcccagattcaagcaattctcctgcctcagcctcccaagtagctgggattagaggcgcctgccaccatgcctggctaatttttgtgtttttagtacagatggggtttcaccatgttggccaggctggtgttgaattcctgacctcaagtgatccgcccaactcggcctcccaaagtgctgagattacaggtgtga

SEQ ID NO: 127904 - DNA, 841 bp, Homo sapiens
gatggtccccactcacattgggtgaggacagatcttcctttctcagtccaccaattcaaacgccaatctctttcagaaacaccctcacatacatactgagaaataatgctttaccagcaatgtgggtatcccttaacccagtcaagttgacacctgaaatccaccatcacgagttggatccttagcatttttattaagagtattttgccaccagtctgtcactgaagcatctttgaaacattaatttcaagataactttataaacatattatttaatttatattctttaattttagggagggtttaaataaaatttaaggtctttcttttttatttaaattataaactactccaatgaagactcacttgcttataaaatgaatagagcaaatgtgtcttctgaacaactttcattacccatgggcctccctggactattcagtaatttgttaaccattgttgggacagccttagagctggttaagtaatctatttttcctacaaccacaatatctgatcagttattttcttctcagaatctgaagttataaaactgattctctcttctgcctgagctgtgtctttgatgttatggtatttaacataagtgaaccattatctttggtaaacttcatcattatgcttttctgttcacacatgggtatcatcggtcatattaaatttttccacctcgtagcagtatcaaaggtagatttatggagtgctaaaggaaatttaaatttctgagcccctcactttcacagaccctgtgtgggtgctgggggatgctgggagaagagtgttccaattgggaagaggaaaccaggttaccaccaagaag

SEQ ID NO: 127905 - DNA, 815 bp, Homo sapiens
gttttgttttgttttgtttttttgagatggagtcttgctctattgcccaggctggagtgcagtggcatgatctcagctcactgcaacctccgcctcctggttcaaacaattcttctgcctcagcctcccaagtagctgggattacaggtgcacaccaccacacccggctaatttttgtgtttttagtagagatggggtaccacccaggctggtatcgatctcctgacctcaaatgatcctcctacctcggcctgccaaagtgctgggattacacgcatgagccactgagcctggctgacaagatttggtgatggcttagatcagggaggaaggaagagtcaaagcttaagtatttaggtggatgtcatgcattttgataggaatgggcgtgttggaggaaaaagttaaagggaaaaaaaaaaaaaaaaaaaaaaaaaaaaaactgtgtgtgtgcgcgcgcgcgccctgcggcctccggaaaaaaacctttcgagaaccctatcgcgttgggggggcgcgcggggcccccgtgggcgccaggtggaacacggggcccaaagggcgggtccccgagaggagagaacacggggcgcatagaaacaagagggggcgggagattttctctccacccactatataaaaaataaacgcccccggggggggggacacgcggagcgtttttttcttagaaacaaatatctcccaaaataggggacattctcacgagagggagagcaaataaacgcggggagctccttttcaaccaagggggggaggtcccaaggggagaggtctgccgatatttcaaatttagg

SEQ ID NO: 127906 - DNA, 494 bp, Homo sapiens
acgcggtccgaactcggcaggcacaagtacggcagtaaaattcatctctctggcatggcaccttttcacatggatttccaaatctgtcctatttgtagctacttgcccacagtctgtacaagcacacaacgtctgagagccagaagctggcttcactgtcagggaatgcagcccggagtccggaggacgggcactcccctggccctgctctgcctcctgggtttctgaggtagtcacacacactctctgcacactgctgcacgcttccaggtgtttcagcactgattctgcatcgtgtgttttcatctgtgttctcaagtgtttcatatacatcctctgagtttcacttgtacctcttttaattcctaaaagattaaaccttttctttgcctggcccttcaaggtgaaagtgctgcttcgtcgacgaaagctattacccaacacgagaatatttcgctcaggtcttggcctcgaggttacactgttaccgtgtg

SEQ ID NO: 127907 - DNA, 302 bp, Homo sapiens
gaattccggctctctgggttctttattctaattcatggatcaaattgtctatctttacaccaacaccaaactattttgactacagtagctatatattatgtcttaaaacaaggtggtataagtcctttaactttcttatttttcaaagttgttttggtgattttattttttatttatttttaattatttatttttttgagacagagttttgttcttgtcgcccaggctggagtgcaatggcatgatctcggctcactgcaacctccacctcctgggttcaagtgattctcctgcctcagcct

SEQ ID NO: 127908 - DNA, 483 bp, Homo sapiens
ggaaaccctccagcaaagacttgggtcatcttgagttattctgcagtttagcagggtggggtgaggtggaatggaggattttgacctggaggtccccagatcccagccccagatgcacagcacacacatatatgtatgtctcaactgtttcttgttctagcccccagcccatgaggcccccaagcctcaggaaggactgttgtattaacaaagaaactctctggctctgtcatttggggcaggtggagtaactatctgccattactgcatctggttactagatagatacttgatctgagggtacctttttatttttttgagacagggcctcactctgtcactcgtggagtggcatgatcttggctcactgcagcctctactgagttgggactatagacatgcactaccacacctggctaattgcttttttagggtggggggcgtattttttgtgtagacgagttctcaccatgttccccaggc

SEQ ID NO: 127909 - DNA, 480 bp, Homo sapiens
catgggacccatacaaagtatcattaatgatgttggaagcactcccaagaagcagagagagtcataacattgtaagaaaaagctgaattgcttgatatgtattacagattgacacctgtagttggggttgcccaccatttcagacagatgtttcatcttgtaaacagatgacataaacttttggtactaataaatacaatgcagtactgaaaatgtattttctcttccttataattttcttccttttatttttctttgagacagggtcttgctctgtcacccaggctagagtgcagtggcaatatcacaatttacgacagccttgatctggcgagctcaaacctctgagtagctgggaccacaggtgtgtgccaccacgtctggctaactgttaaaaattattttgtagagacaaggtctccctatattgcccaagctggtctcaaaactcctgggctcacgtgatcttcctgcctctgc

SEQ ID NO: 127910 - DNA, 325 bp, Homo sapiens
aaaataaataaaaataaaactgcagcctttactccatgcttgtcattactgtttgtgtacacagtgttcttgaaatataaagaaaaaatatgcctgcagtatcagtcacccttacagtcatccatgaaaaaaaaaaacaatcaggccgggtgtggtggctcacgcctgtaattccaacactttgggaggccgaggcaggcagatcacctgaggtcaggagttcaagaccagcctggcaaacatggtaaaaccctgtctctaccaaaaacacaaaaattggctgggtgcggtggctcacacctgtaatcccagcagtttgggaggc

SEQ ID NO: 127911 - DNA, 469 bp, Homo sapiens
atttgtttgttgaaattaactcgagtactttctagtattaatagaaacttatttgagtttcctaaatgaggacttcttcaacctattcaggtgtgacatgtcatctaagttaataagtggagcaaaaaataaaaataacagcatcaagcacaaaaattcagtctctggagactgagagatttggatttggattctaagtccagttcctctgcctgcttgttttgttaccacaggcaagtaactaatcctttactgtgcttataataatacttcctacgatctttgaatgttgtgaggattaaacaggacaatgcaagtaaagtgctatgcacagcccctgacacctagtaaatatttaataagtagtagctgttgttaatgctgctggactctaaaattcataaggctctacaacatgtaaactagcattacacatatcacaacaatggatttttcatttatctatata

SEQ ID NO: 127912 - DNA, 259 bp, Homo sapiens
acattctctatcttgataaggatataggctacagtgctatgttcacttctcgaaatttaagctgaacatttaggactcgcatatttcatattctaccccaattttcaaaaatagaggaacaagagagattcctaggtaagacaaccttcgaggtgcaagacagtttatttttttttcgagacagtctcgctttgttgcccaggtgggtatggtggcagatacctgtaatctagcactttaggaagccaagcgggaggat

SEQ ID NO: 127913 - DNA, 509 bp, Homo sapiens
taaccagatttttacaatggtgccatggtgtaggcaatcccggattaagaggtcccttttacaaataaggaaatagactttaagatggctgccagtaagtggcagtgctgggacttaactcgggtctcatcattaatccagggcttctggaattccgggaatatggcactgtctgccataattttgttaatttactgcttgttttagaaatacatctgttataactagaaattcggggacagcttagtcaatttgttttccttacaagcaaaataaagtaaaatgtagcagtctgctcattagtgctctggtgggatggtttacctgtgaaccttggagaaccatgtcctgctttcacaatttaccaggaaaaatggctactccgaatttaaatatatgtaggacattaatggaaacacctacattccaactcagtcattgccactctgtagaatcttactgctatttcaaatgtccaattacagcaattaaaatactgattactgttg

SEQ ID NO: 127914 - DNA, 453 bp, Homo sapiens
ggagagccccaggcttatcgcatggacagggatggaaggccgtgtgggcctgatctttccctgtccacaatgttccaggctcagactttatctctcccatagtggacacaacaagccccttttgagttcaagctatgggggatgttctcagagaagcagctgtacactagggctggtcctaaccgaccacttttccttttttttttctttttgagacagggactcactctgttgcccaggctggagtgtagtggtgtagtcagctcactgcagcctctgcctcccaggctcaagcaatcctcccaccttagcctcccaagtagctgagactacaggtgcatgtcaccatgcttggctaagttttaaattttttgtagagacaaggtctcactatgttgcccaggctggtcttgaactctaggcctcaagggatcctcccatctcagcctacca

SEQ ID NO: 127915 - DNA, 396 bp, Homo sapiens
gacatctaagcagccccaagaggacacacctgtggccaccagccctgtacttcaccgcacaagccctgtctgagttctaatgccggaaaggaaaccttcagagagaatagctacttcagaaggagggatgagctgagtcgtggtatcccagcttgagtggtggttgttcatcttcagtggtagaatacagaaactatggcctgcagcaaagctcttctggtgatttctcctccttttcaaaacaatattgggaggccaggctgcctccatattgaattctagaatgaaaactgaccagctctgttattcagagtctagggaaaagaaatatgaggattgcaatgcaaaaacatggagtccttgtttgtttgctggtgggatgaactccagcccctc

SEQ ID NO: 127916 - DNA, 453 bp, Homo sapiens
gggggggtgggggtggggggttgacactcccttagcacctccagctcctcctgcagggtcactgaggctttaagtccacgtcagaagtggggttttataaacattcctgggtccatgtgtgtgaattagaagtcaattaaaatgaagaacattcacatgtctggtctctggagtcagttgaggccatttctcacttcctctctccatatatagagttcctacaaagcctggtctcctatccatcctgtcctttggccttggcacaagaatgacttctatagaagcctatgacatattttcgtctctgctcgcctggtaggagctgagttactttccctgtgaggcatgcaggaaccagtgtcatttgtgcacagtctatagatagtgcagagacaagaacccagggcacagctgttacaatgaggctgtgcaaggatccccacagggcccaat

SEQ ID NO: 127917 - DNA, 590 bp, Homo sapiens
caggtcagggtccagtggggttggctgctccccagggctctcttcctggcctgcagacggctgtcttctcactgtgtgcccacaagacctttcctagtttccctctctaggtatccaagcctccaatctggctgctggaatacaagatgctcctgtccttcaggctgcaaactgcctggctcttggtggcttccacagaaaatagcccctggtttcctctaatgaggagacatcacagaatgaccaagtctcccaaggattttcccccacagcgactcagacaaacaaaggcaacctgcaagcgactgactttgctgtctcgcggagtgattaatctccctgaaattaatggcccctcaaaggcaggcagctgcagtggctgtgcgcatctgaattgcaggattcctctgcatgcgtgaagacatttaacaggacagatgacacgttgtgggtgcccatggccctcaggaacccacacaacttgaccataggttccataagcatgcaggaatggggtcaccaccatggggttccctgcctacctcctccattcccattaacagaggtaaaaaagctgtccctcagaagag

SEQ ID NO: 127918 - DNA, 304 bp, Homo sapiens
ctagaggatctcggatatgcgtctcattccatcatttaagcaacataaaaagcaatgagatattttagataactttttccatactaagttttagaaatccagtatgttaggttaattttctggtagattcatcaagaagtgcttctgagtatagaatttccctcagttcacgcatgtttgtagccttgaatctttgtgattgaatataacatctttgtgttatatttttttccctttgtgaaaaggaaaaaattatgttggcaaatgtctcaacaacaacatagaaagcaaggcaacagtaagc

SEQ ID NO: 127919 - DNA, 499 bp, Homo sapiens
catatgaaagagcaaattcagaacatgagcatggaagtccctgcgaacgtcagatctccgtgtgcatccttacccccttgctgctttcatgctcactctcctcttgcgtggctcgctttcaggtttatctccatccctggaagcagagttgctctggcccaggctctccatgagagtttggcttgaacattcattgtctggccccctcctagttctcatctcccaaagtcaagccaatgtgtgaagaaatgaccagctcagcagccaaggcccagggtgcacaggtcttcgttgggagaggcatctgcaggcctttccttgcccactgggatccttgcctagcatagtgacgatgttcagccctggagacaaacaagaaggggaacaccaacatcaatagaagtatatatttacaaattgcatttctgctgtattgaaactaacattctgccctttaaaatcctgaaaataaaatttcagtatgaaatgaaaaaggcta

SEQ ID NO: 127920 - DNA, 734 bp, Homo sapiens
ggaattgtagaaattgctctattgctgttaccactctgtataacctgcaaacttaagtaccttaaattccctgtgtatatggtgtaggtttttcagttccaatgtggaaaagggggttggccatagttcatagccttgttagagtctataacaactcttaatgattggaagtgtaaaataaataagaacaagcattcagtacatttaagaaatttttttctttttcagtgtcatattcttttcttctttcctattattttctttagtgtttattccttattttctgcatacgttttagaaacataatcactgtatagcaaaatagctaattatgaggtgtcatacaatgatactgctcttctcttccctcctctctctagttcctgaatccttaatcattcccttttcttctgacttcccttcctgaaaactttagtccaaacctgggagaagcaagagaaaaggaagtgagatgggaagaagggatagtagcagtggcctgaaagggtatattggagcccaactggagcagtggcctagcatggggtgctagagccaaagtggggtgaggagggtatccacatgaagggggatataatttgagatgtcagagtctgaaagggttgaggatgacttttgtataggggtgaaggggagtgtagagccatagggtgttagtgttcagatggggtgaagtgggcatagcagggggtggcagcagtaggtgcaggttt

SEQ ID NO: 127921 - DNA, 332 bp, Homo sapiens
gactatttgaatctggaactgttttgggcagaaggaagggggccaagaatttgggaaaggagcaggatggggagagggtggacatgtgcaaaagaagagaccacagagctgtgaaactttggccctgggagagaggcccttaaagaccatctcatctgccccattatcttacagccgggaacactgaggcccagagatggaaaggaatgcctgagctcccccagccaggttggagaaccaactctcaggggttttcagaatctgcaaagcagattctcagagccagagtcaaggaagggaaagaggtcagaagacccatcactctccaggtg

SEQ ID NO: 127922 - DNA, 132 bp, Homo sapiens
tgagtacagtcaatctcagtcccttctctgagttctagattagaaaataactcacagagaggaaataacattctttatataagtattgctgatacaaaagaataaggcttaaatgtgtgatacagtgggatt

SEQ ID NO: 127923 - DNA, 167 bp, Homo sapiens
aaaactgtcaagaaggaaaatgatttgccacaataataacgacatctatccatggaggacagcagtgatgcatttttaccctgccattcaacttcatcatttctatcaatatgttaaatagaaagtgagttaagtacagaaacttctgagggttacctagcacattc

SEQ ID NO: 127924 - DNA, 445 bp, Homo sapiens
tttcctcatccgtcaagtagggatagcagctacctatctcgtaggcgattatgtagagtaaacaccccggctcactccaacttctccttcaggtctcaggcgtcacatctcagaggtaattcaggccccctgggccaggctgggctccctgctaggtcacccaccctagaatgtatcacactgtaaagggcgggtcaccatcatgtccccgggaccaggcacagcgtcagacagtgacaatgctcagaaaactgctgagtgagtgagaagctgcctcctccatcctcgccagtctccgcctctctggagaggtgttctgcagtgtctggtcaccctgcaaccaccatgcaaggaaccagggctgggctgtcgctgagcaagaacgcctgctctggacctaacctgcagctggttatttagggactcatgtaattccacggttggc

SEQ ID NO: 127925 - DNA, 402 bp, Homo sapiens
tttgtatttttagtagagacggggtttcttcatgttggtcaggctggtctcgaacttccgacctcagttgatccacccgtcttggcctcccaaagtgctgtattagccccattttatatccaaggaaactgaggcttagggagatttaaataggggggaaagtatagcttcatgattacacagtcaggaaatggcagagctgactcttgaattcagaccctgtgatgctgtatccagtgctgattttgttttgccctgtgttcctttcagtgtcaggtaagaagacctcagagatcatcttctccaacccacacattttactgattataaaatccaggtccgcattaactcattggccaaagttaagtggctaaatgactctcctgttcaggaagtattccc

SEQ ID NO: 127926 - DNA, 680 bp, Homo sapiens
gagggtcaatcacctgaggtcaggagttcgagaccagcctgaccaacatggtgaaacctcatctctactaaaaaatacaaaaattagctgggcatggtggcaggcgcctgtaattccagctactcgagagtctgaggcaggagaatggcttgaacccaggaggcggaggttgcagtaagccaagatcacaccattgcactccagcctgggcgacagagcaagactctgtctcgaaaaaaaatatatatatagataagatatactttaagtttgggggttttaagccatgtactaataaaacagacaagaactactgagccaagacctgaaaaggtgagaaacccagggagagaaataagcaaagcactgtcagctacttttgtcctggggttgaaaggccaagaaatagacttggtggcttctacagaatagatctaaaaaagtccaaatctagggttccaacaaaggtaaagaccctgattgagttagaattcagaaaggctatatcctgggagcaaaagtaacccagaattaagtcagttcctttatggtctgcagtccagctttgagtaatcaaggtggcttagaaaatctcaaatcacactaagaaaaggatagttaatcagacaatccctatcaccaggcacctggatgaaagaaatacaaatcctccatgaaat

SEQ ID NO: 127927 - DNA, 413 bp, Homo sapiens
caggcagcacaatcctgcatggaaaagaaagcccccacctgagtttgaatggaagacctttctgtcatcgggaacacctgctgcaccccaggtgctattctagacaccagaaatataacaaataagtctttgaggaagaggtcctgtgttgtgagggaggaaagacaagcacaaatcataatgatacgctttgacgatccctagttctgcatctgagacttgcacagaagcagaaatttaaccaggttaatcaagtgctgtaaatcaagcaacgaagtcagtcatatctagggaagaaaagcgctcttactccaaaggtttttccccactttgatctgcagtatcatgtcatctgaaattgaaaaagcaactttatacagaagcaggaacaaatggctcatttattttaagta

SEQ ID NO: 127928 - DNA, 521 bp, Homo sapiens
atgacaggctgaatagtattccactgcatgtatatattgcattttttaatccatttgtctgtggatcagcacatcgattgtttctacatcttggctgttgtgaataaaactgcaacgaacacaggagtacagacagacatctcttcaacacactgacttcaattcctttggatatacactcagaagtgggattgctagatggcatgctaagtctatttttagttttttttttaggaacctccatactgttttccaaagtgactgtatatatttacaatactactaacagcgtgtgaagttcccttctctcctccacatcctcaccaacgtttattttccatctttttttttttttagacaagatctcactctgtcacccaggctgggagacagtggtgcgatcacagctcactgcagtctcaacctcccgggctcaagcaatcctcccacctcagattcccaagtagctgggactacaggcatgtgccactattcctagctaatttttactttgtgttcta

SEQ ID NO: 127929 - DNA, 578 bp, Homo sapiens
tgcggggaagcgggagtgccaggagagagaaggtggagcttgcctgatggtgcacaaaaggtgcctgagatggagctgttccgcctccctctcatcctgggggtgctgggggcagactgggctgctaaggagatgtgaggaagtgtcttgtccacggctgcacccctttccccatttgggcaggaaagccctttgcctatgcagactcttcaggcttttgagacccttttctttttctgttgtttttctctaccacagactttacccttgtgaaaataccaggccagggatcacttcctgggtgacctgccctgaccttttgcccctatagggaaggtactaagctgctgcataccaaaggcttttgttagcatttagatggtcggtcacaggcaagacgtgatgcctgctctctcagccctggcctgtgctttactgcacccccttctcatcatcctttcatgctctcaaatctcctccataagtttttggacttttgacacggatttttgttccaaactattaggttggtacaaaagtaattgcggtttttgccactttttttttaaatggtcaaa

SEQ ID NO: 127930 - DNA, 500 bp, Homo sapiens
atttaaaaaaatgtttcttatattttttcatgaatcaatagcactccaccaacccacagatttagatgtttaggaataatttcagctgggtacagtggctcatgcctgtaatcccaacactttgggaggccgaggcaggcggatcacgaggtcaggagtttgagtccatcctggacaatatgatgaaaccccgtctctattaaaaatacaaaaattagctgggtttggtggcacgtgcctatagtcccagctactcgggaggctgaggcaggagaatcacttgaacccgggaggcagaggtcgcagtgagccgagatcgagccactgcactccagcctgggcaacagagcaagactccatctcataaataaataaaataattaattaattcatggcctggcaccgtggctcacacatgtattcccagcactttgggaggccaagccgggtggatcacctgaggtcaggagtttgagaccatcctggccaacatggcaaaa

SEQ ID NO: 127931 - DNA, 715 bp, Homo sapiens
cataaataaaattaatagaccactaactaaattagcaaagaaaaaagaagagtcacataaacacaatcagaaaagttaaaggtgtcattacaaatggtataaccaaaatacaaaagatcaccagagactattgtgaccatctgtttatgtacaaactagaaaatctaaaggaaataaattactgaaaacatacaacctcccaaggttgaaccaggaagaaatagaaatcctgaacagaccaataatgagtagtgaaattaaataagtaataaaaaaccctctaacaacatcaaaaaaattccaggaccagatgggttcatagccgaattttaccagacatacaaggaagaactaataccaatctttactaaaactgttccaaaaattgaggaggagggaatccttccttactcattctatgaagccagcatcaccctgatactaaagccaggcaagcatacaacaaaaagagaaaactacagatcaatatcccagaagaacacagatgcaaaaatcctcaacagaacactagcaaactgaatccaatagcacataaaaaagatagtatactgtgatcaggtgggttttattccagggatgcaagattggttcaacacacacaaatcaatcattgtgattcactgcatgaacagaattgaaaacaaaaatcatatgatcatatcaatagatgcagaaaaagcattagataacatcc

SEQ ID NO: 127932 - DNA, 436 bp, Homo sapiens
tatatttatttattttcccttaaattctgaccttaagcttaaaaataagtttgttaatactaacgttgttttcccttgagctagctttgaacctcaaatgaattgcaaactgcgaagtgactgctgtagggctactcttcagtaagctggtccagttatatggtaatgaatccatttataaaaaaaattgtatgtgagctgtttccaaggctattatagtatttctttatcagactatacataattttacgtttgtaacatggtacagttccaactgaataggcagtaattttctttattagagttgcattttagagtggttcattcatcagatttttatcaaatatattcttcgtgtcattcattgtgataggttctggaatatgattaagaaatggtccctgaactccaggggctcacagtctaggaagaaaaa

SEQ ID NO: 127933 - DNA, 525 bp, Homo sapiens
acagtgaaggtgtctgggggttagactaggactaaggagaagggacataatagaaagagaagagagacatcatctagatcagagtttgtcaagctcagcactattttatacaatttacacataactctgtttagaggggcttactcctgtacactgcaggatgtttagcagcattcccggcttctacgcactacattccagtagcatcctccctccagagtcacaatcaaagtctccagacattgccaaatgcttcctagattacaaaatctctccctagtaaaaaccattaatctaggtttatctctaagaaatgaaagggggaaaaaggaagggaaccttttccactgaaataagagaaaagagatgagatggcgtagggagagggggacaaaacagaaggcagggagctctttttagacatcagcgagctcagtcaagtagaaaagaagattatctatttagaaagactgtagggaggactggaagtttaaaacattaggagagttctagaaaaggcattat

SEQ ID NO: 127934 - DNA, 583 bp, Homo sapiens
acaatgaccttctgactcctttccaccagtccacagtgtcctcctcagtctgggctcattgcctcttgcaaggcgtcctttataagtaacaccctccccagaggtcactttcttattgtgacagtgaggcatactgtcaagaacacaaggctgggtgtttcatcctccctttatcacttaattgctctggagtcattaagtaactctgggagcctccggatcatggaaggaagtgactggctgggtggctgacctgtggagggctgctggctgtgtatggaataaaggaggcttctgggggtcggggcagggtctcggtaagcacagggagaatggatttcgcgggggcttggatcacgtgtgtgtgtgtgtgtgtgtgtagtctctccggatgtctgtgtgagcttgccaaatgctaaaaattcttcttcagtgtcggctttcctgagacttctcttgggctgtggcttggagctttgttggggtgtccactaggtcgggctgtgaagctctgtaggatactttggtagttttggtgtgagtcattgattccttagggtgacttggtgtctgaaagagctcg

SEQ ID NO: 127935 - DNA, 518 bp, Homo sapiens
gtggtggcctgggttacaaccctggcctgtccatttcagtagctgggtgactccatgcctttttaaacctcagtttcctgaaatgtaaagtggagataatcctactccctaccttatagtcattgcaaggattacaggaggctggcacttaatcaggggccagtacaagtactgttgttagagctcaaagcaatccacccgccttggcttcccaaagtgctgggattataggcgagagctactgtgcctagcctgcattcttttttttttttttttttttgagagggagtctcgctctgtcacccaggctggagtgcagcagcgccatctcggctcactgcaacctctgcctcccaggttcaagtgattctcctgcctcagcctcctgagtagctgggattacaggcgctcatcaccctgtcaggctaatttttgtatttttagtagagacggagtttcaccatgttagccaggatggtctcgatctcctgaccttgtgatccgcccgcctcggcccc

SEQ ID NO: 127936 - DNA, 309 bp, Homo sapiens
tctcagacaacaggaggcacaggcaagaggctgagaattatgttgggccctgaggagacagccatggctagcagaaagaaacaagcagaacttgcgcagtctgacaaggctatatggtagtaaaatgagagcacaagagaggtcttaagcatacaactgctttccctcccatggtatctgtcaaattctgagctgcgaaggccaaaaagataaactaaaactctgaaaagcagagctcaggatcaaacaaaaattagttcagaagcctccaaggaaatatggtgtagtgagcaaaatcaagcttccaga

SEQ ID NO: 127937 - DNA, 1441 bp, Homo sapiens
  misc_feature (1233)..(1233): n is a, c, g, or t
gtgggacgcgcgcggctgtgagcctgcgggacatgccccccgcgccggctccttgctggcggccatgaagaggcagaacgtgcggactctgtccctcatcgtctgcaccttcacctacctgctggtgggcgccgccgtgttcgacgccctcgagtcggaccacgagatgcgcgaggaggagaaactcaaagccgaggagatccggatcaaggggaagtacaacatcagcagcgaggactaccggcagctggagctggtgatcctgcagtcggaaccgcaccgcgccggcgtccagtggaaattcgccggctccttctactttgcgatcacggtcatcaccaccataggttatgggcacgctgcacctggcaccgatgcgggcaaggccttctgcatgttctacgccgtgctgggcatcccgctgacactggtcatgttccagagcctgggcgagcgcatgaacaccttcgtgcgctacctgctgaagcgcattaagaagtgctgtggcatgcgcaacactgacgtgtctatggagaacatggtgactgtgggcttcttctcctgcatggggacgctgtgcatcggggcggccgccttctcccagtgtgaggagtggagcttcttccacgcctactactactgcttcatcacgttgactaccattgggttcggggactacgtggccctgcagaccaagggtgccctgcagaagaagccgctctacgtggcctttagctttatgtatatcctggtggggctgacggtcatcggggccttcctcaacctggtcgtcctcaggttcttgaccatgaacagtgaggatgagcggcgggatgctgaagagagggcatccctcgccggaaaccgcaacagcatggtcattcacatccctgaggagccgcggcccagccggcccaggtacaaggcggacgtcccggacctgcagtctgtgtgctcctgcacctgctaccgctcgcaggactatggcggccgctcggtggcaccgcagaactccttcagcgccaagcttgccccccactacttccactccatctcttacaagatcgaggagatctcaccaagcacattaaaaaacagcctcttcccatcgcctattagctccatctctcctgggttacacagctttaccgaccaccagaggctgatgaaacgccggaagtccgtttaggtgtggggagggaaatgggacagaaaagtcatttgtcatagttngtgttaatttccattggtccaactcgtcttttcttatttatttattattattattgtcatcattattactttctctccttcctcctttcttggtctcttggtctcattttcccccacctttccagccagacagagcaggccaaagggaaatacaggcccatcctcctctgaaactcacatctgagcatgaagcatggatctcctcctt

SEQ ID NO: 127938 - DNA, 1310 bp, Homo sapiens
gtgggacgcgcgcggctgtgagcctgcgggacatgccccccgcgccggctccttgctggcggccatgaagaggcagaacgtgcggactctgtccctcatcgtctgcaccttcacctacctgctggtgggcgccgccgtgttcgacgccctcgagtcggaccacgagatgcgcgaggaggagaaactcaaagccgaggagatccggatcaaggggaagtacaacatcagcagcgaggactaccggcagctggagctggtgatcctgcagtcggaaccgcaccgcgccggcgtccagtggaaattcgccggctccttctactttgcgatcacggtcatcaccaccataggttatgggcacgctgcacctggcaccgatgcgggcaaggccttctgcatgttctacgccgtgctgggcatcccgctgacactggtcatgttccagagcctgggcgagcgcatgaacaccttcgtgcgctacctgctgaagcgcattaagaagtgctgtggcatgcgcaacactgacgtgtctatggagaacatggtgactgtgggcttcttctcctgcatggggacgctgtgcatcggggcggccgccttctcccagtgtgaggagtggagcttcttccacgcctactactactgcttcatcacgttgactaccattgggttcggggactacgtggccctgcagaccaagggtgccctgcagaagaagccgctctacgtggcctttagctttatgtatatcctggtggggctgacggtcatcggggccttcctcaacctggtcgtcctcaggttcttgaccatgaacagtgaggatgagcggcgggatgctgaagagagggcatccctcgccggaaaccgcaacagcatggtcattcacatccctgaggagccgcggcccagccggcccaggtacaaggcggacgtcccggacctgcagtctgtgtgctcctgcacctgctaccgctcgcaggactatggcggccgctcggtggcaccgcagaactccttcagcgccaagcttgccccccactacttccactccatctcttacaagatcgaggagatctcaccaagcacattaaaaaacagcctcttcccatcgcctattagctccatctctcctgggttacacagctttaccgaccaccagaggctgatgaaacgccggaagtccgtttaggggaactaactgcacattcaagagaggcgtccgtggatgctgggtctcactgccaaagccgaacacggcttcgggatttctgccttctcaagtggacctctgctgtgctgggcgaatgctc

SEQ ID NO: 127939 - DNA, 802 bp, Homo sapiens
ccttctgattaagcaacaaattcttacccagtaattatgtataattttattaaaacttagttttgctttgttaataagtaaactatctagtagtaagctcgtctgacaatattatttacaatattgttggagaacaagaaacccaaaatgcaacaggactaaaactgaaaaggtttaactctttatttttatttttttatttttaaaatgagacggggtcttgctatgttggcagactggtctcaaactcctgagctcaaccaattctcctgccttggcctcccaaagtgctgggatttcaggcatgagccgccacacccggtgaaagggtttaaactctttctaaatcaccttgtgcagagaagatgaatacgtttttcacttgttggaagggtaattgatttagtaaatggtgttctcatttgccaaagttaatgtttgtcttgggagggggggcagtttattcccaaatatagagggtcagccccactatgtattgaggtttaaaaaacccaccttttaaaatgaatagttgtgctttttttagtgtgttttgagcctgaggtctgtcaagtgtttctgagggttcacacttgaattattgtgcttgaggtcagtgattcataagaggtcagcctcttatgaagcaaccaccttctaatgattgattgaatgatacatgatgtgcttctaaagtgctttctggtcagcattttattttctaaagtaaattttattttttacttttttttttaaaccctttgataacaggccttgagaagagtggaaaccactggctggg

SEQ ID NO: 127940 - DNA, 241 bp, Homo sapiens
gagaataagacaggagtgctgctggagagaccctttactttgctgagtagggaggatgacagagtctcaaaggaacaataaaagtcataaccaaataataaattataatcaaatatacctgtgactgttccaagtcaactcatcaacctagtactctaaaaagtgactctcctaatgaaaatcctcttactgtagaaaaagttgatatcatgacactggcactgagtaccagcaaaagaga

SEQ ID NO: 127941 - DNA, 725 bp, Homo sapiens
ccctaatataagacctaatataattaaataagaatcttaatttggatttgtaccacaaatttaattgaataaactgacttttcaaaaacttatttggtaattatgtatttaaatcaactaaatgaaaaacaaagaggagaaaagtcactgagcaagatgcagaattcctaatttttctttcatgttattcttcgtattttaccacctgacttagctaaataaagccagatattgtctgagctttcattcttaaggcatcatgttataaacagagtgaccttagagctcagtatgtctgcacagtcctggtgttttcctgtaattatcaatagctcctcctttcactttcataagtgtcctggcttggatgacaaagtcatggttacctattaaaatatgtgatcaagtaaatattggaagaaatgtttgagtaatacatacggttttaaatttctcaaaacctacatagtactatgtaaaataattagtgtgatttagtgttaaggtctttggttcttgattcatataattccttttttaacttggaaatgagaccattttcttgttgctcagatcaagaaataatctcagataactcaagtgtgatcattcaattctaatacttgaaaagaagatgatttttctcatgccttgatagatggtgatagaatacattgctgaattgtcctagtggcactctataaaacaggtaatgtagtggggtg

SEQ ID NO: 127942 - DNA, 838 bp, Homo sapiens
caagctgctttccacagtgactgacctcatttacatttcaaccaccagcatataagcatttccttttccctacagctgcaccagcatgttattttttgactttttaataatagtcattctgactggtgtgaggtgatatctcactgtgattttgatttgcatttctctaatgattagagatgttgaacattttttcatatgcttattggccgtgtgtatgtcttcttttgagaagtgtctgttcatgttcctttgtccatcttttaataggattgtttgttttttgcttgctgatttgataacaagatttttatgttggtatttataagttgaacaccaagatattgctaaataggctagtccctcaatctggcatgttagaaactgcgtaaattaggactcagaggaccacctggttttagtttctactttgccactccctacctatatcactagacctaaatttcctgaacagtaaaaacaaggatgttgccctgaataagctataatttacttttcatctcagatattctttaattttggaacccatgcaaaatatctggttaaatttaattaggagttaagaaggtgaggattttgcagaacaggtgtctcagatctttactgtatttattatggtttcatagtctagtagccccaagatgttctgtttctacaacttctctgtaaatggcactggcaaagtcttttaacagtgttttagaaactttttttctgacctggcacggtggctcacgcctgtaatcccagcaccttgggaggccgagacaggtggattggaattcaagaccagcctggccaacatggtgaaaccccg

SEQ ID NO: 127943 - DNA, 281 bp, Homo sapiens
ctattttctgtctggatgatctgtctgttattgaaaatggataatcaagtccctactattattgcactgctgtctattttctgtctggatgatctgtctgttattgaaaatggataatcaagtccctactattattgcactgctgtctatttcttccctcttttctgttaatatttgctttctgtttaggtgccccaatattgggtggatatatatttataattgttatatcctcatgatgaattagcccttttatcattatatagtgacattcctttttt

SEQ ID NO: 127944 - DNA, 454 bp, Homo sapiens
atggctcctcttctcagaaaaatgtacattgcacatacggatataatctgtaaaacttcaggagctttagacccccaaaagccccagcttaagaattcttgctgaagacaaatcactccttttcttactcaagagctgttttccagggctgattaactaccatcttagatgtccaacaggtgagtgaatattcagcactgaactctagtcatcccatgccattggcagatggctgggtctctgctgttgcctgaagccagaaggaagcaaagcccctagaccgagaccacattttgtttttcaaaggagcactctactccacccccaccagaaaacctcagacaccccaggcctggaacacagacacaaagtgacaagacagaaataaatctggtgcagtatacaactacatctgtgaagacagccatagactgggctcttcttgggctggcag

SEQ ID NO: 127945 - DNA, 921 bp, Homo sapiens
gatggttcatagcctccctcttttctcctcactaacacttgtcttttccaccatatgcacgaaaagacatatttgttcctgaggaaattagaaagggagggcctgagttggttgctattcctgaaagtttctttgaatggaatactggatcatcgtttttgaagaggtctgttgttacttcattattacctcctttagcagcacccttgttttcctccaacctctgccaagattagtgtcctgtgtctacatttgccccttctgtttctcatactcccagatggaaatattatatttcttaggacttttcgctctatttgaattagtattttctactcgaaacccttcagaaatcctgaaatccattcttatgctttctgtgtgagttggttttatgtttgttaataatgtttcaacagaatgatagtggacatgatagcaaaagggaaattgatactaatatgtaacgaagaaatcgtatgtgaaattgtgaagaaaatgaacgatatttttattgagtactttgaaggtacttgtcataaactaacaatgctaatgatttctagaggagttatatactacactgtatataaagaaccttggagattggttggcataaaaagaacttcacagttcatttcttttatctgtttacattcttttctctagaggcaaatgttctttaatcagttttcctttgattctctttcagagaggctcatgtagtgggatcaacaatcatatcactgttgtggcattgtatatatgttaactattgattttgcattcttttagattataatatttaatctcttggtctgaaggtagatatattcctgttttctcaagctgtttcttagacctttattgtccagtatggtacccactagccatatgggactactgagcacaggaaatgtg

SEQ ID NO: 127946 - DNA, 405 bp, Homo sapiens
ggtcaagggctgcctgagtcctgcaaggcccaaggcaagcacggactgtgccaggtgcactgagtgggggcctccagtgggcgacgcagagcccagagctttccctggcagtgatggccacggggccgccacgtggcacagcctctcctgagggcttgagcccccaccgggaggcaccctcgcaggcgggcgcacagcccatggggccttggcactgtggggagggtgcacaggcaagtccggctctggcgtgtctgctccagagcctcactcacctgcagctcctggaggctgtggctgttggctgcagtgacttgattgcttgttaattgctcattaattgggtaattagtgctttgttgtgctttgaagcctaaatactcataaaaactgaatttgctgagt

SEQ ID NO: 127947 - DNA, 630 bp, Homo sapiens
ctcctgaaccagcaaacggagaaacaaatcgtactctggctactcctccctcccgagggctcttacctgatcacactagctgcctgctcctcctcactcagaccttatcgggatgacaccacttcacatatcccattttattctcctcatggcactttccaccatctaaacgctccatttctgtacctgtgcatccccttcaggtctggcttccccctctacgccctcccattaaaatgtaaattccttgggagcagacgttcaatcgatcccacctcagtacagcatcctccagtgcctacaacactgcctggcacacagtaaacgctcaagaaatattttttggactgtctgaataaagcatataagcaccaaaggagcaaaaatgcacaatgtagaatgaaaagtgcagcccagcagtggttgggactgagctagaatctcacctacttcctattccaaggaaacattttctgaacactcagaattcagaaaaggcaccttccctccaaacccttagcatatctacatctacactgattatgaagctctctgggttgcttattgttgcttgtttccccagctacatcctgagtcccttgagattaaggtcagattttgcagcatata

SEQ ID NO: 127948 - DNA, 141 bp, Homo sapiens
agagcaaccaagtctgagtctataatcttaaaaatcaaatttatatgaaaacaagccaccagtctgggcaacagagcgagactctgtctcaacaacaacaaaaatctctatccagacaagacaaaataaaattcacagtct

SEQ ID NO: 127949 - DNA, 308 bp, Homo sapiens
acactttgtaaggatatagctgccatatatatggtgattctgatggatttggtcagagtaaattgaaaggcttttgaaaagaatttaccattctagaaaccattaagaacattggtgattcatgggaggagattaaaatatcaacattaataggagtttggaagaagttgattccaaccctcagtggatgactttgtgaggttcaagacttcagcggaggaaataactgcagatgtgatggaaatagcaagagaactagaattagaagtgcagcctgatgatgcgactgagttgctgtaacctcatga

SEQ ID NO: 127950 - DNA, 440 bp, Homo sapiens
actggtctcttagagtggggccggttaatgtcctgagtgctgtttatgcttcttggtctaagcatgcagagacagtgccagagatgagcacgcttgccttccattcccgtgggaggcccttaggagaagcttctaatgagaagtgccgggtctcccgccttctatctctaagaccttcaggagtttccttctcctatctgagcctcggtttcctcatctgcagcacgggacacagtagtgcctgctttgcagggctcagtaaaaagaccatagagcccacagagagagcgtcccccacagagagagcgtcaccccacagagagagcgtcaccccacagagagagcgtcaccccacagagagagcgtcaccccacagagagagcgtcaccccacagagagagcgtcatatcccccacagagagagcgtcgggtaccgagct

SEQ ID NO: 127951 - DNA, 1298 bp, Homo sapiens
agcatttgctactgctggtatggctttaggtgagtacttctctgagcctcaatatcctcaatggttaaatggagaagctatctcactgggttgctgtaaaagataaacaagattacaaatgtatagtgcttagctgcagttgctgacacatagtaagcaccccattgttattgttattgttagcaaaataagactccatggtagaaaaactatgcaagtcataaaatgtatcagcattaacttttatcaacagatagggtgctattaaatgtatcaccaacatagtaaaatgacagaaaggaatattacagtgtgaaagcatttatttatttgtttgacaacagctacaattgaaatacagcaattctgaaggtctttaaatgggttgcactttgccctgttaactcactatttcctgattggcaataattttacttggtaatgctctgtattatggtaaaagctaacaataataatttatcgagtatattctttgtagcaggcacagttatgagtgctatgtgaatacatttaatcttcacagcaactttgaagtaggtactattactgtgcatattttgaagatgggaaaactgaggcagacagtttgcctctgggagccctcactcttaaactcttatgatatataccagaaactgtgacatagcccaggtgccaaatctggccctccacctgcttttgtaaataaagttttattggaatacacccatgcccactcatttacacattgtctatagccatttcggtgctatagcttcagggtggagtagttgctacagagaccacgtggcccacaaaccttaaaacacctactgtttggcactttgcagaaaaagtttgctaacccctgatgtcaactttaaacttcacaaaaagactggagtttaaagggaaagaaataatatcttataataaaaatgccttatgtttggtatttactgtggatttgtacatatttatcttacttaattctcatagcaatcctgtgaagtaagtagtctttttatttccattttagaaatgaagaatcaggagttcagagggattaaatgacttacactctaggctgaagagcaaactccatgagtgtagggatcatgtgtcttcatcatcatgtccctgtcacctaccacgatgctagcacagggtggacactcagaaaatacttgctaaatgaatgacagttacaaaggtcacccagctagagaatccaggtcttctcctcttccagggttctttctcctgactccacagctgtctgacagttaaaaaaaaaa

SEQ ID NO: 127952 - DNA, 838 bp, Homo sapiens
atcttgattaaaaatcaatcaataaaaaaccttattatacttccaaactaaatttataagtctttttgaaaaacagcaaatattggataatagatcctctgactctagatattgcacctgctttaaattagattatcttttgagaagtgaccttgaaaaacaatgattaagtgggtaagtttgactttttagactattagacgtgactgtattctccctcaaaaacctttataaggcagaaatatatatggcatctgattctcttttctttagatggagtttacgatttttgaagtttggctttgacaacaaatgacaatgaaatcatggctatttgatatttagttacaattcatccaatatttattgagcactttctgtcttctgttttgatacaggaaggttataaaaagtataagacaccacttatttcctctgggatcttaaaatctaattatggaaagaagctatgtgggaaaaaataatggagattttgacaaaagatcaagacaagaattaaagagacatcacatgtctatgtatgattagttaacaaattcattttcagacaacaactatgcttggaagttcaggaatgagactggactcttctttgttcatttcttacttttctcctattgacctctcacatgctgacatctccattgtcttctcttcctatgctttgtggctttgttattaaattaagtgttaatttttttttttttcttagacggagtcttgctctgtctcccaggctacagtacaatggtgcaatctcggctcactgcaacctctgcttcccaggttcaagcgattctcgtgcctcaacctcccg

SEQ ID NO: 127953 - DNA, 652 bp, Homo sapiens
  misc_feature (652)..(652): n is a, c, g, or t
agtggaacagtcaatgaagcacaggatccttctgtccccaaggtcctgaacaactgcagaaaccttgtgcccgtgcattcatccctccttcttggatcctttacctgttgatctccttcgttttctttccagacaacaattatggacaacttattattaatatatgtgagccactgtgttcactatcggaaataaaaatatgcttataaggtagtcccaaatcttttttttttttttttttttttttggggggaaggggtttttaaaaaaaaaaaaaaaaaaaaaaaaccatgcggggtggcggggcgccccacggcgccccgaaggaaaaagtttttaaacaaacccaccgtggtggggggcgggggcgggccacacagaatgatagtagtagtgagaacaatgtgtgcgaccaacgagagggcggttcccagaaaagagaaacagcgcggggaaaaagaagaagagaggtgcggggggtctcccccaacacataaagaaaaagccgcggcggcggggaacaaggcgggtggtctgggaagcagcacaacacagaagaggaagtcagaggaggacaacaaggggggacatcaaccaaggaggaacaccagcagagaaggggaaataaaaaacccgcgcgcgcgggggggan

SEQ ID NO: 127954 - DNA, 873 bp, Homo sapiens
acactacaacatttcattaaaaattatggcagctttattgatagtcacaaaaacatgaaaatgaccagtgcatagataaacaggggtacatccatacaatggaataataattagcaatacaagaaataaactattgatttgtgcaacaacattaattcatctaaaatgcattgtgctaagtaaaaagaaaagccagacttagaaaagctgcatattatatgattttcttcatatgacaccttagaaaaaaaattatggaaattgaaaacagattagtgcttgccaagggctgtgggataggggtagaggttgactagaagaaagcagcacgaaggaattttggatgtgatggaaatgttttatatggaacattggtggtggatacatgattctaagcatttgttgaaagttataggattgtataccagaaagactacaattttctatgcataaagttttaaaaagtcaaattgaaaatatatggaggaggctgggcatggtggctcacatctgtaatcccaggattttgggaggctgagtcaggatgatttcttgagctcaggatttcaagaccagcctgggcagcacagcaagaccctgtttctacaaaagtagatttatttaagaaaataaaatatatgcaaggatagcatttggaccactacaaaatgtacagaaaagtgactatgatcaataataatatatagtattcttgaaaaatgtaaacagagtggatgttactctgaccacaaaatgataaccaagtgaggtaatatattttttaattagccaaaattaaccatttcacaatgtatatgtactttaaaacaccatgttgttcatgataacatttcttgaaatttattctcctga

SEQ ID NO: 127955 - DNA, 342 bp, Homo sapiens
ctttcagttaatgataccgcttactatattcaacaaatatttgttagcccttactgtgtcagaatctattctaggtagcagtataaaggaggcagataagttctctcatcacagagctaacattccagagggaagaaatagacaataaatgagcactttaaaaatagaataaggccaggcgcggtggctcacgcctgtaatcccaacactttgggaggccgaggcgggcggatctcaaggtcaggggttcaagaccagcctgactaacatggtgaaaccccgtctctactaaaaatacaaaaattagccgggcatggtggtgtgcactggtaatctcagcta

SEQ ID NO: 127956 - DNA, 446 bp, Homo sapiens
gataggcctgaacccatgagtcatcaacaactaaatgataattgaaagaatggacaggagtaagagggtccagggcattatacactgagaaaataggccttaatatttaagtgttgttgagaagaaagagctagaaaaggagactcagaagtcgtggtctgggaagtaggagggaaactagtagaatgtgacatcacagagtccaagagaaaatactattttgaaaacagatgttcagttctgtcaagtgctgctgctagaagttgtatatggactctctttagcatcttacaacatggaggtcatggatgactttatggagggtacttcagtagagtaataggatagaatccaaattggttttgattgaagaagagagggtggaaaggaaataaagattagttcaaggtctttaagcagttaggggaaggtggcattcacgaaga

SEQ ID NO: 127957 - DNA, 473 bp, Homo sapiens
ttccacctgacctcacttttcccactgccacctgcccgcccactctaaaggtgctgtccgagctccacagcacacccactgcagggatactcccacttgggagcacacttctgtgtccctgctcttcaaacccaaatgacctcccttctctttcttaggatcactgttttcctgagtattgtattatctttaggaaagtacagtgcttatgaaatgacacttcttagaaagacatgtgtcagctgggaagggtgacatgaaatcttcaaaattatcaaaatcagtctaaaataagcagagctgtgcttctagataaggccgaaaatgactactccataggtgtcaacagtctccaaatataatctacagcacaagtagcctcaggggtatgaagaatatgtctgtgaactcatgtcaacccactctcatgtctgtgtaaaacctgaaaaactaaatacatacacgggaggtac

SEQ ID NO: 127958 - DNA, 474 bp, Homo sapiens
caagaggctggatgtgcaaggcaagtgtactggcaagtgtaccagcaagaatgaggcagtgtgattccttcatcaaaaaacaggtggggccaggagtggtggctcacgcctataatcttagcactttgggaggccgagatgggtggattacccgaggtcaggagttggagaccagtctggccatcatggtgaaaccctgtctctactaaaaatcaaaaatcagctgggtgtggtggtgcacgccggtaatcccagctactcaggtggctgaggcatgagaatcacttgaatctgggaggcagaggttgcagtgagccgagatagcgctactgcactttggcctcgcgacagagcaaactccatctcaagaaaaaaaaaaatacaggtgggtctaagaaatttccattctattccccgcctgtccctctctgtctttgttacaggatacctcatcaaatgaaaacacaatgatga

SEQ ID NO: 127959 - DNA, 162 bp, Homo sapiens
ccaaaacctgtctcaaaaccaaaaccaaacacaaacaacaacaaccaaaactacacaatcatcttgtcactttctccttccaaaatctctaaatgattttctgtgccaggaatggtggctcatgcctataatcccagcactttgggaggctcaggcgggtgg

SEQ ID NO: 127960 - DNA, 542 bp, Homo sapiens
tttgctgctctccctccctctcatagcccagaccgtggaacgccttcaatcagttatttggcttggaggtggcagtgacagagcttcacagaaaatgttttttctcagttggaagtctgacactctaagaaataaagtgctgtgtgacagacccttaaccaaggaagagtccagaggacttcatgatgactcagaagcatatggacaggtacctcctcacaccaggagacctgtctgtacaatagtgagacaagtggagaatttctgcgcctacgtttttcccatttcaaaaagagtctggcattgattacattctgtgatcgaaaagagttttgtgtatgttcttgtccttgtcaggatcacagataattcattctgcagagaggcggtgactgtgtgcataaactgggtcctgttggtataatcatgtgcctcacctgttttgaccctatcagaatgctaaagatgcaaattaactctgaaggacacatctagacaatgaaaaaaaaattatgcttgcagacggtcagtgtaacattggg

SEQ ID NO: 127961 - DNA, 503 bp, Homo sapiens
atggcccctctccctttctgagcctccatttcctggcctgctctatgagcacgtggacctggcccctcgttatccttgtcacgatactttcagtagttcctccctcggccagcccagccacatggcttttgactgtttttcccactacggcatctggggcgcagtaggtgctcagctaaatcttgttggagaagcccaggagtgcaccactgagtggctgtcccgggctttcccactcccggcctcttgcttgtgtagccccctttgccaagaatgtggcccccattcatctctacttgtggaaatccttgtcctcgaagcccttcgcaaatgctgcctcccctaggaagcctttcccagtttctcccagccagaggagatgctggtccttggaacacttgctctgaggctctctggtggtccctgttacagtgcactgccgtgtccatagtaacagatgaatggcaaacagggactgtgcacttgctaggagccaggcacag

SEQ ID NO: 127962 - DNA, 362 bp, Homo sapiens
tgctgggattacaggcatgagccaccacacccagtctcagttttcaaacagttcttattcttcactggagtcaaaaaagagaatagaggaaaagacaatcatattgttcctttaagagttaagaccaacaagttttcctctttacatgttgtttttgacatgagcaaactggtgattaaaaacaacttgggtggctcatacttgtaatcccagcaccttgggaagctgaggtgggagaatagcttgaggccaggagttcaagccagggcaacatagtgagaccccatctctacaaaagatacaaaaattagccaggcgtggtggtacacctgtagtcccagctgctctggaggctgagatgg

SEQ ID NO: 127963 - DNA, 401 bp, Homo sapiens
  misc_feature (7)..(7): n is a, c, g, or t
tccgganccccggacgaccagctattcctgaggagagtgggccctcatagggcctggctcagccagcccatttataggcctggttggagaccagccagacattttcagaagcagcacattatatgattgcaaaggtacccaatgtctgacttgtgagccagtaatatgaacccacttttattttattttttttgagacggagtttcactcttgttgcccaggctggagtgccatggtgcgatcttggctcactgcaacctctgcctcccaggttcaagcgattctcctgcttcagcctcccgagtagctgggattaaaggcacccgccaccacgcctggctaatttctttgtatttttagtagagacggggtttcaccatgttggccaggctggtctcgaa

SEQ ID NO: 127964 - DNA, 525 bp, Homo sapiens
tcaacgctttatacttcatttctttcattaatatttaacagttttcaatgtacagatctttcaccttcttggtatacctaggtatgttattttatttcatttaattttttttttttttttttgagacagggtcttgctctgttgcccaggctggagtgcagtggtgcaatctcggctcactgcaacctctgcctcccgggttcaagagattctcctgcctcagcctcccgagtagctgggactacaggcacgcaccaccatgccaggctaatttttgtatttgtagtagagatggggtttcaccatgttggccaggttggtctccaactcctgacctcgagttatctgctcacctccgcctcccaaagtgctgggattacaggcgtgagccaccgcacctggcaagtgtagaatttttgtatgcaattgaagttgagttgttaccagtttaaacagaatgttttgttttatgtaaggtccatggtaaccccaaagaacctacctttagtagaaacacagaagata

SEQ ID NO: 127965 - DNA, 679 bp, Homo sapiens
taaagaagctgaaaaggtaagttacaaattggaggaatctgtttacaatccacacaactaacagagcatttgagtaaaaaatatatcagtaactataatcagtgagaacatcacaacaagtcagaagaaaaagtagcaggagaatggatgagcatgtcgtagaagagcgaacacacaggttcagcacatgtgtgcagaaatgttcaacagcatgggggtcatggagatgccaatgaagacaattagttaccattttatgccttttccatcagcagaagttaagcctgacaatgccaagtcttgatgaacatgtggacccacaggatccttttacatagttggtgggaatgtaagcggacgtcccctgggaggcattgccttctatagttacatgttcatgtaccctggaacccagcagccccactcctgtactcagagtaaccttgcctgtgtgcacgtgaatatgagcatggatatgaatattcattgcagcactatgcacaatatcaaaaacctggaagcaacccaaatgcccagcacagagagagtgaactaacaaaccctgtgttattatacaagagtcagaaccaatgaattatagcaatgcagaaaagcacaaattagttttaagtgaaaagttgaaaagtaagtccgataaattaacattcaccatttgttt

SEQ ID NO: 127966 - DNA, 568 bp, Homo sapiens
agagctgggactacaggtgcacaccactacacctggctaatttttctatttttagtagagatggggtttcaccatattggtcaggctggtctcgaactcctggccacaagtgagcctcccgccttggcctccctaagtgttgggattataggtgtgagccagcagccatacccctcttctcaatcttccttctcccctggaaaacctgctcacttctgaccccaagacagccccctccccttccctctgtcttctgtgtttggcagaccagccccagcgaggacttgttggttgtggtttttctatcagggaagtcaatggctggccagtgtagtgtgaagtcccagcttggcagagacttgcccaaggctggataggaggcttctttgccgctcaggctttatcagtcaggaaatccttagccctccctagaggattggctgtcccctctatcctcactgcttgaatttggtgttgcatgattgatttctaccctgttccctctgcttgagggctatcctccccatgcccatctcacttctccaccaagttcactgttcatcattta

SEQ ID NO: 127967 - DNA, 511 bp, Homo sapiens
cagacgaagtctcgctatgttgcccaggctggtctcgaactcctggccacaagtgagcctcccgccttggcctccctaagtgttgggattataggtgtgagccagcagccatacccctcttctcaatcttccttctcccctggaaaacctgctcacttctgaccccaagacagccccctccccttccctctgtcttctgtgtttggcagaccagccccagcgaggacttgttggttgtggtttttctatcagggaagtcaatggctggccagtgtagtgtgaagtcccagcttggcagagacttgcccaaggctggataggaggcttctttgccgctcaggctttatcagtcaggaaatccttagccctccctagaggattggctgtcccctctatcctcactgcttgaatttggtgttgcatgattgatttctaccctgttccctctgcttgagggctatcctccccatgcccatctcacttctccaccaagttcactgttcatcattta

SEQ ID NO: 127968 - DNA, 849 bp, Homo sapiens
actgcgctacaggccgcctgtaatttacatatgttttaacgctaacattgggaagcattgggcctttctgaagcctttttgtttcgttttgtttgaagctcccctccccccagtaatgagcctcagtttggtcctaagggctgggtcgccggatcgtagacccaaatccttgcaaaatgaacgactccctcccctcaaagaggagggagttgtgttgttgttttgttttgttttgtttttccgcccgttttcttttaacggccccgcagccctctgtgtggccttgttccctgtgaataattgcctcactgttcttcctgggggcttgcgtttgtgagactcaaggtgctagcctcttcactttccatttcccagacaggaaattaagctttcctctccattcgaactttttaaaaaaagcctgaggaggtatatgtgaaaattaaccccgtaaaatagcactttttttttttaattaaccacaacctttagttagcctagcagtagcgttttttaagggtggtcctggaaaaattactgtttggggtttgtttttaatgggggctacttttccctttctgagcctcagtttactgctctgttaaataaggggcgagtctggatgatctataccagacagtgatcgttagctctgtaatgtcttcaattgaaaagtgaagttatgaaactggctgtagttcaggctacctgctgtaggcagactaggttggaatagaagcagcgttggaacaggcgggaaatagccatcccaggaccacattcttgggggttatacttgatattaggcaattttggaacattcatttcacctcttagggactgtattgc

SEQ ID NO: 127969 - DNA, 819 bp, Homo sapiens
agtcttagcatcttattcattcggtcttataggatattaaccagtttcgtctctaacctattgctcctagttaacactccattgttaaatttcctatataaatcctgttcttcaaatgcttcttgaaccagtcttaatattcattcagtcttaagataaatgattaattcattagtaaatgaacagaataaatctttggtatatcttcaattggtatttacatgagtcagattaactttttgaaaattatacttttaacagctctcgctgaactctagcttccttctgatatttgctcaaatgctactcttgtggaggcttttcttaatcgtgctgtataaaataaggccctttgtacttgctcagcatcccctagccctttttatttttttcttttccataccgcttattcctacctgttattttattttgatttgtttattttctgtcttttctccactacagtgtaaattccttgagattaaggagttttccttcccagtagtacttggcatatagtgcatgttcaatgaatactgttggatgaattgaatagatgaactaatatcatgcaccctgctccccaaggactaattacattgtgtatagccacacttactgacctcatccttggaactatggtgctgattaaaaggcatagtactgaataatgagataactttgtgtttctttgtctccactgaatgacttattctggaccctttagtgagacatacatctttgagagttcagtttttccatctataaatgggaacagtaacatatcagagagactacgtgagacttaacgtatatcac

SEQ ID NO: 127970 - DNA, 278 bp, Homo sapiens
ctgaggctgaggcccagaggggttcagtggctcctccaagctccaagtgagctccaagtgaccacagaggtcaggcccagaccccacatcatggatggggagggggtgcagtggtgggaacaagctgactccccaaaacacctgaggttgagagtgaggaggtggagtttgaattctagctgcccctcacttgctgtgtgacctgggcaagcacatccccctctctgggccttagctgaaccagtcacccacccattcttgcccccttcaaccaaagc

SEQ ID NO: 127971 - DNA, 212 bp, Homo sapiens
tttctgtttctgcattaattaactttgggataatggcctccagctgtaaccaggttgttgcaaaaggtaagatttcattctttttaatggctatgtagtattctgtggtatatatgtacagcactttcttcatccaattcactgctaatggacatctaaggacatctaaggtgtccatgtttttgctactgtgtatagtgttacaatgaaca

SEQ ID NO: 127972 - DNA, 493 bp, Homo sapiens
ccccgtgatccaatcactttctaccaggctccacttccaacagtgggaatcacatttcaacatgagatttggagggtacaaacatccaaaccatatcagtacagaaggagcttatttagtaaaaccaccagaaacaagaacagcagtttcccctctcacctacctcccacaaaccctcctataaaatatctcagagaccagagattataacaactttgaataaaaggctacaaaacccaaaataatggtaacttaattgttttgaaaagctttgttataacttgcacaaatattctaaatgcctttacgtgaatgaacttaaaaatgtatattgatatcacactagttcctttaaaaaacaaaaaagaaagaaagaaacaagagaatatggactccatttcttctctagtgcagagttctttcttccttggcatgcaaagtacttccagtacagaactggtcacactgtatttctaaatatttgtttatctat

SEQ ID NO: 127973 - DNA, 772 bp, Homo sapiens
cagcgaaagcctgcaccttgttcttctcttgaacagaaatacagagctggtctcccgtggcttttaatgaatatgagtggggctttccaatgtccaggaatttgatctctaggctgaccaaagggtcaggaacaaagaacacattttttcacgttagagtggacccaggtgtaatttgtcagatttagtaactgtggaggaagtgccttaacttctccagcaggaaaattagatcaggcctaggcagtgcaattctaaaatggctgaaataggaagagaaagtctgttgagttgcattttcaaaggaagtgtgagcaggatttgttttcccttcctctcttcccctcatttcctatcataaccatgttgaattcattcattcatttagatgtaattttctcagcatttttcaaagtgggagttgatttcactctctgcagcatttctaattgtgtttgcacacaaatagctacaaggttgctcacatttcccttgttctgatcagtgcaatagtactttatgtttactctgtcaggaaagcgtcagatgtttttatttccaattataagttttgtaatgcatcatgtattttgctgacagtcttcaagttcttgaaatagtgaacaaattaacagcagatattgagtgagaggattagaaaaccaactggcaactcatatgatagaattcagatacagggatgggtggaatgggctcatttattttattttctcagtcatactttgtaattaacttaggcaaaaaaaaaaaa

SEQ ID NO: 127974 - DNA, 190 bp, Homo sapiens
ggaatgggcataaggtgtttgtgggtggtatcagatttttggaagggaaggatgatgagattggatcggggcaggttcagcatgagagatcatcaaagccacatgaccaagaaatgcttgaaaatcatccccagtccctgtggcccacatttacctctgcccttgagacagaggcagagtagccaacagt

SEQ ID NO: 127975 - DNA, 297 bp, Homo sapiens
gatgattatgataaatttaatgaggattattatgaggattttaacacattcacatggctcactgttccctctccttcctcgcaatatagtgataatgcaatttttgggtaaatccacattcactttattattaggcttaactgaagaactgcaatttcatgtgcctttcagagtcagtcttaagctattcaccatgaccaatgtggaaactggtgtcaccaaaaatgtggaagtctttcaggaggaatacacttatctttgaggtcaagagacacagaaaaattaagtgtgaatata

SEQ ID NO: 127976 - DNA, 265 bp, Homo sapiens
tggctagcatgtggcaggcactacgtatcatattgcctcattgattctcataacaactctatgggttgaatatgattattactccatttaacaactgaggaaactaaggcccaaaaacatcaagtaatttgcccagggtcttcagctagaaagtgacaaagccaagttgcctggatctaccatttctgttctttattaaaatgggaaggtcaccagaagagtagagtttacacacacacatacacacacacacatgcacacgcat

SEQ ID NO: 127977 - DNA, 318 bp, Homo sapiens
cttaaacctgctagaccaaaatgcaatttgatatagtagtagctatttttttctctttctcttgtttttctctctttttaaagaaaaaaaattgaatgattattctttaccttattataagataaatagcatctaatatagcaaatacaggaatgcatttgtaaagtctgattccacatcagttgtttacaacattatttgaacattttggctattgtctcatgacccatgttagaatgggttggagtgtttcaaatctaatacacagtgagctcttctttaaactctaatgaagctgggctggtcacctatttggga

SEQ ID NO: 127978 - DNA, 1762 bp, Homo sapiens
caaaatagcaagcaaaggaattgtatatgtgcctatgttctttttttctgggaaggagaatctgcagctttataatttcaacatcggctaaattgtcgtgaacctaaaacaatcaaaagggccggaatctatttaaagagtttattcaagggcagtgtgaggatggaccaaccagaaaacctccaaagaatggagtcagccttcagaagtagagaagttacgatttcatttatttagggagacagaggagtttttagctggattacgttatccatacaaggttggaacataattacagaatttggttacaagaagtgtttttttttggggggggggcgggggtacagctaacattgttttacgaagagtttaacacgcatgagttgctgtcatctggtgacatcgtttgagtctctctagtcattgaacagaacaagaaaaatcgaattaaatttataatctgaactgaagttatatgtgacccatcacatctctcaagttttaaaatgggtttttttgttgttgttgatggggggggagagggtccagcagcttttaaatgttttcacatcgtgtgttccaaaaataactggttagcctaagtcacttccaccctccaatgttgtgaatgcagtctctagcattcgctatttaatgtcttcttcctgcactatttgagaaatcgcgaggtcgacttaataccgcagtcgccacttcgcggaccggaggcggagtctgcttagttctgaggactgcgtgggtccgcgcagagagctcctgctaggcctgcgcgtcccgttctaaattcttaccctttagttcttgtcaccacccccgccgtgggaacggcctgacagtcactcgtcaaaggaagtggctgccggcagctcttgacccggaatcggatcctagtcccaccccctccgctccaggcttccttctgcaacaggcgtgggtcacgctctcgctcggtctttctgccgccatcttggttccgcgttccctgcacaaaatgcccggcgaagccacagaaaccgtccctgctacagagcaggagttgccgcagccccaggctgagacagggtctggaacagaatctgacagtgatgaatcagtaccagagcttgaagaacaggattccacccaggcaaccacacaacaagcccagctggcggcagcagctgaaatcgatgaagaaccagtcagtaaagcaaaacagagtcggagtgaaaagaaggcacggaaggctatgtccaaactgggtcttcggcaggttacaggagttactagagtcactatccggaaatctaagaatatcctctttgtcatcacaaaaccagatgtctacaagagccctgcttcagatacttacatagtttttggggaagccaagatcgaagatttatcccagcaagcacaactagcagctgctgagaaattcaaagttcaaggtgaagctgtctcaaacattcaagaaaacacacagactccaactgtacaagaggagagtgaagaggaagaggtcgatgaaacaggtgtagaagttaaggacatagaattggtcatgtcacaagcaaatgtgtcgagagcaaaggcagtccgagccctgaagaacaacagtaatgatattgtaaatgcgattatggaattaacaatgtaaccatatggaagcaactttttttggtgtctcaaaggagtaactgcagcttggtttgaaatttgtactgtttctatcataaataaagttatggcttcttgttgg

SEQ ID NO: 127979 - DNA, 703 bp, Homo sapiens
  misc_feature (45)..(45): n is a, c, g, or t
  misc_feature (61)..(61): n is a, c, g, or t
ttgcggtacattccccggaccgcttgcttgttcgattaatccgcncacttaggaatttgcntcgggccaaattcggcacggggtccccagagtttgtggatgaagctctgtgtgcgtgctaggagtaccttagcaacttggcccacatggacatcgacaaggacctggaggccccgctgtacctcacccccgagggctggtccctcttcctccagcgctactaccaagtggtccacgaaggggcagaactcaggcacctcgacactcaggtccagcgctgtgaggacataagagccctgcttcagatacttacatagtttttggggaagccaagatcgaagatttatcccagcaagcacaactagcagctgctgagaaattcaaagttcaaggtgaagctgtctcaaacattcaagaaaacacacagactccaactgtacaagaggagagtgaagaggaagaggtcgatgaaacaggtgtagaagttaaggacatagaattggtcatgtcacaagcaaatgtgtcgagagcaaaggcagtccgagccctgaagaacaacagtaatgatattgtaaatgcgattatggaattaacaatgtaaccatatggaagcaactttttttggtgtctcaaaggagtaactgcagcttggtttgaaatttgtactgtttctatcataaataaagttatggcttcttgttgg

SEQ ID NO: 127980 - DNA, 1788 bp, Homo sapiens
caaaatagcaagcaaaggaattgtatatgtgcctatgttctttttttctgggaaggagaatctgcagctttataatttcaacatcggctaaattgtcgtgaacctaaaacaatcaaaagggccggaatctatttaaagagtttattcaagggcagtgtgaggatggaccaaccagaaaacctccaaagaatggagtcagccttcagaagtagagaagttacgatttcatttatttagggagacagaggagtttttagctggattacgttatccatacaaggttggaacataattacagaatttggttacaagaagtgtttttttttggggggggggcgggggtacagctaacattgttttacgaagagtttaacacgcatgagttgctgtcatctggtgacatcgtttgagtctctctagtcattgaacagaacaagaaaaatcgaattaaatttataatctgaactgaagttatatgtgacccatcacatctctcaagttttaaaatgggtttttttgttgttgttgatggggggggagagggtccagcagcttttaaatgttttcacatcgtgtgttccaaaaataactggttagcctaagtcacttccaccctccaatgttgtgaatgcagtctctagcattcgctatttaatgtcttcttcctgcactatttgagaaatcgcgaggtcgacttaataccgcagtcgccacttcgcggaccggaggcggagtctgcttagttctgaggactgcgtgggtccgcgcagagagctcctgctaggcctgcgcgtcccgttctaaattcttaccctttagttcttgtcaccacccccgccgtgggaacggcctgacagtcactcgtcaaaggaagtggctgccggcagctcttgacccggaatcggatcctagtcccaccccctccgctccaggcttccttctgcaacaggcgtgggtcacgctctcgctcggtctttctgccgccatcttggttccgcgttccctgcacagcctcctttttattcccttccttcagaaatgcccggcgaagccacagaaaccgtccctgctacagagcaggagttgccgcagccccaggctgagacagggtctggaacagaatctgacagtgatgaatcagtaccagagcttgaagaacaggattccacccaggcaaccacacaacaagcccagctggcggcagcagctgaaatcgatgaagaaccagtcagtaaagcaaaacagagtcggagtgaaaagaaggcacggaaggctatgtccaaactgggtcttcggcaggttacaggagttactagagtcactatccggaaatctaagaatatcctctttgtcatcacaaaaccagatgtctacaagagccctgcttcagatacttacatagtttttggggaagccaagatcgaagatttatcccagcaagcacaactagcagctgctgagaaattcaaagttcaaggtgaagctgtctcaaacattcaagaaaacacacagactccaactgtacaagaggagagtgaagaggaagaggtcgatgaaacaggtgtagaagttaaggacatagaattggtcatgtcacaagcaaatgtgtcgagagcaaaggcagtccgagccctgaagaacaacagtaatgatattgtaaatgcgattatggaattaacaatgtaaccatatggaagcaactttttttggtgtctcaaaggagtaactgcagcttggtttgaaatttgtactgtttctatcataaataaagttatggcttcttgttgg

SEQ ID NO: 127981 - DNA, 1845 bp, Homo sapiens
  misc_feature (1787)..(1787): n is a, c, g, or t
  misc_feature (1813)..(1813): n is a, c, g, or t
caaaatagcaagcaaaggaattgtatatgtgcctatgttctttttttctgggaaggagaatctgcagctttataatttcaacatcggctaaattgtcgtgaacctaaaacaatcaaaagggccggaatctatttaaagagtttattcaagggcagtgtgaggatggaccaaccagaaaacctccaaagaatggagtcagccttcagaagtagagaagttacgatttcatttatttagggagacagaggagtttttagctggattacgttatccatacaaggttggaacataattacagaatttggttacaagaagtgtttttttttggggggggggcgggggtacagctaacattgttttacgaagagtttaacacgcatgagttgctgtcatctggtgacatcgtttgagtctctctagtcattgaacagaacaagaaaaatcgaattaaatttataatctgaactgaagttatatgtgacccatcacatctctcaagttttaaaatgggtttttttgttgttgttgatggggggggagagggtccagcagcttttaaatgttttcacatcgtgtgttccaaaaataactggttagcctaagtcacttccaccctccaatgttgtgaatgcagtctctagcattcgctatttaatgtcttcttcctgcactatttgagaaatcgcgaggtcgacttaataccgcagtcgccacttcgcggaccggaggcggagtctgcttagttctgaggactgcgtgggtccgcgcagagagctcctgctaggcctgcgcgtcccgttctaaattcttaccctttagttcttgtcaccacccccgccgtgggaacggcctgacagtcactcgtcaaaggaagtggctgccggcagctcttgacccggaatcggatcctagtcccaccccctccgctccaggcttccttctgcaacaggcgtgggtcacgctctcgctcggtctttctgccgccatcttggttccgcgttccctgcacaaaatgcccggcgaagccacagaaaccgtccctgctacagagcaggagttgccgcagccccaggctgagacagggtctggaacagaatctgacagtgatgaatcagtaccagagcttgaagaacaggattccacccaggcaaccacacaacaagcccagctggcggcagcagctgaaatcgatgaagaaccagtcagtaaagcaaaacagagtcggagtgaaaagaaggcacggaaggctatgtccaaactgggtcttcggcaggttacaggagttactagagtcactatccggaaatctaagaatatcctctttgtcatcacaaaaccagatgtctacaagagccctgcttcagatacttacatagtttttggggaagccaagatcgaagatttatcccagcaagcacaactagcagctgctgagaaattcaaagttcaaggtgaagctgtctcaaacattcaagaaaacacacagactccaactgtacaagaggagagtgaagaggaagaggtcgatgaaacaggtgtagaagttaaggacatagaattggtcatgtcacaagcaaatgtgtcgagagcaaaggcagtccgagccctgaagaacaacagtaatgatattgtaaatgcgattatggaattaacaatgtaaccatatggaagcaactttttttggtgtctcaaaggagtaactgcagcttggtttgaaatttgtactgtttctatcataaataaagttatggcttcttgttgggaaaaaaaaaaaaaaaaccgggctnttttgggggggaaaaggttaagggcnggcttgtccgccctttttgtcagggaatcgcg

SEQ ID NO: 127982 - DNA, 2058 bp, Homo sapiens
caaaatagcaagcaaaggaattgtatatgtgcctatgttctttttttctgggaaggagaatctgcagctttataatttcaacatcggctaaattgtcgtgaacctaaaacaatcaaaagggccggaatctatttaaagagtttattcaagggcagtgtgaggatggaccaaccagaaaacctccaaagaatggagtcagccttcagaagtagagaagttacgatttcatttatttagggagacagaggagtttttagctggattacgttatccatacaaggttggaacataattacagaatttggttacaagaagtgtttttttttggggggggggcgggggtacagctaacattgttttacgaagagtttaacacgcatgagttgctgtcatctggtgacatcgtttgagtctctctagtcattgaacagaacaagaaaaatcgaattaaatttataatctgaactgaagttatatgtgacccatcacatctctcaagttttaaaatgggtttttttgttgttgttgatggggggggagagggtccagcagcttttaaatgttttcacatcgtgtgttccaaaaataactggttagcctaagtcacttccaccctccaatgttgtgaatgcagtctctagcattcgctatttaatgtcttcttcctgcactatttgagaaatcgcgaggtcgacttaataccgcagtcgccacttcgcggaccggaggcggagtctgcttagttctgaggactgcgtgggtccgcgcagagagctcctgctaggcctgcgcgtcccgttctaaattcttaccctttagttcttgtcaccacccccgccgtgggaacggcctgacagtcactcgtcaaaggaagtggctgccggcagctcttgacccggaatcggatcctagtcccaccccctccgctccaggcttccttctgcaacaggcgtgggtcacgctctcgctcggtctttctgccgccatcttggttccgcgttccctgcacatactttctgtgccgctactgtctatccgcagccatccgcctttctttcgggctaagccgccccggggactgagagttaaggagagttggaggctttactgggccacagggttcctactcgcccctgggcctccggacaaaatggggtctgcggttggtgtcctggcaaaagcagggtagaagggctgcggggcgggcccagaatccgagcctgcagagatgggagcagttgcagtgttgagggcggaagaggagtgcgtcttgttttgggaactgcttcacaggatccagaaaaggaaatgcccggcgaagccacagaaaccgtccctgctacagagcaggagttgccgcagccccaggctgagacagggtctggaacagaatctgacagtgatgaatcagtaccagagcttgaagaacaggattccacccaggcaaccacacaacaagcccagctggcggcagcagctgaaatcgatgaagaaccagtcagtaaagcaaaacagagtcggagtgaaaagaaggcacggaaggctatgtccaaactgggtcttcggcaggttacaggagttactagagtcactatccggaaatctaagaatatcctctttgtcatcacaaaaccagatgtctacaagagccctgcttcagatacttacatagtttttggggaagccaagatcgaagatttatcccagcaagcacaactagcagctgctgagaaattcaaagttcaaggtgaagctgtctcaaacattcaagaaaacacacagactccaactgtacaagaggagagtgaagaggaagaggtcgatgaaacaggtgtagaagttaaggacatagaattggtcatgtcacaagcaaatgtgtcgagagcaaaggcagtccgagccctgaagaacaacagtaatgatattgtaaatgcgattatggaattaacaatgtaaccatatggaagcaactttttttggtgtctcaaaggagtaactgcagcttggtttgaaatttgtactgtttctatcataaataaagttatggcttcttgttgg

SEQ ID NO: 127983 - DNA, 1076 bp, Homo sapiens
  misc_feature (901)..(901): n is a, c, g, or t
  misc_feature (914)..(914): n is a, c, g, or t
cgggggggcaacaaaaagtaaggctaaaggtacgaggccgggtgtgtgctactttctgtgccgctactgtctatccgcagccatccgcctttctttcgggctaagccgccccggggactgagagttaaggagagttggaggctttactgggccacagggttcctactcgcccctgggcctccggacaaaatggggtctgcggttggtgtcctggcaaaagcagggtagaagggctgcggggcgggcccagaatccgagcctgcagagatgggagcagttgcagtgttgagggcggaagaggagtgcgtcttgttttgggaactgcttcacaggatccagaaaaggaaatgcccggcgaagccacagaaaccgtccctgctacagagcaggagttgccgcagccccaggctgagacagggtctggaacagaatctgacagtgatgaatcagtaccagagcttgaagaacaggattccacccaggcaaccacacaacaagcccagctggcggcagcagctgaaatcgatgaagaaccagtcagtaaagcaaaacagagtcggagtgaaaagaaggcacggaaggctatgtccaaactgggtcttcggcaggttacaggagttactagagtcactatccggaaatctaagaatatcctctttgtcatcacaaaaccagatgtctacaagagccctgcttcagatacttacatagtttttggggaagccaagatcgaagatttatcccagcaagcacaactagcagctgctgagaaattcaaagttcaaggtgaagctgtctcaaacattcaagaaaacacacagactccaactgtacaagaggagagtgaagaggaagagtcgatgaacccggtgtaaacgttaggcctgaattgcctgtccangcaatgtgcggancaggggtcgggctgagaaaacagttggtttgttgggttggtccagtcctttgggcacttttgggtcaaggaagggggggggagggggctttaaaatgctgtgtggaaaaagcttttgggggggagggggtgtgccttcgttctgtgctctgtttatatatgg

SEQ ID NO: 127984 - DNA, 959 bp, Homo sapiens
tagcccgcaaaccttagggctaggtagcgaggctgggtgtcgcttggttccgcgttccctgcacaaaatgcccggcgaagccacagaaaccgtccctgctacagagcaggagttgccgcagccccaggctgagacagggtctggaacagaatctgacagtgatgaatcagtaccagagcttgaagaacaggattccacccaggcaaccacacaacaagcccagctggcggcagcagctgaaatcgatgaagaaccagtcagtaaagcaaaacagagtcggagtgaaaagaaggcacggaaggctatgtccaaactgggtcttcggcaggttacaggagttactagagtcactatccggaaatctaagaatatcctctttgtcatcacaaaaccagatgtctacaagagccctgcttcagatacttacatagtttttggggaagccaagatcgaagatttatcccagcaagcacaactagcagctgctgagaaattcaaagttcaaggtgaagctgtctcaaacattcaagaaaacacacagactccaactgtacaagaggagagtgaagaggaagaggtcgatgaaacaggtgtagaagttaaggacatagaattggtcatgtcacaagcaaatgtgtcgagagcaaaggcagtccgagccctgaagaacaacagtaatgatattgtaaatgcgattatggaattaacaatgtaaccatatggaagcaactttttttggtgtctcaaaggagtaactgcagcttggtttgaaatttgtactgtttctatcataaataaagttatggcttcttgttggcaaacaacacacaaaaaaaaactccggggtctttttccggtcgcggaacaaaggttttgatggcccgtggtcaagttttcccggacccctttttgtccacgggtaattcccggcccaaatagggctatcgaaaccggacgtg

SEQ ID NO: 127985 - DNA, 806 bp, Homo sapiens
ggtctaggtacgacctgggttgaatcggccgaggtggtccgcgttccctgcacaaaatgcccggcgaagccacagaaaccgtccctgctacagagcaggagttgccgcagccccaggctgagacagggtctggaacagaatctgacagtgatgaatcagtaccagagcttgaagaacaggattccacccaggcaaccacacaacaagcccagctggcggcagcagctgaaatcgatgaagaaccagtcagtaaagcaaaacagagtcggagtgaaaagaaggcacggaaggctatgtccaaactgggtcttcggcaggttacaggagttactagagtcactatccggaaatctaagaatatcctctttgtcatcacaaaaccagatgtctacaagagccctgcttcagatacttacatagtttttggggaagccaagatcgaagatttatcccagcaagcacaactagcagctgctgagaaattcaaagttcaaggtgaagctgtctcaaacattcaagaaaacacacagactccaactgtacaagaggagagtgaagaggaagaggtcgatgaaacaggtgtagaagttaaggacatagaattggtcatgtcacaagcaaatgtgtcgagagcaaaggcagtccgagccctgaagaacaacagtaatgatattgtaaatgcgattatggaattaacaatgtaaccatatggaagcaactttttttggtgtctcaaaggagtaactgcagcttggtttgaaatttgtactgtttctatcataaataaagttatggcttcttgttgg

SEQ ID NO: 127986 - DNA, 918 bp, Homo sapiens
ggtctaggtacgacctgggttgaatcggccgaggtggtccgcgttccctgcacaaaatgcccggcgaagccacagaaaccgtccctgctacagagcaggagttgccgcagccccaggctgagacagggtctggaacagaatctgacagtgatgaatcagtaccagagcttgaagaacaggattccacccaggcaaccacacaacaagcccagctggcggcagcagctgaaatcgatgaagaaccagtcagtaaagcaaaacagagtcggagtgaaaagaaggcacggaaggctatgtccaaactgggtcttcggcaggttacaggagttactagagtcactatccggaaatctaagaatatcctctttgtcatcacaaaaccagatgtctacaagagccctgcttcagatacttacatagtttttggggaagccaagatcgaagatttatcccagcaagcacaactagcagctgctgagaaattcaaagttcaaggtgaagctgtctcaaacattcaagaaaacacacagactccaactgtacaagaggagagtgaagaggaagaggtcgatgaaacaggtgtagaagttaaggacatagaattggtcatgtcacaagcaaatgtgtcgagagcaaaggcagtccgagccctgaagaacaacagtaatgatattgtaaatgcgattatggaattaacaatgtaaccatatggaagcaactttttttggtgtctcaaaggagtaactgcagcttggtttgaaatttgtactgtttctatcataaataaagttatggcttcttgttggggtccaacaagaaaggagaaattggggcttggccggaaatttaaatttggggggcgaggaaaaagaaggccagagggaaggggttccaacggggggtgaaagggtggtaagg

SEQ ID NO: 127987 - DNA, 817 bp, Homo sapiens
tagcccgcaaaccttagggctaggtagcgaggctgggtgtcgcttggttccgcgttccctgcacaaaatgcccggcgaagccacagaaaccgtccctgctacagagcaggagttgccgcagccccaggctgagacagggtctggaacagaatctgacagtgatgaatcagtaccagagcttgaagaacaggattccacccaggcaaccacacaacaagcccagctggcggcagcagctgaaatcgatgaagaaccagtcagtaaagcaaaacagagtcggagtgaaaagaaggcacggaaggctatgtccaaactgggtcttcggcaggttacaggagttactagagtcactatccggaaatctaagaatatcctctttgtcatcacaaaaccagatgtctacaagagccctgcttcagatacttacatagtttttggggaagccaagatcgaagatttatcccagcaagcacaactagcagctgctgagaaattcaaagttcaaggtgaagctgtctcaaacattcaagaaaacacacagactccaactgtacaagaggagagtgaagaggaagaggtcgatgaaacaggtgtagaagttaaggacatagaattggtcatgtcacaagcaaatgtgtcgagagcaaaggcagtccgagccctgaagaacaacagtaatgatattgtaaatgcgattatggaattaacaatgtaaccatatggaagcaactttttttggtgtctcaaaggagtaactgcagcttggtttgaaatttgtactgtttctatcataaataaagttatggcttcttgttgg

SEQ ID NO: 127988 - DNA, 1923 bp, Homo sapiens
caaaatagcaagcaaaggaattgtatatgtgcctatgttctttttttctgggaaggagaatctgcagctttataatttcaacatcggctaaattgtcgtgaacctaaaacaatcaaaagggccggaatctatttaaagagtttattcaagggcagtgtgaggatggaccaaccagaaaacctccaaagaatggagtcagccttcagaagtagagaagttacgatttcatttatttagggagacagaggagtttttagctggattacgttatccatacaaggttggaacataattacagaatttggttacaagaagtgtttttttttggggggggggcgggggtacagctaacattgttttacgaagagtttaacacgcatgagttgctgtcatctggtgacatcgtttgagtctctctagtcattgaacagaacaagaaaaatcgaattaaatttataatctgaactgaagttatatgtgacccatcacatctctcaagttttaaaatgggtttttttgttgttgttgatggggggggagagggtccagcagcttttaaatgttttcacatcgtgtgttccaaaaataactggttagcctaagtcacttccaccctccaatgttgtgaatgcagtctctagcattcgctatttaatgtcttcttcctgcactatttgagaaatcgcgaggtcgacttaataccgcagtcgccacttcgcggaccggaggcggagtctgcttagttctgaggactgcgtgggtccgcgcagagagctcctgctaggcctgcgcgtcccgttctaaattcttaccctttagttcttgtcaccacccccgccgtgggaacggcctgacagtcactcgtcaaaggaagtggctgccggcagctcttgacccggaatcggatcctagtcccaccccctccgctccaggcttccttctgcaacaggcgtgggtcacgctctcgctcggtctttctgccgccatcttggttccgcgttccctgcacagcctcctttttattcccttccttcagaaatgcccggcgaagccacagaaaccgtccctgctacagagcaggagttgccgcagccccaggctgagacagggtctggaacagaatctgacagtgatgaatcagtaccagagcttgaagaacaggattccacccaggcaaccacacaacaagcccagctggcggcagcagctgaaatcgatgaagaaccagtcagtaaagcaaaacagagtcggagtgaaaagaaggcacggaaggctatgtccaaactgggtcttcggcaggttacaggagttactagagtcactatccggaaatctaagaatatcctctttgtcatcacaaaaccagatgtctacaagagccctgcttcagatacttacatagtttttggggaagccaagatcgaagatttatcccagcaagcacaactagcagctgctgagaaattcaaagttcaaggtgaagctgtctcaaacattcaagaaaacacacagactccaactgtacaagaggagagtgaagaggaagaggtcgatgaaacaggtgtagaagttaaggacatagaattggtcatgtcacaagcaaatgtgtcgagagcaaaggcagtccgagccctgaagaacaacagtaatgatattgtaaatgcgattatggaattaacaatgtaaccatatggaagcaactttttttggtgtctcaaaggagtaactgcagcttggtttgaaatttgtactgtttctatcataaataaagttatggcttcttgttggtggtctgtgggaaaacaaaaaaaaaatcgggccttggccggggggaacagcaagaagccaggaactttctggcgttgacaagggaagccggccatagcgtatgaccgggaatagaaaaagagaggaatcggaaca

SEQ ID NO: 127989 - DNA, 1248 bp, Homo sapiens
caaaatagcaagcaaaggaattgtatatgtgcctatgttctttttttctgggaaggagaatctgcagctttataatttcaacatcggctaaattgtcgtgaacctaaaacaatcaaaagggccggaatctatttaaagagtttattcaagggcagtgtgaggatggaccaaccagaaaacctccaaagaatggagtcagccttcagaagtagagaagttacgatttcatttatttagggagacagaggagtttttagctggattacgttatccatacaaggttggaacataattacagaatttggttacaagaagtgtttttttttggggggggggcgggggtacagctaacattgttttacgaagagtttaacacgcatgagttgctgtcatctggtgacatcgtttgagtctctctagtcattgaacagaacaagaaaaatcgaattaaatttataatctgaactgaagttatatgtgacccatcacatctctcaagttttaaaatgggtttttttgttgttgttgatggggggggagagggtccagcagcttttaaatgttttcacatcgtgtgttccaaaaataactggttagcctaagtcacttccaccctccaatgttgtgaatgcagtctctagcattcgctatttaatgtcttcttcctgcactatttgagaaatcgcgaggtcgacttaataccgcagtcgccacttcgcggaccggaggcggagtctgcttagttctgaggactgcgtgggtccgcgcagagagctcctgctaggcctgcgcgtcccgttctaaattcttaccctttagttcttgtcaccacccccgccgtgggaacggcctgacagtcactcgtcaaaggaagtggctgccggcagctcttgacccggaatcggatcctagtcccaccccctccgctccaggcttccttctgcaacaggcgtgggtcacgctctcgctcggtctttctgccgccatcttggttccgcgttccctgcacaaaatgcccggcgaagccacagaaaccgtccctgctacagagcaggagttgccgcagccccaggctgagacagggtttcaccatgttggtcaggtcggtctggaactcctgacctcgtgatccgccctcccaggcatcccgaagtgctgggattacaggcatgagccacgtgcccggcctattttttattttgactgttattttttcgagacagtgtcttgctctgtgacccaggctgg

SEQ ID NO: 127990 - DNA, 1823 bp, Homo sapiens
  misc_feature (1680)..(1680): n is a, c, g, or t
  misc_feature (1741)..(1741): n is a, c, g, or t
  misc_feature (1745)..(1745): n is a, c, g, or t
  misc_feature (1776)..(1776): n is a, c, g, or t
  misc_feature (1781)..(1781): n is a, c, g, or t
  misc_feature (1823)..(1823): n is a, c, g, or t
caaaatagcaagcaaaggaattgtatatgtgcctatgttctttttttctgggaaggagaatctgcagctttataatttcaacatcggctaaattgtcgtgaacctaaaacaatcaaaagggccggaatctatttaaagagtttattcaagggcagtgtgaggatggaccaaccagaaaacctccaaagaatggagtcagccttcagaagtagagaagttacgatttcatttatttagggagacagaggagtttttagctggattacgttatccatacaaggttggaacataattacagaatttggttacaagaagtgtttttttttggggggggggcgggggtacagctaacattgttttacgaagagtttaacacgcatgagttgctgtcatctggtgacatcgtttgagtctctctagtcattgaacagaacaagaaaaatcgaattaaatttataatctgaactgaagttatatgtgacccatcacatctctcaagttttaaaatgggtttttttgttgttgttgatggggggggagagggtccagcagcttttaaatgttttcacatcgtgtgttccaaaaataactggttagcctaagtcacttccaccctccaatgttgtgaatgcagtctctagcattcgctatttaatgtcttcttcctgcactatttgagaaatcgcgaggtcgacttaataccgcagtcgccacttcgcggaccggaggcggagtctgcttagttctgaggactgcgtgggtccgcgcagagagctcctgctaggcctgcgcgtcccgttctaaattcttaccctttagttcttgtcaccacccccgccgtgggaacggcctgacagtcactcgtcaaaggaagtggctgccggcagctcttgacccggaatcggatcctagtcccaccccctccgctccaggcttccttctgcaacaggcgtgggtcacgctctcgctcggtctttctgccgccatcttggttccgcgttccctgcacagcctcctttttattcccttccttcagaaatgcccggcgaagccacagaaaccgtccctgctacagagcaggagttgccgcagccccaggctgagacagggtctggaacagaatctgacagtgatgaatcagtaccagagcttgaagaacaggattccacccaggcaaccacacaacaagcccagctggcggcagcagctgaaatcgatgaagaaccagtcagtaaagcaaaacagagtcggagtgaaaagaaggcacggaaggctatgtccaaactgggtcttcggcaggttacaggagttactagagtcactatccggaaatctaagaatatcctctttgtcatcacaaaaccagatgtctacaagagccctgcttcagatacttacatagtttttggggaagccaagatcgaagatttatcccagcaagcacaactagcagctgctgagaaattcaaagttcaaggtgaagctgtctcaaacattcaagaaaacacacagactccaactgtacaagaggagagtgaagaggaagaggtcgatgaaacaggtgtagaagttaaggacatagaattggtcatgtcacaagcaaatgtgtcgagagcaaaggcagtccgagccctgaagaacaacagtaatgatattgtaaatgcgattatgaatttaacnatgtttaccattttggaaaccacttttttttggtgttctccaaaaggaattaacctgccancttngggtttgaaaattttgttactggttttcctntcccnaaaattaaaattttttgggcttccttggtttgggtttgaaan

SEQ ID NO: 127991 - DNA, 632 bp, Homo sapiens
  misc_feature (6)..(6): n is a, c, g, or t
taaggntccccggatccagcaaacctttccaagccccactggcggcagcagctgaaatcgatgaagaaccagtcagtaaagcaaaacagagtcggagtgaaaagaaggcacggaaggctatgtccaaactgggtcttcggcaggttacaggagttactagagtcactatccggaaatctaagaatatcctctttgtcatcacaaaaccagatgtctacaagagccctgcttcagatacttacatagtttttggggaagccaagatcgaagatttatcccagcaagcacaactagcagctgctgagaaattcaaagttcaaggtgaagctgtctcaaacattcaagaaaacacacagactccaactgtacaagaggagagtgaagaggaagaggtcgatgaaacaggtgtagaagttaaggacatagaattggtcatgtcacaagcaaatgtgtcgagagcaaaggcagtccgagccctgaagaacaacagtaatgatattgtaaatgcgattatggaattaacaatgtaaccatatggaagcaactttttttggtgtctcaaaggagtaactgcagcttggtttgaaatttgtactgtttctatcataaataaagttatggcttcttgttgg

SEQ ID NO: 127992 - DNA, 410 bp, Homo sapiens
tcgtcttgactttggcaaatgagccggagccccttgggcaggtcacacaacctgtcccagcgagggacaccgagtggcccttcatgtacatccatggtgtgctggcttaaaatgtaattaatcttgttgggagcttaagctcccaacaagaggagagtgaagaggaagaggtcgatgaaacaggtgtagaagttaaggacatagaattggtcatgtcacaagcaaatgtgtcgagagcaaaggcagtccgagccctgaagaacaacagtaatgatattgtaaatgcgattatggaattaacaatgtaaccatatggaagcaactttttttggtgtctcaaaggagtaactgcagcttggtttgaaatttgtactgtttctatcataaataaagttatggcttcttgttgg

SEQ ID NO: 127993 - DNA, 247 bp, Homo sapiens
gcggccgcctactactactactgctcgaattcaagcttctaacgatgtacggggacaagcaaatgtgtcgagagcaaaggcagtccgagccctgaagaacaacagtaatgatattgtaaatgcgattatggaattaacaatgtaaccatatggaagcaactttttttggtgtctcaaaggagtaactgcagcttggtttgaaatttgtactgtttctatcataaataaagttatggcttcttgttgg

SEQ ID NO: 127994 - DNA, 219 bp, Homo sapiens
ctactactaaaacagcggccgtgcgaccaagcaaatgtgtcgagagcaaaggcagtccgagccctgaagaacaacagtaatgatattgtaaatgcgattatggaattaacaatgtaaccatatggaagcaactttttttggtgtctcaaaggagtaactgcagcttggtttgaaatttgtactgtttctatcataaataaagttatggcttcttgttgg

SEQ ID NO: 127995 - DNA, 496 bp, Homo sapiens
  misc_feature (66)..(66): n is a, c, g, or t
tcaatctcgaaattaaccccctcacctaaagggaacaaaagctggagcctccccacccggtggcgncccgcctcctagaacctagtggatcccccccgggctgcaggaatttcggcacgagcccaagatcgaagatttatcccagcaagcacaactagcagctgctgagaaattcaaagttcaaggtgaagctgtctcaaacattcaagaaaacacacagactccaactgtacaagaggagagtgaagaggaagaggtcgatgaaacaggtgtagaagttaaggacatagaattggtcatgtcacaagcaaatgtgtcgagagcaaaggcagtccgagccctgaagaacaacagtaatgatattgtaaatgcgattatggaattaacaatgtaaccatatggaagcaactttttttggtgtctcaaaggagtaactgcagcttggtttgaaatttgtactgtttctatcataaataaagttatggcttcttgttgg

SEQ ID NO: 127996 - DNA, 609 bp, Homo sapiens
  misc_feature (567)..(567): n is a, c, g, or t
  misc_feature (570)..(572): n is a, c, g, or t
  misc_feature (595)..(595): n is a, c, g, or t
tcgtcttgactttggcaaatgagccggagccccttgggcaggtcacacaacctgtcccagcgagggacaccgagtggcccttcatgtacatccatggtgtgctggcttaaaatgtaattaatcttgttgggagcttaagctcccaacaagaggagagtgaagaggaagaggtcgatgaaacaggtgtagaagttaaggacatagaattggtcatgtcacaagcaaatgtgtcgagagcaaaggcagtccgagccctgaagaacaacagtaatgatattgtaaatgcgattatggaattaacaatgtaaccatatggaagcaactttttttggtgtctcaaaggagtaactgcagcttggtttgaaatttgtactgtttctatcataaataaagttatggcttcttgttgggagctaagctcccaacaagaaggttaacattttctgattcatgttagactttgaagagactaaagaaaattttcagaggaacatatgcctgagaacctttgcatgaatttaaaatttcattatccattcttataagaaggaagatgattgtaaaganatnnnccgaagttaaatctgtataggantgatcatctctaag

SEQ ID NO: 127997 - DNA, 467 bp, Homo sapiens
ctgaatgatagggatgattaggttctttctgatcctggagctgaatggctcccaaattaattttattgaattttgattaggtaacgtatatgagtctgaattttctcacccttgcctaagcctttttattgtattttaacttttatttatttattcttttgagatgggagttttgctccttgtttgggagcttaagctccccacaagaggagagtgaagaggaagaggtcgatgaaacaggtgtagaagttaaggacatagaattggtcatgtcacaagcaaatgtgtcgagagcaaaggcagtccgagccctgaagaacaacagtaatgatattgtaaatgcgattatggaattaacaatgtaaccatatggaagcaactttttttggtgtctcaaaggagtaactgcagcttggtttgaaatttgtactgtttctatcataaataaagttatggcttcttgttgg

SEQ ID NO: 127998 - DNA, 736 bp, Homo sapiens
tgttgggattacaggcatgagctaccatgcctgatctggttatctttttcatgaaacttagatttctctgtttaagtaaagatatagatatacttatgaaagacagatatacttataaaagacagatatactaaatttctgaaacctaaatttctctctttacatatgtctgttcttctatttgattctactaaatttggggcagtctttttgggagcttaagctccccacaagaggagagtgaagaggaagagctcaaaaggtttgctgatagaactgggtccccacccaagctccctgctttccccagtaccccttcacggtttttccactgcctctcactggggccacatgggacctcttgtagggaccatggttgtggcagccccttcctagagggccctcggagaagtccccgtgcgtcttgttgggagccagctccccaccagaggagagtgaagaggaagaggtcgatgaaacaggtgtagaagttaaggacatagaattggtcatgtcacaagcaaatgtgtcgagagcaaaggcagtccgagccctgaagaacaacagtaatgatattgtaaatgcgattatggaattaacaatgtaaccatatggaagcaactttttttggtgtctcaaaggagtaactgcagcttggtttgaaatttgtactgtttctatcataaataaagttatggcttcttgttggtgagcttcagtcctgcgactcgtctct

SEQ ID NO: 127999 - DNA, 595 bp, Homo sapiens
aaagcctgagacagcgttcttttgagggactgagatgcaggatttcttcacgcctcccctttgtgacttcaagccctctggcatctctttctgcaaaggcacctgaatgtgtctgcgtccctgttagcataatgtgaggaggtggagagacagcccacccttgtgtccactgtgacccctgttcccatgctgacctgtgtttcctccccagtcatctttcttgttccagagaggtggggctggatgtctccatctctgtctcaactttacgtgcactgagctgcaacttcttacttccctactgaaaataagaatctgaatataaatttgttttctcaaatatttgctatgagaggtcgatgaaacaggtgtagaagttaaggacatagaattggtcatgtcacaagcaaatgtgtcgagagcaaaggcagtccgagccctgaagaacaacagtaatgatattgtaaatgcgattatggaattaacaatgtaaccatatggaagcaactttttttggtgtctcaaaggagtaactgcagcttggtttgaaatttgtactgtttctatcataaataaagttatggcttcttgttgg

SEQ ID NO: 128000 - DNA, 626 bp, Homo sapiens
agggataattggactattgggtaaaatttagatcatatggtcattattgcctgtgccaagaaacaaagaccttgagggaaagaaagcagttacagtatattaactgctcagctatttctagtgattagtcctcatttctggggttagggctgggtctttactagatgtgtacccgctagttagtgactaagttaggggctatcaagctgacttcacacaagccagttggtttacatttaacattcttaggtctagcatgaggcattcacctctagtccagggcaggctgtggtgaagtaccttctcttataatttctactataaagcagtaaaagttgtttctcatcttagggtctggaacagaatctgacagtgatgaatcagtaccagagcttgaagaacaggattccacccaggcaaccacacaacaagcccagctggcggcagcagctgaaatcgatgaagaaccagtcagtaaagcaaaacagagtcggagtgaaaagaaggcacggaagaggtaagatttgaaaaggatttcaggatcttatgaagcacctttatacagagtggaactgtttatttccataggtttttggggaacaggtggtattttggttatacaagta

SEQ ID NO: 128001 - DNA, 555 bp, Homo sapiens
  misc_feature (236)..(236): n is a, c, g, or t
aactcaggggcgagctgccagcaccagccatggccaaatacgtcaagatcctgtatgacttcacagcccgaaatgccaacgagctatcggtgctcaaggatgaggtcctagaggtgctggaggacggccggcagtggtggaagctgcgcagccgcagcggccaggcggggtatgtgccctgcaacatcctaggcgaggaactcaggggtgagctgctaactcaggggcgagctgcnaactcaggggcgagctgcaactcaggggcgagctgctggcggcagcagctgaaatcgatgaagaaccagtcagtaaagcaaaacagagtcggagtgaaaagaaggcacggaaggctatgtccaaactgggtcttcggcaggttacaggagttactagagtcactatccggaaatctaagaatatcctctttgtcatcacaaaaccagatgtctacaagagccctgcttcagatacttacatagtttttggggaagccaagatcgaagatttatcccagcaagcacaactagcagctcgcacctgagttgcgctacgcct

SEQ ID NO: 128002 - DNA, 714 bp, Homo sapiens
agttcgacggagactctcagccaggctgagacagggtctggaacagaatctgacagtgatgaatcagtaccagagcttgaagaacaggattccacccaggcaaccacacaacaagcccagctggcggcagcagctgaaatcgatgaagaaccagtcagtaaagcaaaacagagtcggagtgaaaagaaggcacggaaggctatgtccaaactgggtcttcggcaggttacaggagttactagagtcactatccggaaatctaagaatatcctctttgtcatcacaaaaccagatgtctacaagagccctgcttcagatacttacatagtttttggggaagccaagatcgaagatttatcccagcaagcacaactagcagctgctgagaaattcaaagttcaaggtgaagctgtctcaaacattcaagaaaacacacagactccaactgtacaagaggagagtgaagaggaagaggtcgatgaaacaggtgtagaagttaaggacatagaattggtcatgtcacaagcaaatgtgtcgagagcaaaggcagtccgagccctgaagaacaacagtaatgatattgtaaatgcgattatggaattaacaatgtaaccatatggaagcaactttttttggtgtctcaaaggagtaactgcagcttggtttgaaatttgtactgtttctatcataaataaagttatggcttcttgttgg

SEQ ID NO: 128003 - DNA, 852 bp, Homo sapiens
acacaaaaatataggtcaggtacgaggctgggtggcgctttctgccgccatcttggttccgcgttccctgcacagcctcctttttattcccttccttcagaaatgcccggcgaagccacagaaaccgtccctgctacagagcaggagttgccgcagccccaggctgagacagggtctggaacagaatctgacagtgatgaatcagtaccagagcttgaagaacaggattccacccaggcaaccacacaacaagcccagctggcggcagcagctgaaatcgatgaagaaccagtcagtaaagcaaaacagagtcggagtgaaaagaaggcacggaaggctatgtccaaactgggtcttcggcaggttacaggagttactagagtcactatccggaaatctaagaatatcctctttgtcatcacaaaaccagatgtctacaagagccctgcttcagatacttacatagtttttggggaagccaagatcgaagatttatcccagcaagcacaactagcagctgctgagaaattcaaagttcaaggtgaagctgtctcaaacattcaagaaaacacacagactccaactgtacaagaggagagtgaagaggaagaggtcgatgaaacaggtgtagaagttaaggacatagaattggtcatgtcacaagcaaatgtgtcgagagcaaaggcagtccgagccctgaagaacaacagtaatgatattgtaaatgcgattatggaattaacaatgtaaccatatggaagcaactttttttggtgtctcaaaggagtaactgcagcttggtttgaaatttgtactgtttctatcataaataaagttatggcttcttgttgg

SEQ ID NO: 128004 - DNA, 912 bp, Homo sapiens
acacaaaaatataggtcaggtacgaggctgggtggcgctttctgccgccatcttggttccgcgttccctgcacagcctcctttttattcccttccttcagaaatgcccggcgaagccacagaaaccgtccctgctacagagcaggagttgccgcagccccaggctgagacagtggctgcatttcctttggaaagtgctgaccctgccggggtggctcccacaactgccaaagggtctggaacagaatctgacagtgatgaatcagtaccagagcttgaagaacaggattccacccaggcaaccacacaacaagcccagctggcggcagcagctgaaatcgatgaagaaccagtcagtaaagcaaaacagagtcggagtgaaaagaaggcacggaaggctatgtccaaactgggtcttcggcaggttacaggagttactagagtcactatccggaaatctaagaatatcctctttgtcatcacaaaaccagatgtctacaagagccctgcttcagatacttacatagtttttggggaagccaagatcgaagatttatcccagcaagcacaactagcagctgctgagaaattcaaagttcaaggtgaagctgtctcaaacattcaagaaaacacacagactccaactgtacaagaggagagtgaagaggaagaggtcgatgaaacaggtgtagaagttaaggacatagaattggtcatgtcacaagcaaatgtgtcgagagcaaaggcagtccgagccctgaagaacaacagtaatgatattgtaaatgcgattatggaattaacaatgtaaccatatggaagcaactttttttggtgtctcaaaggagtaactgcagcttggtttgaaatttgtactgtttctatcataaataaagttatggcttcttgttgg

SEQ ID NO: 128005 - DNA, 1252 bp, Homo sapiens
acacaaaaatataggtcaggtacgaggctgggtggcgctttctgccgccatcttggttccgcgttccctgcacaaaatgcccggcgaagccacagaaaccgtccctgctacagagcaggagttgccgcagccccaggctgagacagggtctggaacagaatctgacagtgatgaatcagtaccagagcttgaagaacaggattccacccaggcaaccacacaacaagcccagctggcggcagcagctgaaatcgatgaagaaccagtcagtaaagcaaaacagagtcggagtgaaaagaaggcacggaaggctatgtccaaactgggtcttcggcaggttacaggagttactagagtcactatccggaaatctaagaatatcctctttgtcatcacaaaaccagatgtctacaagagccctgcttcagatacttacatagtttttggggaagccaagatcgaagatttatcccagcaagcacaactagcagctgctgagaaattcaaagttcaaggtgaagctgtctcaaacattcaagaaaacacacagactccaactgtacaagaggagagtgaagaggaagaggtcgatgaaacaggtgtagaagttaaggacatagaattggtcatgtcacaagcaaatgtgtcgagagcaaaggcagtccgagccctgaagaacaacagtaatgatattgtaaatgcgattatggaattaacaatgtaaccatatggaagcaactttttttggtgtctcaaaggagtaactgcagcttggtttgaaatttgtactgtttctatcataaataaagttatggcttcttgttggaacaaacaaaaaaaaacaaaaaaaaaaaaaaaaaaaaaaaaaaaaaaaaaacagaggggggcgcgccgcgcatcaaaagatataccccctgaggggcgcccaccaaactaacgccgcacccccgaggttttctgttaagaaagagaggggccccacataagaagggaggcctcgtttatataaacagccctagaggcggacgggggccagccgttgttttaaaaaacaaccgttcggcggaacgaggggagaaaaacaaagtgggatcagaggcggggaaactactgcggagagaagaggaaccacccattaagtccggggggggggggcaccaaatcatgcggcgacaaacactcaccccgaagcagaaaattttaagcagcgctggcggggcaacaattagagaaattttgaggggtcacaacg

SEQ ID NO: 128006 - DNA, 1218 bp, Homo sapiens
acacaaaaatataggtcaggtacgaggctgggtggcgctttctgccgccatcttggttccgcgttccctgcacaaaatgcccggcgaagccacagaaaccgtccctgctacagagcaggagttgccgcagccccaggctgagacagggtctggaacagaatctgacagtgatgaatcagtaccagagcttgaagaacaggattccacccaggcaaccacacaacaagcccagctggcggcagcagctgaaatcgatgaagaaccagtcagtaaagcaaaacagagtcggagtgaaaagaaggcacggaaggctatgtccaaactgggtcttcggcaggttacaggagttactagagtcactatccggaaatctaagaatatcctctttgtcatcacaaaaccagatgtctacaagagccctgcttcagatacttacatagtttttggggaagccaagatcgaagatttatcccagcaagcacaactagcagctgctgagaaattcaaagttcaaggtgaagctgtctcaaacattcaagaaaacacacagactccaactgtacaagaggagagtgaagaggaagaggtcgatgaaacaggtgtagaagttaaggacatagaattggtcatgtcacaagcaaatgtgtcgagagcaaaggcagtccgagccctgaagaacaacagtaatgatattgtaaatgcgattatggaattaacaatgtaaccatatggaagcaactttttttggtgtctcaaaggagtaactgcagcttggtttgaaatttgtactgtttctatcataaataaagttatggcttcttgttggaacaaacaaaaaaaaacaaaaaaaaaaaaaaaaaaaaaaaaaaacccgggggcacatctattgtgcgcggggcgcgcgggaaaaagagggtatctagtaaaaggcgcccctgtgtgcgccactaagcttgtccctggtgccccacttttctgtggtgcgaaccacgagggtggggaacactctagccgcgcacactctcccaatagagagaagggcgcgattaataatcttgcagaaaaacgcggtggtatactgccgggatttttaaaaatgtcatcggtaggaaagaaaaaaaagcgagccacaagagcagcataacgcgcacccgcaccatattgtgcgagccgactatagatagatagagatccatcaccagcgagctcctccactag

SEQ ID NO: 128007 - DNA, 1254 bp, Homo sapiens
  misc_feature (1119)..(1119): n is a, c, g, or t
  misc_feature (1254)..(1254): n is a, c, g, or t
acacaaaaatataggtcaggtacgaggctgggtggcgctttctgccgccatcttggttccgcgttccctgcacaaaatgcccggcgaagccacagaaaccgtccctgctacagagcaggagttgccgcagccccaggctgagacagggtctggaacagaatctgacagtgatgaatcagtaccagagcttgaagaacaggattccacccaggcaaccacacaacaagcccagctggcggcagcagctgaaatcgatgaagaaccagtcagtaaagcaaaacagagtcggagtgaaaagaaggcacggaaggctatgtccaaactgggtcttcggcaggttacaggagttactagagtcactatccggaaatctaagaatatcctctttgtcatcacaaaaccagatgtctacaagagccctgcttcagatacttacatagtttttggggaagccaagatcgaagatttatcccagcaagcacaactagcagctgctgagaaattcaaagttcaaggtgaagctgtctcaaacattcaagaaaacacacagactccaactgtacaagaggagagtgaagaggaagaggtcgatgaaacaggtgtagaagttaaggacatagaattggtcatgtcacaagcaaatgtgtcgagagcaaaggcagtccgagccctgaagaacaacagtaatgatattgtaaatgcgattatggaattaacaatgtaaccatatggaagcaactttttttggtgtctcaaaggagtaactgcagcttggtttgaaatttgtactgtttctatcataaataaagttatggcttcttgttggaacaaacaaaaaaaaacaaaaaaaaaaaaaaaaaaaaaaaaaaaaaaaaaaaaaaaaaaaaaaaaaaaaaaaacaaaaaacaaaaaaaaattggggggcggcccggccccctcacaaaagcttttccagaacccaactgtgtgtgggggaccgggggccccagtaaggtcaactgcgacacatgagtgcgcaactaacgagggggtcccaagggcagaacgcggggggcagaagacaaagcggcgtgggagatctcccccccaaaataaaaacccggccgcggggaggcagancacggagcggtctgtagacacacctcccacaaggggactctcaggcagccgcaaatacgaggggcgctctcatcaaccgcgggagcctccaaggggaccacccgcatttaaatttaagccgcgggatggggaggn

SEQ ID NO: 128008 - DNA, 968 bp, Homo sapiens
acacaaaaatataggtcaggtacgaggctgggtggcgctttctgccgccatcttggttccgcgttccctgcacaaaatgcccggcgaagccacagaaaccgtccctgctacagagcaggagttgccgcagccccaggctgagacagggtctggaacagaatctgacagtgatgaatcagtaccagagcttgaagaacaggattccacccaggcaaccacacaacaagcccagctggcggcagcagctgaaatcgatgaagaaccagtcagtaaagcaaaacagagtcggagtgaaaagaaggcacggaaggctatgtccaaactgggtcttcggcaggttacaggagttactagagtcactatccggaaatctaagaatatcctctttgtcatcacaaaaccagatgtctacaagagccctgcttcagatacttacatagtttttggggaagccaagatcgaagatttatcccagcaagcacaactagcagctgctgagaaattcaaagttcaaggtgaagctgtctcaaacattcaagaaaacacacagactccaactgtacaagaggagagtgaagaggaagaggtcgatgaaacaggtgtagaagttaaggacatagaattggtcatgtcacaagcaaatgtgtcgagagcaaaggcagtccgagccctgaagaacaacagtaatgatattgtaaatgcgattatggaattaacaatgtaaccatatggaagcaactttttttggtgtctcaaaggagtaactgcagcttggtttgaaatttgtactgtttctatcataaataaagttatggcttcttgttggcaaacaacacacaaaaaaaaactccggggtctttttccggtcgcggaacaaaggttttgatggcccgtggtcaagttttcccggacccctttttgtccacgggtaattcccggcccaaatagggctatcgaaaccggacgtg

SEQ ID NO: 128009 - DNA, 1157 bp, Homo sapiens
  misc_feature (828)..(828): n is a, c, g, or t
  misc_feature (832)..(832): n is a, c, g, or t
  misc_feature (835)..(835): n is a, c, g, or t
acacaaaaatataggtcaggtacgaggctgggtggcgctttctgccgccatcttggttccgcgttccctgcacaaaatgcccggcgaagccacagaaaccgtccctgctacagagcaggagttgccgcagccccaggctgagacagggtctggaacagaatctgacagtgatgaatcagtaccagagcttgaagaacaggattccacccaggcaaccacacaacaagcccagctggcggcagcagctgaaatcgatgaagaaccagtcagtaaagcaaaacagagtcggagtgaaaagaaggcacggaaggctatgtccaaactgggtcttcggcaggttacaggagttactagagtcactatccggaaatctaagaatatcctctttgtcatcacaaaaccagatgtctacaagagccctgcttcagatacttacatagtttttggggaagccaagatcgaagatttatcccagcaagcacaactagcagctgctgagaaattcaaagttcaaggtgaagctgtctcaaacattcaagaaaacacacagactccaactgtacaagaggagagtgaagaggaagaggtcgatgaaacaggtgtagaagttaaggacatagaattggtcatgtcacaagcaaatgtgtcgagagcaaaggcagtccgagccctgaagaacaacagtaatgatattgtaaatgcgattatggaattaacaatgtaaccatatggaagcaactttttttggtgtctcaaaggagtaactgcagcttggtttgaaatttgtactgtttctatcataaataaagttatggcttcttgttggcnacanaanaaaaacacaaacggggcccatacagaatcccccaggcggccaaattatcgttcacgtttggtaaaagtggcccaataggtagcgcacaatatgctcagagcagacaggataaacaactcgagcatgggaaccgtagcagcgaaactggagaggacaccatagtgggggcaaggaataacaagaactatacgtctgggataataattagctagcataagtatcttgtgtattcatattacaaaggcacaatcacaatacgccgactaacgtgtatgatgaaaatcaacaaatatcatatctccttcgttcccttccgtcgtga

SEQ ID NO: 128010 - DNA, 879 bp, Homo sapiens
acacaaaaatataggtcaggtacgaggctgggtggcgctttctgccgccatcttggttccgcgttccctgcacagcctcctttttattcccttccttcagaaatgcccggcgaagccacagaaaccgtccctgctacagagcaggagttgccgcagccccaggctgagacagggtctggaacagaatctgacagtgatgaatcagtaccagagcttgaagaacaggattccacccaggcaaccacacaacaagcccagctggcggcagcagctgaaatcgatgaagaaccagtcagtaaagcaaaacagagtcggagtgaaaagaaggcacggaaggctatgtccaaactgggtcttcggcaggttacaggagttactagagtcactatccggaaatctaagaatatcctctttgtcatcacaaaaccagatgtctacaagagccctgcttcagatacttacatagtttttggggaagccaagatcgaagatttatcccagcaagcacaactagcagctgctgagaaattcaaagttcaaggtgaagctgtctcaaacattcaagaaaacacacagactccaactgtacaagaggagagtgaagaggaagaggtcgatgaaacaggtgtagaagttaaggacatagaattggtcatgtcacaagcaaatgtgtcgagagcaaaggcagtccgagccctgaagaacaacagtaatgatattgtaaatgcgattatggaattaacaatgtaaccatatggaagcaactttttttggtgtctcaaaggagtaactgcagcttggtttgaaatttgtactgtttctatcataaataaagttatggcttcttgttggtgagcttcagtcctgcgactcgtctct

SEQ ID NO: 128011 - DNA, 1265 bp, Homo sapiens
  misc_feature (1265)..(1265): n is a, c, g, or t
acacaaaaatataggtcaggtacgaggctgggtggcgctttctgccgccatcttggttccgcgttccctgcacagcctcctttttattcccttccttcagaaatgcccggcgaagccacagaaaccgtccctgctacagagcaggagttgccgcagccccaggctgagacagggtctggaacagaatctgacagtgatgaatcagtaccagagcttgaagaacaggattccacccaggcaaccacacaacaagcccagctggcggcagcagctgaaatcgatgaagaaccagtcagtaaagcaaaacagagtcggagtgaaaagaaggcacggaaggctatgtccaaactgggtcttcggcaggttacaggagttactagagtcactatccggaaatctaagaatatcctctttgtcatcacaaaaccagatgtctacaagagccctgcttcagatacttacatagtttttggggaagccaagatcgaagatttatcccagcaagcacaactagcagctgctgagaaattcaaagttcaaggtgaagctgtctcaaacattcaagaaaacacacagactccaactgtacaagaggagagtgaagaggaagaggtcgatgaaacaggtgtagaagttaaggacatagaattggtcatgtcacaagcaaatgtgtcgagagcaaaggcagtccgagccctgaagaacaacagtaatgatattgtaaatgcgattatggaattaacaatgtaaccatatggaagcaactttttttggtgtctcaaaggagtaactgcagcttggtttgaaatttgtactgtttctatcataaataaagttatggcttcttgttggaaaaaaaaaaaaaaaaaaaaaaaaaaaaatttgggggggggggggccggaaaaagtttttaaacaccatttgttggggggggcgggcccaaggggtaggggaaaaggggccaaggggggcccagggaaccccgcgcaggactaagcgtgggggttcccccaaaaaaaaaagcggcgcgcgacaccgggtgttctgaacactccagatgggttgcgaggctaactggtccacacacagggtcacacgagcctaatacgccccgcgccgcgcgggggaacgcacaagacacgagaaagacgaagaagcacagagagagcgcgacacaaacaggagacagaagagaaagaagcagacagagacaggagaagagacaacaaaaagagcacgcaacgacagaagagcaccggacaagn

SEQ ID NO: 128012 - DNA, 1187 bp, Homo sapiens
acacaaaaatataggtcaggtacgaggctgggtggcgctttctgccgccatcttggttccgcgttccctgcacagcctcctttttattcccttccttcagaaatgcccggcgaagccacagaaaccgtccctgctacagagcaggagttgccgcagccccaggctgagacagggtctggaacagaatctgacagtgatgaatcagtaccagagcttgaagaacaggattccacccaggcaaccacacaacaagcccagctggcggcagcagctgaaatcgatgaagaaccagtcagtaaagcaaaacagagtcggagtgaaaagaaggcacggaaggctatgtccaaactgggtcttcggcaggttacaggagttactagagtcactatccggaaatctaagaatatcctctttgtcatcacaaaaccagatgtctacaagagccctgcttcagatacttacatagtttttggggaagccaagatcgaagatttatcccagcaagcacaactagcagctgctgagaaattcaaagttcaaggtgaagctgtctcaaacattcaagaaaacacacagactccaactgtacaagaggagagtgaagaggaagaggtcgatgaaacaggtgtagaagttaaggacatagaattggtcatgtcacaagcaaatgtgtcgagagcaaaggcagtccgagccctgaagaacaacagtaatgatattgtaaatgcgattatggaattaacaatgtaaccatatggaagcaactttttttggtgtctcaaaggagtaactgcagcttggtttgaaatttgtactgtttctatcataaataaagttatggcttcttgttggaaaaaaaaaaaaaaaaaaaaaaaaaaaaagggggcccccaaattttccccgggggccccattaccggacgttccccagcttttctggtggtaacaagggtgccccctataaggtagaagcggttatatataatcgctaaggcacctggccgcatcgtattaacaaaccgttcctgcagtctggcaacacgcgctcacctgagaacacttgggaaaagacccatacttcggtggggggcgacactcgtgggacaaactaccctacacaagtataaacgcctcacagcgaacatcaataaatctcagcggcctacacgggtgtaacaccagctgcat

SEQ ID NO: 128013 - DNA, 1260 bp, Homo sapiens
acacaaaaatataggtcaggtacgaggctgggtggcgctttctgccgccatcttggttccgcgttccctgcacagcctcctttttattcccttccttcagaaatgcccggcgaagccacagaaaccgtccctgctacagagcaggagttgccgcagccccaggctgagacagggtctggaacagaatctgacagtgatgaatcagtaccagagcttgaagaacaggattccacccaggcaaccacacaacaagcccagctggcggcagcagctgaaatcgatgaagaaccagtcagtaaagcaaaacagagtcggagtgaaaagaaggcacggaaggctatgtccaaactgggtcttcggcaggttacaggagttactagagtcactatccggaaatctaagaatatcctctttgtcatcacaaaaccagatgtctacaagagccctgcttcagatacttacatagtttttggggaagccaagatcgaagatttatcccagcaagcacaactagcagctgctgagaaattcaaagttcaaggtgaagctgtctcaaacattcaagaaaacacacagactccaactgtacaagaggagagtgaagaggaagaggtcgatgaaacaggtgtagaagttaaggacatagaattggtcatgtcacaagcaaatgtgtcgagagcaaaggcagtccgagccctgaagaacaacagtaatgatattgtaaatgcgattatggaattaacaatgtaaccatatggaagcaactttttttggtgtctcaaaggagtaactgcagcttggtttgaaatttgtactgtttctatcataaataaagttatggcttcttgttgggagctaagctcccaacaagaagctaaatccaaagaaatatgaaggtggccgtgaattaagtgatattattagctatctacaaagagaagctacaaacccccctgtaattcaagaagaaaaacccaagaagaagaagaaggcacaggaggatctctaaagcagtagccaaacaccactttgtaaaaggactcttccatcagagatgggaaaaccattggggaggactaggacccatatgggaattattacctctcggggccgagaggacagaatggatataatctgaatcctgttaaattttctctaaactgtttcttagctgcactgtttatggaaataccaggaccagtttatgtttgtggttttgggaaaatatttgtggtgggggaaatgttgtgggtgagtctg

SEQ ID NO: 128014 - DNA, 881 bp, Homo sapiens
acacaaaaatataggtcaggtacgaggctgggtggcgctttctgccgccatcttggttccgcgttccctgcacagcctcctttttattcccttccttcagaaatgcccggcgaagccacagaaaccgtccctgctacagagcaggagttgccgcagccccaggctgagacagggtctggaacagaatctgacagtgatgaatcagtaccagagcttgaagaacaggattccacccaggcaaccacacaacaagcccagctggcggcagcagctgaaatcgatgaagaaccagtcagtaaagcaaaacagagtcggagtgaaaagaaggcacggaaggctatgtccaaactgggtcttcggcaggttacaggagttactagagtcactatccggaaatctaagaatatcctctttgtcatcacaaaaccagatgtctacaagagccctgcttcagatacttacatagtttttggggaagccaagatcgaagatttatcccagcaagcacaactagcagctgctgagaaattcaaagttcaaggtgaagctgtctcaaacattcaagaaaacacacagactccaactgtacaagaggagagtgaagaggaagaggtcgatgaaacaggtgtagaagttaaggacatagaattggtcatgtcacaagcaaatgtgtcgagagcaaaggcagtccgagccctgaagaacaacagtaatgatattgtaaatgcgattatggaattaacaatgtaaccatatggaagcaactttttttggtgtctcaaaggagtaactgcagcttggtttgaaatttgtactgtttctatcataaataaagttatggcttcttgttggaaaaaaaaaattcaatagaataaacgaca

SEQ ID NO: 128015 - DNA, 892 bp, Homo sapiens
acacaaaaatataggtcaggtacgaggctgggtggcgctttctgccgccatcttggttccgcgttccctgcacagcctcctttttattcccttccttcagaaatgcccggcgaagccacagaaaccgtccctgctacagagcaggagttgccgcagccccaggctgagacagggtctggaacagaatctgacagtgatgaatcagtaccagagcttgaagaacaggattccacccaggcaaccacacaacaagcccagctggcggcagcagctgaaatcgatgaagaaccagtcagtaaagcaaaacagagtcggagtgaaaagaaggcacggaaggctatgtccaaactgggtcttcggcaggttacaggagttactagagtcactatccggaaatctaagaatatcctctttgtcatcacaaaaccagatgtctacaagagccctgcttcagatacttacatagtttttggggaagccaagatcgaagatttatcccagcaagcacaactagcagctgctgagaaattcaaagttcaaggtgaagctgtctcaaacattcaagaaaacacacagactccaactgtacaagaggagagtgaagaggaagaggtcgatgaaacaggtgtagaagttaaggacatagaattggtcatgtcacaagcaaatgtgtcgagagcaaaggcagtccgagccctgaagaacaacagtaatgatattgtaaatgcgattatggaattaacaatgtaaccatatggaagcaactttttttggtgtctcaaaggagtaactgcagcttggtttgaaatttgtactgtttctatcataaataaagttatggcttcttgttggctatctctcacgggggatcgctctagatgtcgatcctgca

SEQ ID NO: 128016 - DNA, 1236 bp, Homo sapiens
  misc_feature (1101)..(1101): n is a, c, g, or t
  misc_feature (1236)..(1236): n is a, c, g, or t
acacaaaaatataggtcaggtacgaggctgggtggcgctttctgccgccatcttggttccgcgttccctgcacagcctcctttttattcccttccttcagaaatgcccggcgaagccacagaaaccgtccctgctacagagcaggagttgccgcagccccaggctgagacagggtctggaacagaatctgacagtgatgaatcagtaccagagcttgaagaacaggattccacccaggcaaccacacaacaagcccagctggcggcagcagctgaaatcgatgaagaaccagtcagtaaagcaaaacagagtcggagtgaaaagaaggcacggaaggctatgtccaaactgggtcttcggcaggttacaggagttactagagtcactatccggaaatctaagaatatcctctttgtcatcacaaaaccagatgtctacaagagccctgcttcagatacttacatagtttttggggaagccaagatcgaagatttatcccagcaagcacaactagcagctgctgagaaattcaaagttcaaggtgaagctgtctcaaacattcaagaaaacacacagactccaactgtacaagaggagagtgaagaggaagaggtcgatgaaacaggtgtagaagttaaggacatagaattggtcatgtcacaagcaaatgtgtcgagagcaaaggcagtccgagccctgaagaacaacagtaatgatattgtaaatgcgattatggaattaacaatgtaaccatatggaagcaactttttttggtgtctcaaaggagtaactgcagcttggtttgaaatttgtactgtttctatcataaataaagttatggcttcttgttggaaaaaaaaaaaaaaaaaaaaaaaaaaaaacaaaaaacaaaaaaaaattggggggcggcccggccccctcacaaaagcttttccagaacccaactgtgtgtgggggaccgggggccccagtaaggtcaactgcgacacatgagtgcgcaactaacgagggggtcccaagggcagaacgcggggggcagaagacaaagcggcgtgggagatctcccccccaaaataaaaacccggccgcggggaggcagancacggagcggtctgtagacacacctcccacaaggggactctcaggcagccgcaaatacgaggggcgctctcatcaaccgcgggagcctccaaggggaccacccgcatttaaatttaagccgcgggatggggaggn

SEQ ID NO: 128017 - DNA, 1084 bp, Homo sapiens
acacaaaaatataggtcaggtacgaggctgggtggcgctttctgccgccatcttggttccgcgttccctgcacagcctcctttttattcccttccttcagaaatgcccggcgaagccacagaaaccgtccctgctacagagcaggagttgccgcagccccaggctgagacagggtctggaacagaatctgacagtgatgaatcagtaccagagcttgaagaacaggattccacccaggcaaccacacaacaagcccagctggcggcagcagctgaaatcgatgaagaaccagtcagtaaagcaaaacagagtcggagtgaaaagaaggcacggaaggctatgtccaaactgggtcttcggcaggttacaggagttactagagtcactatccggaaatctaagaatatcctctttgtcatcacaaaaccagatgtctacaagagccctgcttcagatacttacatagtttttggggaagccaagatcgaagatttatcccagcaagcacaactagcagctgctgagaaattcaaagttcaaggtgaagctgtctcaaacattcaagaaaacacacagactccaactgtacaagaggagagtgaagaggaagaggtcgatgaaacaggtgtagaagttaaggacatagaattggtcatgtcacaagcaaatgtgtcgagagcaaaggcagtccgagccctgaagaacaacagtaatgatattgtaaatgcgattatggtaagtgttcaagcctttgttccttgactccctctgccctgaccaattatgagtgactttattttgtcttgctaaatatcagccaattaaggaacctcattccagagcctcttctgagttgccgtataggttttagtggcctaaattctcctgatttgcctgtaagagttttagtgacctgaattctcctgatttgcctataagaaccgctaattatcttttctctgttacagaattaacaatgtaaccatatggaagcaactttttttggtgtctcaaaggagtaactgcagcttggtttgaaatttgtactgtttctatcataaataaagttatggcttcttgttgg

SEQ ID NO: 128018 - DNA, 778 bp, Homo sapiens
acacaaaaatataggtcaggtacgaggctgggtggcgctttctgccgccatcttggttccgcgttccctgcacagcctcctttttattcccttccttcagaaatgcccggcgaagccacagaaaccgtccctgctacagagcaggagttgccgcagccccaggctgagacagggtctggaacagaatctgacagtgatgaatcagtaccagagcttgaagaacaggattccacccaggcaaccacacaacaagcccagctggcggcagcagctgaaatcgatgaagaaccagtcagtaaagcaaaacagagtcggagtgaaaagaaggcacggaaggctatgtccaaactgggtcttcggcaggttacaggagttactagagtcactatccggaaatctaagaatatcctctttgtcatcacaaaaccagatgtctacaagagccctgcttcagatacttacatagtttttggggaagccaagatcgaagatttatcccagcaagcacaactagcagctgctgagaaattcaaagttcaaggtgaagctgtctcaaacattcaagaaaacacacagactccaactgtacaagaggagagtgaagaggaagaggtcgatgaaacaggtgtagaagttaaggacatagaattggtcatgtcacaagcaaatgtgtcgagagcaaaggcagtccgagccctgaagaacaacagtaatgatattgtaaatgcgattatgaattaacatgtaccatattggacgagcaccgggatcctctaga

SEQ ID NO: 128019 - DNA, 732 bp, Homo sapiens
acacaaaaatataggtcaggtacgaggctgggtggcgctttctgccgccatcttggttccgcgttccctgcacagcctcctttttattcccttccttcagaaatgcccggcgaagccacagaaaccgtccctgctacagagcaggagttgccgcagccccaggctgagacagggtctggaacagaatctgacagtgatgaatcagtaccagagcttgaagaacaggattccacccaggcaaccacacaacaagcccagctggcggcagcagctgaaatcgatgaagaaccagtcagtaaagcaaaacagagtcggagtgaaaagaaggcacggaaggctatgtccaaactgggtcttcggcaggttacaggagttactagagtcactatccggaaatctaagaatatcctctttgtcatcacaaaaccagatgtctacaagagccctgcttcagatacttacatagtttttggggaagccaagatcgaagatttatcccagcaagcacaactagcagctgctgagaaattcaaagttcaaggtgaagctgtctcaaacattcaagaaaacacacagactccaactgtacaagaggagagtgaagaggaagaggtcgatgaaacaggtgtagaagttaaggacatagaattggtcatgtcatccggagtgactataatggggaagactttaaagggaatggaggaagagactgaaagaaatgaaagcatgtta

SEQ ID NO: 128020 - DNA, 787 bp, Homo sapiens
acacaaaaatataggtcaggtacgaggctgggtggcgctttctgccgccatcttggttccgcgttccctgcacagcctcctttttattcccttccttcagaaatgcccggcgaagccacagaaaccgtccctgctacagagcaggagttgccgcagccccaggctgagacagggtctggaacagaatctgacagtgatgaatcagtaccagagcttgaagaacaggattccacccaggcaaccacacaacaagcccagctggcggcagcagctgaaatcgatgaagaaccagtcagtaaagcaaaacagagtcggagtgaaaagaaggcacggaaggctatgtccaaactgggtcttcggcaggttacaggagttactagagtcactatccggaaatctaagaatatcctctttgtcatcacaaaaccagatgtctacaagagccctgcttcagatacttacatagtttttggggaagccaagatcgaagatttatcccagcaagcacaactagcagctgctgagaaattcaaagttcaaggtgaagctgtctcaaacattcaagaaaacacacagactccaactgtacaagaggagagtgaagaggaagaggtcgatgaaacaggtgtagaagttaaggacatagaattggtcatgtcaccccgcccctgcgttgagagcaatttcccccccccccctttttaacccccgtgtttccccccccccccccccctgggcctctctttgtttttgttgccggctcctttccctggggttcccaggggta

SEQ ID NO: 128021 - DNA, 807 bp, Homo sapiens
acacaaaaatataggtcaggtacgaggctgggtggcgctttctgccgccatcttggttccgcgttccctgcacagcctcctttttattcccttccttcagaaatgcccggcgaagccacagaaaccgtccctgctacagagcaggagttgccgcagccccaggctgagacagggtctggaacagaatctgacagtgatgaatcagtaccagagcttgaagaacaggattccacccaggcaaccacacaacaagcccagctggcggcagcagctgaaatcgatgaagaaccagtcagtaaagcaaaacagagtcggagtgaaaagaaggcacggaaggctatgtccaaactgggtcttcggcaggttacaggagttactagagtcactatccggaaatctaagaatatcctctttgtcatcacaaaaccagatgtctacatcgaagatttatcccagcaagcacaactagcagctgctgagaaattcaaagttcaaggtgaagctgtctcaaacattcaagaaaacacacagactccaactgtacaagaggagagtgaagaggaagaggtcgatgaaacaggtgtagaagttaaggacatagaattggtcatgtcacaagcaaatgtgtcgagagcaaaggcagtccgagccctgaagaacaacagtaatgatattgtaaatgcgattatggaattaacaatgtaaccatatggaagcaactttttttggtgtctcaaaggagtaactgcagcttggtttgaaatttgtactgtttctatcataaataaagttatggcttcttgttgg

SEQ ID NO: 128022 - DNA, 1028 bp, Homo sapiens
acacaaaaatataggtcaggtacgaggctgggtggcgctttctgccgccatcttggttccgcgttccctgcacagcctcctttttattcccttccttcagaaatgcccggcgaagccacagaaaccgtccctgctacagagcaggagttgccgcagccccaggctgagacagggtctggaacagaatctgacagtgatgaatcagtaccagagcttgaagaacaggattccacccaggcaaccacacaacaagcccagctggcggcagcagctgaaatcgatgaagaaccagtcagtaaagcaaaacagagtcggagtgaaaagaaggcacggaaggctatgtccaaactgggtcttcggcaggttacaggagttactagagtcactatccggaaatctaagaatatcctctttgtcatcacaaaaccagatgtctacaagagccctgcttcagatacttacatagtttttggggaagccaagatcgaagatttatcccagcaagcacaactagcagctgctgagaaattcaaagttcaaggtgaagctgtctcaaacattcaagaaaacacacagactccaactgtacaagaggagagtgaagaggaagagcgatgatcaggtgcacaccacctgagtcgatgggtttgccggcggcctgggcctcttcgatcatttggatcaagggccaggcgcgtttgcgcaggctgactggctcctcgacaaaaggcacggactcgcgttcatccaccattgcagacgacacctcatccgataaggcgttcaacatggcaagagcccgaggcatatcctccggctcaatgatgcccggctgctgggcgaccttacccaacaagccaagcagcttgttacccaaatcattcaaaagcagcaaatccgcagtaacgccacagcgcagcctaatcgtcatttaacgtccccgcgagcctcacttgtagataagtctacgcttgcggatccagtggtcaatggcttaaagcgtgcggctcaagctgtaagcatgatta

SEQ ID NO: 128023 - DNA, 649 bp, Homo sapiens
acacaaaaatataggtcaggtacgaggctgggtggcgctttctgccgccatcttggttccgcgttccctgcacagcctcctttttattcccttccttcagaaatgcccggcgaagccacagaaaccgtccctgctacagagcaggagttgccgcagccccaggctgagacagggtctggaacagaatctgacagtgatgaatcagtaccagagcttgaagaacaggattccacccaggcaaccacacaacaagcccagctggcggcagcagctgaaatcgatgaagaaccagtcagtaaagcaaaacagagtcggagtgaaaagaaggcacggaaggctatgtccaaactgggtcttcggcaggttacaggagttactagagtcactatccggaaatctaagaatatcctctttgtcatcacaaaaccagatgtctacaagagccctgcttcagatacttacatagtttttggggaagccaagatcgaagatttatcccagcaagcacaactagcagctgctgagaaattcaaagttcaaggtgaagctgtctcaaacattcaagaaaacacacagactccaactgtacaagaggagagtgaagaggaagagcgatgaaacagtgtagaaattgaccggggtcctctag

SEQ ID NO: 128024 - DNA, 881 bp, Homo sapiens
  misc_feature (635)..(635): n is a, c, g, or t
  misc_feature (782)..(782): n is a, c, g, or t
  misc_feature (795)..(795): n is a, c, g, or t
  misc_feature (814)..(814): n is a, c, g, or t
  misc_feature (848)..(848): n is a, c, g, or t
  misc_feature (873)..(873): n is a, c, g, or t
acacaaaaatataggtcaggtacgaggctgggtggcgctttctgccgccatcttggttccgcgttccctgcacagcctcctttttattcccttccttcagaaatgcccggcgaagccacagaaaccgtccctgctacagagcaggagttgccgcagccccaggctgagacagggtctggaacagaatctgacagtgatgaatcagtaccagagcttgaagaacaggattccacccaggcaaccacacaacaagcccagctggcggcagcagctgaaatcgatgaagaaccagtcagtaaagcaaaacagagtcggagtgaaaagaaggcacggaaggctatgtccaaactgggtcttcggcaggttacaggagttactagagtcactatccggaaatctaagaatatcctctttgtcatcacaaaaccagatgtctacaagagccctgcttcagatacttacatagtttttggggaagccaagatcgaagatttatcccagcaagcacaactagcagctgctgagaaattcaaagttcaaggtgaagctgtctcaaacattcaagaaaacacacagactccaactgtacaagaggagagtgaagaggaagaggggagagccggccctgaggcagnagaatcccccctcaactggttgcacctcatgtccctcccgcacacgttgactctccctccttaatccccagggaccccgaggggttttcccacattttcccggcaggcaaggagccaccgattccccctttaaggaaggcgtttgantgttacgggcggncgccaggaggggcccaaanttaagttttggtttttcgggggaaacgttttttnggggagcatttttttttaaaatccntgtttggg

SEQ ID NO: 128025 - DNA, 766 bp, Homo sapiens
acacaaaaatataggtcaggtacgaggctgggtggcgctttctgccgccatcttggttccgcgttccctgcacagcctcctttttattcccttccttcagaaatgcccggcgaagccacagaaaccgtccctgctacagagcaggagttgccgcagccccaggctgagacagggtctggaacagaatctgacagtgatgaatcagtaccagagcttgaagaacaggattccacccaggcaaccacacaacaagcccagctggcggcagcagctgaaatcgatgaagaaccagtcagtaaagcaaaacagagtcggagtgaaaagaaggcacggaaggctatgtccaaactgggtcttcggcaggttacaggagttactagagtcactatccggaaatctaagaatatcctctttgtcatcacaaaaccagatgtctacaagagccctgcttcagatacttacatagtttttggggaagccaagatcgaagatttatcccagcaagcacaactagcagctgctgagaaattcaaagttcaaggtgaagctgtctcaaacattcaagaaaacacagttgtagaagctaaggacataccattggccctcgcacaagcaaatgtgcccggcgcaaaggaagcctttccctggacaccccaggcttgatattctaaatgccatttcgaaataaccatgtcccatattgtaacgaatttttttccagcccaaagtataaccgcccctctcctaaatttgaaccgcacattcc

SEQ ID NO: 128026 - DNA, 603 bp, Homo sapiens
acacaaaaatataggtcaggtacgaggctgggtggcgctttctgccgccatcttggttccgcgttccctgcacagcctcctttttattcccttccttcagaaatgcccggcgaagccacagaaaccgtccctgctacagagcaggagttgccgcagccccaggctgagacagggtctggaacagaatctgacagtgatgaatcagtaccagagcttgaagaacaggattccacccaggcaaccacacaacaagcccagctggcggcagcagctgaaatcgatgaagaaccagtcagtaaagcaaaacagagtcggagtgaaaagaaggcacggaaggctatgtccaaactgggtcttcggcaggttacaggagttactagagtcactatccggaaatctaagaatatcctctttgtcatcacaaaaccagatgtctacaagagccctgcttcagatacttacatagtttttggggaagccaagatcgaagatttatcccagcaagcacaactagcagctgctgagaaattcaaagttcaaggtgaagctgtctcaaacattcaagaaaacatccggaatcactatcaggtccgtacggagccg

SEQ ID NO: 128027 - DNA, 1039 bp, Homo sapiens
acacaaaaatataggtcaggtacgaggctgggtggcgctttctgccgccatcttggttccgcgttccctgcacagcctcctttttattcccttccttcagaaatgcccggcgaagccacagaaaccgtccctgctacagagcaggagttgccgcagccccaggctgagacagggtctggaacagaatctgacagtgatgaatcagtaccagagcttgaagaacaggattccacccaggcaaccacacaacaagcccagctggcggcagcagctgaaatcgatgaagaaccagtcagtaaagcaaaacagagtcggagtgaaaagaaggcacggaaggctatgtccaaactgggtcttcggcaggttacaggagttactagagtcactatccggaaatctaagaatatcctctttgtcatcacaaaaccagatgtctacatcgaagatttatcccagcaagcacaactagcagctgctgagaaattcaaagttcaaggtgaagctgtctcaaacattcaagaaaacacacagactccaactgtacaagaggagagtgaagaggaagaggtcgatgaaacaggtgtagaagttaaggacatagaattggtcatgtcacaagcaaatgtgtcgagagcaaaggcagtccgagccctgaagaacaacagtaatgatattgtaaatgcgattatggtaagtgttcaagcctttgttccttgactccctctgccctgaccaattatgagtgactttattttgtcttgctaaatatcagccaattaaggaacctcattccagagcctcttctgagttgccgtataggttttagtggcctaaattctcctgatttgcctgtaagagttttagtgacctgaattctcctgatttgcctataagaaccgctaattatcttttctctgttacagaattaacaatgtaaccatatggaagcaactttttttggtgtctcaaaggagtaactgcagcttggtttgaaatttgtactgtttctatcataaataaagttatggcttcttgttgg

SEQ ID NO: 128028 - DNA, 503 bp, Homo sapiens
acacaaaaatataggtcaggtacgaggctgggtggcgctttctgccgccatcttggttccgcgttccctgcacagcctcctttttattcccttccttcagaaatgcccggcgaagccacagaaaccgtccctgctacagagcaggagttgccgcagccccaggctgagacagggtctggaacagaatctgacagtgatgaatcagtaccagagcttgaagaacaggattccacccaggcaaccacacaacaagcccagctggcggcagcagctgaaatcgatgaagaaccagtcagtaaagcaaaacagagtcggagtgaaaagaaggcacggaaggctatgtccaaactgggtcttcggcaggttacaggagttactagagtcactatccggaaatctaagaatatcctctttgtcatcacaaaaccagatgtctacaagagccctgcttcagatacttacatagtttttggggaagccaagtctctctctgtatgggggtg

SEQ ID NO: 128029 - DNA, 531 bp, Homo sapiens
  misc_feature (527)..(527): n is a, c, g, or t
acacaaaaatataggtcaggtacgaggctgggtggcgctttctgccgccatcttggttccgcgttccctgcacagcctcctttttattcccttccttcagaaatgcccggcgaagccacagaaaccgtccctgctacagagcaggagttgccgcagccccaggctgagacagggtctggaacagaatctgacagtgatgaatcagtaccagagcttgaagaacaggattccacccaggcaaccacacaacaagcccagctggcggcagcagctgaaatcgatgaagaaccagtcagtaaagcaaaacagagtcggagtgaaaagaaggcacggaaggctatgtccaaactgggtcttcggcaggttacaggagttactagagtcactatccggaaatctaagaatatcctctttgtcatcacaaaaccagatgtctacccttgaactttgaatttctcaacagctgctagttgtgcttgctgggataaatcttcgatctgcttccccgaaactatgtaagtatggtncaca

SEQ ID NO: 128030 - DNA, 396 bp, Homo sapiens
acacaaaaatataggtcaggtacgaggctgggtggcgctttctgccgccatcttggttccgcgttccctgcacaaaatgcccggcgaagccacagaaaccgtccctgctacagagcaggagttgccgcagccccaggctgagacagggtctggaacagaatctgacagtgatgaatcagtaccagagcttgaagaacaggattccacccaggcaaccacacaacaagcccagctggcggcagcagctgaaatcgatgaagaaccagtcagtaaagcaaaacagagtcggagtgaaaagaaggcacggaaggctatgtccaaactgggtcttcggcaggttacaggagttactagagtagatccgatatctgggatcctctagaacaccgcagcaca

SEQ ID NO: 128031 - DNA, 309 bp, Homo sapiens
gatgatctagaggatcccggatatatttcacagactccaactgtacaagaggagagtgaagaggaagaggtcgatgaaacaggtgtagaagttaaggacatagaattggtcatgtcacaagcaaatgtgtcgagagcaaaggcagtccgagccctgaagaacaacagtaatgatattgtaaatgcgattatggaattaacaatgtaaccatatggaagcaactttttttggtgtctcaaaggagtaactgcagcttggtttgaaatttgtactgtttctatcataaataaagttatggcttcttgttgg

SEQ ID NO: 128032 - DNA, 794 bp, Homo sapiens
acacaaaaatataggtcaggtacgaggctgggtggcgctttctgccgccatcttggttccgcgttccctgcacagcctcctttttattcccttccttcagaaatgcccggcgaagccacagaaaccgtccctgctacagagcaggagttgccgcagccccaggctgagacagggtctggaacagaatctgacagtgatgaatcagtaccagagcttgaagaacaggattccacccaggcaaccacacaacaagcccagctggcggcagcagctgaaatcgatgaagaaccagtcagtaaagcaaaacagagtcggagtgaaaagaaggcacggaagaagagccctgcttcagatacttacatagtttttggggaagccaagatcgaagatttatcccagcaagcacaactagcagctgctgagaaattcaaagttcaaggtgaagctgtctcaaacattcaagaaaacacacagactccaactgtacaagaggagagtgaagaggaagaggtcgatgaaacaggtgtagaagttaaggacatagaattggtcatgtcacaagcaaatgtgtcgagagcaaaggcagtccgagccctgaagaacaacagtaatgatattgtaaatgcgattatggaattaacaatgtaaccatatggaagcaactttttttggtgtctcaaaggagtaactgcagctcgcccctgagttagcagctcgcgcttgattcagcagctcgcctgaggtatcacctcgcacctgagtaaacagctcgccctgagtaagcccaggttccc

SEQ ID NO: 128033 - DNA, 694 bp, Homo sapiens
  misc_feature (559)..(559): n is a, c, g, or t
  misc_feature (694)..(694): n is a, c, g, or t
acacaaaaatataggtcaggtacgaggctgggtggcgctttctgccgccatcttggttccgcgttccctgcacaaaatgcccggcgaagccacagaaaccgtccctgctacagagcaggagttgccgcagccccaggctgagacagggtctggaacagaatctgacagtgatgaatcagtaccagagcttgaagaacaggattccacccaggcaaccacacaacaagcccagctggcggcagcagctgaaatcgatgaagaaccagtcagtaaagcaaaacagagtcggagtgaaaagaaggcacggaagaaaaaaaaaaaaaaaaaaaaaaaaaaaaacaaaaaacaaaaaaaaattggggggcggcccggccccctcacaaaagcttttccagaacccaactgtgtgtgggggaccgggggccccagtaaggtcaactgcgacacatgagtgcgcaactaacgagggggtcccaagggcagaacgcggggggcagaagacaaagcggcgtgggagatctcccccccaaaataaaaacccggccgcggggaggcagancacggagcggtctgtagacacacctcccacaaggggactctcaggcagccgcaaatacgaggggcgctctcatcaaccgcgggagcctccaaggggaccacccgcatttaaatttaagccgcgggatggggaggn

SEQ ID NO: 128034 - DNA, 826 bp, Homo sapiens
acacaaaaatataggtcaggtacgaggctgggtggcgctttctgccgccatcttggttccgcgttccctgcacaaaatgcccggcgaagccacagaaaccgtccctgctacagagcaggagttgccgcagccccaggctgagacagggtctggaacagaatctgacagtgatgaatcagtaccagagcttgaagaacaggattccacccaggcaaccacacaacaagcccagctggcggcagcagctgaaatcgatgaagaaccagtcagtaaagcaaaacagagtcggagtgaaaagaaggcacggaaggctatgtccaaactgggtcttcggcaggttacaggagttactagagtcactatccggaaatctaagaatatcctctttgtcatcacaaaaccagatgtctacaagagccctgcttcagatacttacatagtttttggggaagccaagatcgaagatttatcccagcaagcacaactagcagctgctgagaaattcaaagttcaaggtgaagctgtctcaaacattcaagaaaacacacagactccaactgtacaagaggagagtgaagaggaagaggtcgatgaaacaggtgtagaagttaaggacatagaattggtcatgtcacaagcaaatgtgtcgagagcaaaggcagtccgagccctgaagaacaacagtaatgatattgtaaatgcgattatggaattaacaatgtaaccatatggaagcaactttttttggtgtctcaaaggagtaactgcagcttggtttgaaatttgtactgtttctatcataaataaagttatggcttcttgttgg

SEQ ID NO: 128035 - DNA, 931 bp, Homo sapiens
ctagttctagatcgcgagcggccgctcgcgatctagaactagcaaatgcccggcgaagccacagaaaccgtccctgctacagagcaggagttgccgcagccccaggctgagacagggtctggaacagaatctgacagtgatgaatcagtaccagagcttgaagaacaggattccacccaggcaaccacacaacaagcccagctggcggcagcagctgaaatcgatgaagaaccagtcagtaaagcaaaacagagtcggagtgaaaagaaggcacggaaggctatgtccaaactgggtcttcggcaggttacaggagttactagagtcactatccggaaatctaagaatatcctctttgtcatcacaaaaccagatgtctacaagagccctgcttcagatacttacatagtttttggggaagccaagatcgaagatttatcccagcaagcacaactagcagctgctgagaaattcaaagttcaaggtgaagctgtctcaaacattcaagaaaacacacagactccaactgtacaagaggagagtgaagaggaagaggtcgatgaaacaggtgtagaagttaaggacatagaattggtcatgtcacaagcaaatgtgtcgagagcaaaggcagtccgagccctgaagaacaacagtaatgatattgtaaatgcgattatggaattaacaatgtaaccatatggaagcaactttttttggtgtctcaaaggagtaactgcagcttggtttgaaatttgtactgtttctatcataaataaagttatggcttcttgttggaaaaaaacaaaagggggggcgtaaaatttcctagggggggcaagttacacgaccagcttttttacaaagggccaaaaggagaatttaagaagactgggggctaacagtgtgatggcatgtacggattggagggaca

SEQ ID NO: 128036 - DNA, 585 bp, Homo sapiens
cggggcggtctagaggatcccggtcaatttctacacaaaacagatcggagtgaaaagaaggcacggaaggctatgtccaaactgggtcttcggcaggttacaggagttactagagtcactatccggaaatctaagaatatcctctttgtcatcacaaaaccagatgtctacaagagccctgcttcagatacttacatagtttttggggaagccaagatcgaagatttatcccagcaagcacaactagcagctgctgagaaattcaaagttcaaggtgaagctgtctcaaacattcaagaaaacacacagactccaactgtacaagaggagagtgaagaggaagaggtcgatgaaacaggtgtagaagttaaggacatagaattggtcatgtcacaagcaaatgtgtcgagagcaaaggcagtccgagccctgaagaacaacagtaatgatattgtaaatgcgattatggaattaacaatgtaaccatatggaagcaactttttttggtgtctcaaaggagtaactgcagcttggtttgaaatttgtactgtttctatcataaataaagttatggcttcttgttgg

SEQ ID NO: 128037 - DNA, 384 bp, Homo sapiens
  misc_feature (1)..(1): n is a, c, g, or t
naattcgcggccgcgtacgaccggctgcgcagaagacgacagaagggagctgctgagaaattcaaagttcaaggtgaagctgtctcaaacattcaagaaaacacacagactccaactgtacaagaggagagtgaagaggaagaggtcgatgaaacaggtgtagaagttaaggacatagaattggtcatgtcacaagcaaatgtgtcgagagcaaaggcagtccgagccctgaagaacaacagtaatgatattgtaaatgcgattatggaattaacaatgtaaccatatggaagcaactttttttggtgtctcaaaggagtaactgcagcttggtttgaaatttgtactgtttctatcataaataaagttatggcttcttgttgg

SEQ ID NO: 128038 - DNA, 675 bp, Homo sapiens
atacgctagtcgaggctgggttcaatcggccgagggcttgaagaacaggattccacccaggcaaccacacaacaagcccagctggcggcagcagctgaaatcgatgaagaaccagtcagtaaagcaaaacagagtcggagtgaaaagaaggcacggaaggctatgtccaaactgggtcttcggcaggttacaggagttactagagtcactatccggaaatctaagaatatcctctttgtcatcacaaaaccagatgtctacaagagccctgcttcagatacttacatagtttttggggaagccaagatcgaagatttatcccagcaagcacaactagcagctgctgagaaattcaaagttcaaggtgaagctgtctcaaacattcaagaaaacacacagactccaactgtacaagaggagagtgaagaggaagaggtcgatgaaacaggtgtagaagttaaggacatagaattggtcatgtcacaagcaaatgtgtcgagagcaaaggcagtccgagccctgaagaacaacagtaatgatattgtaaatgcgattatggaattaacaatgtaaccatatggaagcaactttttttggtgtctcaaaggagtaactgcagcttggtttgaaatttgtactgtttctatcataaataaagttatggcttcttgttgg

SEQ ID NO: 128039 - DNA, 935 bp, Homo sapiens
  misc_feature (877)..(877): n is a, c, g, or t
  misc_feature (903)..(903): n is a, c, g, or t
acacaaaaatataggtcaggtacgaggctgggtggcgctttctgccgccatcttggttccgcgttccctgcacagcctcctttttattcccttccttcagaaatgcccggcgaagccacagaaaccgtccctgctacagagcaggagttgccgcagccccaggctgagacagggtctggaacagaatctgacagtgatgaatcagtaccagagcttgaagaacaggattccacccaggcaaccacacaacaagcccagctggcggcagcagctgaaatcgatgaagaaccagtcagtaaagcaaaacagagtcggagtgaaaagaaggcacggaaggctatgtccaaactgggtcttcggcaggttacaggagttactagagtcactatccggaaatctaagaatatcctctttgtcatcacaaaaccagatgtctacaagagccctgcttcagatacttacatagtttttggggaagccaagatcgaagatttatcccagcaagcacaactagcagctgctgagaaattcaaagttcaaggtgaagctgtctcaaacattcaagaaaacacacagactccaactgtacaagaggagagtgaagaggaagaggtcgatgaaacaggtgtagaagttaaggacatagaattggtcatgtcacaagcaaatgtgtcgagagcaaaggcagtccgagccctgaagaacaacagtaatgatattgtaaatgcgattatggaattaacaatgtaaccatatggaagcaactttttttggtgtctcaaaggagtaactgcagcttggtttgaaatttgtactgtttctatcataaataaagttatggcttcttgttgggaaaaaaaaaaaaaaaaccgggctnttttgggggggaaaaggttaagggcnggcttgtccgccctttttgtcagggaatcgcg

SEQ ID NO: 128040 - DNA, 944 bp, Homo sapiens
  misc_feature (910)..(911): n is a, c, g, or t
  misc_feature (916)..(916): n is a, c, g, or t
  misc_feature (920)..(920): n is a, c, g, or t
  misc_feature (925)..(925): n is a, c, g, or t
  misc_feature (933)..(934): n is a, c, g, or t
acacaaaaatataggtcaggtacgaggctgggtggcgctttctgccgccatcttggttccgcgttccctgcacagcctcctttttattcccttccttcagaaatgcccggcgaagccacagaaaccgtccctgctacagagcaggagttgccgcagccccaggctgagacagggtctggaacagaatctgacagtgatgaatcagtaccagagcttgaagaacaggattccacccaggcaaccacacaacaagcccagctggcggcagcagctgaaatcgatgaagaaccagtcagtaaagcaaaacagagtcggagtgaaaagaaggcacggaaggctatgtccaaactgggtcttcggcaggttacaggagttactagagtcactatccggaaatctaagaatatcctctttgtcatcacaaaaccagatgtctacaagagccctgcttcagatacttacatagtttttggggaagccaagatcgaagatttatcccagcaagcacaactagcagctgctgagaaattcaaagttcaaggtgaagctgtctcaaacattcaagaaaacacacagactccaactgtacaagaggagagtgaagaggaagaggtcgatgaaacaggtgtagaagttaaggacatagaattggtcatgtcacaagcaaatgtgtcgagagcaaaggcagtccgagccctgaagaacaacagtaatgatattgtaaatgcgattatggaattaacaatgtaaccatatggaagcaactttttttggtgtctcaaaggagtaactgcagcttggtttgaaatttgtactgtttctatcataaataaagttatggcttcttgttggcaaaaaaaaaaaggggggcggctaaaaatcccgggggccaattacgtacccgttttgnncaagngccntaggnataaaaanngcggcgggta

SEQ ID NO: 128041 - DNA, 1226 bp, Homo sapiens
acacaaaaatataggtcaggtacgaggctgggtggcgctttctgccgccatcttggttccgcgttccctgcacaaaatgcccggcgaagccacagaaaccgtccctgctacagagcaggagttgccgcagccccaggctgagacagggtctggaacagaatctgacagtgatgaatcagtaccagagcttgaagaacaggattccacccaggcaaccacacaacaagcccagctggcggcagcagctgaaatcgatgaagaaccagtcagtaaagcaaaacagagtcggagtgaaaagaaggcacggaaggctatgtccaaactgggtcttcggcaggttacaggagttactagagtcactatccggaaatctaagaatatcctctttgtcatcacaaaaccagatgtctacaagagccctgcttcagatacttacatagtttttggggaagccaagatcgaagatttatcccagcaagcacaactagcagctgctgagaaattcaaagttcaaggtgaagctgtctcaaacattcaagaaaacacacagactccaactgtacaagaggagagtgaagaggaagaggtcgatgaaacaggtgtagaagttaaggacatagaattggtcatgtcacaagcaaatgtgtcgagagcaaaggcagtccgagccctgaagaacaacagtaatgatattgtaaatgcgattatggaattaacaatgtaaccatatggaagcaactttttttggtgtctcaaaggagtaactgcagcttggtttgaaatttgtactgtttctatcataaataaagttatggcttcttgttggaacaaacaaaaaaaaacaaaaaaaaaaaaaaaaaaaaaaaaaaaaaaagttttttgcggcgcggccttgggccccggaaaaaaagtttttattataaacacatattctgcgtttggggcgcgcgcgggggccaagtataggggctaccgtggaaactatgtgggtaatataggctggggttcacatataggagaacatctctgggcgcacatagaacctataggtcgttgggagtttcctcaacaattataaaaaaggcgccgggggggaaaaccgcgagcgcggttctttaagacacaattctcacgaatgggggggtccagaggggtcttagcggggctcatctcaacggggaggtgtcatacggaggagtcgaatattaaattagcccgcatggtgc

SEQ ID NO: 128042 - DNA, 877 bp, Homo sapiens
acacaaaaatataggtcaggtacgaggctgggtggcgctttctgccgccatcttggttccgcgttccctgcacagcctcctttttattcccttccttcagaaatgcccggcgaagccacagaaaccgtccctgctacagagcaggagttgccgcagccccaggctgagacagggtctggaacagaatctgacagtgatgaatcagtaccagagcttgaagaacaggattccacccaggcaaccacacaacaagcccagctggcggcagcagctgaaatcgatgaagaaccagtcagtaaagcaaaacagagtcggagtgaaaagaaggcacggaaggctatgtccaaactgggtcttcggcaggttacaggagttactagagtcactatccggaaatctaagaatatcctctttgtcatcacaaaaccagatgtctacaagagccctgcttcagatacttacatagtttttggggaagccaagatcgaagatttatcccagcaagcacaactagcagctgctgagaaattcaaagttcaaggtgaagctgtctcaaacattcaagaaaacacacagactccaactgtacaagaggagagtgaagaggaagaggtcgatgaaacaggtgtagaagttaaggacatagaattggtcatgtcacaagcaaatgtgtcgagagcaaaggcagtccgagccctgaagaacaacagtaatgatattgtaaatgcgattatggaattaacaatgtaaccatatggaagcaactttttttggtgtctcaaaggagtaactgcagcttggtttgaaatttgtactgtttctatcataaataaagttatggcttcttgttgggcttgggatcctctagagtcaccca

SEQ ID NO: 128043 - DNA, 892 bp, Homo sapiens
acacaaaaatataggtcaggtacgaggctgggtggcgctttctgccgccatcttggttccgcgttccctgcacagcctcctttttattcccttccttcagaaatgcccggcgaagccacagaaaccgtccctgctacagagcaggagttgccgcagccccaggctgagacagggtctggaacagaatctgacagtgatgaatcagtaccagagcttgaagaacaggattccacccaggcaaccacacaacaagcccagctggcggcagcagctgaaatcgatgaagaaccagtcagtaaagcaaaacagagtcggagtgaaaagaaggcacggaaggctatgtccaaactgggtcttcggcaggttacaggagttactagagtcactatccggaaatctaagaatatcctctttgtcatcacaaaaccagatgtctacaagagccctgcttcagatacttacatagtttttggggaagccaagatcgaagatttatcccagcaagcacaactagcagctgctgagaaattcaaagttcaaggtgaagctgtctcaaacattcaagaaaacacacagactccaactgtacaagaggagagtgaagaggaagaggtcgatgaaacaggtgtagaagttaaggacatagaattggtcatgtcacaagcaaatgtgtcgagagcaaaggcagtccgagccctgaagaacaacagtaatgatattgtaaatgcgattatggaattaacaatgtaaccatatggaagcaactttttttggtgtctcaaaggagtaactgcagcttggtttgaaatttgtactgtttctatcataaataaagttatggcttcttgttggaagtcgacgcggccgcgaatttagtagtagtaggggccgc

SEQ ID NO: 128044 - DNA, 1011 bp, Homo sapiens
  misc_feature (861)..(861): n is a, c, g, or t
acacaaaaatataggtcaggtacgaggctgggtggcgctttctgccgccatcttggttccgcgttccctgcacagcctcctttttattcccttccttcagaaatgcccggcgaagccacagaaaccgtccctgctacagagcaggagttgccgcagccccaggctgagacagggtctggaacagaatctgacagtgatgaatcagtaccagagcttgaagaacaggattccacccaggcaaccacacaacaagcccagctggcggcagcagctgaaatcgatgaagaaccagtcagtaaagcaaaacagagtcggagtgaaaagaaggcacggaaggctatgtccaaactgggtcttcggcaggttacaggagttactagagtcactatccggaaatctaagaatatcctctttgtcatcacaaaaccagatgtctacaagagccctgcttcagatacttacatagtttttggggaagccaagatcgaagatttatcccagcaagcacaactagcagctgctgagaaattcaaagttcaaggtgaagctgtctcaaacattcaagaaaacacacagactccaactgtacaagaggagagtgaagaggaagaggtcgatgaaacaggtgtagaagttaaggacatagaattggtcatgtcacaagcaaatgtgtcgagagcaaaggcagtccgagccctgaagaacaacagtaatgatattgtaaatgcgattatggaattaacaatgtaaccatatggaagcaactttttttggtgtctcaaaggagtaactgcagcttggtttgaaatttgtactgtttctatcataaataaagttatggcttcttgttggaacaaacancaacaaaaaccccggagcatatattacgcggccgagcaacgggttgactgggcatgtgctagctttcctgcccgtttttgtccaggggactgcggccccaagggggaaatcgacctgggtccctgaacatgtacctctctgctcgtcgag

SEQ ID NO: 128045 - DNA, 898 bp, Homo sapiens
acacaaaaatataggtcaggtacgaggctgggtggcgctttctgccgccatcttggttccgcgttccctgcacagcctcctttttattcccttccttcagaaatgcccggcgaagccacagaaaccgtccctgctacagagcaggagttgccgcagccccaggctgagacagggtctggaacagaatctgacagtgatgaatcagtaccagagcttgaagaacaggattccacccaggcaaccacacaacaagcccagctggcggcagcagctgaaatcgatgaagaaccagtcagtaaagcaaaacagagtcggagtgaaaagaaggcacggaaggctatgtccaaactgggtcttcggcaggttacaggagttactagagtcactatccggaaatctaagaatatcctctttgtcatcacaaaaccagatgtctacaagagccctgcttcagatacttacatagtttttggggaagccaagatcgaagatttatcccagcaagcacaactagcagctgctgagaaattcaaagttcaaggtgaagctgtctcaaacattcaagaaaacacacagactccaactgtacaagaggagagtgaagaggaagaggtcgatgaaacaggtgtagaagttaaggacatagaattggtcatgtcacaagcaaatgtgtcgagagcaaaggcagtccgagccctgaagaacaacagtaatgatattgtaaatgcgattatggaattaacaatgtaaccatatggaagcaactttttttggtgtctcaaaggagtaactgcagcttggtttgaaatttgtactgtttctatcataaataaagttatggcttcttgttggatgctctgtggtgaggtttttgcgtggggttgtgatgtggggggga

SEQ ID NO: 128046 - DNA, 1051 bp, Homo sapiens
  misc_feature (1009)..(1009): n is a, c, g, or t
  misc_feature (1012)..(1014): n is a, c, g, or t
  misc_feature (1037)..(1037): n is a, c, g, or t
acacaaaaatataggtcaggtacgaggctgggtggcgctttctgccgccatcttggttccgcgttccctgcacagcctcctttttattcccttccttcagaaatgcccggcgaagccacagaaaccgtccctgctacagagcaggagttgccgcagccccaggctgagacagggtctggaacagaatctgacagtgatgaatcagtaccagagcttgaagaacaggattccacccaggcaaccacacaacaagcccagctggcggcagcagctgaaatcgatgaagaaccagtcagtaaagcaaaacagagtcggagtgaaaagaaggcacggaaggctatgtccaaactgggtcttcggcaggttacaggagttactagagtcactatccggaaatctaagaatatcctctttgtcatcacaaaaccagatgtctacaagagccctgcttcagatacttacatagtttttggggaagccaagatcgaagatttatcccagcaagcacaactagcagctgctgagaaattcaaagttcaaggtgaagctgtctcaaacattcaagaaaacacacagactccaactgtacaagaggagagtgaagaggaagaggtcgatgaaacaggtgtagaagttaaggacatagaattggtcatgtcacaagcaaatgtgtcgagagcaaaggcagtccgagccctgaagaacaacagtaatgatattgtaaatgcgattatggaattaacaatgtaaccatatggaagcaactttttttggtgtctcaaaggagtaactgcagcttggtttgaaatttgtactgtttctatcataaataaagttatggcttcttgttgggagctaagctcccaacaagaaggttaacattttctgattcatgttagactttgaagagactaaagaaaattttcagaggaacatatgcctgagaacctttgcatgaatttaaaatttcattatccattcttataagaaggaagatgattgtaaaganatnnnccgaagttaaatctgtataggantgatcatctctaag

SEQ ID NO: 128047 - DNA, 988 bp, Homo sapiens
acacaaaaatataggtcaggtacgaggctgggtggcgctttctgccgccatcttggttccgcgttccctgcacagcctcctttttattcccttccttcagaaatgcccggcgaagccacagaaaccgtccctgctacagagcaggagttgccgcagccccaggctgagacagggtctggaacagaatctgacagtgatgaatcagtaccagagcttgaagaacaggattccacccaggcaaccacacaacaagcccagctggcggcagcagctgaaatcgatgaagaaccagtcagtaaagcaaaacagagtcggagtgaaaagaaggcacggaaggctatgtccaaactgggtcttcggcaggttacaggagttactagagtcactatccggaaatctaagaatatcctctttgtcatcacaaaaccagatgtctacaagagccctgcttcagatacttacatagtttttggggaagccaagatcgaagatttatcccagcaagcacaactagcagctgctgagaaattcaaagttcaaggtgaagctgtctcaaacattcaagaaaacacacagactccaactgtacaagaggagagtgaagaggaagaggtcgatgaaacaggtgtagaagttaaggacatagaattggtcatgtcacaagcaaatgtgtcgagagcaaaggcagtccgagccctgaagaacaacagtaatgatattgtaaatgcgattatggaattaacaatgtaaccatatggaagcaactttttttggtgtctcaaaggagtaactgcagcttggtttgaaatttgtactgtttctatcataaataaagttatggcttcttgttggaaaaaaacaaaagggggggcgtaaaatttcctagggggggcaagttacacgaccagcttttttacaaagggccaaaaggagaatttaagaagactgggggctaacagtgtgatggcatgtacggattggagggaca

SEQ ID NO: 128048 - DNA, 920 bp, Homo sapiens
  misc_feature (769)..(769): n is a, c, g, or t
  misc_feature (808)..(808): n is a, c, g, or t
acacaaaaatataggtcaggtacgaggctgggtggcgctttctgccgccatcttggttccgcgttccctgcacagcctcctttttattcccttccttcagaaatgcccggcgaagccacagaaaccgtccctgctacagagcaggagttgccgcagccccaggctgagacagggtctggaacagaatctgacagtgatgaatcagtaccagagcttgaagaacaggattccacccaggcaaccacacaacaagcccagctggcggcagcagctgaaatcgatgaagaaccagtcagtaaagcaaaacagagtcggagtgaaaagaaggcacggaaggctatgtccaaactgggtcttcggcaggttacaggagttactagagtcactatccggaaatctaagaatatcctctttgtcatcacaaaaccagatgtctacaagagccctgcttcagatacttacatagtttttggggaagccaagatcgaagatttatcccagcaagcacaactagcagctgctgagaaattcaaagttcaaggtgaagctgtctcaaacattcaagaaaacacacagactccaactgtacaagaggagagtgaagaggaagaggtcgatgaaacaggtgtagaagttaaggacatagaattggtcatgtcacaagcaaatgtgtcgagagcaaaggcagtccgagccctgaagaacaacagtaatgatattgtaaatgcgattatgaattaacatgtacatatggaagcacttttggggnctcaagggtactgcggtggtgaattgcgggcataaaaangtagggctcttggtgaaaaaaaaaaaatcagggatatttgggggagaaagagatagaagggaagggtaaggttcgtacactttgcagggaaaagggcaaagagtaaaacgaa

SEQ ID NO: 128049 - DNA, 1509 bp, Homo sapiens
acacaaaaatataggtcaggtacgaggctgggtggcgctttctgccgccatcttggttccgcgttccctgcacagcctcctttttattcccttccttcagaaatgcccggcgaagccacagaaaccgtccctgctacagagcaggagttgccgcagccccaggctgagacagggtctggaacagaatctgacagtgatgaatcagtaccagagcttgaagaacaggattccacccaggcaaccacacaacaagcccagctggcggcagcagctgaaatcgatgaagaaccagtcagtaaagcaaaacagagtcggagtgaaaagaaggcacggaaggctatgtccaaactgggtcttcggcaggttacaggagttactagagtcactatccggaaatctaagaatatcctctttgtcatcacaaaaccagatgtctacaagagccctgcttcagatacttacatagtttttggggaagccaagatcgaagatttatcccagcaagcacaactagcagctgctgagaaattcaaagttcaaggtgaagctgtctcaaacattcaagaaaacacacagactccaactgtacaagaggagagtgaagaggaagaggtcgatgaaacaggtgtagaagttaaggacatagaattggtcatgtcacaagcaaatgtgtcgagagcaaaggcagtccgagccctgaagaacaacagtaatgatattgtaaatgcgattatggtaagtgttcaagcctttgttccttgactccctctgccctgaccaattatgagtgactttattttgtcttgctaaatatcagccaattaaggaacctcattccagagcctcttctgagttgccgtataggttttagtggcctaaattctcctgatttgcctgtaagagttttagtgacctgaattctcctgatttgcctataagaaccgctaattatcttttctctgttacagaattaacaatgtaaccatatggaagcaactttttttggtgtctcaaaggagtaactgcagcttggtttgaaatttgtactgtttctatcataaataaagttatggcttcttgttgggaaaaaaaaaaaaaaaaaaaaaaaaaaaaaaaaaaaaaaaaaaaaaaaaaaaaaaaaaaaaaaaaaaaacaaacaaaaaaaaacaaaaaaaaaaaaaaaaaaaaaaaaaaagagggggggggcgcggcacacaacgaacctccccgctgcggcgggcggccgacgagcaacgacagcccgcgtcgtgtttaaaaaaagaaagcgggccccaacaaggggaggaggcggagaagtaaatcgaacaagaggcgaggggaggccataacaaaacaacgcggaggtgagaaaagaaacaacaccagcggcattaaggaaaggcacaacacaacatcagccgaggggagaaaaaaaagggagaaaaacacacgcagaaacaaagccgcggagaaggacaaaacagaagacgacagaagcgagggggacac

SEQ ID NO: 128050 - DNA, 744 bp, Homo sapiens
acacaaaaatataggtcaggtacgaggctgggtggcgctttctgccgccatcttggttccgcgttccctgcacagcctcctttttattcccttccttcagaaatgcccggcgaagccacagaaaccgtccctgctacagagcaggagttgccgcagccccaggctgagacagggtctggaacagaatctgacagtgatgaatcagtaccagagcttgaagaacaggattccacccaggcaaccacacaacaagcccagctggcggcagcagctgaaatcgatgaagaaccagtcagtaaagcaaaacagagtcggagtgaaaagaaggcacggaaggctatgtccaaactgggtcttcggcaggttacaggagttactagagtcactatccggaaatctaagaatatcctctttgtcatcacaaaaccagatgtctacaagagccctgcttcagatacttacatagtttttggggaagccaagatcgaagatttatcccagcaagcacaactagcagctgctgagaaattcaaagttcaaggtgaagctgtctcaaacattcaagaaaacacacagactccaactgtacaagaggagagtgaagaggaagaggtcgatgaaacaggtgtagaagttaaggacatagaattggtcatgtcacaagcaaatgtgtcgagagcaaaggcagtccgagccctgaagaacacgtgcggtatgaacacgtgagacctctagacaccccca

SEQ ID NO: 128051 - DNA, 1199 bp, Homo sapiens
acacaaaaatataggtcaggtacgaggctgggtggcgctttctgccgccatcttggttccgcgttccctgcacagcctcctttttattcccttccttcagaaatgcccggcgaagccacagaaaccgtccctgctacagagcaggagttgccgcagccccaggctgagacagggtctggaacagaatctgacagtgatgaatcagtaccagagcttgaagaacaggattccacccaggcaaccacacaacaagcccagctggcggcagcagctgaaatcgatgaagaaccagtcagtaaagcaaaacagagtcggagtgaaaagaaggcacggaaggctatgtccaaactgggtcttcggcaggttacaggagttactagagtcactatccggaaatctaagaatatcctctttgtcatcacaaaaccagatgtctacaagagccctgcttcagatacttacatagtttttggggaagccaagggtgagtaaacttttcttgggcattgttccagaccagggtttctcaacctcagcactgctgacattttgcgtcagatagttctctgttatggaagggctatccattacatccagttttgattacccaaaaactccattgccatatatctcctgggagacctaactaccccctagttgagaaccactgctctaaacctaaacaactactctttctactgtgagggcaagcagtttaaagctgtacaataagttacctgaatgggtttacagagagttgtgaaactatatgatttatttttcaaagactgctaatctactcacatggatctgtattttctaccctgtagatcgaagatttatcccagcaagcacaactagcagctgctgagaaattcaaagttcaaggtgaagctgtctcaaacattcaagaaaacacacagactccaactgtacaagaggagagtgaagaggaagaggtcgatgaaacaggtgtagaagttaaggacatagaattggtcatgtcacaagcaaatgtgtcgagagcaaaggcagtccgagccctgaagaacaacagtaatgatattgtaaatgcgattatggaattaacaatgtaaccatatggaagcaactttttttggtgtctcaaaggagtaactgcagcttggtttgaaatttgtactgtttctatcataaataaagttatggcttcttgttgg

SEQ ID NO: 128052 - DNA, 750 bp, Homo sapiens
acacaaaaatataggtcaggtacgaggctgggtggcgctttctgccgccatcttggttccgcgttccctgcacagcctcctttttattcccttccttcagaaatgcccggcgaagccacagaaaccgtccctgctacagagcaggagttgccgcagccccaggctgagacagggtctggaacagaatctgacagtgatgaatcagtaccagagcttgaagaacaggattccacccaggcaaccacacaacaagcccagctggcggcagcagctgaaatcgatgaagaaccagtcagtaaagcaaaacagagtcggagtgaaaagaaggcacggaagaagagccctgcttcagatacttacatagtttttggggaagccaagatcgaagatttatcccagcaagcacaactagcagctgctgagaaattcaaagttcaaggtgaagctgtctcaaacattcaagaaaacacacagactccaactgtacaagaggagagtgaagaggaagaggtcgatgaaacaggtgtagaagttaaggacatagaattggtcatgtcacaagcaaatgtgtcgagagcaaaggcagtccgagccctgaagaacaacagtaatgatattgtaaatgcgattatggaattaacaatgtaaccatatggaagcaactttttttggtgtctcaaaggagtaactgcagcttggtttgaaatttgtactgtttctatcataaataaagttatggcttcttgttgg

SEQ ID NO: 128053 - DNA, 1195 bp, Homo sapiens
  misc_feature (678)..(678): n is a, c, g, or t
  misc_feature (1188)..(1188): n is a, c, g, or t
acacaaaaatataggtcaggtacgaggctgggtggcgctttctgccgccatcttggttccgcgttccctgcacagcctcctttttattcccttccttcagaaatgcccggcgaagccacagaaaccgtccctgctacagagcaggagttgccgcagccccaggctgagacagggtctggaacagaatctgacagtgatgaatcagtaccagagcttgaagaacaggattccacccaggcaaccacacaacaagcccagctggcggcagcagctgaaatcgatgaagaaccagtcagtaaagcaaaacagagtcggagtgaaaagaaggcacggaaggctatgtccaaactgggtcttcggcaggttacaggagttactagagtcactatccggaaatctaagaatatcctctttgtcatcacaaaaccagatgtctacaagagccctgcttcagatacttacatagtttttggggaagccaagatcgaagatttatcccagcaagcacaactagcagctgctgagaaattcaaagttcaaggtgaagctgtctcaaacattcaagaaaacacacagactccaactgtacaagaggagagtgaagaggaagagcgatccgagagtcgtcggggtttcctgcttcaacagtgcttggacggaacccggcgctcgttcccncaacccgggccggccgggccatagccaggcctccgtcacctcttcaccgtacctcggactgtcccaagggccccggcgcggtccagcgcgcgcaggcaccggcgcggcgcgcgtctcctttagtgcgccgccatgaagaccgggttcaccttcgcaggtgcgccagaataacacccggggtccaaaaggggcgcattaacggcaataaacttggggctttagaccctaaagttcctgccacgttcaacaaatttgagcgcgaaaagtctgttagaacactgtgcacaaagactttccaccacatctcggaggaaaacactgtaaacactaatgcgcaccaggaggggacatccgagaaaacacacgtgtgagtaggagaagcaaaaaagggcccaaaaaccacaccgaagggaaaacacggtgtgaaaaaaaagcaaagagggaaggggaggaaaaagagagtagaggggattatatatagaattcgtcttcttgattctcttctggggnggtttgg

SEQ ID NO: 128054 - DNA, 811 bp, Homo sapiens
acacaaaaatataggtcaggtacgaggctgggtggcgctttctgccgccatcttggttccgcgttccctgcacagcctcctttttattcccttccttcagaaatgcccggcgaagccacagaaaccgtccctgctacagagcaggagttgccgcagccccaggctgagacagggtctggaacagaatctgacagtgatgaatcagtaccagagcttgaagaacaggattccacccaggcaaccacacaacaagcccagctggcggcagcagctgaaatcgatgaagaaccagtcagtaaagcaaaacagagtcggagtgaaaagaaggcacggaaggctatgtccaaactgggtcttcggcaggttacaggagttactagagtcactatccggaaatctaagaatatcctctttgtcatcacaaaaccagatgtctacaagagccctgcttcagatacttacatagtttttggggaagccaagatcgaagatttatcccagcaagcacaactagcagctgctgagaaattcaaagttcaaggtgaagctgtctcaaacattcaagaaaacagtcgatgaaacaggtgtagaagttaaggacatagaattggtcatgtcacaagcaaatgtgtcgagagcaaaggcagtccgagccctgaagaacaacagtaatgatattgtaaatgcgattatggaattaacaatgtaaccatatggaagcaactttttttggtgtctcaaaggagtaactgcagcttggtttgaaatttgtactgtttctatcataaataaagttatggcttcttgttgg

SEQ ID NO: 128055 - DNA, 715 bp, Homo sapiens
  misc_feature (578)..(578): n is a, c, g, or t
  misc_feature (583)..(583): n is a, c, g, or t
  misc_feature (595)..(595): n is a, c, g, or t
  misc_feature (661)..(661): n is a, c, g, or t
  misc_feature (669)..(669): n is a, c, g, or t
  misc_feature (694)..(694): n is a, c, g, or t
acacaaaaatataggtcaggtacgaggctgggtggcgctttctgccgccatcttggttccgcgttccctgcacagcctcctttttattcccttccttcagaaatgcccggcgaagccacagaaaccgtccctgctacagagcaggagttgccgcagccccaggctgagacagggtctggaacagaatctgacagtgatgaatcagtaccagagcttgaagaacaggattccacccaggcaaccacacaacaagcccagctggcggcagcagctgaaatcgatgaagaaccagtcagtaaagcaaaacagagtcggagtgaaaagaaggcacggaaggctatgtccaaactgggtcttcggcaggttacaggagttactagagtcactatccggaaatctaagaatatcctctttgtcatcacaaaaccagatgtctacaagagccctgcttcagatacttacatagtttttggggaagccaagatcgaagatttatcccagcaagcacaactagcagctgctgagaaattcaaagttcaaggtgaagctgtctcaaacattcaagaaaacatgttacnaaggngggaggagttgnaaggaggggaaggaggttcggtttggaaacaggtttttagggagttttaagggactttagattttnggtccttnttccaccaaggcaattttttttccngaggagccaaaggccgttttt

SEQ ID NO: 128056 - DNA, 1431 bp, Homo sapiens
acacaaaaatataggtcaggtacgaggctgggtggcgctttctgccgccatcttggttccgcgttccctgcacagcctcctttttattcccttccttcagaaatgcccggcgaagccacagaaaccgtccctgctacagagcaggagttgccgcagccccaggctgagacagggtctggaacagaatctgacagtgatgaatcagtaccagagcttgaagaacaggattccacccaggcaaccacacaacaagcccagctggcggcagcagctgaaatcgatgaagaaccagtcagtaaagcaaaacagagtcggagtgaaaagaaggcacggaaggctatgtccaaactgggtcttcggcaggttacaggagttactagagtcactatccggaaatctaagaatatcctctttgtcatcacaaaaccagatgtctacaagagccctgcttcagatacttacatagtttttggggaagccaagggtgagtaaacttttcttgggcattgttccagaccagggtttctcaacctcagcactgctgacattttgcgtcagatagttctctgttatggaagggctatccattacatccagttttgattacccaaaaactccattgccatatatctcctgggagacctaactaccccctagttgagaaccactgctctaaacctaaacaactactctttctactgtgagggcaagcagtttaaagctgtacaataagttacctgaatgggtttacagagagttgtgaaactatatgatttatttttcaaagactgctaatctactcacatggatctgtattttctaccctgtagatcgaagatttatcccagcaagcacaactagcagctgctgagaaattcaaagttcaaggtgaagctgtctcaaacattcaagaaaacacacagactccaactgtacaagaggagagtgaagaggaagaggtcgatgaaacaggtgtagaagttaaggacatagaattggtcatgtcacaagcaaatgtgtcgagagcaaaggcagtccgagccctgaagaacaacagtaatgatattgtaaatgcgattatggtaagtgttcaagcctttgttccttgactccctctgccctgaccaattatgagtgactttattttgtcttgctaaatatcagccaattaaggaacctcattccagagcctcttctgagttgccgtataggttttagtggcctaaattctcctgatttgcctgtaagagttttagtgacctgaattctcctgatttgcctataagaaccgctaattatcttttctctgttacagaattaacaatgtaaccatatggaagcaactttttttggtgtctcaaaggagtaactgcagcttggtttgaaatttgtactgtttctatcataaataaagttatggcttcttgttgg

SEQ ID NO: 128057 - DNA, 856 bp, Homo sapiens
acacaaaaatataggtcaggtacgaggctgggtggcgctttctgccgccatcttggttccgcgttccctgcacagcctcctttttattcccttccttcagaaatgcccggcgaagccacagaaaccgtccctgctacagagcaggagttgccgcagccccaggctgagacagggtctggaacagaatctgacagtgatgaatcagtaccagagcttgaagaacaggattccacccaggcaaccacacaacaagcccagctggcggcagcagctgaaatcgatgaagaaccagtcagtaaagcaaaacagagtcggagtgaaaagaaggcacggaaggctatgtccaaactgggtcttcggcaggttacaggagttactagagtcactatccggaaatctaagaatatcctctttgtcatcacaaaaccagatgtctacatcgaagatttatcccagcaagcacaactagcagctgctgagaaattcaaagttcaaggtgaagctgtctcaaacattcaagaaaacacacagactccaactgtacaagaggagagtgaagaggaagaggtcgatgaaacaggtgtagaagttaaggacatagaattggtcatgtcacaagcaaatgtgtcgagagcaaaggcagtccgagccctgaagaacaacagtaatgatattgtaaatgcgattatggaattaacaatgtaaccatatggaagcaactttttttttttccaacaagaagccataactttatttatgatagaaacagtacaaatttcaaaccaagctgcagttactcctttgagacaccaaaaaaagtcgacgcggccgcgaatttagtagtagtaggggccgc

SEQ ID NO: 128058 - DNA, 1003 bp, Homo sapiens
acacaaaaatataggtcaggtacgaggctgggtggcgctttctgccgccatcttggttccgcgttccctgcacaaaatgcccggcgaagccacagaaaccgtccctgctacagagcaggagttgccgcagccccaggctgagacagggtctggaacagaatctgacagtgatgaatcagtaccagagcttgaagaacaggattccacccaggcaaccacacaacaagcccagctggcggcagcagctgaaatcgatgaagaaccagtcagtaaagcaaaacagagtcggagtgaaaagaaggcacggaaggctatgtccaaactgggtcttcggcaggttacaggagttactagagtaagagccctgcttcagatacttacatagtttttggggaagccaagatcgaagatttatcccagcaagcacaactagcagctgctgagaaattcaaagttcaaggtgaagctgtctcaaacattcaagaaaacacacagactccaactgtacaagaggagagtgaagaggaagaggtcgatgaaacaggtgtagaagttaaggacatagaattggtcatgtcacaagcaaatgtgtcgagagcaaaggcagtccgagccctgaagaacaacagtaatgatattgtaaatgcgattatggtaagtgttcaagcctttgttccttgactccctctgccctgaccaattatgagtgactttattttgtcttgctaaatatcagccaattaaggaacctcattccagagcctcttctgagttgccgtataggttttagtggcctaaattctcctgatttgcctgtaagagttttagtgacctgaattctcctgatttgcctataagaaccgctaattatcttttctctgttacagaattaacaatgtaaccatatggaagcaactttttttggtgtctcaaaggagtaactgcagcttggtttgaaatttgtactgtttctatcataaataaagttatggcttcttgttgg

SEQ ID NO: 128059 - DNA, 410 bp, Homo sapiens
acacaaaaatataggtcaggtacgaggctgggtggcgctttctgccgccatcttggttccgcgttccctgcacaaaatgcccggcgaagccacagaaaccgtccctgctacagagcaggagttgccgcagccccaggctgagacagggtctggaacagaatctgacagtgatgaatcagtaccagagcttgaagaacaggattccacccaggcaaccacacaacaagcccagctggcggcagcagctgaaatcgatgaagaacaacagtaatgatattgtaaatgcgattatggaattaacaatgtaaccatatggaagcaactttttttggtgtctcaaaggagtaactgcagcttggtttgaaatttgtactgtttctatcataaataaagttatggcttcttgttgg

SEQ ID NO: 128060 - DNA, 303 bp, Homo sapiens
ggagggcagtggggagagtggggagttcatgttgaatgggtatacagtttcagtccgagatgaggaaaagagttctggacatggctggtggtgagggttgcacaacaatacgaatgtacttaaaaccactcacctgcacactgaacaaatgattcggatagtaatttttaggtgtgttttgccacaatgaaaaaaaaaattaagacaggcacagtggctcactcctgtaatcccagcacttttcggaggctgaggcgggcaggtaacttgaggtcaggagttcgagagcagcctggccaacat

SEQ ID NO: 128061 - DNA, 220 bp, Homo sapiens
tgatctagcggtcctaactcccggtccagagctcttttccccacatcacactgcccccttgggagtccctgatgacattacaaatctctgaggggaatgggtggcagggtagaaggcatctagggtgctcgtccagcccagctttgttgtttaccagctgtgggccgtgcacaactcccctcacctcagcaaagcggggctaacagtcacaccctgcagt

SEQ ID NO: 128062 - DNA, 481 bp, Homo sapiens
gtagggttctaagactgtataggatctaaaaaatataaaaatattgtccacatggtgctcaaatcctcaagaagttcaaaactgcaaacatgaattttttagtgaaaaggtgtatacagttttattttgtggttttatcataaacagaatgtagaattcattttcatgttttaaaaaatccctttcagtggtagtttaataaggctggtatgtagttgtatagactggacactgcacacaggtatgccttctaagagggtacctttcactttgtggacatcttaaacatttgtcagcagatggcagtaaagaggaaggatgtccttttataatttgcacacaagcaccatatggactaatagcaaacatgtagttcagtatagcttttttcttgaaagaagagaaatttttatataagacaaccatttaaaatttcttttttggtggccgggcacagtggctcacacctgtaattccagca

SEQ ID NO: 128063 - DNA, 689 bp, Homo sapiens
tgaaaggcaccagggccttcaacggcagcgggcgggggcagacggtgcagcagagggttgggggggatggtggcaccagactccacacttttccttacagctcttgcacctcccagttgtgtgacccaggacacatctctctacctccgtgtgcctcatcttgaatcggcacagtaatgacagcacctgcctcgtagggtagcgtgaggtgtagtaagcaagttaatatattaacacacagtgcttggcacatgctaagtgctggagagacacagggaacagatctgacccatggcctggaaaggtcactttggcacagaataggccctaaagagtcactgggtcaatgggctggagcagctgtggacagaagggaagagaatccagtttacaggtggttgcagaatcccgtgaggggatccaggaggctggaactggggaagagcagaaggatcaacacgagagatttggacagtgattctatctacattcagcgtctgaccacaggcctggagttgagtgcacacgtggagcctctgcacacactgcactgattgagtctgggaaggtggtcaggggagacctccttgcgctggagcagacgggaaggaagagaagcctccagcagcaggaagggctggagaaaaggcattctaggcagaaggaacagtgagcgccaagtccctggg

SEQ ID NO: 128064 - DNA, 678 bp, Homo sapiens
tacccccagcaaccccactgcttccccttcttggtattaagtgcaattaaagccgtgggtgtcgcatcttctccagcgctgggccctcccttgcccccaagctcaagaagggggcactgcccggcccggctgtgaggagggcggcagggggcacggcctccagcttccaaagagcagcgagccgcggagccggggagtgcccacagaccccagcccccgcgcccccgccctccgccgctggtttgtaatggaaccttttctgtgcccctatcttcccggagaccacgcttctcctccgtgccgtgcgacccccaccccatgactattgtgcgattcgtgagcgccgcccgagcggagttggtaacttgttgggtttttttccaaccatcatggccttatctgttccagttttctcagtgttttcagcctgtgagatagatgtttatggcaagaaaaaggaaaaaaaaatggaaatctgacctattgtataaaaatcactattttgtgtgctccgcgtgctatagcttttggggcggccctgcccagtccccgtgcccacggggctccctctcccggtggtgaaagtgtccacacgtgtggtagtctagtgtgccgagctgttttctacctttttgtagtctttcttaaaacaataaattccgctgtgatatttgccta

SEQ ID NO: 128065 - DNA, 209 bp, Homo sapiens
  misc_feature (43)..(43): n is a, c, g, or t
ttggggtttgggacccttacccaccgggtccggggtttgggtnccctttaaatagcttttggggcggccctgcccagtccccgtgcccacggggctccctctcccggtggtgaaagtgtccacacgtgtggtagtctagtgtgccgagctgttttctacctttttgtagtctttcttaaaacaataaattccgctgtgatatttgccta

SEQ ID NO: 128066 - DNA, 384 bp, Homo sapiens
ctgaatccaagctggtcacgtgactccagttccagccatgacaccctaatgcaggtacccatgcaggatgaaaacaaaggaattatagggctctgagcacgtttcactatatataacctccctctcatccaatattctaagcagcaaatgaatacaatgaatatcaacttctaacttcaaaaaacttgtaggtggaaatgtatctgcataaaaagcagttgaaaagagatctattaaactctacacagattgaggcacttagaaggtcctagcgatcagggcttatctttatttattgccaggttggaggtatatgagtaaatattgacactgtttctgttgttatatttctatatgaatacaagctaacggcttcaccagtcc

SEQ ID NO: 128067 - DNA, 194 bp, Homo sapiens
cggtgaggtaccggagctgccaggatttctctgcaggcccctcagtgagtgtctgatccacacgttctgacagaaggaaggtgaggtgtgcaggaggcaggggcagtgaggacaggctgtggagttcctcacctggtacaactgagtcatgaaggaagaatcgggccttggtgagagctaaggggctactgttc

SEQ ID NO: 128068 - DNA, 598 bp, Homo sapiens
aaggacagctactcaaatattagatttttttttatttattttttattttttaaagtcagggccttgctctgtctcccaggctggaatgcagtagtgtgatcatgactcactgtggccttgacctccctggctcaggcacttctcctgccttagcctcctgagtagctgggatgacaggcacacagcaccacacccagctaatttttaaattttttgtagagacggtgtctcattatgttgcccaggctggtctcaaactcttaggctcaggtgatcctcccttcttggcctcgtgaagtgctggtattaaagcatgagcaactacatccagccactagaatgtattttcaaggaagtacttatagaataataatatttgagtgcagctgtgtcttcactagactgtgtattcagatgactgtatatttcacatgactatacagtcatccttcgatacctgtaaacctccctcggataccaaaatcgtggatgctcaaatccctgacacaaaatgcatagtatttgcgtgtaacctatgcacatttctcttatatgctttaaataatctggtgtgtgtatatatatatatatatatata

SEQ ID NO: 128069 - DNA, 408 bp, Homo sapiens
ctggggaaggatgagacaggttcagggggtagcagtgcaacaacgtgagttggtttcagagagaaggacgagcaggagtctggaccagagtgagaaaggccaagatggtgcagagaggacaggcgggctggcattctgctttttgattgggggaaggtatgtggttgccaccctttcatcctatcaaataagaataattaaaaaaaaaagactagaatctattcttctcattattttgcaaaaggacattcatttccccagttaggaaggaccactatcagcaggtcataaaattacaatattttgccttccagatggcatcccttatactcctccttattcctggaaaaagcatacaaactccctgtcaagctgcctgtaggatttttggttcccagcttgctcaga

SEQ ID NO: 128070 - DNA, 506 bp, Homo sapiens
ccacgcccggctaatttcttttttgtatttttggtagagacggggtttcaccatgttagccaggatggtctcgatctcctgacctcgtgatctgcccgcctcggcctcccaaagtgctgggattacaggcgtgagccaccgcgctcagccattgggtgtaaaattaacagggactactttctatcactatgtcggaggtggatgactatgctaactagacttgaaaagctacagactacggatctcttcattggcacacaactgagccacctgagtaaatcactctcccttcatcccttgttgacattcagcaaatcctgatggtgcttctgccatgcaccaggcctctaccaagggctgcagcaaatataaacatgactgtggttcaggctgccccccaaaaaggagcctcctaatagaaggagtgcccccttcatcttcctgtgtcccctgccctgccagtgtttgcctcccgtcttcagtcctgttttcagtcacctgcttca

SEQ ID NO: 128071 - DNA, 603 bp, Homo sapiens
gcaacaggaaagtatgatccattcacaggatataaagaatttcacagaaaccatacctaaagaagaccagactttggaattattagtcaaagatgttaaatcaattgttttaaatatgttcaatatgttttctaaaggaaaccatgaataaacactaatagaaatcaagaaaacaatgtctgaacaaaatgaaagtataaatagaaattataaaaaggagccaaacaaaatctgcaataactaaaatgaaaaatgcaatagagggattcaacagcaagtttgaacaaggaaaagagaggactggcaaaattgaagataagacattgaaaattacccagtctagggaaaagaaagaaagagtgaagaaaaatgaagacagcctgaggaacctatgggacctcatcaagcataccaaatacacattataggaatcccagaaggagaagacatagagaaaggagcagcaaaaaatttgaagaaataatagctgacaacttcccaaatctgattaaaaacatgaatatatacatctaagaagctcaatgaactccaagcaggaaaactttgaagagatacacactgagacatatagtcaaattatca

SEQ ID NO: 128072 - DNA, 393 bp, Homo sapiens
tcatcataacgtgacccagcgacctgtgtgtcccacagcccgtccgtccctctgcagtctccctgcactggcatgtcctgggtggtcccagtggcaccttctaggcccggcccctggatgcggtggaggctgcccggggtgggtcagcatggggttgtccctgtgagcacagctccgggagacccgtactcagaatcctccagctctctcgcctgaggcggaaatgtgacttgggaattgtcctccatataaaggaagcaaaatcagggcctaggggtgagctgcttactgtgcttcttccctctctcagcctccaatcggggggcacaggcgtttgattcccgcgacgtctgtgggctgtcactgtccagcctctgcgtcccacacctgggc

SEQ ID NO: 128073 - DNA, 789 bp, Homo sapiens
aacgttaatcagggatattgacctgatcttttcttttattttcctttcctctttcctttcctttcaatttttcttttttcttttctttcttcctctctctctctctctctctccctccctcttcatttttcttttttaaagaaacttgaccaaaagacagtacataaacactggcaattgaatgttgaatgtcaccgtatgcatgaaagtatgtattttgtggtaatgtgagcttttaatattaagtcatattaaattcttaagttaaattaagcaggcctggcgttggcagtgtagccatacctttctgatgttagtaaaaacaaaattggcgacttgaaattaaatcttgccaaggttttgatacacttgtcttaagatattaattaaacacttcagaacattgatacgaagtgtccagattctgagatgtttgttgtgtgaattttgtttagttatgtgtgtggttttttttttttttcagtgaatggcacattgcaatcctcaaacatgtggttatctttgttgtattggtgtaatcagtgacttgtagattcagcaatagcatttgagcagtcagttttatcagcaagcaatattttcagttaataaggattcaaaaatcatgtaaagatttaaacttgccgaatgtaaagattgaacctcaagtcactgtagctttagtaattgcttattgtattagttcaggttctagcactgcatgtgctgtgcatattctgattttattaaataaaaagatgaactgcaaaacaaaaaattttctgaaaa

SEQ ID NO: 128074 - DNA, 150 bp, Homo sapiens
cttggcttcctatttcacctagaaaatagaagcaatggagagaacctctacaagcagcataatccaccagcctaactccatctgtacccacaccctctgtcttttctcccgtttctcctgaatggtctctcctccccgctggagtgcagt

SEQ ID NO: 128075 - DNA, 322 bp, Homo sapiens
acatttattgattgaatagtcattacatttacatggttcaattttagaaaatgtaaaaggcttcctcctgtctgcgctgctaaattccctgtccagagtcaatcagcgcttctactgtattctaccagttacctttttctttggactcttttgttattggtgtcatgtctgaggaataattgcctgacccaaggtcatggatgttttctcctgtgtcgtctcctgagagttttataggattacaggtgtgagccactatgccaggcctgaaacaagattttaattctgaaggccagatacctttttcttttgtcacttttga

SEQ ID NO: 128076 - DNA, 278 bp, Homo sapiens
aaaaaaaaagaattttttagagcagtttgagatttccagagtgttgcaaagagagtgcatagtttcattgacaccacacccactttctcccatgttgatttttattggtaacaactaatgaaccaataccgacacattatttattttattttttttttttgagacacggaatttcgctcttgtcacccaggctggagtgcaatggtgcgatctcggctcactgcaacctccgcctcctgggttcaagtgattctcctgcctcagcctcctcagtagct

SEQ ID NO: 128077 - DNA, 618 bp, Homo sapiens
tgaggggagaggatcacttggggccagaagttcgagaccagcctgggcaacatagtgagacctcgtctctacaaaaatatcaaacaaattaggcaggcatggtggcacacgctgatagttccagctactcaggaggctgaggcatgaagatagcttgagcccaagagtttgaggttacagtgagctatgacagtgccactgcactccagcctgggtgacagagcaagatcctgagatacatacatacatactcaacagtttaaaaagcaaacaaatccagttagaaaatgggcaaaattcagcaggtcacagaatgaaatgaagagaaaaaaaaaattttttaaagaaaatgggcaagacatgatgagatatttcactggagaacatatataggcagcaaatacacaagtgaaaaagatgttcaagatcaccagccatcaggaaaaagcagatcgagacctcagtaagatactgctgtacacctgttaaagcagctaaaaaaccaaccaccaaaccaagacaaccagcggcaacaccaagcggaggtgaggaggcggagaccccggacctctcatacactgctagtgggaatgtcaaatggcacaaactagaaaacag

SEQ ID NO: 128078 - DNA, 442 bp, Homo sapiens
ggctgaaggctactgggtgcggccactgccccagctgactggagtgggagatctggctattcattctggctccacatggacgctccagccaccttactgcctcctgacctaccacctgcacccccaaccttccaggtctcactcgcaggtgtcaccagcctaactgatgccttagcagtgacagcttcacctgtgtgcacagcaaggccatgtgcaattttatggaaccactagaagactcaagacactttcagaaccatctatataaattgctaatgctgaaaagacctgaatttggtcaagatggtagaggaagtgttttcctcctcggttgggactttgtgagtctgctcagtacccctgaaattacacaaattggcagcaactcattctactttggaaatggtcactaaggcatgccatggtaaggagcttctctgtg

SEQ ID NO: 128079 - DNA, 445 bp, Homo sapiens
gcccttaatgggttttttgatgcagttggagcaagatttcctttataaggggtttggataatatttctctttggtttagcaatatttattttctttttgaattttcattagcacctattttttaaccttttaatgtaggtaaaaatccatatttttatgcctccttataattcttttagtaaaagtatatttcactttccttacatgctttgcacataaactgtttctttaatagttttacatttaggacacctaattacttttatacaatattccttgcataaattccctattataacattttttacaactttcataggccatctttgacatgcctcaactttctgacttcttttaacactatttctttccccagtcacaccttctgtgtctttctgtaatctctgtctctttcagcctctctttcacttattctctccctctg

SEQ ID NO: 128080 - DNA, 468 bp, Homo sapiens
  misc_feature (238)..(238): n is a, c, g, or t
  misc_feature (421)..(421): n is a, c, g, or t
agcccagaaaaggaaatgacaggagaaaggcgttggaggtttcctgaggggcaggaggcgagagctttctcataaaggccaaacaagagagaaaataaagacccccacagtttaatatattttgtaaaattggagaatcttgaagataaaattctaagttttctgaaaaaaaaaatccagattgcttataaatgaacacgtatcacaggtacttggaactttcagcagcaaaacacanagaagacaagaaagtaagttttgacgtgttgaaggaacctagaattttataccctgctaaactctcatttaaatctgagtgtaaaataaagctattcttttttttttttttccaacagaatctcactctgtcacccaggctggagtgcagtggtgcaatcttggctcactgcaacctctgccntcctgtgttcaagtgattctctggcttcagcctcccaagtagctggg

SEQ ID NO: 128081 - DNA, 463 bp, Homo sapiens
tgcccgtttaaaaatctgtaccttcccagagaggaccaaatgagagtgggcagtcctcacgtcaggaccacatttcttgtccagacggatggggctagaaagtgagtgcagtgactcccaaagatcagggtcctgtttgggggaaccaggtagtgtctagagttagctgggcttcttccaaataggcagacagtggctatggggccacgcccgatgctgaggagcaagtcaccaggaaggcttggcctgctgagtcatgctcagctgcaggggaggtgacaggacttttccaagtttgctgggcatggagaccgtgggcccatgcttggaccagccccaagccctgcatttgctaagtgctcttgacagctcttgccaaagtgtgtgcttcagaactggctccctttgggaatccttacagatggaaagtctgtaagacaggctgggaggaaacagagggagg

SEQ ID NO: 128082 - DNA, 476 bp, Homo sapiens
ctatacaaatgcaaagtgtcatcaattatccagcaaatactttttgagcaccaactatgtgtaaagccttgtagaaagtacactgagaaaataaaagagaaattaggataactcagctgggtgctgtggctcatgcttgtaatcccaactgtttgggagcccaaggtgagtggatcacttaagcccggttgtttgagaccagtttgggcaacacagtgaaattccgtctatacaaaaaatacaaaaaaaaaaacaaccaaaaaacctgagtatggtggtgcacacctatagtctcagccacttgggaggctgaggtgggaggatcacttgagcccaggaggtcaagggtacagtgagctgtggtcatgccactgcactccagcccacatgacagaaaccttatctcaaaaaaaaaaaaggaagatagaaaaattgagataactctttactcttagagaagatttaatatgttataa

SEQ ID NO: 128083 - DNA, 225 bp, Homo sapiens
ggttctaccagcgggaggttgtctccagccggcggttgtaccccgcaggttgtacgagagaggtaacagagcaagaagagaaaaaccacataaacttggtttgcctctgcaaaattaataccaattacaaaaacatttatgtgaactgcttaccatttacacctaattaccatgcagcacaattatgcatatcattaagggtatgccagattaattatgctgtac

SEQ ID NO: 128084 - DNA, 712 bp, Homo sapiens
catggtggcttatgccagtaatcccaacaatttgggaggccgaggcgggtggataacttgaagtcaagagttcgagaccagtctggtcaacatagtgaaatcccatctccactaaaaatacaaaaattagctgggcgtgggggaaggcatctgtaatccagctactcaggagactgagtcaggagaatcacttgaacctgggaggcagaagtcgcagtgagctgagatcatgccactgcaagcctgggcaacagtgcaagaccccatctcaaaaaaaaaagacaattcaaaaaaggaaactacagaccaatgtcactcaggaacatagaaacaaaaatcctcaaaaaatattcaatcaaaaaaaagaatccaacaatatataaaaagaattataaacaatgaccaagtgggatttatctcgggtattcaaggctgattgacattctaaaccaatgtaatccatcacatcaacaggctcaagaataaaaatcacacaatcatatcaaattcaacacctatttattaaaaaaactatcaggaaattaggaatataaactttttcaacctgataaagaacacacacacacacatacacacacaaatccacagtaacataataactatgagaaacttgaagttttcccactaagattagatactactgcttttaaacatcatattgaaagtcctaactaatgcataaagacaagaa

SEQ ID NO: 128085 - DNA, 800 bp, Homo sapiens
  misc_feature (679)..(679): n is a, c, g, or t
gcagagattgacagtttttagtaacttgactttgacctccagtgtacacagacatagccttggctgctggactctgagctttctggccctgggaagctcgagatttgcaaacacttgttcgacaatcacctcgtttatctgcattgtcaccagtgcagcctctgagccctctccctgtctttacttgaccctgtatagaaaaatgctttcagggccaattgcagtgactcatgcctgtaatcccagcactctgggaggccaaggcgggcagatcacctgaagttgggagtttgagaccagcctgaccaacatggagaaaccccatctgtactaaaaataaaaaattagccggatattgtggcgcaggcctgtaatcccagctaccagggaagctgaggcaggagaatggcttgaacccagtaggcggaggttgcagtgagccaagatcatgccattacactccagcctagctgggcaaaagagcaaaacactgtctcaaaaaaaaaaaaaaaaaaaaaaccggggtggggcgctgggacctgagaaagattccccagaacccatccgggctgggggcgccgcgcctcatggttgagtggacaggtcccatagacgtggtccccagagacaccggtccggaacatagtggcgggtttccccaccataaaaaggcgcggcnccgcaggcttcgaacaatccaaggggctcgaggcctcgggtctacacgggcccagggacgagtacccgcgccggccggcgcgaagagagaaacggagacagaagcaccacggagcgacact

SEQ ID NO: 128086 - DNA, 364 bp, Homo sapiens
gaatttaaactgctgtcacagaggggacctagacagctgattcatcctggtggaaaccctgcctcttccccaagttttaccctaatggtccatccaacttgccaacccctttgccatctaaaggccagcaacttgcccgtctctccaccctacccagcccaacataccaggaagagcaagatagcaaccagacaatgagaaactgccagagcttcagcccctgtccctgcctgcagacctgccgtctctgcaaaatgcctcatctgtggatgctacaagcttctcaaggaatctcaagtcctagctgtcctagaggctaaccaagaagtcatctctccatttcagtcctcaacagctcctgcag

SEQ ID NO: 128087 - DNA, 398 bp, Homo sapiens
cctcagcctcctgagtaactgggattatagacatctgtcaccatgtctggctattttttttgtatttttagtagagacagggtttagccatgttggccaggctggtctcgaactcctgacctcaggggatctgcccgcctcggcctcccaaagtgctagggttacaggcatgagccaccatgcccggctgcatctgtctttttaaagtaaaaagttttccctgatgcctgacaaatatctgatcagcctccagcacatggccagccttgaacaaggtgctaggagtatagcaccaataagatagctgtggtttcatcttttccagagctggcattctagtaactgagagtccttgcactacccattgtagtatgcatggtagtatttgtggtagtatc

SEQ ID NO: 128088 - DNA, 527 bp, Homo sapiens
tattccagcagggtctaatctgtgccaagtgctaaatttgaaaggaagggatacttttctgaatctgcggtcttctttggtgtcagttttagatagacactaaagatcaccaagtgtggagaaagccaaagtggttaattatcaattaattacacagacacagggcgcccaagcaggcagaagcacttcctgggtcctgaaagcacacacatggctgaatcagaacgcgggctgtttctccctgcagatgggtcgtaaacgtgtctccaaattgctaatcattaccccatacctcctatcgcagtcaccaggaagcacatatcacacatacttgcatttgtaaatattaacttctccctcacacccatcaaacattttgagggcacagtaaggagggtgtcacttgaagaagtcaagtcattgaggccagcggcctggatgtccccacagggctgaggggctgcaatcagttcccatttatccagggcttctctggagctggacactggctgctccctccatgcccg

SEQ ID NO: 128089 - DNA, 145 bp, Homo sapiens
ttcaagaccttgacatttttgaagactacagaacagttaccttgctgaatatccctcaatgtggttttgagggatatttggcatatggttcccatttgtcccatcactgcttttgttacctttattgcttgttaaggtggtgtct

SEQ ID NO: 128090 - DNA, 391 bp, Homo sapiens
cagacagcttcatgcagggctgcaggtatcttgagtcggccatccctcgattccttccagcccagaagtttagccttgtgtttaagttccatgtcttttttttggagacagagtctgactctatcccccaggctggagtgcagtggaatgatcttggctcaccacaacctctgcctcccgggttcaagcaattctcatgcctcagcctcccaagtagctgggactacaggtacctgccaccacactgggctaatttttgtatttttagtagagatggggtttcaccatgtgttggccaagatggtctcgaactcctgacctcaggtgatccacccacctcggcctctgaaagtgctgggattacaggcgtgagccaccatgcccagctgta

SEQ ID NO: 128091 - DNA, 887 bp, Homo sapiens
gtattctaaaaactttatatggggccaggcatggtggctcacacctgtaatcccagcatgtcaggaggctgagatgggagacaaggagtttgagaccagcctgatcaacatagcgagactccatctctatttaaaaaacaaaaaacacacaaaaaaactttaaatataggtcttgtttaatcctcacagagctctgtgaggtaggttttattagcttgtttttatgaggaaactgattgaagaaagttaagtagcttgtatgagaatatatgttaggcagtaatgaggaattagtgccctttgtatgtatatgcattctatatacttgatcacacacacacacacacacacacacacacatatatacattttttttttgagatggagtctcgctctgttgcccaggcggaggttgcagtgagccaagatcacgccagcgcactacagcctgggcaacaagagtgaaactccctctcgaaaaaaaaaaaaaaaaaaaaaaaaaacaaacatttggggggcagcaaggccccaaaaaaggtttagaaaacaataggggggggagcgcggggagccccatataggacatagagaaacgtgtggcaaacagcggtgtcccacaagagaacacgtggacacaacaacaggcgggggaatccacccaaataaaagacggcggggagaaaacagaagctgttcagacaaaacccaaaggagaataagaaggcaaaaaaaggggggacacacaaagagagggaacacaaggggaccgtcaaaaaaaaaacccccgggaggcggacacaaacaaaaaacagagaaagacaaacacgaacaaaagaaaaaaaaagaaagcaagacaaaagagataaacgaagaagaaagagagcacg

SEQ ID NO: 128092 - DNA, 531 bp, Homo sapiens
aagcacactgccatgttctgaaatgcctgccatcagacccatgttagatagtccaacgcagtaatttctgcagagcatttaatgcaacttccatcttcttcagctctatctggccagccactctaccaggtgtcttttctttggtcaactttttgttaaagtggtctgggggtgggctccctttgtagctcatctcttctctcactgttccagaggcctttaaaagctatgtgcagtggtggggagtttgccaactctctccctgcccaggaatggatgtacattaacattgtcaaatgtctaatcagcgaggcagctgcgttttgctgaaagggctccaaaccacctgattcatgtcttccctataaaataaattatgatggcccttgtcaggtgacacctgttagaagccttacaaagcatttttcctgaatataaaacagtctccgcctctttttataatcttctgggcaaggctttaggacattctgctgcatctgccgagggtataaacaaccctatcccttagtc

SEQ ID NO: 128093 - DNA, 700 bp, Homo sapiens
  misc_feature (560)..(560): n is a, c, g, or t
gctatacattttcctctggctatggctttccaaaaccctccaatcctgttcattcttttctctgtagtttttctgacttattccagggacttccctttctagattataatcttcttagtctgtaccatataatttgtcacctaattatctactgtttcactttctgttggtttcgtggacattaatcttctccccagccaactgatggtagtcatattataataactccccagattggtttgtgctctgcactttacaaatcactccactgtttaagacctgtctttttgcttatcatgcccacagctgctctgtgaggtgggacaggaggggattgttatctccatattattgtaaacaaattcaaagaaagcaggtgacttcccaatgtcatatatgtaattaggggcagaacagaaactatatctcaggtttactaatttctggcttagaattttatctgcaggctcttctacatttgtttttttccttaccatttcccctcttgccttcaagggtcactcaaggcagaacatctaccttgtgggtttttaggaggntttggttggtgacccagtgaatggtaaagtagcccagatatcaatcttaggtacttctcagtggcatcagtgttctgggttgctattgccgagagaattctctttctgtggctattaggattaatgttgaactaagaagc

SEQ ID NO: 128094 - DNA, 644 bp, Homo sapiens
ctgacttgacctggcagccttagctgggagacactgttccatttttcatgggcagctggagttgtggccaccattgtgattcttgtgactggcttacagaagaaacatggttcctaagaaggccaggagggacagtccctgagacatacgtgtaaaatgaagagtataaaaagcaaataactaccacaactggttttatccagggctgttaatttttagatactcattgctacacttattagaaataatgtttaccttatttccttttcttcctcctttctcctcttccttctttctatttaaaaaccatttgccaggtacttctatggcaggcagagtgagaaatataagataggaacttgtcctcaaattgcttacctctgggagaaaacgaaggcgctttagggcagctcttgatcaggcccttgaagataacttaagtatagcatagcacttaacccacaatatgttctcaaagaaagtcctgaaagatgaatccagttttctccaagattgcaagctccccccttgaagatgggtaaggtcctagtgagccatgctttattcatctttgcatgtctagaccagtgcctggtatatatatttgatgcccaacaaatgctagttgaaggaaggaagggagg

SEQ ID NO: 128095 - DNA, 497 bp, Homo sapiens
gtgcaatggcgtgatcttgactccccacaacctctgtctctcgggttcaagcaattctcctgcctcagcctcctgagtaactgggattacaagcaggtgccatcacagccggctaatttttctgtttttagtagagacacggtttcaccatgttgctcaggctggtctcaaactcctgaccacatgatccgaccgcctcggcctcccaaagtgctgggattacaggcatgagccaccacgcccagccagagagacccattttaaccacacagggacccagctaaaaacccttccctggttctgtcaccatcagattaaagcctaagcttctagatctctgtcctgcactttttcactttaataacgaccctccaggctcagtagctgatgcctgtaatttcagcacattgggagacttgaggcgggaggattgcttgagtccaggagtttgagaccagcctgggcaacacaccaagactccatctttacaaaatatt

SEQ ID NO: 128096 - DNA, 434 bp, Homo sapiens
gaattgactgataggattctagtgcatttgctctctgaaaactatatttctgggaaccttcagattaagtacaacatgaaaagatgataaggacggggaaaaaaaaaaggaagaaatttatgcttgccagaatagtggagggaataaatagagcttttacagctctatcaggtgaaggaaatactagaaattaaagcagatattaagtctaggaggaaagtgaaatgcaagatgatcacacagtggctgggtactcaagtgcccttttgaacaagaggcaaaaaaaaaaaaaaaaaaaaaaaaaaagctcaagcctggttctccactcagtcagttatgtggccatggcagtgaaaatgctgtatgtatgcaggcacagtggaaactgtccccagagaaacgagcactcctcatcacagtctctactatgttgt

SEQ ID NO: 128097 - DNA, 506 bp, Homo sapiens
tggaccaagcaacagtcctagtggtgtagttattgtcaataatatatacttgatttttttccctctcttcagtcattcccttgtattatttatatatcttccctattgactagatgtaggttctgctgagagcatgagaactcttgtattacctttgaatccttttaaatgcctgtgtggtgttacattttttcggtgctcaatgcttatggtttactaaaatgggaactcttagtggacttacatagggcccacttcataattgttttctgttctacaaatagatacaatttattagtttttttttcatttttatggcatagaagaacattcttatttctgcctatcttatgttttaaaatttcatctctatgctcccctgaattcctgattcatatccaactgcttactttatctcgacttggatattaataagcatctcatgctttatgtctaaactgaactggtattcttgctcaaaactgccccttgtctagcttcccgct

SEQ ID NO: 128098 - DNA, 282 bp, Homo sapiens
ctgatattgacctggagaggaaaggggtctagaaaggccactgcttcattatcatctggggttggggtaggggttgggggagtatggtaaaattattcccacagcaaacctctatggggcagaagaccactagagacactttcaatgatggtgcccatctgtgcaagagcttagaagctataaagtatacttacatatgtcatctcatttaatctctgagagagaggtcacttgcctactctgtcaggtaatgccaacaacagcatttctagatatattggt

SEQ ID NO: 128099 - DNA, 347 bp, Homo sapiens
tggcacaccatctgattctctgccatacactcgcttatcagctctgctcggaagaaatgttcttaaccagttcggcttgcactgatcacacttcagcaataaaggcctgaatctgacagaagttcctgccttccaggtcattgtgggtagggccaggcaagtttggttggctcctacatttgcactaacgttgagagaagtactatcccctcccctgccgtttcacgtagattcagagagtgggtgtagcagctgcaagagcaccccgtaagaggaaagggcccctggccagaggatgagaggcggtcctgtggcctcgagctcctccagggagggagggcaccgcg

SEQ ID NO: 128100 - DNA, 618 bp, Homo sapiens
aaagctggggcagaggaaagcctcccagaaatatgagatcctagagcttgcaagatctgaaaacagtcagagatgattaggatttgtgtggagtggtggaggattggaaaggaagagggggagcacactggtcagaggggtcttgcggaaggctgacaagaggaagacacagtagagtagggagaaatggcaaacactctttccaaaggcttaagattgtgaggcagtcagattttttttttccaatggcacatgtctgttaggtagagtgacaactatattctgcttctctgtgttgctctatggtatttgtgacaactacttgatctctcagttaaagatctgcattaacctccactgtaacttatgcatgtgttcggtttgagcaagaccagcaaggtacctaggaacctttccctgatcatcttgtatttcaggcagagatttagctgacaggaaccagcccatcatttatagattgcagaggtgcttcctaatgaccagcagctaaagagaaaatgccacaatctggtggaaggctctacgtgtttaggaatcatgaaaattaatttcctgattttctcctgcaggcagaatgtggcaaagattgctatccat

SEQ ID NO: 128101 - DNA, 407 bp, Homo sapiens
ggggggctgaggcaggaggattgcttgaacctggaaagcggaggttgtagtgagccgagatcatgccactgcactccagcctgggcaacgaagcgagactccgtctcaaaaaaaaaaaaattgtattttaaagttttgttttccatgaatttgtggggggaaaacccttatttcttaccttatctgttgatcaaagaaactgctgaagaatgaggaaaaaaatttagtaacttgataaagagatcaaaattttcagctaaaaaagtgataataaatttattattgcataagactgagtagcaaaaggctgccaaaaataattaagcagcaaacactaagtcaggcatatatatatatctagtggaaaatccactttttttttcatagagagtatttctgtacctagt

SEQ ID NO: 128102 - DNA, 588 bp, Homo sapiens
atccaggaaaaatgtacagaattatatcatggcctcaccccctgcatttacaaagtgaagagagccagtggggtggtagaaataataattctgccattaatcaattatatgactgtggacaagtaacgctgctcctgagtttcatcttcctcatctgtaacaagaagtttatgccgtctgatttctaatgcttctgcgaagtctgggttcatacgtgtgaattactggatggtttgttttgatacgttgaatttgagattcaaggtcttcaaatggggctgtgctgacctctgtttttaagggttaaggtcagagggtttggcctttccaaagaggtgaactaagttcttcgtttattcttttatttgtgagagccgggggctgcgtggatttaggagtgagggctggggacttagaaacaaaacttttataggcaggtgttagatagctatcctttaaggacttttgatgtgaactgattaatgaagcccattatcagatttgtacttaggaacactctggtggaaagaactaagataatagcagctttccttttgtagcatagctattacccctttctgtaactta

SEQ ID NO: 128103 - DNA, 406 bp, Homo sapiens
ctgtccccttgcaggcctgtcacatgcattctacttgacagtcagtcagtcacgtccatcccctgagcataccctgtaaggcagcctcttgctctaatttccaccaggctctctttactgaaagataaccaattcttccagagccagcttccctaggaagtatgactctcttacaaactacctctacattccagtcacacctgactactccccattcctcagtgatatcctagactttgatgctttcattccagccacaaatttccactgcttctctctccaccacacacccccatccttaattttcagcttctggcaaatctctggaatgattcaaatgtcactcactctaaaggcttcctcaaatccaccaagtatgtgcttacctaacacatcaattagttct

SEQ ID NO: 128104 - DNA, 311 bp, Homo sapiens
cagtgagtgggatgcttctcaagccacagcctaaggacagtcacctgcttccaagtggtcacagtgccacccacgggaagggcaaagctccctgccctgtgccctgagctgtacagcctgagctgtagcaggtgaccctcatggtcatccactgggagggcctacttccagccccacagccactgtggaggagggaacacctatatttgaaggattctggggtctctggtagtgggcctcctccgtgggcttcaatgggctcactaaggggtgagcccgtcagtctctgagtgaggttgactttcgtagaa

SEQ ID NO: 128105 - DNA, 328 bp, Homo sapiens
ctcgcctagcctggggttctcagggaagagggaatgtaactgggagcaaagtaccccatactaattattttatcattttagtgtaaccagtgccttctgcaagaaggagatggtagagttttcaagaatcagactaagtctgcccaagtttaaatcaggatatttgggggaaggattagggttggggtggctatgccatatgagctggtgcctttggaaagccaagaactgtgaaatgttaaaggggggatgggcacctgtgaaccgccaggagacaggaccatagaggaggctgaggctgaggctgaggctgagcctgatccgcact

SEQ ID NO: 128106 - DNA, 312 bp, Homo sapiens
agtataggggtaaggctcagcaacatgtgttttaacaaaccttccaggtgattctgatgaatatttatagcacattataatcagaatataaattgaacataaaggcatcctaaattgattttgatcgagccactgtggtctcctcttacatttatttttgtggtaatcctacatttccccccttggacttaaccttcctgcatcctaaccctagcccaaacagatgattgaaacacattttcactaagtgtaatttgtttcactttcagaaaacatatcactttttgctttctctccttttcatggttattc

SEQ ID NO: 128107 - DNA, 362 bp, Homo sapiens
tacccatttaaatgtttacattttcaagtatataaaaccaggattgtaaaataccgttgtatttccagttgtaaatagccgtttagttaagttaggcatttgtttatcacgcgtcctaatctctgtttgtgtcgttactgtctcagagatcatcatcatctgtgtttacatttttatgcatcattctttatgcaagtagttcttattcagtgtttttgatgatgttaagcaaaattctgttgctaccttacctcattaccttcccgggatatattttgcagatataaaccaataatattttctggttctttcttgactagtagcttttggttaactctaaggtttttctgtttgtttttctc

SEQ ID NO: 128108 - DNA, 279 bp, Homo sapiens
ctgttgcccaggctggagtgtagtggcacgatctaggctcactgcaacctccacctcctaggcttaagtgattctctcatctcagcctcccaaagtgctgggattacaggcgtgagccaccatgccccacctgaagcaatttctttgttgtcttttttttttttaacttctctcatagaaataattaaccctcaaaaacactcagtgttgacaaagggtggtgtgaggacacagaaagtatcacactatcattggcagaaacttcctggaaagcaactt

SEQ ID NO: 128109 - DNA, 335 bp, Homo sapiens
gactcaacgagactcacatcttcaacggaagtaattggatcatgctgatctataaagggggtgatgaaaatggtctgggattagacagtagtaatggttgcacaaccttgtaaatatagtaaaaactactgacttttacatcacagaagtttggattttatagtatctgaatcatatctccagaaaaataaaacagaaaggaattagagctttatcagatgacttacaggaacgaccagacacaaaaccatttgtcatctcatcaggccagaagccaagaatttcattttatttttagcttatttatttttttcttgagctggagtcttgctctg

SEQ ID NO: 128110 - DNA, 366 bp, Homo sapiens
ttgaaggctctggccttcccagtcacagcctcatgttctctgtcttcaagtttcacgaagccacgtgacatgcccataaacgatggaaaccaggccctttcaacagtgtcttggcccatccaggtcctggctgtacgaaactgttaactcatcaaggtacagctccagtgccattccctaaccagagctttccctgacttctcagcctgaattatgtttctttacctctgctgccgtcatacttgataaagggggcagaatacgctatcccaaaatatgctccttaggcataggattattttgagttaaagacacttgaaaaccatcacatgcaagaagagggctccgaccttcctttttcatcct

SEQ ID NO: 128111 - DNA, 333 bp, Homo sapiens
aatttcaggaaccattgtaatatgctatcgtttggatgtttgttccccaaaacctcattttgaaatttaattcccaatgttggtggtgtagcctaatggaaaatattagggtcatcagggaggatccctcatgaacggcttgctgtcatcctgcaggtaatcgggggatgtgagttatttcttaattcccatgagagctggttgttaaaaaaaagtctggcacttcccttagcactcttgcttgtattgctataaaggaataccagaggctgtgtaatgtataaagaaaagaggtttatttggctcatggttctgcaaactgtgcaagaaaaa

SEQ ID NO: 128112 - DNA, 351 bp, Homo sapiens
  misc_feature (169)..(169): n is a, c, g, or t
aaatgggctctgatcttcagtctgggctggagggatgacttctcccccgggtcacgggcacgggcatggaggggtggctctgcccgggtcccattctggtccttaggccggggccggggcttggtaaactgggccttatggagcagatactgcacctctcggtccaggnccatcatcttagcttcaaggtctattatttggccaaattagtcactaaagtgcccttatagaagataactctgggagaggtatttatttctctgaaatttttattctcctttcccctttcctttcctttcctttttctttttctttttttctttcctttttctcccctcccccccctcccct

SEQ ID NO: 128113 - DNA, 315 bp, Homo sapiens
ccaaagtgctgggattacaagcaagagccaccgcacccagccttaatcattatagttttatgatatgttttcatgttttcctttttaaaaaattttcttgaatattcttgttcacttactgttctttttatttaataaatcagcttattattccattaaaatcctgacgggaatttgattggagtcatatttttaagagaaactaatctttcattacccagtaaatacattcttattaaaaataaaagcattttaaataatgctgaagtctcctgggaacgctatgcctaatctcaatcccctaccctacccttt

SEQ ID NO: 128114 - DNA, 277 bp, Homo sapiens
cttaccggctaaacaggttcctcctttcattcccaaagcagtcaccagtctcatatgatagatatcactgatcattcttcccaggtattctgatgtaccagcatctatgcatgtgaagatatcccaggtattccgatatcccagatatcccaggtattctgatgtaccagcatctgtttcttcctctaccaatatctatttagcctggagagcccatatcatcatacttcaaactctggacagagccagtttcagccaggttacgtgaagtacggag

SEQ ID NO: 128115 - DNA, 319 bp, Homo sapiens
aaggagccagtggtcagatggtcacgtgttgaagggcatcctgggcctgaacaggaaatatactcagaggaaagttacagtaacttaactagctctgtggtcaggagggaggtgctcttctatgccagggaaatcagcatcaccttcacagtatgctcacaaatatcacagggcaaaatggctgaaagtagaagctttcattgtttttggttcctacctaacatgtgaaattctgttcagtccgaatttttaaaaggaaacaagataattagaatcttacaacctgatttttcaactgcaaaagaaagtcagactatga

SEQ ID NO: 128116 - DNA, 849 bp, Homo sapiens
taagagactatataatttacttacttattttcattgtagtttgtctgtcttcccttactcctgctggaatgggagctccaggaaagtagatctaagtacttagatctatttagtactccaggaaagtatcctaagtacttagaatagtgccagcagataataggtactcaataaataattattgaactaatgtatatatcttacttagcatagtgtctgacactttgtaaacactcaacatttttgatgacttaatttaagaaaaaatcttggatcagtggtcctcaaagtaaaccctgcagctctagttttgtggaaaccagaggactgaagcaaaagtgtcctgacatcttagactgtatgttaatctcaggaatgtttttcctatatatgtctactttgagagaaaaatcagaattaggtatggttctacaaatataggagcttttcttcctccatgctttgtaggtttgtcttatcttaaagcctttattgaattactagaatgcaaacaaacaaaaaatgatagttatggtatatattttatattttattctaaaaaatggtctaaatttgacttttccaaatggccaattatttagaaattctaacactatactatgcctgaagtaaaaatttgcttagttttccagtgacaaactaataaccaaccaaatttacagtgaaaaataaagtataccacctttaaatatagcagcaaggtatttcaacatgaactttactgttttaacctactaaactcaaagcaaaacaagacattcttatctcttattcatttattatcttgggaaaatatttaatagtttcgttttttctgattctagaacc

SEQ ID NO: 128117 - DNA, 292 bp, Homo sapiens
cctggccaatgtggtgaaacccaatctctactaaaaatacaaaaattagctgggcgtggtggcgcgtgcctgtagtctcagctactcaggaggctgaggcaggagaatcgcttgaacccgggaggcagagattgcagtaagccgagatcgcatcactgcactctggcctagggggtacttttcttttttacagtgtttacagaactttttctcataatatttattgagctcttattatgtgcaggcactgtgctgggcactttacatgcattgtttgcttgaatcaagctgg

SEQ ID NO: 128118 - DNA, 532 bp, Homo sapiens
caccacacccagcttcattttcaaaatttctcaccaactcctcactccttgtattcacccaggaccacttctcacaaagccagggtgctgcaggaggggtcagaaccccaagccctaatcctggctctgtcattaacactgtgcgaccctcagcaaatcattttgcctgtctaggtcctgttttcattcctatgaaacgagggcgttaaactgtatgttataaataatgagggctaccagttaccaagctcctattttaggccaggcacttttcacatgttattatgagtcctttcaatctaggtattgttctcaatggacagcttagtcaacggaagctcagagaggtggtgtaacttgccaaaagtcccactacccagtgaatgtccccacggggtctgcacccaggagtctgacacagagcccaggcctcagcacctggcgatgttttgggggtgtgagcagcccagcctactctgggcacgtgtttacttgctgttccttctgcctcatgtttgtgtttgtcccctct

SEQ ID NO: 128119 - DNA, 596 bp, Homo sapiens
ctatttacaacaaaagcttaataaataggcacttcccccttaccattttctttcttgttttttttttctcttgtttcatttttttgtttttgtttttgttttcactttgagacagggtctcgttctgttgcccaggctggagtgcagtggcaaaatcacagctcactgcagcctcaacctcccaggctcaggtgttcctcccacctcagcctctgtattagctttgactataggcatgcgccaccatacccagctaatttgttttgtatttttagtagaaacgaggttttgccatttgggcaggctactctcaaactcctgagctcaagcaatccacctgtttggcctcccaaagtgctgggattacagggatgagccaccacacccagccttgtctcttttcttaaaggaagactgtatctttcaaaaatatctacaaaaagtttgaaaacctctattggccgggcacagtggctcacacctgcaaacccagcactttggtaggccaaggcagatggatcgcctgaggtcaggagttcgagaccagactgaccaacatggagagaccattttagtctctactaaaaatataaaat

SEQ ID NO: 128120 - DNA, 271 bp, Homo sapiens
atattcttagctacttatctaaatagctaggtagctagcatctacctagctaaattatcagctttgttctaaaagctgaatgttcccactatttcataaactgtattttgtaccttgaattttagagctacaagaaacattacttttctagtattttggcattgtatgagttaatccaagaccatctctatatttttttccccacaacaacattgtagcacaaagaatactgaacttaaagccaaaagacctatgttcttttttttttttt

SEQ ID NO: 128121 - DNA, 596 bp, Homo sapiens
cctggctggaaaagacaatggaggagaaagctaaagggccctgtaagtttctgtcacacccagagaacaatatccccctttttgctgggaaatgagccagtcagtatcacagttggagaaaaagcagggcacggggtgccactgtgtggcagggggggccacactacgaggccatttctgtaacaaggccacaggcgtcctcagaatactgacgtgttacctgagatgacaagcacagttttgcgccccgtt[344 bp omitted]

SEQ ID NO: 128122 - DNA, 314 bp, Homo sapiens
aaaaaacaaaaacaaaaacatcatgagccgttattatagctttacctcagcaataatatccacaaaatgactgacttgaacaactagttatatttttccaattcatataaaaatacatactattaagccgggcacggtggctgacacctttaatcccagcactttgggaggccaaggcgggcggatcatgaggtcaggagattgagaccatcctggccaacacagtgaaaccctgtctctactaaaaatacaaaaaacttagccaagcgtggtggtgggcacctgtagtcccagctactcggaaggctgaggca

SEQ ID NO: 128123 - DNA, 136 bp, Homo sapiens
tgctgggattacaggcgtgagccaccgtgtccaactcctgtggcagatttctgaagcctcttctatatatagttctctgtagcaccctgccccataaattccagcagtttctaattctcatatctactcaggtcag

SEQ ID NO: 128124 - DNA, 717 bp, Homo sapiens
ccaataatatataaaaagagtttgatgcacccaaaatcacaaaaatcctaatacatacaggttattgttggattttccaagtactttctatcctttaatgcctaaaactccatcaagggaagtaaacagcaagtaatataatttttcaggcagcctgtggacttctctggtaggatcaggttgacatatcgtttattaggtgagtaagtgaaaagacaagtaaagcataactgaaccaacaggtaacctgttgggctccttcctgacatcactgagatctgaggagccctacaatagcagcacattcaggaaatcaggtccctcaaaatttctagctcccaaccccattgagagattttgggagctttccaatctgccacaaactccctgctacatatgtactatatagttcaaatgtgtgatacagagcaccctgaaagggaataattgaaacaaagttataatcttcttagtcttatgctaaatttattccagccaccctactgaagggaggaagatctgatcattagaatccttttcctagccatgacacatttacatacttgtaaaatttattgtagtaagtctagcattgcaacagaatagatcttataatggccaatcctcacacttttgtattaaggatattatgacagactaagcatggtagctcacgcctgtaatcccagcactttgggaggctgaggcaggcagatc

SEQ ID NO: 128125 - DNA, 3595 bp, Homo sapiens
  misc_feature (1509)..(1509): n is a, c, g, or t
  misc_feature (2335)..(2335): n is a, c, g, or t
  misc_feature (2419)..(2419): n is a, c, g, or t
  misc_feature (3440)..(3440): n is a, c, g, or t
gccacatatgacataaatgccatctgactttttaagaagtttgggtttgatgacaggtataatagaaagccaccagaggttttgaggtgacagaagtatgagctgatctgtcaatgtataagagggccaacatgatgagagcagggccagtcagagcctgctgcagtggtcctatgcctggactcaggtgggaaaggtggggaaaatgatatagactcatatttggaataaacctgaagccagagcctacagtgcctgctgaagggtgaccaggaaaagagaagaatcaaagatgacatctagggttttagcctgagaaagtaagaatggcaatggtgtttaccaagattgagaccccatgaaagggagcagatttcaggggaagagagtggtggtgaaaaggaaaagtcagttttgctcattatgcatatttaagggcgctgttggacatccaagtgaagttgccatgtggatggttagattgaaggacttgagaagagggattgggaatagaggtgtgtatcccaaagccattaggaatgagtggttttcctgggcacgaactcagtgagatgaggcagggagggagagctgatctggatgaggaggaacaaccagccaagactgagacagacgatggaggttaggtcgaagaaaagcctggagcgtgctttcccagaagccagttgagaaaagtgcttcaagaggaagaaggagtcatctgtgctaaaaggcactgaatagaataagaggaaatttcatcattgttttttgcatgggggaattcctaggtgatcttgacaacagaaatttcaatcgcaaaatgggaacagagcctgactggagtggatggaaaccaggggacagaaagtaaaaagtgcaaatcagagagcatatgtgatcttttacgaagagctttgttgttaaagagagcagagaaacaaggcagttacaagagggaagggcatggagccaagagagggtttgggatgtttatgatgatgattatgataatgaccgtgatcatcataatcacaatgcacgccatgcgttgagggcttaccatgtgccaggcactgtgccaagcagtctccatcatgagctcaaggcatttttcagcaaacctagaaagaaggctctgacattatcaccagtgtagaggtgaaagaactaaggatcagggtcccaaatctggtgaatgatgaactgggagtccaaccaagatgtgtcataaacacagcagatggagatgttcctgttcaaaggccagctgaaaatgaatgaaattcttaactgttgttagtcaagacctgttgtggttgcaatgaatagaataccacctcaaaatgactcaagggagtgaaaaagtgagggaggtttaattcagatatctcaaaagtctctaagaagaactgacttcagaataactggattcaggggctcaaatggtgtaattaggatcctctccatccctgggctcaggcctctgctttccactctgttgccctnagtcttggcaggttccccatgtgctggcgtctagcagatcatggctcacttccaaccatttggaaaatccaggagtcaaagtctcatgtggctgggtggctctcattgcttgactttggccacctgctcatctgggaaacaatcactatccccaaggacacacagtgttctcaaagggactggcccacatgcctggctccagagccagcagaactgatctggacatagaggttgctctctaaaggcaacatccaggtgccatggacaaaataagggacactgggctggcggtgaagggcagatgtcccctaaagtatgaagcacgtggacatgaagtctcctgcagacagtgtcaagatatgcttcccagcattctgcccaaatctaagctctatgagggcagtgacctctttagtcctgttcatcaagtatagtttctagcacagtgacaggcacaccatagactcaggttaaaaatatgtttattgaataatggagtgacctcaaatgattattctataatgctggtctgtttcacttgatttagttgctggttattttaattttagctggagagctcttcatgtatttgaaactcatcattattcgtcctaactataattctccaactctccaaaacccttagtttatttggaaatagggtattcaattaatgtcctactcatcagaacagtgtttttggtgtattttaatcaaagggggaaaaaaactgccttagtataaaatcttcaaatctctttgtgatgtcccctgagggtatgaacctggtggtttagccagaattgaaatccccacaaattctaangaagctttgctttgttgaacccctgggggtttatctcctccccgctgactctgtaaggtgaggcagagctctagggaaagacangtgcatgacaaaaagctgtttggggtatatttgcttctgatactgaagtgcctgcagcagagctgtccatctggaaaatgcaggcttgggcggtggagagaggaacaccacagaatccttgtacaggatttgaaatgttgtcttctgtgcggtgtcagtgggaggatgctgaagggcttgggctgcctagaagacatttgagctttgtgttatggttgtggggagaggcttacaagaaaaaatacagaatgccagtcttgtcctatgtcgacatgatgccttctttcccaatggtcatcaagagatagccatgtgctgctggggagatgtgtgaaccgaggagtggggcaggcaagtgagaatggtagagggctaaaaaacaaacaaacaaacaaacaaaaacccagcaaaacctcctggaaggcatgcagaagagaagcatagtgtagtgagtaccctgaacaggaaggggtgctttaatgatgaagctcaggggctgcagccctggaatgtctgggtgcagactctaactgcttcactcttccttttttcggttgggagacttcaggcaagatgcagatcatctgtgtctcagttcccctgttggtaaaatacgggtaataaaatagtactacttcacagacgctagacacccgttgatatatttaaagcattttaaacagtgcttggcacagagaaatcaatatgtgtgggtttgtttccattgttattagtccgaatgggaaaaagatgggaatgtaagtctgagtgtgcatgggagaagttatgagctttggtctgaatattcagagggcataagctttgagaggtgtgtgtgtgtgtgtgtgtgtgtgtgtatgtacacacatggaggagggacaggaggaggcaaggctggtctgagatggatctctctggctgtatgcaaatatttaacattctgggcagagagcacctgttgggtgtctcgcaagtttgagaagagcaattgctctgaagtcagaaatggaattactgtcangaaaagaagcagaggctgatgtgaataattaagcctcctaatgagagcattaatatttccccaatagattgatttagagcttctttctctgggattgttgcacaaacttacctgagctggccatctatcttgattgttcaggacaaaatgcactg

SEQ ID NO: 128126 - DNA, 243 bp, Homo sapiens
cggccctggcgttgctcagcctctgtctccgctgctgctcgggttaccccactcctcacctccaggatttcactcccgttagtgttttttctttactgcgtcatccatttatcccctgataagggatcattccaactggggaaaaggatgatcataaagaagttccctctaacccagtcatgccccagttcctgctcattatctccagaatcttgcctcctggtctctcttcagccgaatcca

SEQ ID NO: 128127 - DNA, 306 bp, Homo sapiens
aaatctgcaatggagattattctaaacttgatcatgatgatgagtgagaaaactggtgcattctcaaactcctgctggaaacgtaaattggcaccacctctcaaggtcactctttcaaacttccaagtttggccgggagtagtggctcacacctgtaatcccaacactttgggaggcagagacttgagctcaggagtgagaccagcccgggcaacatggtgaaactccaactgtaccaaaactacaaaaattcgccatggcatggtggtgcgagcctgtagttccagctactccggaggcaggagt

SEQ ID NO: 128128 - DNA, 338 bp, Homo sapiens
gaaaaattgttgaagttgagtgttatttcatgctgataagtgagctttcttagagtatctttcttagatgttagcaaatattttaggatttgggaataatgtttgaaaagaaaatagttactttaagccggatgtggtggctcacacctgtaatcccagaaatttgggaggctgaggtgggtggatcacttgaggccaggagttcgaaaccagcctgaccaacatggtgaaaccccgtctctactaaaaatacaaaattagccaggcatggtggcacatggctgtaatcccagctactcgggaggctgaggcaggagaattgtttgaacctgggaggc

SEQ ID NO: 128129 - DNA, 856 bp, Homo sapiens
ggctgaaaaaacaattattgtaattataataatatttattaagaactattaataggcaagtaactgtgctaaattatagtagtaacacttaagtagtgcttacttctaaattagtttattgaacactcatactaatgtaagaactgttactattcctgttcaacagatgaggaaactgcatcttagagttgttaagtaagatattcaaggtaacacagtttaataaggtgtggagcctcaaaaaaaaaagttgaaatactactattgtcatcactgtttttgagtgaagaaatgaaggcaaagacattaactttttgaagctcataccactagtgaatggtgaaagccaggatttgaaatgcagctaactgactttagagctcattctttagctacaactttttattgcctcagagtaaatgaaaaaagagttccaaagattgagttattgcagggactagtgcataagctactaggaaaatggcctagttattgaagagcagtacaaaattagaacttagaaataagagcaagttgagcctgggtgcagtggctcatgcctgtaatcccagcactttgggaggccgaggtgggtggatcacctgaggtcgggagtttgagaccagcctgaccaacatggagaaaccctgtctctactaaaaatacaaaattagctgggcatggtggtggatgcctgtaatcccagctactcgggaggctgaggcaggagaatcgcttgaacccagaaggcattgcagtgagccaagatcgtgccattgcactccagcctgggcaacaagagcaaaaaaccccatctcaaaaaaaaaaaccaaaaaaaaaaaaaagaaataagagc

SEQ ID NO: 128130 - DNA, 285 bp, Homo sapiens
gtctgggtccttactggcaactttcccgtgaggtaccagttatgggaccttgaacccttcacgtaacccctttgcacttcagtttcttccttagcatttgctatttagaaattggggaaagtaatgaggagtgaatgagatgctgcttgtgaatattctttgcttgtccaccagtgttagaaatgatgcattatcagtatgtggcagcatccgcaggatttcttaatttaggacattctcctggaatgctaagggcccactgaaatattctttaatctgtcatga

SEQ ID NO: 128131 - DNA, 809 bp, Homo sapiens
tgttcaattctattgctgagactttccagagtgttttgcatttctaaaagtgtatccaaagttttctgaatttttgattgtttttttctttaagctatctattttcttgactatttctccctttatgtcttgtatcgttttttggatttccttgcattgggcttcacctttctctggtgcctctttgattagcttcatatttttattaagctgattatttttcacataaatcagggatttattcttggtttggatccattgctggtgaactagtatgattcgggagggtgtaaagagtactagatcaagggaacacacatgagacaaaagaatctgaacaatggccttcagccctagacgttccctctggacagagcgtaccctaaatgacgaatggaagcagacacagagaacacatggtcaatcatgacaaaacaaggctcttgcgacagcccccacaaaacaagtattcaaacccaggcttaacgcagcacacggaatcgcaaaccaaagagaggtcattcgctgaagtgttcctggggaaaagaaggtccagggggggagcttcacgcatcacgtactgcaggcataagcataaccgcgcgaagagggaaccccgcagtaaacagcgcggacagcgcgcaaacttgcaccaggcgaaacaatccactacaacatgttggaagtacgaactcggaaatctgcaaccgggaaggacaactaggggacccggaagcaagacggaatgtcggaccgcgcgggggggaccatccgcacacttcacaaagaagtgctcgagagaagtgtgg

SEQ ID NO: 128132 - DNA, 596 bp, Homo sapiens
ccgccaaaccgcattgagagcccatttctcaagtgtcactttggagccggcttcgggctgtgaaatgtctcccacaaagctgcccttggttttcttgaggctgatggaactttcatgcggttgttggttttgtttcggatgaggaggaatggctgtattttcacctggcctctggtaggtgtcctcttgtaattggaaatccctacatttctccttgggggctgggtttctgccaaggccacgttggaggaggatctggggaactggcctttggagcattgaaggtcagggaagccacagcaggagacccagttttgaatctgctgaatggcacttggaggatcaagttccctctgaggttgaagagcccccctctgaccttggttcaggggaatcacgtgggctggccttaccagcagatgtggcaactgggatctaagaatccttgtaaaggcgttttgtatccttcctggaaaactggagttggacataccttcaaggaaaaactagctgggcttcctgtcctggaagaggaagggcgctgggagagaacactgacatgcattcattcattcatgcattcacaatacagtgca

SEQ ID NO: 128133 - DNA, 175 bp, Homo sapiens
gtgttagccaggatggtctggatttctgacctcgtgatctgcccaccttggcctcccaaagtgctgggattacaggcctgagccaccgcacccgggattgtatgcttttttcttaagccactcgggcattttctttttctttttcttttttttgctatttatttattaacttttt

SEQ ID NO: 128134 - DNA, 329 bp, Homo sapiens
tagggagttcaaggttggggccctgcggcaggagctggccacgctactatcatccgtgcagctgctaaaggaagacaaccctgggcggaagatcgcggagatgcagggcaagctggccacggtagtcctggggctgcccgcacccagctgggagagagggggagccatcaggttcagacggggcagccgtgcggagaggcaggacccccagcctacggggcattttccagccagcaggagacgctcagaaaaccacctgtcggaggccaggcggggtggcttacacccataattccagcactttgggaggccgaggcgggtggatcacc

SEQ ID NO: 128135 - DNA, 456 bp, Homo sapiens
aaaacaaaagcataatagaatgaagacaaaccaaccataactcagccaaaaatacagaaggttatcaatattgtttgaaattccctttctgaagataactctagctttatttgctgcatattattcccctgctttttgttgcagttgtataatatatttgagacaaattatgtactttcttctttaaatagcttaacctggcttctcagtctgtattggaaggactcaatgcttgttttgaccaccgaggagaaatctatgtgcctgagttaggaatgagctttcaagtgcagcatgaaaagacgaagatttttgggtgtcagaatccctttagacaaggaggtgggaggaaaggcttgcccaggtctttccttaacagattcactcaggtcttcgttgatccccttacagtaattgacatggagttcattgccagtactttgtttccagccattg

SEQ ID NO: 128136 - DNA, 224 bp, Homo sapiens
cctttaaaccttgctcaatttgaatgctttcatttagtggaaaacgtaatccgaattttatgtgttgtcatggtgcatctgtctctattttctaacttagcagagtggcactgttgggaaagaggaataatcacattagcagaaaaagaagataaatgagaactagagaagcaagcaagaatggtcatggaatggagaaactatatagagcaatattattaaag

SEQ ID NO: 128137 - DNA, 265 bp, Homo sapiens
cagcttccacccctctcagctaccaaaagtgcctagtccacatctacatttagatgtctaatggatggctcaaactcaacatggccaaatctaaacttctgatctttgaacccaaacctttttcacccatagtcttcaccacttccgttgagggcaaagccatccttctagttgctcatgctaggaaatacaaagtaatatttttcttctttttttttttttttttttttttgccctccacatcccaatctgtcaggaattctta

SEQ ID NO: 128138 - DNA, 1323 bp, Homo sapiens
gtgttgaaagccggcaggaagagaatgctggctctgtgtttagcagccgaagggacttgttatttaatgtgtcttctgaagccacgaggcctcggctttgtaacttgctttctttattcttataaatcttctaggatgctccatggactgtaggaggagctctgacttcccgaccatacccttgtgtttaccactacagggacagaggttcacagctgcttctggttgctgtagatgatctggttccctgataatttgagataagtttgtgttagtttggagtcttcggtgaatacgttagggtacatgtttcttcgtcgttcctggcagggctgatcatagaccacatcaacccaagaatgtgtttgcctctctgatgaggctacatctagaatatgaacttgtcgagtgcttaagtatctttctacatagtttattcattagcctgttcatttatctgttcaacaactatttcttgcttgtcaaccatgttctaggcatgtcatgggctctggaagcagagtgagaagcaaggctaagtcctgggctcacggaacttaggttctaatgaggaagacaggcaaacaaggcgccgtggagaggcaggcagagaaccttgctttccaaccctgctcagaggtgcagtctctttatatatcccacttccgctatccccaaacatgcccattagcactgacatctaaagggctcatggtgaattaaaatgtgaccccacctctgggtatttagtcatttagtattgaactggggttaaagtcctaaggaaaggcatgtggagctaatatttttggggggacaggccctactggcagccatggaatcttactccgcgtggctcattgctcctgggctttacaactcaacgcagctgtagttcattcaccatgctgtggcttttgtcactcccacctcacctgtggcccacattcttctctatttgaatgtgtggcaggcaggcgagatagacaatggggaggagttgttctgcaggagagaaggggacagtccttcctccagcctggagcacttcctgcaccgctccccaccccgtctactctccatatcccaccacgccctcagggccttgccctaaccccggaagcccacctgtctcttggctgaaatcctatgggctgagttgggtccccccaaaactcatgtgttgaagccctgtctcctgtacttctagaatgtgactgcatttggagacagggtctttaaagaggtgattaagttagcatgagaccattagggtgggcctactccaatatgattggatttataaaaagaagaaacttggac

SEQ ID NO: 128139 - DNA, 466 bp, Homo sapiens
ttcaaatgtccccactgccatctccaagttgtctctctcgggttcctatttccctggcttttgtcactcccacctcacctgtggcccacattcttctctatttgaatgtgtggcaggcaggcgagatagacaatggggaggagttgttctgcaggagagaaggggacagtccttcctccagcctggagcacttcctgcaccgctccccaccccgtctactctccatatcccaccacgccctcagggccttgccctaaccccggaagcccacctgtctcttggctgaaatcctatgggctgagttgggtccccccaaaactcatgtgttgaagccctgtctcctgtacttctagaatgtgactgcatttggagacagggtctttaaagaggtgattaagttagcatgagaccattagggtgggcctactccaatatgattggatttataaaaagaagaaacttggac

SEQ ID NO: 128140 - DNA, 381 bp, Homo sapiens
  misc_feature (18)..(18): n is a, c, g, or t
tgtgggcaaggatgtctnccatcacaccttcttcgacctgctgggctcttggtccccttggagattactttaaggaattggcatgtaagatggccctggaactcctcacccaagagtttggcattcccattgccaagactttatgttacttaccttggagaggccctggcactgcagtcatcccccagtggcagaaggatgaattgcgggagactctcaaatccctaaagaaggtcatggatgacttggaccgagccagcaaagccgatgtccagaaacgagtgttagagaagacgaagcagttcatcgacagcaaccccaaccagcctcttgtcatcctggagatggagagcggcgcctcagccaaggccacccaggggc

SEQ ID NO: 128141 - DNA, 908 bp, Homo sapiens
  misc_feature (339)..(340): n is a, c, g, or t
gagggtatgtgctacacatggaaccatctacggtgacctgaaagtgggggatcaggtctggctgtttattgatgagccccgacgaagacccatcatgagcaaccacacagctacgcacattctgaacttcgccctgcgctcagtgcttggggaagctgaccagaaaggctcattggttgctcctgaccgcctcagatttgactttactgccaagggagccatgtccacccaacagatcaagaaggctgaagagattgctaatgagatgattgaggcagccaaggccgtctatacccaggattgccccctggcagcagcgaaaccatccaggcctacggnntgtgtttgatgagacctatcctgaccctgtgcgagtcgtctccattggggtcccggtgtccgagttgctggatgacccctctgggcctgctggctccctgacttctgttgagttctgtgggggaacgcacctgcggaactcgagtcatgcaggagcttttgtgatcgtgacggaagaagccattgccaagggtatccggagattggtggctgtcacaggtgccgaggcccagaaggcctcaggaaagcagagagcttgaagaaatgtctctctgtcatggaagccaaagtgaaggctcagactgctccaaacaagggatgtgcagagggagatcgctgaccttggagaggccctggcactgcagtcatcccccagtggcagaaggatgaattgcgggagactctcaaatccctaaagaaggtcatggatgacttggaccgagccagcaaagccgatgtccagaaacgagtgttagagaagacgaagcagttcatcgacagcaaccccaaccagcctcttgtcatcctggagatggagagcggcgcctcagccaaggccacccaggggc

SEQ ID NO: 128142 - DNA, 488 bp, Homo sapiens
tttgtagagacgggatctcactatgttgtccaggctggtcttgaactcccaacctcaagggatcctcccacttcagcctcctgaagtgctgggattacaggcgtgagccaggagcctggcctaaactctgctgtttaatcctaacaacaggccttcctctgccaacacctacccccctgtcctgacttgctgagtcctataacaggtctgctttttgagccctgttactgctgctcatcactgttggcagagccagtctcagctgggcaatgcccttagcctcaggggctgggttgccttggccactggtgggggcggacttgagactctggtgcctcccatgtggaagacccaagtctctagtctgtgaagggatcctcaggatttcaaaaagtcctttgcctttgattaggggattattgctgctaccaaagtttttgggtcactttcctttggtctggagtcgtgtgggcaccattcatgatgag

SEQ ID NO: 128143 - DNA, 680 bp, Homo sapiens
acaatctaagtggttggactataaatatgcacttcccacaacatttttatatgtttaaacagttttataataccatattagggaaactgtttgtctcaaggaaatagagattgtgatatattctagtacaatgaagtgtaatcatgtaaaataaaagcttttacttctggcaattaaagttagtcatgttagaacactgtctaggaatggttggaaaatcatattttattttctaatcaatatatttatgtcatctgtcaatcagaattacactgactttaaaaagcaataatatgactgtatattcatgatgaaatatagcctaagaacaaaataatgcacaaaaataatctcagattgcttattatttttcagaaggctgtatttttagtcttaggctattggtttgtcttatattgcaggattttaaaaaaatgattagttcccagcactttgggaggctgagatgggcagatcaccaggtgaagagattgagaccatcctggccaacatggtgaaaccccctctctactaaaaatacaaaaattagctgggcgtggtggcatgtgcctgtagtcccagctacttagggggctgaggcaggagaattgcttaaactccagaggtggaggttgcagtgagccgaggtgtgccattgcactccagcctgctgacatgta

SEQ ID NO: 128144 - DNA, 357 bp, Homo sapiens
tataatcatctgtgtgaaataaagtaagaaagactaatctgcctcctgtaactaatatgcacaaatataacttgaataactcaaagagaaatataatttcttaaaaaaactagacaaagtgctatagaaataatctgcatgtttggattccaatatgttacaaaatgttattcaatacagatgtaagtcacttcctctttctgggtctcagttttctcatccataaattaagaccaacgaactggaatgtttctaaattactttccagtcctaataaataaggatgttatctttatagagatcttgcttagataggctggcactgggcagtgaaagaaaaccaaggaggcaaaccag

SEQ ID NO: 128145 - DNA, 487 bp, Homo sapiens
ttactgatacactacacttttcccaagattatttcctccattctcatggctttacatattattaatacgttgataatgcccaagttttgatctctagaccaaacagctttcttcagcctaaaaaccatctattagacaactccacctgcgtttctcatcagtacctcaaatctaacaagaccaaacggaactcttggttttcacagcatcatcatgagttgtaattatatttgtttacttattatatatctccctcaataagtgataagctttgtaaaggagcaacgatatgcttttgtaagtctgctgtgcttaccaaagtatactcagcaactaaataggacttggcaagagtaagcactcaaagccaggtgcagtggctcatgcctgtaatcccagcactttggggaggctgaggtgggtggatcactagagctcaggagtttgagatctgcctgggcaatgtggtgaaaccctgtctctacaa

SEQ ID NO: 128146 - DNA, 403 bp, Homo sapiens
ctgagcgtcccaagttggaaagagaaaaagacagagagagaaaagagttcccctgtatggagcagagagaaaaagggaaaacaaaaagaaaagaaaaataaatcccaaactctgggcttacctcctggctcactcaccaaaatatgtcaccagtggagggtcttgactacaagtcatccaggctcttggtattttgaacaaagaattggaaaaaatgcacaaacaaagcaatgaaaaagtgaagcaatgaaaacacagatttcagagtacatgccacagagtgggaacacgcttgagcaagtggctgaagagcattggttacagaattttctggggcttaaatactctctagaggtttcccgttggttacttggttataccctatgtaaatgaagtagtggcc

SEQ ID NO: 128147 - DNA, 383 bp, Homo sapiens
aagtccaaagttcttgttttctgatgtatttattcatccaaaaaatatttattggagtctgtactatgtgccaggcactgtattaagtttttgggatacataattgagccagacaaaaatcctaccttccaattgaggacagtgggcgcctataacaacaaataaaaaataataagtgaattatgtagtctgttagaagataatacattctttgctgggaaaagagtaggaggcgtgagatgggccaaagatttaggagtacacagaggggcagtgggcaggttgccgcttactattttaaaaaaagggcctgagtgagtgtcattgaatgtaacaagtaaagatttgaaagttagggagttagccacatggatattcaggag

SEQ ID NO: 128148 - DNA, 440 bp, Homo sapiens
agcgattctcctgcctcagcctcccaagtagctgggattataggcacacaacaccacgcccagataatttttgttattttttagtagacatggggtttcaccatgttggccaggctggtctcaaacgcctgacctcaggtgatccgcatgcatcagtctctcaaagtgctgggattacaggtgtgagccaccatgcccagccgaacgttactgctcttctgttgtggcctgtgaaaccagggcatgcagtctgttagaaccatgtgtaaagtaaaagtaatgaggctttgagcaagaaaatctcatgggagaaaaatacatccctcttgtgttttatttgatcttactttcttggtgatagctctaaagttctttgtagcctaaatgagttgatactggcactgccctacaggatcgtctgtgatgatgcaaacgctccg

SEQ ID NO: 128149 - DNA, 876 bp, Homo sapiens
gtatcctgtcctcttccctcttggcttttttcctgctcccagcggaacccagtcaggggattctataggagaagagggagcccaacagaatactaacttcagtggagctgactctgcttatacaataggggtgggctgcacagagtggaaaccgagtacctggtagaatgtgcatttccatggcccactgtaggcgcctctcttagagcaaacagtattttaggtgtgctctttattgaacacaggaccacagtgtgtcactgaatcttcttaaacagaagcaattagaacgatttagatatagggagggcacaagtaataagtaacccaggggatagaccaagaagcagctctctggaagagtctggaattaaaaagacggctgtactagaacagtagccactgcctgctccagaactaggggggagatatttgagctggagccaccagagaacatttctattgagaagtttttatttgtttgttctgttggttttttgttatttctgttttcttctaatctttctctgaagtatcactctggtattgagaaatttttatttcattagctaacctgggcttggtggttaaggctagtacttgtacttagaatgattctctgtcaggaaaagtcttggctttagagtttgttatagttggggatataacaattactgtgatcgaagagaaaaaatagcacctttggttgtagatagatgtagttttcctcacagccctcacgtcccttcatgtaaaagggattttaacaggatttacagagggaatggctctcagttcccacactgtgacatgtgtttgaggaattttgcctttaagcatttttcttgcacatggctgaaacacccctggctctct

SEQ ID NO: 128150 - DNA, 491 bp, Homo sapiens
tgtttgtgttggggtgtggcagctctctgacaagtcaaaagaaaatgagtaattgatttggtgctaaaacatgattatgcttgctataatgaaagcaccctagaaatattaaaactaaaaaacaacacgtactatctctgttagacaagtgccttttgttatgttaagatattccatttcttcttcatgcgagatggttcagcatttactaatcttataccagaagcagtttacatggagagatatttagataatgaaaacttgtctgtacttaggtaaatggaaaggttgtcacctgaactagccagagactccaaagcatttagctgccagtcatgccttaaaccttgggaacatcccatgttagacttagattaagaacccttttggggtttcaaagaggtgacgggctgcattcaatggtgaatgatcccaaggttgagttaactcatcactctgaagaagaacaaaatgaggaatttacttagtta

SEQ ID NO: 128151 - DNA, 167 bp, Homo sapiens
acacacagctagaacacagagtagggtagtgactcaaggtcacacggcaagtcagtgtcagaagggggccagcactccagactcctaactcctggctgggggcatttccctctccaatgatagatgacactgaccattcactcgagaatttgtttgtttgttttttt

SEQ ID NO: 128152 - DNA, 490 bp, Homo sapiens
aaacgagcatccttacacagtttctgagggtcagtcatctgggagtggcttagctggtggtccaggcccaaggtccctcctgaggctgcagttacctgcaggccaggaggatccacttccaagcttactcatgtggctgtgggcagggaccttccattccgcaccacgtgggcctctctttacgaaccaaaatagaagttgcaatggctcctataaccaaccttgggagtgacataccaacacttcctccatgttctgtggttcagagactaaccctggtacaatgggtgtgggtctgggggacttcacagggtgtgtgagttggaggcaggaggctggccaccacagccatctaataaacctctaaaaattaacatggcccaagctcaaattcatcactcgcagcagccccacaacttgctcttccctgtcttctccatcgtagtaaatgacagcatcattcactcaggtccctgtaaggatgcaagtc

SEQ ID NO: 128153 - DNA, 541 bp, Homo sapiens
atcattctaattggtatgaagcatgcaggaggtaattagcttaagatgcaatggtggagaacatgcataatttatatacaagccttgttacatgtgcagctatgaaagagttctttttcatatggtcagttatatgttatatgtcgacaagataattaaaagtagatttataagccaaaatttaatgatggttaagttaatggaaattttccctcaattaaaaacattcaacaataatgtaatatcacctcccctgggtgaaatgagtttattttatcttattatttttttaataggctttactttttagagcagttttaggtttacactgtgaaattgagaagaaggtacagagatttctcatgtattttcttcctcccatcacgtatgtacagccgcctccattattaatatctgtctccagagtggtacatcattataattgatgaatctacacatcattatcacccaaaatttcttttatttttaattaaaaatttttttaaaaaatagtacaaagccccctgaaccttgctgaagg

SEQ ID NO: 128154 - DNA, 466 bp, Homo sapiens
ggactgggagtggctcctgcaccagctggcatctgcctagagacaggaaggtgggtgcctcctgggttcagctgggaactctgagctttgggtgctggaggtcactgcgtttgggatggctgtctcctggacccagctgtctctgtgtgtggagtcagtaaggcaccgtcctggctgcggaactgaggcaggcatgctatgagaagataaaattgccttaacaactgtccccaggatccttccagcaggcacttccttgctgtgccctggaaaagcggggtggcactctggatgacagcacagcctcagggtgcttctctgtggcccacacacccttccggcctgatggccacgtccgttcctgtttacccaagccccacttcccctgaaatccaggcagggagagatggggcctggctgtgagaaacctggccccaggtgtcaccatttccccaaaagccttgtt

SEQ ID NO: 128155 - DNA, 371 bp, Homo sapiens
tttttaattgcttgtatggctagcctgttgaggtcctctttttgcttagtccccccattctcattccataatacatattgggaaaagattataataaatattgggaaaaggttatctctacactgatacctttcatgtttacatctttgtttaccatagagtctgctcttgtgccatcaaagtatctaactgaatataaaacatagcattaggagtatctatcttctatagatgctatctatagaagcatcttctagtggaaagattaggatgagaacaaagtagaccataacaagtataatagccatacaaatagctagatggttatgcttagttggctgaatttaataggctgggttctggagcaaacc

SEQ ID NO: 128156 - DNA, 378 bp, Homo sapiens
tgttgacagaggggtgatggaggagggtcttgaagccagaatttagagctggaggaggcaggaggacataaataaccccaggcaatctgcaaaagcactcaacagggcaggccagtgcagtagggcttaatgtttttatttggattttagagggaagggtagaaggaggctggtgaccccaggacacattttggtcgcaattatgttccagaggctggtatcactcattttgaggaccaagttttaatgtcttgtgcagctaaggtctctcaggatatagagggtatcacccctagaaagcatagcctgaaggaagcattagaaactgagaggtttgctttgtcacctcggttttctggccttcaacaggtcaattgc

SEQ ID NO: 128157 - DNA, 115 bp, Homo sapiens
ttggctggttcttcctttgccacatctcccacattcaccattccctctcctgtcaccaccactatcctcatctgccaggactgctgacccctaattcctccgcctaacactagtc

SEQ ID NO: 128158 - DNA, 891 bp, Homo sapiens
tgtaaacatgttttactgttgaatgtgctctctcagtatgcagatcctagggaattctgctttgccttcaatcccatttgaattatgattttagcttatctgtctaccttcttgtggaagtggaagcgtttgaacaagttaaagagtgaaaaaagtcagataccccattatttggtctgtgtagcagtatcagtcactatgaccagctcctggtgcactgatagaaggtaatttgagtgtcctataggcaactgaccatagcttggctcctactctggaggtcattggcctgtgtttcggcgacttctcagcctgtctttccccccagagtgctccgactgctgctagggcacccctgccacaccctgttcccaaccgccttggcttctccttgtccgcaggctggctgggttgcctgggtgcttggctgcttggcttctgagtgtctcatgcccaggttacctcaagagctccagcagctgccttcctacagggagaaacgtgctcatccacacagtttgtgccacaccctgtccctcttgtgaacacacctgtggtactgtcctgacctatacatattgaaattctaaaagagaaacacagttcttttgcctttcaaactgtgctccccactatactgctttcacttttctaagaatcaaatacaatggggaatttggccatggagaaatgaaactcgcttcagctcaagttcaggatgccttagggtgtggcagtaacattgttcccataaaggggtcttggggggaggcagtgtgccttaatggaaccgagagaacattttcgggagctttgggcctttggttggttatgagagaggggatttaaaagaagagggatctatcgggcccagagtggaaaaaaaattct

SEQ ID NO: 128159 - DNA, 684 bp, Homo sapiens
ggggggtaatccaaaaaacacgtttttatctagacccccaggtggtcctgacataggtggctgaatgaactccccccagtgtgttgtcattgtactttctacctgtctttaacattttcctacatattcaactgtattatgattaaagtaatctcttcccaactttgagtttatctggcagaaaattataaaatcagaacttttttcctctatatttttccaaaacttggagaatttttagtataaaaggagttattcatttgagaatatttagaaaaaaagataatgcagaaataggaagtaggggtgtctagccaccacagagaacctaaggatgtgaagtaactgtggaccttagaatgacagtcctgaagctgttactccagtggacattgagttctggtatccccaagaacctacgtccagagactaaaaagcctaatcatgaggctgcaagggtcagtgaagacagaaagtataaaatgagcatgggacaaggaaaaatgatatgtttttaatgcatatgttaatttcaacaaagtagaacaatttaccctgccaaaattttggaggaaggaaattctagaatttgctgataaatatgtgttaataaaagggtatttgttgtattatatattaccattgtagggcaggaaagactttcttctaccctcttaagttcta

SEQ ID NO: 128160 - DNA, 316 bp, Homo sapiens
cctctgagtctgaatctgattcggtggactgacaaaacatcacaattgaaggaatctctctcctcactcattacttttccaaaaaagtcccactagctgatagctccaggtttcttgctggttcctagatttattgcttggaaattataatgcatagtgggcctttcaaaaaaaaaaaaaggtacaagcaaatgaaaacaaccacggttttaaagccccataaaagaccgtatatgtagcagaaatgaaccctgccaatgtttactatgaggacctattactcctttatgctactcgagtggattttaaactcaaa

SEQ ID NO: 128161 - DNA, 509 bp, Homo sapiens
ctgcttctttctctctgggactcttctcaataagcactcattgaattcctagaatatgtgaagcacaagctcacattttttggcatggtggaaagtgcaaactagggtcttctcccagccattgtttcttccacccccctctccccattgaacctaggccctttacacactttaaaatgccacctttccagtactcaggttttacttatgtgtattgttttgccttttataacaaaagccaaaataattttgttataaaaggcaaaagaatattttggcctgttttaccccaaaattcaaatctagatagtactgcttctgaaaggcaaatattaaaaacacaatctgaaatacaagtgccaaaataacatatacacctgactcttaaaaaatcatgatgacccagcagccttaactgctgctgttgcaaggacagtaatctccttttttgtatatgatgtcatgtttcagccctttctaaaactgaggtcagatatccaaatgaagag

SEQ ID NO: 128162 - DNA, 640 bp, Homo sapiens
gcatatctaaaacataaggatacagaaaggttagaagtaaaggctgaaaattgatctccatgcaatacataatcaaaagaaagctacaccagctatattaatgccagacaaaatagactttaagacaaagggcattcctttatctggaagacgaagagggtcactacctaatgattaaaagttccattcaccaggaagagaaaaaaatcataagcttgtatgcacatgataacttagccttaaaaggtaggaagcgaaagtgaccaaatgtacgaaaaaataacacatccacctaatagtgggagaatctaatagatctttcctgataatagttgaaacagacccccaaaaaatcaggatatagaacttgtaaagcacaggagctggatatactgaacatgtttataatactgtaccaaacagctgcgcaaacacactctttgtaagcacatgtagatttatgaaatttgatgacactgaaccaaaagcaagcctcaaactgtcaaaggattactatcactgtggatagcctactccaatcagagggaaaatgagttagacattaaaaagataaaaaactcccatctatttgcaatttgagaaacatacatctaaataattcatgagacagggagagatc

SEQ ID NO: 128163 - DNA, 376 bp, Homo sapiens
attactcaagacagtaaagcagaaaaaaaaaattctccatgtaagaatatttaaggcactcttgccttagaatttgtttacaacaatgactcttttcagtcattaaattaatcctgagtcaccaatatcttagaaccagtatgttaaggtggcagtgctcagaaggtcttaggacaggctttggaaatcatgtcagtattatctaacttacttcaacacatctcctgccgcaagtcactgatatactgaacggttaaaaagcaattacaggcctggcgcagtggctcacacttgtaatcacagcactttgggaggcagagatgggattgtggggagagatcacttgaggtcagggatcacttgaggtcaggagtgc

SEQ ID NO: 128164 - DNA, 308 bp, Homo sapiens
tctcgccgtctctcattgggaatctgtgtttgcctcaattcatctgtgaacccttgggcttgtctcaagcggggacccaggcaaatcaagacacagccatgaaaagacagcttatgagacacaggcaggggagtgggccattcctgggactggggctggcactgcccgagtataggggattgagggatgggggatcaagtgcagggacagcggctggcctcaaggccacacacaggattttggtcattccactggggcaagggggagcagtggggttttaatcagggcagacatgatccagttggact

SEQ ID NO: 128165 - DNA, 761 bp, Homo sapiens
cagcggaacctcaatagctgggatcgggcccgggttcagcgacaccttgagctcctactgcgggatctggaagatagccggggtgccacccttaatccttggcgcaaggcccagctgctgcgagtggagggcgaggtcagggccctcctggagcagctgggaagctctggaagctgagacactggcggcaggcacctagctatgtgaccactggccctaaaccttttccctctgtggcctcctggcttgcactgctccctctagaaagattccttcaggtctggaggcagaggaatgggcatagctgagccagttgccctcctagggcatgtttgaccaggactgagtctggaatctccaagttaaagatggtgaatcaatgcttcgggcttggagatggaacatgcctcctctccattcagctagaaggaccaaagcatgtggcatttggatggccagagtgccctgaagcaccactaccaaccttgcctccccctcctctcaaagagcctctgactgtgtcaccaaggggctcacatcttatgtctgccatgccaggggtgtcgccatccagatgtgttggaagcttcccctcctgccttatgctcacctgtggacaccgaggatgccctcacattggtgctttctcctcatcctcatgccccctttgccacaatggtatgatggcttggtagcccctcgaggcagatgcacctgacttgctgctattaaaaagccgtgtgccttctaaaaaaaaaggc

SEQ ID NO: 128166 - DNA, 746 bp, Homo sapiens
cagcggaacctcaatagctgggatcgggcccgggttcagcgacaccttgagctcctactgcgggatctggaagatagccggggtgccacccttaatccttggcgcaaggcccagctgctgcgagtggagggcgaggtcagggccctcctggagcagctgggaagctctggaagctgagacactggcggcaggcacctagctatgtgaccactggccctaaaccttttccctctgtggcctcctggcttgcactgctccctctagaaagattccttcaggtctggaggcagaggaatgggcatagctgagccagttgccctcctagggcatgtttgaccaggactgagtctggaatctccaagttaaagatggtgaatcaatgcttcgggcttggagatggaacatgcctcctctccattcagctagaaggaccaaagcatgtggcatttggatggccagagtgccctgaagcaccactaccaaccttgcctccccctcctctcaaagagcctctgactgtgtcaccaaggggctcacatcttatgtctgccatgccaggggtgtcgccatccagatgtgttggaagcttcccctcctgccttatgctcacctgtggacaccgaggatgccctcacattggtgctttctcctcatcctcatgccccctttgccacaatggtatgatggcttggtagcccctcgaggcagacgctcatgacatggagaagctcaagagccgcgaaaag

SEQ ID NO: 128167 - DNA, 1152 bp, Homo sapiens
gaggacgtcagcctggtactgggcatcatggccaagctgctgcctctgcgggctctgcctctgctcttcaacctgatcaaggtggttccacgagtgtttgggcgcatggtgggtaaaagccgggaggcggtggctcaggccatggtgctggagatgtttcgagaggaggactactacaacgatgatgttctggaccagatgggcgccagtatcctgggcgtggagggcccccggcgccacccagatgagccccctgaggatgaagtcttcgagctcttccccatgttcatgggggggcttctctctgcccacaaccgagctgtgctagctcagcttggctgccccatcaagaacctggatgccctggagaatgcccaggccatcaagaagaagctgggcaagctgggccggcaggtgctgcccccatcagagctccttgaccacctcttcttccactatgagttccagaaccagcgcttctccgctgaggtgctcagctccctgcgtcagctcaacctggcaggtgtgcgcatgacaccagtcaagtgcacagtggtggcagctgtgctgggcagcggaaggcatgccctggatgaggtgaacttggcctcctgccagctagatcctgctgggctgcgcacactcctgcctgtcttcctgcgtgcccggaagctgggcttgcaactcaacagcctgggccctgaggcctgcaaggacctccgagacctgttgctgcatgaccagtgccaaattaccacactgcggctgtccaacaacccgctgacggaggcaggtgttgccgtgctaatggaggggctggcaggaaacacctcagtgacgcacctgtccctgctgcacacgggccttggggacgaaggcctggagctgctggctgcccagctggaccgcaaccggcagctgcaggagctgaacgtggcgtacaacggtgctggtgacacagcggccctggccctggccagagctgcccgggagcacccttccctggaactgctacacctctacttcaatgagctgagctcagagggccgccaggtcttgcgagacttggggggtgctgctgaaggtggtgcccgggtggtggtgtcactgacagaggggacggcggtgtcagaatactggtcagtgatcctc

SEQ ID NO: 128168 - DNA, 1219 bp, Homo sapiens
gaggacgtcagcctggtactgggcatcatggccaagctgctgcctctgcgggctctgcctctgctcttcaacctgatcaaggtggttccacgagtgtttgggcgcatggtgggtaaaagccgggaggcggtggctcaggccatggtgctggagatgtttcgagaggaggactactacaacgatgatgttctggaccagatgggcgccagtatcctgggcgtggagggcccccggcgccacccagatgagccccctgaggatgaagtcttcgagctcttccccatgttcatgggggggcttctctctgcccacaaccgagctgtgctagctcagcttggctgccccatcaagaacctggatgccctggagaatgcccaggccatcaagaagaagctgggcaagctgggccggcaggtgctgcccccatcagagctccttgaccacctcttcttccactatgagttccagaaccagcgcttctccgctgaggtgctcagctccctgcgtcagctcaacctggcaggtgtgcgcatgacaccagtcaagtgcacagtggtggcagctgtgctgggcagcggaaggcatgccctggatgaggtgaacttggcctcctgccagctagatcctgctgggctgcgcacactcctgcctgtcttcctgcgtgcccggaagctgggcttgcaactcaacagcctgggccctgaggcctgcaaggacctccgagacctgttgctgcatgaccagtgccaaattaccacactgcggctgtccaacaacccgctgacggaggcaggtgttgccgtgctaatggaggggctggcaggaaacacctcagtgacgcacctgtccctgctgcacacgggccttggggacgaaggcctggagctgctggctgcccagctggaccgcaaccggcagctgcaggagctgaacgtggcgtacaacggtgctggtgacacagcggccctggccctggccagagctgcccgggagcacccttccctggaactgctacagggtgtcgccatccagatgtgttggaagcttcccctcctgccttatgctcacctgtggacaccgaggatgccctcacattggtgctttctcctcatcctcatgccccctttgccacaatggtatgatggcttggtagcccctcgaggcagatgcacctgacttgctgctattaaaaagccgtgtgccttctaaaaaaaaaggc

SEQ ID NO: 128169 - DNA, 874 bp, Homo sapiens
ggcatcgactttctctctcctgccagcctctacttcaatgagctgagctcagagggccgccaggtcttgcgagacttggggggtgctgctgaaggtggtgcccgggtggtggtgtcactgacagaggggacggcggtgtcagaatactggtcagtgatcctcagtgaagtccagcggaacctcaatagctgggatcgggcccgggttcagcgacaccttgagctcctactgcgggatctggaagatagccggggtgccacccttaatccttggcgcaaggcccagctgctgcgagtggagggcgaggtcagggccctcctggagcagctgggaagctctggaagctgagacactggcggcaggcacctagctatgtgaccactggccctaaaccttttccctctgtggcctcctggcttgcactgctccctctagaaagattccttcaggtctggaggcagaggaatgggcatagctgagccagttgccctcctagggcatgtttgaccaggactgagtctggaatctccaagttaaagatggtgaatcaatgcttcgggcttggagatggaacatgcctcctctccattcagctagaaggaccaaagcatgtggcatttggatggccagagtgccctgaagcaccactaccaaccttgcctccccctcctctcaaagagcctctgactgtgtcaccaaggggctcacatcttatgtctgccatgccaggggtgtcgccatccagatgtgttggaagcttcccctcctgccttatgctcacctgtggacaccgaggatgccctcacattggtgctttctcctcatcctcatgccccctttgccacaatggtatgatggcttggtagcccctcga

SEQ ID NO: 128170 - DNA, 1121 bp, Homo sapiens
  misc_feature (15)..(15): n is a, c, g, or t
cataggaatggaggncccccccgcggtttttaaatcggacgagggatcaggtggttccacgagtgtttgggcgcatggtgggtaaaagccgggaggcggtggctcaggccatggtgctggagatgtttcgagaggaggactactacaacgatgatgttctggaccagatgggcgccagtatcctgggcgtggagggcccccggcgccacccagatgagccccctgaggatgaagtcttcgagctcttccccatgttcatgggggggcttctctctgcccacaaccgagctgtgctagctcagcttggctgccccatcaagaacctggatgccctggagaatgcccaggccatcaagaagaagctgggcaagctgggccggcaggtgctgcccccatcagagctccttgaccacctcttcttccactatgagttccagaaccagcgcttctccgctgaggtgctcagctccctgcgtcagctcaacctggcaggtgtgcgcatgacaccagtcaagtgcacagtggtggcagctgtgctgggcagcggaaggcatgccctggatgaggtgaacttggcctcctgccagctagatcctgctgggctgcgcacactcctgcctgtcttcctgcgtgcccggaagctgggcttgcaactcaacagcctgggccctgaggcctgcaaggacctccgagacctgttgctgcatgaccagtgccaaattaccacactgcggctgtccaacaacccgctgacggaggcaggtgttgccgtgctaatggaggggctggcaggaaacacctcagtgacgcacctgtccctgctgcacacgggccttggggacgaaggcctggagctgctggctgcccagctggaccgcaaccggcagctgcaggagctgaacgtggcgtacaacggtgctggtgacacagcggccctggccctggccagagctgcccgggagcacccttccctggaactgctacacctctacttcaatgagctgagctcagagggccgccaggtcttgcgagacttggggggtgctgctgaaggtggtgcccgggtggtggtgtcactgacagaggggacggcggtgtcagaatactggtcagtgatcctc

SEQ ID NO: 128171 - DNA, 817 bp, Homo sapiens
tactgagtgagaaagaaattttaactataaaagtataggtaagattaactttaatcttaactgtaagattaaaatagataatctacaagtgaatagcttataatcagataatcaagagtttgttataaaacagttgataaaattagagtaattttttcaaaattaaatcataaatcatatagaactgaattttaatttcatttttccagaaacatatactgtgctcttatcctttctttacctcaacttcttctacaataagacagatgctaactgttcagcttacgttttgtgaggataacctgaaaattggttattttcaaaaacaaaagtggtgattattggtaccttcttttaagatctcattataatatattttcaggatagggacagttcaagaaggcctctggagaacatgattgaacattcattgtccatacccttcatctccaacaaagaaccctttactaaagatttgttttttttttgttttttttttttgagacacggtctcactctgttgcccgggccggagtgcagtggtgccatcatagctcactgcaggctcaaattcctgggctgaagcgatcctcctgcctcaggttcccaagtagctgggactatagcgctcaccaccacaccggctaatttttttttaaattttaaatagagacgcggtctcactatgttgcccaggctgatcttgaactcttctgctccagcaatccttctacctcagcctcccaaagtgctggaattacaggtgtgagccactgcacctggcctccctgtatactcttaaaagttattgagaccc

SEQ ID NO: 128172 - DNA, 255 bp, Homo sapiens
catgtgcatgtagtccccagctacttgggaggctcaggtgggaggatcgcttgagcctgggaggtcgaggctgcagtgaactgtgatcctgccaccgtgctccagcctgggtgatggagtgagaccctgtctctaaataagtaatttgtcagtggcattcgtaatgaactactttcttgagatatggatgggtgcatttgctttattgttattcattatgctttacatacacactatatgttctttgcacataaa

SEQ ID NO: 128173 - DNA, 146 bp, Homo sapiens
tacactttttcctccttaggttttcctttgaaggaaaacaaaagcccttagctctcatttcaagaaggaaagaaaaaaacccgtaagccaagtcactcaacgagcaccaagccggatcgcctggagaggagccaaagagccgcagg

SEQ ID NO: 128174 - DNA, 516 bp, Homo sapiens
cacgcatcacggcgtcgtgtaggacggggaacgcgggtcccaacatggggctgggcttaagccactggattcacagcaagtgccctcatgaaagatgcatctgacggcacatgactgagtgacaacgctgagaaacaggagctggagatgcggcccccgcaaggcgctggggccacaggcgtgcatcacacccagctaatttttgtgttttctgtagagacagggtcttgccatgtttcccaggctggtctcaaatcctgaattcaagcaatccccccgcctcggcctcccaaagtgctgggattacaggtgtgagccaccacgccttggctagctctttgttttctaacctagtaatatgggtatgtcattttcagaatgaacaaatggatgtacatatcaaaggaaatggcttatttggatgcccagaacaggtggagtctgggcagctggtgggttcagggtactaaagattccagaacgctaaagcccaggtctgccttggtagctgatacg

SEQ ID NO: 128175 - DNA, 548 bp, Homo sapiens
taaagcaaatcatgtacatgaaagcccagtttgtccaagacatttgcattcatttcgctcaaattttatgatgtcatcgtgaaccactaatcctttcttttgctaatctataacttgcaaagctaattcagtataaatgctgaatttttcaaatcagattttacaaacacacataaaaagtattgagcaagtaagatttccatgaaataaaccataacatggttaggaagagccaactacttcaaataagataataacagaagagtgaccaagatgacttctggatgagaatttttatttctatcctcccaatttttgtttgacagactttctgttttataggtttcctcatattaaacaacagtgtttcagaaaagataagtggtaaaaccagcgtgaagagacagacaaaaaaataggtttttaaacttcgaaaagttgcaaaaagttgcaataagaagtttgtttaagactaaagatagacttcataaaacatatcaagagattttggtggggcttggctgcaggcatggaagttgagctcatta

SEQ ID NO: 128176 - DNA, 697 bp, Homo sapiens
cgtggtggtgcatgcctgtaatcccagctacttgggaggctgaggagggagaatcgcttgaacccaggaggcagaggttgcagtgagccgagatggcgccattgcactctagcctgggcaacaagagcaaaactccacctaaaaaaaaaaaattattattgcctaaacattccaggaaacgtgtcaggctcaaaaacacaaaaataagtaagatgcagtctctgcttccaaataaactttccagtctattggaaacctctcaattgagaaatgggggcatgtcagcagttcactgtaatatattttgacagatgtgagctcaggtacctggcagcacagagtagggatatccattagggtactaaagtaaagctttcaaagtggcaacactggatagagcatgggtgactgcctatccaagcagtgaatgcaacatacgaaaacaaagacaatgaggagtaaaaaatgagacacacattgggaaatatgaacagtattgagttgtttctttgcagatgagttaagtataccgaaatgataagtagaaaaaaagaagccagcgaaaaagtttctaaagcttgtgatgtttaatgtgattttagactttaacctagaattaatattcatgcaaacacttcaagcgaaagactggaatgattagctctgctttttagacagctcactggtcccctaagaa

SEQ ID NO: 128177 - DNA, 153 bp, Homo sapiens
ctattttgtgcacttggagaaggcagttaaaagatcaaagatgtggaaagcacatgtgaaaagttaagaggacacccacatagtaagaaactcagggccaggtgcagtggctcacacctgtaagtaatcccagcactttggagaccgaggtgg

SEQ ID NO: 128178 - DNA, 416 bp, Homo sapiens
gccattcagtcataattacaagcggcctgtggactcccagtgggcatctggtttctaaagtaaaggcagtcatgttggggaccatggcgttaaacctctggaatctgacactaactccccatgtttagggtcagaattaaattgcagtacaccacttgtcagaataaatattatttgcttttccaaggtgagagataattaatgccaaagaggggggcattctttcatttaactcttagcacatatgcttgaagggagggatgaccaatataagactggcaaattctaacaagttggggttaaaggtatatctacttttgaatctggttattttttctgacctggagtaaattttaagaaaagagtgtcacaaatttgtaactctgttgcccttagaatctttaaaaatgattacc

SEQ ID NO: 128179 - DNA, 317 bp, Homo sapiens
ttcatctctaggtgaggtcagcatcactctaaccctgcttggttcttgtcccctgtgccacccttccactcacctctcgggcccacgcctctccctccactccaccagtaatctgaaaccttcttctgatcccacagcccacagcttctgatctgctaaatcctggtacttctctaaacataactgcatcttaagttagtttttgtgtacctgcaaattcattatttgctacctatttatgacttttgcctttctcaaaggcattcaaaagacacttgacctgtcagtataattcattgtttcagcaatcactaaaa

SEQ ID NO: 128180 - DNA, 224 bp, Homo sapiens
atgatctgagctaagtggagagtcagggatgtttctgtaatgcacttgggatgagagggtggaaggtgaaaggagacaagtgagaattaatagaggaagaggcaggacaaggctgggaaaagagaacatctaggaggatgatgcagagtcgctgaggtccaacagcttctgcacagacatggtgcaggtggaaccatcagaaagcaggactccgtcacgcccag

SEQ ID NO: 128181 - DNA, 707 bp, Homo sapiens
taagaaaatatttagccagttctgtttcgtaaagtcttcaagaaagataatagcttgggtggactgcttcttcatgcactttattaatgtggcttcctgttaagatctgaagccaggcagagatgtccacttttgctacttatatttaaaattgtactgcaggttcagaaatcaaaggcatccggattgggaagaaagaaagaaaactctctttattttcagatgaattgagcctgtactagaaaacctaaaggaacacatgcccaatcccgattcccccaaagtacgaaccgactaatgagttcagcaaccttacaggataaaagattagtatacaaaaatcaattgtatttttacatactagcaccaagcaatctgaaacccacattatgaacacaattctgaggaataaatttaataaaatcagtgcaagactagtttattgctaaatgagagttatcccatgttcatggattggaagactcaatattgttaaatcttcctaaaatgatttgtagattcagtgcaatccttatacaattttagtatgcatctttttaaaaaaaattgtcaagctgtttctaacagtatagaaatgtagatgacctagaataaacaaaacaattcggaaagggaagaaaaaaagattaggggtcttatatttcttagtttcaaaacttactacaaagctatactattcaaatcag

SEQ ID NO: 128182 - DNA, 267 bp, Homo sapiens
gcccaaggggtcttctgttttgtttgaggggcaggagtgaggcaggaagcagggacaaacccagtgtgggaggggacttgggtgtgaagtgaagccatttggtgggcctgagcctggtggcatcaaagtaaataaaggccgcctggtttgtgtttagcttctccatgtcttaggcgcatggccttgggtcctcatgggctctctccaggcatcagtgtcctcatctgtgaggtgggattgataatgtgacacagctcacagaaatgt

SEQ ID NO: 128183 - DNA, 332 bp, Homo sapiens
actctgtgtgtgtgtgtgtgtgtgtgtgtgtgtgtgtgtgtgtgtgtgtgtgtgtttagtactgggttgtctgctggccagcttttcttcacccccaaaatgccgtgaggaagtatttactctgaggtatcagaattcgcatcagaagccttcacaagccatctcttactccctgctgccacagttggttcagtttctttagaaatgaaccctgagatgtgttgtctgtcaatacactcagcctcagctaccacgcatgcctggccactctttgaagtacagtactcttttgtttcccaaattaacacttcgctttcagggtcagttttccc

SEQ ID NO: 128184 - DNA, 196 bp, Homo sapiens
tctatttttttaaacaaacaaaaattataaaattgggaatgacttgttccttataagctatgaaaaactagtctatgtattttctttaaaatgttaggcagcatagtctagtgatggactgtggattcaaattttagctcctccattgaactctgtgaccttgggaaagttttctctttgtgcctgtattctttag

SEQ ID NO: 128185 - DNA, 485 bp, Homo sapiens
ttttttaggcccatgttccaaagtgatgataaaacatccaactacacttccattcctagctcagaaaccacaacagatggaagcgggtgtgggccataattagtgcccgaggtgagtgaagaaagccaggaaaacctcgtcaaaggaaatcagcctagagaataaaggctccctgggtttgctttggaagaaaggacaggggattatgtccttgcgccttcaagaacaagagacctggcactggattaaaccatccaaatagtaaaaccaataattatgtgttgtgggcagggccagcctggtttctcagtgccacatccacttcctgtggtgcgtggcaggtctacagggaacggcaatgccaaatttcctcagctttcttttcagtgcagggaagttagaataaagccagagagtgtggcttgaagatacaaagcaagccactgagaagatcatttgagcaagacgagccaggtttcaaccag

SEQ ID NO: 128186 - DNA, 415 bp, Homo sapiens
tgaaggcagacagagataaagtaaaatataaggtaaatatagtgaattatcagatcccaggaggaaatgtggaatgtgccttacaagttaaaaggaaactttcaagcaaaaaaggacatgagtaccaagaaactagaaacaaattctaagcaatgatatgtggactaattcgatgatctacatggaggtttactgcctttgaaagaagcagtgatgactcgaagcctatgtggcctcattagtgaaaataatttcagaggaactttatctttgacaggatttacagctggatagattaggaaaaataattcaatggcataggatatttggccttttacagggcatttcatgacatacttgtgaaagatggagaaatataggccatgcaatgatatgaatgggtgaacatagagct

SEQ ID NO: 128187 - DNA, 196 bp, Homo sapiens
acagtggtcctttctggatgggctgcagtctccgaaggcttcccccactggagtcagccctttaggagtttgtccagtgcctccagaaagctgttttttgggggacggaggacttggcctggaattctggaattcccagggggtcagacatggttatgggaagtttaataaaaccggtgaatcacgtgaattctgc

SEQ ID NO: 128188 - DNA, 135 bp, Homo sapiens
taaaaaattccattttcaggatctacagacatagaacacaaagatactttgtgtccacatcaaaagttcagagttcaggccaggcatggtggctcacgcctgtaatcccagcactttgggaggctgaggcgggtg

SEQ ID NO: 128189 - DNA, 373 bp, Homo sapiens
acaagcaaaagctgagggaatatatcaccactagactggccctagaagaaatgcttaagaaagtcctacatccagaagcaaaagaacactatctaccatcacaaaaacacaaaaaaatataaaaaccactgatagaccaaacacaaacaaggaagagactcacaactacagaaaaccaccaagccaaaataataattaataagagacagagggaatagatgatatactgaacagccataaatcagttaataaaatgacagaaataagccttcacacatcaataactctgaatgtaaactgatcaaactttccacttaaaagatacagactaatttggccaggcgcggtgtggctctcacctacaatcccagca

SEQ ID NO: 128190 - DNA, 666 bp, Homo sapiens
cctcaagttcattcggcaacctatgcaattctctggaacttccctgaacgtaccattctatttcaggcatctacactttttgtgtacagtttgccttgcctggtaaatttgctcaactgccactatttttgctggtttttctccctctttttcaaagcttagctcaggcaatttcctctctcctattgaagttaattcctattaacttcataacttctagctttaaggtgagtaacttgtttggaggataatcgtcccttaggctgttctccaaattagatatagtcacatggagagaacaggtgggaaccacatagttcagactctatagtagtttcctctgtttggtatttgtcttagtgacaacgacatacacatgcatatacacacatgcacacgtgtgcacatacgatccagtaagttcccagaggggagtgactgtttgattcttgtagttctaatatcaatatgtttaataaatgtaaactttgccagactaatcttcccagatgtttgttaataacagaattctttgacaagtcctaatgaatgcaatgaaacaggccaaagttaggtttacaccattttatattggaacattaacataagagttacttatatccccagctgctgtatttaatgataacattttatttcccaacttag

SEQ ID NO: 128191 - DNA, 204 bp, Homo sapiens
ctcaaaaaaaaaaaaaaaaagtaaatctaacagaaaccagacaatgttgttgccttcaagctgggctctttgttaaaaggaaaattactaagtgttagggaggtgttaaaggcctattagcatctacctgaggcttcctttctcgcaaaagcagagcgtctgaaagatacgtggaaaagaaacttaaagtataataaaaaagaa

SEQ ID NO: 128192 - DNA, 325 bp, Homo sapiens
actgacaataagatacccttctttagaaaatccagacgaacccttcagcaaaaaacacacacctactaaggatctctgatgtggagtgttagattagacaatgcgagaacctttcctggggaaagagacctggaacaatgtggggagagagcaaagtgttctccaagatgctgtagcacatgatttaatactgggagagtatagtggttcattcttggggtggtttcctggcagaaataagaaatgcatttcttttaaaatatttacacttaaggtacatttcaatgccttcctgagtaaagaatgaatttagcacatgttcata

SEQ ID NO: 128193 - DNA, 391 bp, Homo sapiens
taagatgagaaaataagtatgagatgcaacttggaattaaagtgatcaaatgtttgctctgacagataagcttcagcacctgttaacttggagaatcaagtgaaactccaccggcttcatgtggaagctcgtcaggcagcatcacaacatgtacataacccaagagccgttctgtacaaggttctccttaaaatataatgggaggccgggcgcggcggctcatgcctgtcatcccaacactttgggaggccgaggtgggtggatcatgaggtcaggagttcgagaccagcctggccaacatagtgaaatcctgtctctactaaaaatacaaaaattagctgggtgtggtggcgcacacctgtagtctcagctacttgggaggctgaaggag

SEQ ID NO: 128194 - DNA, 338 bp, Homo sapiens
acacacagggctgaagacatgatgagtgtcccagcatgcagtgggggaagaaatggactaaaaagacacagcctcgcactctgggaggggtgcggacgtggtcacacccccgcctgcagtgcactcctgtcccttctccaagcttcaggtgacaaccaggatcctgtctggagaccccccgcggactccaagcatggagatgcagacgcccgcatggcacccacacatgaggaaagccggtttgaaaacaccatggaaccaaagtcccggctccaagatctttacactatttgggaagaaaacagagacacccatgcttgcgtcagcagtacgtgtac

SEQ ID NO: 128195 - DNA, 320 bp, Homo sapiens
ccatgagattaaaacatcgggtaaaataaagagatggaaactcggtaagcataataacacagcaaaatcgtggagatgacagttggtcttgcagatggtccactcttaacaaagagaaggatttaaagctttctcctacaaatacacagtaagaacatgccaaccctcagtctcactatagtgtcagaggcaatgggcccttcatgactgcaacagggacacctaggccagagaaatagaaaagatcagggaaatcatggattggggggaggtgagaaaaaggagggaccagcgagaagggatttctgaagtggattctg

SEQ ID NO: 128196 - DNA, 459 bp, Homo sapiens
cattttacaggaaataaactggttaaaactacatgatgacagaattatatcagagttgaaacaaacgccatacctaagcatttttttcaaaatcctttgttccatagacacttgattgagtacttaagttgaacatctaggtctatgaatgacgttggtcaaatgttttattgttctctgtttcggttttagcaggagagatttgctgtttcataaaagaaattgggagagtatatcattttatgcctgtaacttattatagcattggaataagctgttctttggaggtttgagagactttaccagtacaatcattccccccctcccccaaatataaaaagataaaataaaaagccggtcagtgtctgttgcacaaaattacaaccgctctctgcttgtatttgcctagttctccagaatgtagggaaaaataaaaattcaatgaattagacaccttgc

SEQ ID NO: 128197 - DNA, 316 bp, Homo sapiens
gggcagccactcctatctatgcccatctttacctaagcttttgggatttctctagcatttctgctccctgaggctgggtgagacaaaaagcaagtgttctctttttcctggttctgagggcagaaagccaaaggcaagccctgaagaacggtagagcccactcttcctggctgttctttactatctgtcagttctctgagggaaaggatcttcaaggaaagcacatcacagggacaaagttgtgaaaaagttctactctggagtctaataagaaatgaatggccaggcgtggtggctcacacctgtcatcccacca

SEQ ID NO: 128198 - DNA, 477 bp, Homo sapiens
ttccgcacagacgtggtctcggggaccatgaatgaggagatgctttctcagggcagctctattcctcaacttcctagtgcatccactctgaggacaagcgattgcgctcagactgtcatattctttatttatggggggcttctttctagcaaattctgcgagctgtttaggatctgataggtcaatgccaggtattcctccaggcggaagcttcttgcctgtcatgtactcagaatactcaagcgaattctctccaactatcttttgtggaagctctttctttaccccttttttcatgtattccaaagaacattcaagggagcttgcttcgaaaaccttttgagaaagctgttgttctgatcctttctttaggtattccaaggactcaaaaagtgagtcctcttccaggatgggttgagaaaactcaccccttatgacgcattctatgtaacagtctgagaaatcatcccctccgag

SEQ ID NO: 128199 - DNA, 270 bp, Homo sapiens
cactcaggctggagtggcacgagtcacatctcacaacctccagggctcaagcagtcctcccacctcagcctcctaaagtgttgggattacaggtgtgagccctgccactttttttaaaaatgcagaaatcaccactgtcttttgatatgttccactctagttccttgtgtatgttttggctattaattttccctttttataaacatgctttttaggctgaattctgtatatgcgtaaaactgagttatacagagaaatagctttcaactt

SEQ ID NO: 128200 - DNA, 161 bp, Homo sapiens
acaatggctatagtcaaatgaaattatgagcccaagatgcattttcatagatcatctactctctgcagtccttaaccaagatgagagcttcctaaggaagatggacctcccctgctaaagctgcctagctagagaagctgatcccatgttatttggaatct

SEQ ID NO: 128201 - DNA, 411 bp, Homo sapiens
tttctggacatgttgagtgtgaggagcctgctagacacttgggtgggatggccagtgaggaggcagctggtcatgtggtctcacttacagacacatttggaggacagcaaatcacagatggtcatctgagccatgggcatagatgagagagctcaaggagagggtacagactaagaagaggggcccaagaaagccagcctacaaagcaagaaactgacagccaaccagatcccctaagtaatctgttaaccaaggaactaaatagctaacaactcactaacgcctgtttcttttctttttctttttctttttttttttgagacagggtgctgcatgggagccagtggagggtcacctcgccctgctagggagagcagcagcattcctcagggctcctaaattcccctgacc

SEQ ID NO: 128202 - DNA, 414 bp, Homo sapiens
tcctgtcagtttcaaggtggccagtcacacaggtacctggcagcagccgggtgacctagatttgtcagaccttatcttattggctttcctttctcgtgtatttacccagcacctgcccccacgatgctcagagcaggttggcctcttgtttttatagagaaagagatggacagggaggaactctcctcccacacagacacactttgtgttttttctttttttctcccgctgcgggaagaatcaagaaatatgggggcttcgagcttcaaaaagctccatgaagtctagtttcactggcttcctctctcctcaggcttcctaggtgaatgtttctggcatgaaccttaacggccctctcagagttgtacctgtcgtttggaacatttggcatctgaaggggaaaggccagctgtg

SEQ ID NO: 128203 - DNA, 260 bp, Homo sapiens
tgaagcagggcaagaggacaggaagtgaaggagggcaacagtgtgtgtgggcacagatgtcatggagagggtggttagaaaaggcctctgcagagaagacatttgaccatagctcgaatttagtgaggccacaagccacaggcagatatgagggaagaacactccaggcggaggaacaatgcgtacttttaacacttgccccaaccagctgaactggaacacatgctacctggtatactacacttgggcacatagacaag

SEQ ID NO: 128204 - DNA, 790 bp, Homo sapiens
ctcccaagtagctgagactataggcgcatgccaccatgcccacctaatttttgtatttttagtagaggcaggatttcaccatgttggtcaggctggtctcgaactcttgacctcaggtgatccacctgctacagcctcccaagatgctgggattacaggcgttagccaccgcacccagccctaatttgcattttctaaagtcctgaatcatacagtagtcctcacttgtgcaaaccctcctcattcagttcatacaagctaagttgctgcttgtgatttaacagagacatctccttccaactgtgtcattctgggccataaataattcagaagtacgggcaattacatagaatcttgatcttagtattataatttcaattaaattagcaagatagattttttctttgatttttacatcattttctgattctcttagtgacatacgatcagccccctgtatctgagggttccacatccagggattcaaccaatcaaggatcaaaaatatttggaggctgggggcagtggctcatgcctgtaatcccagcactttgggaggctgaggcaggaggatggcttcatctcaggagtttgagaccagcccgggcaacatagggagaccctgtctatacaaaaataaaaataaattaacctggtgtggcggtgaattgctgtggtcccagctacttgggaggctgaggatcactagagcctgagaggttgaggctgcagtgagccatgatcatgccactgcactctagcctgggccacagagggggcccctgtctca

SEQ ID NO: 128205 - DNA, 712 bp, Homo sapiens
attgtgatcgagagaaaagtggacctagaatagaaaggatagaggtcaaatcccaattctgtcgtgcattatctctgagcaagttacttttcatccctgagttccattttccttttctctaagaagggaccaataatccctaactcaagaggtcatttgggaaactggaacaaaagaatatttgtgaaagtgcttagcacaaagcataatacttattaggttaaaggctcaataaaactgcagtccttcctttcagtcctttcagaagcaacatgaggcatccagatgtggatttcttctttttgctaaaccgctatgttattggacactctcacctaagtagcagaagcctggactcctttaaaccttatatgactaggggaactctgaaataatgaaggtatctgatgtacgttcagtgtggcctggcttgtcttccagcccctcctggtcctggtctttgcttattcattaaacttagtgtgccttcccctgaattcctttcaaagcttagtcatttcccaaaaaaaaagaaagaataagaagaaaaacacagtgtcagagggcaacagaggaccacaaaaactgagaaaaacacatagaatagaacacaagggcacagaaaagggacagacaccagagggaaaaaagggagtgaccaagggaacaccaggaacaaaaaaaagagaagaggaaataaccacaaataacg

SEQ ID NO: 128206 - DNA, 596 bp, Homo sapiens
gaacagcaaatatcagctgggctgctgtagcactaattgtggaggattgctcaaagtgaaagggaaggatgagaaacacattggaggatgtgttctgttctctgacggttctcactggatgagatttctactttctgacttccacgttttctatcacttacgtatatctttgcattcagtgctatttatattccagatacgtattagacattgtgatagaggttgtgtgtgccagacatggttcctggtttagtgttgttaattaacaaaactttaagtacctgtgttttgcttttctaaattgattgtaagttttaccacatcagggaccatgcatttttatattcattctttaaaaaactgttgagtatttatatgtgacagccactattgatataaaaggaatgtagtggttctggtttgcaagatatccagatagtttttaaaaggtatgagaattgttaccaatgaactgcagtgagattaattgttaaatttttctggaagaggctgggcgcggagtggctcacgcctgtaatcccagcactttgggcggctgaggtgggtggatcacctgaggtcaggagttcatgacc

SEQ ID NO: 128207 - DNA, 510 bp, Homo sapiens
ctggtctcgaactcctggcctcaagggatcctcctgccctggcctcccaaaatgctggtgtaacaggcatgagccaccgctcatggccagacttttaaacatttctaactcagagaagtgtttggattttacctcttgaatgtgttgcgccaatttgctttaggtacgggatttctagtttgttgaattctattttacttacaaaaattttttatatggctccaatcagatcaaaccagcctatgtagtatcatagaagtaacattaaaatattgagaattttgaagggttccaggtatcctgaagactttaccgtcacaggacaaaaacacttatagggctgtccttccaccagacccagcctctgctgttccattgcccttgctgccctcctccgtccagtttgtccgctaccttcttgcttagccaggatgtgtgttgtttggcatctgccttcacatggacattgtgctgcagttggttgcttctccagctaagtaagaactgtct

SEQ ID NO: 128208 - DNA, 447 bp, Homo sapiens
atgctgtttaaagatatggtctggagctggccacattggctcatgcctataatcccagcactttgtgaggctgaggtgggagaattgcttgaggccatgagtttgagaccagccctggcaacatagcaaaactccatctctacaaaaaatagaaaaattagctgggtatagtagtacacgcctatagtcccagctactctgcaggctgaggcaggaggatcacttgaaactgggaggtcggcctgcagtgagccataatagtttcactgcttcagcctgggtgatagagtgagaccctgtctccaaaaaagataaaagataaaagatgccaggcgtggtggcttacgcctgtaatcccagcactttgggaggccgaggtgggtagatcacttaaggtcaggagttcgagaccagcctggccaacatggtgaaaccccgtctctacta

SEQ ID NO: 128209 - DNA, 297 bp, Homo sapiens
gagggagggaagcgggaggggcgcagagccgagctgcggggtgctgcaggtgcctctggggagagggcgcgaggagaaggcgccctgcggggggctgggcgccagccagtcctgggatcttggttcgtccccatcctcgtgaagcccctcggccttcccgcgactccgagggtgggccggaagcctctctgcgggtccgtttcccaactggcgggttgcaccatcccgggccagaccgtttaaccccgggagtggccgcgggggacaactccgcccctgtccagcagggggcgtgcc

SEQ ID NO: 128210 - DNA, 683 bp, Homo sapiens
gggtctgttgagtcagtcgctacgtttccagtccgctttccaccttcctaatcttattgtcatctcctctcttattatctggctcattttagtgagtttttggagagaacagagttaaatgtattcgttcaattcatcttgtttacccttttcttctttttgtttttatgtttctcctgtcactttccacatatcacctccctactttctgttttccatttcttccgtccatgttggttctccttagaattagaattatgaaggtggagaatcctcagagagcatctggctcagtcacttcatttttcaggtggtgaacctgagacccaaggagaacaacagtccatccacgggccacacaattactgctcttatcttttctacctttaatagcaaagagacttttgcccttctaccccttcagctagtgagccacaaccacacaagaaagaatagtacccgctactcaaatgggaagctggaaagcagatggaggagaaaatgtcattgctgaccaggttgctgtgggtcctgaggagagaacaactccagagacaactctgttaggactgcctcggtctcctgtgcccactgcaccccttccccactgcagtgccaggtggaggccagtagctaggagagtgcttagccgtcttgggaccctcaagctcttttcacttttt

SEQ ID NO: 128211 - DNA, 418 bp, Homo sapiens
tctttttggcaacaataatacggcgcccaacgtgggcctcagagaagactcggaaccccaaaggagttgcccgaaaccggagagagaagcggagatcctgatgtttctcagtgccattgtgatgatgaagaaccgcagatccatcactgtggagcaacatataggcaacattttcatgtttagtaaagtggccaacgcaattcttttcttccgcttggatattcgcatgggcctactttacatcacactctgcatagtgttcctgatgacgtgcaaacccccccctccccatatatgggccctgagtatatcaagtacttcaatgataaaaccattgatgaggaactagaacgggacaacagggtcacttggattgtggagttctttgccaattggtctaatgactgccaatcatttg

SEQ ID NO: 128212 - DNA, 642 bp, Homo sapiens
gttaacagtgcattttgtgtttatatgtatagaagagtactttttctagcatcagagcttgtgtcccatggtcctttatagctgcaggcttatttctctgactaagcctctataacagtcgttaaatttgaggtaagaagttcctattgatacatccatttgaatagctagctttggtttcactcaccactgacttcagcataatatgatccttcatttgataacagttgactctttgggtggaatttgtttgactcatacatttttggaattaaagagaatctagcctggtagtttttaaactatcttaattgaagtcttcagaggaatctcagggccagttctccaacaactggaacaccctaagggctaaacccaagcccagatcccaggcccagatcccagtcccagatcccaggcccagctctttagattttccattccagcaatcctgctttgatcccttgtaaaggttaggttctgcgtaagacagcatttgaagagagggttctgcagctagcagagcttgaaaccactggtctggctagcatttgccctattcctttgacagattaggagcttgaggattagcaattatgactgaaggtcatacaccaagatggtagaattgatgatcacagc

SEQ ID NO: 128213 - DNA, 2265 bp, Homo sapiens
  misc_feature (873)..(873): n is a, c, g, or t
ttttgttgttgttacttgtttgtttgaaataatattagcctaaatttgacattcacactgagtatcagtaagggtcatggtttttaaaccttgtgctttcttatttttttcaaactaatttcagacttaaatagaagttacaagaatagtacagggagtttcatgtacccttcacccaaattcctcaagtgttaacattttaccacatttataggtttttttctgatacacttgagagtaagtttcaggtagatgtccctttacttctaaatatttcagtgtgtattttctaaaaaacagggatattcccttatagaatcatagttttattatcaaaatcaggaaatttaataattatatgtctcatctaactatagatcttattagtatttcactattcttctaatctctttagagcaaaatggaaaaaaatggtttttctgttctggtgcaggatccagcggaggctcacgtgctgtattggattatcacatccttaatgttctttaatctgaaatcgttcccaagtcttgttattcatgaccctgactgacatttttttaagagtaaaaacactaggggggattttttgttgttttttgtttcattttgttttttgtttcgttttgttttttgtcttttgtttttttttgagccagggtctcactctgtcacccaggctggagtgcaatggtgcgatctcagttcactggaacctccacctcccaggctcaagtgatcctcccacctcagcctcccaaggagctgggactacaggctacagccaacatgcccagctaatttttgtattttttgtagagacaggatttcgccatgttgcccaggctggtctcaaactcatccaatccgccnaccttcaccttgacctcccaaagtggtgggactacaggcgtgagccactgcacccggccaaagacccattcttttataaaatgtccctccctcaatttggatttatctgatgttttctcataattcgatttaggttctgcatttggggcaggaatagcaatgaagtaatgatgtgtcctctgtgtatcatgcaaggaggtttacaaagtctacttgtgccgttacttatgatgctaattttaatcacatggttaaggtgtctgcagccttatgctttcccagtttccctggtttactaaccattccattaatgaatttacaaagtaagcaaaatgtatatttcccaagtcagttcctgactgttttctcctaaaataaatccttgcgtgctgttgtcaacctaaactatgaaatgctctaaaataaatccttgcgtgctgttgtcaacctaaactatgaaatgctctgggattctgtcctgtgctgttggggtgcatcaagatgccaaacccacgaaccaagtattttgtcaaatgaactgagtcttcagggacattgaggcatgtctgcatttagctcaaaaggtagaagtctcacaaaactgatactagcgaatatcatgttactgaaaattcttggttattcaggcgttcctagctatgtataagtgcttcctacctacatacaacgtctttcttctatgcacatcatctcaggtaccaaatagacagtattatttaaaatccccctttgacattttatgctcagtttttcagaccatggaaatctacacctatgatgctcttccaagatcactgggcatttttttgtagtttagtaagtgacttatttaatttgcaattctcaattatttcatttatatgtaaacttttttacgagacacaaggttccactctgtcacccaggcaaatggtacaatccaatggtacgatcatatctcactgcagttgtgaactcctgggctcaagagatcatcctcctgtctcagcctcccaagtagccaggattacagacacacaccaccatgcccagctatttttttttttttttttaaatacacagggtctcactatgttccccaggctgatctcaaactcctagcctcaagcaaccctcccactttgggaggtcaaggcatacgtatcacctgaggttgggagttcgagaccaacctgacgaacatggagaaaccctgtctctactaaaaatataaaattagccaggtgtggtggcgcatgcctgtaatcccagctactcgggaggctaaggcaggagaattgcttgaacccaggaggcagagattgcagtgagccgagatcacgccattgcactccagcctgggcaacaagcaaaactccatctcaaaaaaat

SEQ ID NO: 128214 - DNA, 1127 bp, Homo sapiens
aaactgggaaagcataaggctgcagacaccttaaccattccattaatgaatttacaaagtaagcaaaatgtatatttcccaagtcagttcctgactgttttctcctaaaataaatccttgcgtgctgttgtcaacctaaactatgaaatgctctaaaataaatccttgcgtgctgttgtcaacctaaactatgaaatgctctgggattctgtcctgtgctgttggggtgcatcaagatgccaaacccacgaaccaagtattttgtcaaatgaactgagtcttcagggacattgaggcatgtctgcatttagctcaaaaggtagaagtctcacaaaactgatactagcgaatatcatgttactgaaaattcttggttattcaggcgttcctagctatgtataagtgcttcctacctacatacaacgtctttcttctatgcacatcatctcaggtaccaaatagacagtattatttaaaatccccctttgacattttatgctcagtttttcagaccatggaaatctacacctatgatgctcttccaagatcactgggcatttttttgtagtttagtaagtgacttatttaatttgcaattctcaattatttcatttatatgtaaacttttttacgagacacaaggttccactctgtcacccaggcaaatggtacaatccaatggtacgatcatatctcactgcagttgtgaactcctgggctcaagagatcatcctcctgtctcagcctcccaagtagccaggattacagacacacaccaccatgcccagctatttttttttttttttttaaatacacagggtctcactatgttccccaggctgatctcaaactcctagcctcaagcaaccctcccactttgggaggtcaaggcatacgtatcacctgaggttgggagttcgagaccaacctgacgaacatggagaaaccctgtctctactaaaaatataaaattagccaggtgtggtggcgcatgcctgtaatcccagctactcgggaggctaaggcaggagaattgcttgaacccaggaggcagagattgcagtgagccgagatcacgccattgcactccagcctgggcaacaagcaaaactccatctcaaaaaaat

SEQ ID NO: 128215 - DNA, 686 bp, Homo sapiens
agttgaggattaaatgagttaatacacaaacagctcttggaacaagtgcttgtcacatagtaagcctgcagtgaatcttcgtgctgctgctactgttaaatattattactgaggctgagctggcctagggctccttggattggacttgctaagagctaggcaagagtcacaactgtatgaaacttgattgagttaaaacaaacagtgctactcctctttattatctccatgcctggtaagcacattttctacccccaaaattgggactgactaatatgagaatatttatggccttaataggacaggttatttgatacaattactagcctagacattttaggagattggccgctcctcaatactataaatgcatatatgggtgtgtagatagagatgttgcttcccagattgccacacatcctgatactgcaagtaggcatcaactgaaaatgtgccgtgatgtgaagaccaaacgcagagaagtgagagggacaaggctgtgctcagtgacccatatccagatgagaaatccatctgctcacttgggagcaaaaatgccccaagaccctgctatctctgggcttgcacgaggctttaaatgaatcaccattatgatgtcttatattcagagggaaataccaatattcatatattcaggtactgaaacttttaagggaatttttctt

SEQ ID NO: 128216 - DNA, 9037 bp, Homo sapiens
ggtggtccagtacctccaaagatatggaatacactcctgaaatatcctgaaaccttttttttttcagaatcctttaataagcagttatgtcaatctgaaagttgcttacttgtactttatattaatagctattcttgtttttcttatccaaagaaaaatcctctaatccccttttcacatgatagttgttaccatgtttaggcgttagtcacatcaacccctctcctctcccaaacttctcttcttcaaatcaaactttattagtccctcctttataatgattccttgcctccttttatccagatcaattttttttcactttgatgcccagagctgaagaaatggactattgtataaattattcattgccaagagaataattgcattttaaacccatgttataacaaagaataatgattatattttgtgatttgtaacaaataccctttattttcccttaactattgaattaaatattttaattatttgtattctctttaactatcttggtatattaaagtattatcttttatatatttatcaatggtggacacttttataggtactctgtgtcatttttgatactgtaggtatcttatttcatttatctttattcttaatgtacgaattcataatatttgattcagaacagatttatcactaattaacagagtgtcaattatgctaacatctcatttactgattttaatttaaaacagtttttgttaacatgcatgtttagggttggcttcttaataatttcttcttcctcttctctctctcctcttcttttggtcagtgttgtgcgggttaatacaacaaactgtcacaagtgtttgttgtccgggacgtacattttcgcggtcctgctagtatgcgtggtgttccactctggcgcccaggagaaaaactacaccatccgagaagaaattccagaaaacgtcctgataggcaacttgttgaaagaccttaacttgtcgctgattccaaacaagtccttgacaactactatgcagttcaagctagtgtacaagaccggagatgtgccactgattcgaattgaagaggatactggtgagatcttcactaccggcgctcgcattgatcgtgagaaattatgtgctggtatcccaagggatgagcattgcttttatgaagtggaggttgccattttgccggatgaaatatttagactggttaagatacgttttctgatagaagatataaatgataatgcaccattgttcccagcaacagttatcaacatatcaattccagagaactcggctataaactctaaatatactctcccagcggctgttgatcctgacgtaggcataaacggagttcaaaactacgaactaattaagagtcaaaacatttttggcctcgatgtcattgaaacaccagaaggagacaagatgccacaactgattgttcaaaaggagttagatagggaagagaaggatacctatgtgatgaaagtaaaggttgaagatggtggctttcctcaaagatccagtactgctattttgcaagtaagtgttactgatacaaatgacaaccacccagtctttaaggagacagagattgaagtcagtataccagaaaatgctcctgtaggcacttcagtgacacagctccatgccacagatgctgacataggtgaaaatgccaagatccacttctctttcagcaatctagtctccaacattgccaggagattatttcacctcaatgccaccactggacttatcacaatcaaagaaccactggatagggaagaaacaccaaaccacaagttactggttttggcaagtgatggtggattgatgccagcaagagcaatggtgctggtaaatgttacagatgtcaatgataatgtcccatccattgacataagatacatcgtcaatcctgtcaatgacacagttgttctttcagaaaatattccactcaacaccaaaattgctctcataactgtgacggataaggatgcggaccataatggcagggtgacatgcttcacagatcatgaaattcctttcagattaaggccagtattcagtaatcagttcctcctggagaatgcagcatatcttgactatgagtccacaaaagaatatgccattaaattactggctgcagatgctggcaaacctcctttgaatcagtcagcaatgctcttcatcaaagtgaaagatgaaaatgacaatgctccagttttcacccagtctttcgtaactgtttctattcctgagaataactctcctggcatccagttgatgaaagtaagtgcaacggatgcagacagtgggcctaatgctgagatcaattacctgctaggccctgatgctccacctgaattcagcctggatcgtcgtacaggcatgctgactgtagtgaagaaactagatagagaaaaagaggataaatatttattcacaattctggcaaaagataatggggtaccacccttaaccagcaatgtcacagtctttgtaagcattattgatcagaatgacaatagcccagttttcactcacaatgaatacaaattctatgtcccagaaaaccttccaaggcatggtacagtaggactaatcactgtaactgatcctgattatggagacaattctgcagttacgctctccattttagatgagaatgatgacttcaccattgattcacaaactggtgtcatccgaccaaatatttcatttgatagagaaaaacaagaatcttacactttctatgtaaaggctgaggatggtggtagagtatcacgttcttcaagtgccaaagtaaccataaatgtggttgatgtcaatgacaacaaaccagttttcattgtccctccttacaactattcttatgaattggttctaccgtccactaatccaggcacagtggtctttcaggtaattgctgttgacaatgacactggcatgaatgcagaggttcgttacagcattgtaggaggaaacacaagagatctgtttgcaatcgaccaagaaacaggcaacataacattgatggagaaatgtgatgttacagaccttggtttacacagagtgttggtcaaagctaatgacttaggacagcctgattctctcttcagtgttgtaattgtcaatctgttcgtgaatgagtcagtgaccaatgctacactgattaatgaactggtgcgcaaaagcattgaagcaccagtgaccccaaatactgagatagctgatgtatcctcaccaactagtgactatgtcaagatcctggttgcagctgttgctggcaccataactgtcgttgtagttattttcatcactgctgtagtaagatgtcgccaggcaccacaccttaaggctgctcagaaaaacatgcagaattctgaatgggctaccccaaacccagaaaacaggcagatgataatgatgaagaaaaagaaaaagaagaagaagcattcccctaagaacctgctgcttaatgttgtcactattgaagaaactaaggcagatgatgttgacagtgatggaaacagagtcacactagaccttcctattgatctagaagagcaaacaatgggaaagtacaattgggtaactacacctactactttcaagcctgacagccctgatttggcccgacactacaaatctgcctctccacagcctgccttccaaattcagcctgaaactcccctgaatttgaagcaccacatcatccaagaactgcctctcgataacacctttgtggcctgtgactctatctccaattgttcctcaagcagttcagatccctacagcgtttctgactgtggctatccagtgacaaccttcgaggtacctgtgtccgtacacaccagaccgtcccagcggcgtgtcacatttcacctgccagaaggctctcaggaaagcagcagtgatggtggactgggagaccatgatgcaggcagccttaccagcacatcccatggcctgccccttggctatcctcaggaggagtactttgatcgtgctacacccagcaatcgcactgaaggggatggcaactccgatcctgaatctactttcatacctggactaaagaaagaaataactgttcaaccaactgtggaagaggcctctgacaactgcactcaagaatgtctcatctatggccattctgatgcctgctggatgccggcatctctggatcattccagctcttcacaagcacaggcctctgctctatgccacagcccaccactgtcacaggcctctactcagcaccacagcccaccagtgacacagaccattgttctctgccacagccctccagtgacacagaccatcgcattgtgccacagcccaccaccgatacaggtgtctgctctccaccacagtcctcctctagtgcagggtactgcacttcaccacagcccaccatcagcacaggcctcagccctctgctacagccctcctttagcacaggctgctgcaatcagccacagctcttctctgccacaggttattgccctccatcgtagtcaggcccaatcatcagtcagtttgcagcaaggttgggtgcaaggtgctaatggactatgctctgttgatcagggagtgcaaggtagtgcaacatctcagttttacaccatgtctgaaagacttcatcccagtgatgattcaattaaagtcattcctttgacaaccttcgctccacgccaacaggccagaccgtccagaggtgattcccccattatggaaacacatcccttgtaaagctaaaatagttacttcaaattttcagaaaagatgtatatagtcaaaatttaagatacaattccaatgagtattctgattatcagatttgtaaataactatgtaaatagaaacagataccagaataaatctacagctagacccttagtcaatagttaaccaaaaaattgcaatttgtttaattcagaatgtgtatttaaaaagaaaaggaatttaacaatttgcatccccttgtacagtaaggcttatcatgacagagcgtactatttctgatgtacagtattttttgttgtttttatcatcatgtgcaatattactgatttgtttccatgctgattgtgtggaaccagtatgtagcaaatggaaagcctagaaatatcttattttctaagtttacctttagtttacctaaacttttgttcagataatgttaaaaggtatacgtactctagccttttttggggctttctttttgatttttgtttgtggttttcagtttttttgttgttgttagtgagtctcccttcaaaatacacagtaggtagtgtaaatactgcttgtttgtgtctctctgctgtcatgttttctaccttattccaatactatattgttgataaaatttgtatatacattttcaataaagaatatgtataaactgtacagatctagatctacaacctatttctctactctttagtagagttcgagacacagaagtgcaataactgccctaattaagcaactatttgttaaaaagggcccctttttactttaatagtttagtgtaaagtacatcagaaataaaactgtatctgacattttaagcctgtagtccattattacttgggtctttacttctgggaatttgtatgtaacagcctagaaaattaaaaggaggtggatgcatccaaagcacgagtcacttaaaatatcgacggtaaactactattttgtagagaaactcaggaagatttaaatgttgatttgacagctcaataggctgttaccaaagggtgttcagtaaaaataacaaatacatgtaactgtagataaaaccacatactaaatctataagactaagggatttttgttattctagctcaacttactgaagaaaaccactaataacaacaagaatatcaggaaggaacttttcaagaaatgtaattataaatctacatcaaacagaattttaaggaaaaatgcagagggagaaataaggcacatgactgcttcttgcagtcaagaagaaataccaataacacacacagaacaaaaaccatcaaaatctcatatatgaaataaaatatattcttctaagcaaagaaacagtactattcatagaaaacattagttttctcctgttgtctgttatttccttcttttatcctcttaactggccattatcttgtatgtgcacattttataaatgtacagaaacatcaccaacttgattttcttccatagcaaaactgagaaaataccttgtttcagtataacactaaaccaagagacaattgatgtttaatgggggcggttggggttgggggggagtcaatatctcctattgattaacttagacatagattttgtaatgtataacttgatatttaatttatgattaaactgtaattttgtaacataaactgtggtaattgcataatttcattggtgaggatttcctttgaatattgagaaagtttcttttcatgtgcccagcaggttaagtagcgttttcagaatatacattattcccatccattgtaaagttccttaagtcatatttgactgggcgtgcagaataacttcttaactattaactatcagagtttgattaataaaattaattaattttttttctccttcgtgttgttaatgttccaagggatttggagcatactggttttccaggtgcatgtgaatcccgaaggactgatgatatttgaatgtttattaaattattatcacacaaatgtgttgatattgtggctattgttgatgttgaaaattgtaaacttggggaagattaagaaaagaaccaatagtgacaaaaatcagtgcttccagtagattttagaacattctttgcctcaaaaaacctgcaaagatgatgtgagattttttcttgtgttttaattattttcacattttctctctgcaaacctttagttttctgatgatctacacacacacatacacacacacacacacacacgtgcacacacacacatttaaaggatataaaaagaagaggttgaaagattattaaataacttatcaggcatctcaatggttactatctatgttagtgaaaatcaaataggactcaaagttggatatttgggatttttcttctgacagtataatttattgagttactagggaggttcttaaatcctcatatctggaaacttgtgaagttttgacacctttcctatagatataggaatgaaccaatacgcttttattaccctttctaactctgattttataatcagacttagattgtgtttagaatattaaatgactgggcaccctcttcttggtttttaccagagaggctttgaatggaagcaggctgagagtagccaaagaggcaaggggtattagcccagttattctcccctatgccttctcttcctaagcgtccactaggtctggccttggaaatctgttacttctacggcttcagatctgatgatatctttttcatcacattacaagttatttctttgactgaatagacagtggtataggttgacacagcacacaagtggctattgtgatgtatgatgtatgtagtcccacaactgcaaaacgtcttactgaagcaacaatcgaaaaatggttctgttttaaaaaggattttgtttgatttgaaattaaaacttcaaactgaatgacttatatgagaataatatgttcaatcaaagtagttattctattttgtgtccatattccattagattgtgattattaattttctagctatggtattactatatcacacttgtgagtatgtattcaaatactaagtatcttatatgctacgtgcatacacattcttttcttaaactttacctgtgttttaactaatattgtgtcagtgtattaaaaattagcttttacatatgatatctacaatgtaataaatttagagagtaattttgtgtattcttatttacttaacattttacttttaattatgtaaatttggttagaaaataataataaatggttagtgctattgtgtaatggtagcagttacaaagagcctctgccttcccaaactaatatttatcacacatggtcattaaatgggaaaaaaatagactaaacaaatcacaaattgttcagttcttaaaatgtaattatgtcacacacacaaaaaaatccttttcaatcctgagaaaattaaaggtgttttactcacatggatatttcaacattagttttttttgtttgtttctttttcatggtattactgaaggtgtgtatactccctaatacacatttatgaaaatctacttgtttagacttttatttatactcttctgatttatattttttattataattattatttcttatcttcttttatattttttggaaaccaaatttatagttagtttaggtaaactttttattatgaccattagaaactattttgaatgtttccaactggctcaattggctgggaaaacatgggaacaagagaagctgaaatatatttctgcaagaacctttctatattatgtgccaattaccacaccagatcaattttatgcagaggccttaaaatattctttcacagtagctttcttacactaaccgtcatgtgcttttagtaaatatgatttttaaaagcagttcaagttgacaacagcagaaacagtaacaaaaaaatctgctcagaaaaatgtatgtgcacaaataaaaaaaattaatggcaattgtttagtgactgtaagtgatactttttaaagagtaaactgtgtgaaatttatactatccctgcttaaaatattaagatttttatgaaatatgtatttatgtttgtattgtgggaagattcctcctctgtgatatcatacagcatctgaaagtgaacagtatcccaaagcagttccaagcatgctttggaagtaagaaggttgactattgtatggccaaggatggcagtatgtaatccagaagcaaacttgtattaattgttctatttcaggttctgtattgcatgttttcttattaatatatattaataaaagttatgagaaata

SEQ ID NO: 128217 - DNA, 5118 bp, Homo sapiens
ggtggtccagtacctccaaagatatggaatacactcctgaaatatcctgaaaccttttttttttcagaatcctttaataagcagttatgtcaatctgaaagttgcttacttgtactttatattaatagctattcttgtttttcttatccaaagaaaaatcctctaatccccttttcacatgatagttgttaccatgtttaggcgttagtcacatcaacccctctcctctcccaaacttctcttcttcaaatcaaactttattagtccctcctttataatgattccttgcctccttttatccagatcaattttttttcactttgatgcccagagctgaagaaatggactattgtataaattattcattgccaagagaataattgcattttaaacccatgttataacaaagaataatgattatattttgtgatttgtaacaaataccctttattttcccttaactattgaattaaatattttaattatttgtattctctttaactatcttggtatattaaagtattatcttttatatatttatcaatggtggacacttttataggtactctgtgtcatttttgatactgtaggtatcttatttcatttatctttattcttaatgtacgaattcataatatttgattcagaacagatttatcactaattaacagagtgtcaattatgctaacatctcatttactgattttaatttaaaacagtttttgttaacatgcatgtttagggttggcttcttaataatttcttcttcctcttctctctctcctcttcttttggtcagtgttgtgcgggttaatacaacaaactgtcacaagtgtttgttgtccgggacgtacattttcgcggtcctgctagtatgcgtggtgttccactctggcgcccaggagaaaaactacaccatccgagaagaaattccagaaaacgtcctgataggcaacttgttgaaagaccttaacttgtcgctgattccaaacaagtccttgacaactactatgcagttcaagctagtgtacaagaccggagatgtgccactgattcgaattgaagaggatactggtgagatcttcactaccggcgctcgcattgatcgtgagaaattatgtgctggtatcccaagggatgagcattgcttttatgaagtggaggttgccattttgccggatgaaatatttagactggttaagatacgttttctgatagaagatataaatgataatgcaccattgttcccagcaacagttatcaacatatcaattccagagaactcggctataaactctaaatatactctcccagcggctgttgatcctgacgtaggcataaacggagttcaaaactacgaactaattaagagtcaaaacatttttggcctcgatgtcattgaaacaccagaaggagacaagatgccacaactgattgttcaaaaggagttagatagggaagagaaggatacctatgtgatgaaagtaaaggttgaagatggtggctttcctcaaagatccagtactgctattttgcaagtaagtgttactgatacaaatgacaaccacccagtctttaaggagacagagattgaagtcagtataccagaaaatgctcctgtaggcacttcagtgacacagctccatgccacagatgctgacataggtgaaaatgccaagatccacttctctttcagcaatctagtctccaacattgccaggagattatttcacctcaatgccaccactggacttatcacaatcaaagaaccactggatagggaagaaacaccaaaccacaagttactggttttggcaagtgatggtggattgatgccagcaagagcaatggtgctggtaaatgttacagatgtcaatgataatgtcccatccattgacataagatacatcgtcaatcctgtcaatgacacagttgttctttcagaaaatattccactcaacaccaaaattgctctcataactgtgacggataaggatgcggaccataatggcagggtgacatgcttcacagatcatgaaattcctttcagattaaggccagtattcagtaatcagttcctcctggagaatgcagcatatcttgactatgagtccacaaaagaatatgccattaaattactggctgcagatgctggcaaacctcctttgaatcagtcagcaatgctcttcatcaaagtgaaagatgaaaatgacaatgctccagttttcacccagtctttcgtaactgtttctattcctgagaataactctcctggcatccagttgatgaaagtaagtgcaacggatgcagacagtgggcctaatgctgagatcaattacctgctaggccctgatgctccacctgaattcagcctggatcgtcgtacaggcatgctgactgtagtgaagaaactagatagagaaaaagaggataaatatttattcacaattctggcaaaagataatggggtaccacccttaaccagcaatgtcacagtctttgtaagcattattgatcagaatgacaatagcccagttttcactcacaatgaatacaaattctatgtcccagaaaaccttccaaggcatggtacagtaggactaatcactgtaactgatcctgattatggagacaattctgcagttacgctctccattttagatgagaatgatgacttcaccattgattcacaaactggtgtcatccgaccaaatatttcatttgatagagaaaaacaagaatcttacactttctatgtaaaggctgaggatggtggtagagtatcacgttcttcaagtgccaaagtaaccataaatgtggttgatgtcaatgacaacaaaccagttttcattgtccctccttacaactattcttatgaattggttctaccgtccactaatccaggcacagtggtctttcaggtaattgctgttgacaatgacactggcatgaatgcagaggttcgttacagcattgtaggaggaaacacaagagatctgtttgcaatcgaccaagaaacaggcaacataacattgatggagaaatgtgatgttacagaccttggtttacacagagtgttggtcaaagctaatgacttaggacagcctgattctctcttcagtgttgtaattgtcaatctgttcgtgaatgagtcagtgaccaatgctacactgattaatgaactggtgcgcaaaagcattgaagcaccagtgaccccaaatactgagatagctgatgtatcctcaccaactagtgactatgtcaagatcctggttgcagctgttgctggcaccataactgtcgttgtagttattttcatcactgctgtagtaagatgtcgccaggcaccacaccttaaggctgctcagaaaaacatgcagaattctgaatgggctaccccaaacccagaaaacaggcagatgataatgatgaagaaaaagaaaaagaagaagaagcattcccctaagaacctgctgcttaatgttgtcactattgaagaaactaaggcagatgatgttgacagtgatggaaacagagtcacactagaccttcctattgatctagaagagcaaacaatgggaaagtacaattgggtaactacacctactactttcaagcctgacagccctgatttggcccgacactacaaatctgcctctccacagcctgccttccaaattcagcctgaaactcccctgaatttgaagcaccacatcatccaagaactgcctctcgataacacctttgtggcctgtgactctatctccaattgttcctcaagcagttcagatccctacagcgtttctgactgtggctatccagtgacaaccttcgaggtacctgtgtccgtacacaccagaccgactgattccaggacatgaactattgaaatctgcagtgagatgtaactttctaggaacaacaaaattccattccccttccaaaaaatttcaatgattgtgatttcaaaattaggctaagatcattaattttgtaatctagatttcccattataaaagcaagcaaaaatcatcttaaaaatgatgtcctagtgaaccttgtgctttctttagctgtaatctggcaatggaaatttaaaatttatggaagagacagtgcagcgcaataacagagtactctcatgctgtttctctgtttgctctgaatcaacagccatgatgtaatataaggctgtcttggtgtatacacttatggttaatatatcagtcatgaaacatgcaattacttgccctgtctgattgttgaataattaaaacattatctccaggagtttggaagtgagctgaactagccaaactactctctgaaaggtatccagggcaagagacatttttaagaccccaaacaaacaaaaaacaaaaccaaaacactctggttcagtgttttgaaaatattgactaacataatattgctgagaaaatcatttttattacccaccactctgcttaaaagttgagtgggccgggcgcggtggctcacgcctgtaattccagcactttgggaggccgaggcgggtggatcacgaggtcaggatattgagaccatcctggctaacatggtgaaaccccatctccactaaaaatacaaaaaattagctgggcgtggtggcgggcgcctgtagtcccagctactcgggaggctgaggcaggagaatggcgtgaacccgggaggcggagcttgcagtgagccgagatggcgccactgcactccagcctgggtgacagagcaagactctgtctcaaaaagaaaaaaatgttcagtgatagaaaataattttactaggtttttatgttgattgtactcatgctgttccactccttttaattattaaaaagttatttttggctgggtgtggtggctcatacctgtaatcccagcactttgggaggccgaggcgggtggatcacctgaggtcaggagttcaagaccagtctggccaacatggcgaaaccccgtctcttctaaaaaatacaaaaattagccgggcgtggtaatgggcgcctgtaatcccagctactcgggaggctgaggcaggagaattgcttgaacccaggaggcggaagttgcagtgagccgagatcgtgccgttgcactcca

SEQ ID NO: 128218 - DNA, 4864 bp, Homo sapiens
cccctttctccccctctgttaagtccctccccctcgccattcaaaagggctggctcggcactggctccttgcagtcggcgaactgtctgggcgggaggagccgtgagcagtagctgcactcagctgcccgcgcggcaaagaggaaggcaagccaaacagagtgcgcagagtggcagtgccagcggcgacacaggcagcacaggcagcccgggctgcctgaatagcctcagaaacaacctcagcgactccggctgctctgcggactgcgagctgtggcggtagagcccgctacagcagtcgcagtctccgtggagcgggcggaagccttttttctccctttcgtttacctcttcattctactctaaaggcatcgttattaggaaaatcctgttgtgaataagaaggattccacagatcacataccagagcggttttgcctcagctgctctcaactttgtaatcttgtgaagaagctgacaagcttggctgattgcagtgcactatgaggactgaatgacagtgggttttaattcagatatttcaagtgttgtgcgggttaatacaacaaactgtcacaagtgtttgttgtccgggacgtacattttcgcggtcctgctagtatgcgtggtgttccactctggcgcccaggagaaaaactacaccatccgagaagaaattccagaaaacgtcctgataggcaacttgttgaaagaccttaacttgtcgctgattccaaacaagtccttgacaactactatgcagttcaagctagtgtacaagaccggagatgtgccactgattcgaattgaagaggatactggtgagatcttcactaccggcgctcgcattgatcgtgagaaattatgtgctggtatcccaagggatgagcattgcttttatgaagtggaggttgccattttgccggatgaaatatttagactggttaagatacgttttctgatagaagatataaatgataatgcaccattgttcccagcaacagttatcaacatatcaattccagagaactcggctataaactctaaatatactctcccagcggctgttgatcctgacgtaggcataaacggagttcaaaactacgaactaattaagagtcaaaacatttttggcctcgatgtcattgaaacaccagaaggagacaagatgccacaactgattgttcaaaaggagttagatagggaagagaaggatacctatgtgatgaaagtaaaggttgaagatggtggctttcctcaaagatccagtactgctattttgcaagtaagtgttactgatacaaatgacaaccacccagtctttaaggagacagagattgaagtcagtataccagaaaatgctcctgtaggcacttcagtgacacagctccatgccacagatgctgacataggtgaaaatgccaagatccacttctctttcagcaatctagtctccaacattgccaggagattatttcacctcaatgccaccactggacttatcacaatcaaagaaccactggatagggaagaaacaccaaaccacaagttactggttttggcaagtgatggtggattgatgccagcaagagcaatggtgctggtaaatgttacagatgtcaatgataatgtcccatccattgacataagatacatcgtcaatcctgtcaatgacacagttgttctttcagaaaatattccactcaacaccaaaattgctctcataactgtgacggataaggatgcggaccataatggcagggtgacatgcttcacagatcatgaaattcctttcagattaaggccagtattcagtaatcagttcctcctggagaatgcagcatatcttgactatgagtccacaaaagaatatgccattaaattactggctgcagatgctggcaaacctcctttgaatcagtcagcaatgctcttcatcaaagtgaaagatgaaaatgacaatgctccagttttcacccagtctttcgtaactgtttctattcctgagaataactctcctggcatccagttgatgaaagtaagtgcaacggatgcagacagtgggcctaatgctgagatcaattacctgctaggccctgatgctccacctgaattcagcctggatcgtcgtacaggcatgctgactgtagtgaagaaactagatagagaaaaagaggataaatatttattcacaattctggcaaaagataatggggtaccacccttaaccagcaatgtcacagtctttgtaagcattattgatcagaatgacaatagcccagttttcactcacaatgaatacaaattctatgtcccagaaaaccttccaaggcatggtacagtaggactaatcactgtaactgatcctgattatggagacaattctgcagttacgctctccattttagatgagaatgatgacttcaccattgattcacaaactggtgtcatccgaccaaatatttcatttgatagagaaaaacaagaatcttacactttctatgtaaaggctgaggatggtggtagagtatcacgttcttcaagtgccaaagtaaccataaatgtggttgatgtcaatgacaacaaaccagttttcattgtccctccttacaactattcttatgaattggttctaccgtccactaatccaggcacagtggtctttcaggtaattgctgttgacaatgacactggcatgaatgcagaggttcgttacagcattgtaggaggaaacacaagagatctgtttgcaatcgaccaagaaacaggcaacataacattgatggagaaatgtgatgttacagaccttggtttacacagagtgttggtcaaagctaatgacttaggacagcctgattctctcttcagtgttgtaattgtcaatctgttcgtgaatgagtcagtgaccaatgctacactgattaatgaactggtgcgcaaaagcattgaagcaccagtgaccccaaatactgagatagctgatgtatcctcaccaactagtgactatgtcaagatcctggttgcagctgttgctggcaccataactgtcgttgtagttattttcatcactgctgtagtaagatgtcgccaggcaccacaccttaaggctgctcagaaaaacatgcagaattctgaatgggctaccccaaacccagaaaacaggcagatgataatgatgaagaaaaagaaaaagaagaagaagcattcccctaagaacctgctgcttaatgttgtcactattgaagaaactaaggcagatgatgttgacagtgatggaaacagagtcacactagaccttcctattgatctagaagagcaaacaatgggaaagtacaattgggtaactacacctactactttcaagcctgacagccctgatttggcccgacactacaaatctgcctctccacagcctgccttccaaattcagcctgaaactcccctgaatttgaagcaccacatcatccaagaactgcctctcgataacacctttgtggcctgtgactctatctccaattgttcctcaagcagttcagatccctacagcgtttctgactgtggctatccagtgacaaccttcgaggtacctgtgtccgtacacaccagaccgactgattccaggacatgaactattgaaatctgcagtgagatgtaactttctaggaacaacaaaattccattccccttccaaaaaatttcaatgattgtgatttcaaaattaggctaagatcattaattttgtaatctagatttcccattataaaagcaagcaaaaatcatcttaaaaatgatgtcctagtgaaccttgtgctttctttagctgtaatctggcaatggaaatttaaaatttatggaagagacagtgcagcgcaataacagagtactctcatgctgtttctctgtttgctctgaatcaacagccatgatgtaatataaggctgtcttggtgtatacacttatggttaatatatcagtcatgaaacatgcaattacttgccctgtctgattgttgaataattaaaacattatctccaggagtttggaagtgagctgaactagccaaactactctctgaaaggtatccagggcaagagacatttttaagaccccaaacaaacaaaaaacaaaaccaaaacactctggttcagtgttttgaaaatattgactaacataatattgctgagaaaatcatttttattacccaccactctgcttaaaagttgagtgggccgggcgcggtggctcacgcctgtaattccagcactttgggaggccgaggcgggtggatcacgaggtcaggatattgagaccatcctggctaacatggtgaaaccccatctccactaaaaatacaaaaaattagctgggcgtggtggcgggcgcctgtagtcccagctactcgggaggctgaggcaggagaatggcgtgaacccgggaggcggagcttgcagtgagccgagatggcgccactgcactccagcctgggtgacagagcaagactctgtctcaaaaagaaaaaaatgttcagtgatagaaaataattttactaggtttttatgttgattgtactcatgctgttccactccttttaattattaaaaagttatttttggctgggtgtggtggctcatacctgtaatcccagcactttgggaggccgaggcgggtggatcacctgaggtcaggagttcaagaccagtctggccaacatggcgaaaccccgtctcttctaaaaaatacaaaaattagccgggcgtggtaatgggcgcctgtaatcccagctactcgggaggctgaggcaggagaattgcttgaacccaggaggcggaagttgcagtgagccgagatcgtgccgttgcactcca

SEQ ID NO: 128219 - DNA, 187 bp, Homo sapiens
cagagagatcagtggctaaagcctctcagaattaggtgtggtgctcagagctggggatccagtgacttggtgctgatggtggggacagaggggtaagggggctttgtggaccaccctccatggggatggctatgatcatataagactgtggacctaagggaaaaatctgaggccaaagtaatataag

SEQ ID NO: 128220 - DNA, 285 bp, Homo sapiens
gaatgaggttaaaaaaaccagtagaggatgaaactagagaatacacatggccttgactccactgagaggcatagtgttttttgctgtgggacccatatagatgctagcagaatgtgtgtgttattgatttttttttttttttttgagatggagttttgctcttgctgcccaggctggagtgcaatggtgcaatctcggctcactgcaatctccacctcttgggttcaagtgattctcctgcctcagcctcccaagaatctgggattacaggtatgcgccaccatg

SEQ ID NO: 128221 - DNA, 260 bp, Homo sapiens
aattttattcaaagctgcctttgtgtgaggatctgatagcatagaggtagtagaaatagacattttttaaggggtaactcccaacaaaataaaagcgaagtaccagttgtggcagggatgacagtggttattggatcaccgagctgtattctttctatcagctctctccaagggactcagctttctaggagggggagatggaaatcttaaacaggtttgatagcttccctaccttttatctgcccagagagccggaattc

SEQ ID NO: 128222 - DNA, 452 bp, Homo sapiens
aacctcagctgggaagaaagagccccccacctggtcagttacccagaatcttccctcttgctaactttatctccttctgttcagcttcacaaaaccatgctcaattaggttccaaggtgtgcctcggctcccctcttgatcccattctttggttgtaaggttagcttcctggttctttttgtttgtgaggggaaggggagacagagtctcattctgtcacccagcctggagtgcattggtgggatctcagctcactgcaaacctctgcctcccaggttcaagtgattctcatgtctcagcctcctgagtacctggaattacaggcgcttgccaccacacctggctaatttttgtatttgtagtagagacaaggtttcactctattggcccggctgatcttgaactcctgacctcaaatgatccgcccactttggcctccccagatgctggaa

SEQ ID NO: 128223 - DNA, 273 bp, Homo sapiens
agaggttgaggttatggtgagccatcacatcactgactgcactccagtctgagcaagagagcaagaccctgtctcttaacaaaaaaaagaaaagaaagaaagaaagaaaaaagattcactgctttggtccacaaaggaaacatggctttggtccacattcagtatttctaatctgtatttcatacttatgcccataattaaaaattagtgaaatgaaaaaagacttcttacttgaaaataaggcaagccatttcttcatcgacttttttttag

SEQ ID NO: 128224 - DNA, 626 bp, Homo sapiens
caacaaacaatccctactatatttcatgtgctattgtcagtgctagaaacatcaatttaaaaatgtttaaatcctagtcttcgaagagtttataattaaatataaaaatattgtctatgtgtcaattactgtagctccaaatacctatttactccaaaaattagtgtctgaaaggaacaatcatttattatctcttacagtttggtgggtcagaaatttgatagcatcttgggccaggcgtggtggctcatgcctttaatcccggcacactgggaggctgaggcaggcagatcacttgaggccggggagttccagaccagcctggctgacatggcgaaaacctgtctctactaaaaatacaaaaattagccaggcatgatggcacgtgcttgtagtcccagctacttgggaggctgaggcatgagaatcacttgagcccaagaggcagaggttgcagtgagctgagatcatgccactgcactccagtctgggggacagagtgagactctgtctcaaaaaagacaaaaagaaagaaaacctcgagggggggcccgaaccccatttgccctataggaggcgattacaacttactggcccacgtttaacaccttatacatggaaaacct

SEQ ID NO: 128225 - DNA, 161 bp, Homo sapiens
ctcaaagggcacactattgacctacttgccatccagcccctatggaaagcttgactcagcaggggcaaacctgagcaggagctccagctcattgcacagtagacacctgggtcacaaatctgggttagggctaagattttgcttgatgaccaaagagtcat

SEQ ID NO: 128226 - DNA, 660 bp, Homo sapiens
ggaattcatcatcatttccctatgcattctgccttcagcttcttccctccaggtaaattgcagacgtgatgctcagaattaaactgtcaggatgctgccattctgctgcatgctccggacagctggccgttagggagcactgcaggcttggaagaggtgacttgtctccctgtgtacagccctctgggtagagcagctgtcatctaaatacagatgctgatctccaaaagaagttccagtttggttacagaggtaatttcagcatttttcctttctctcaatatttgagtggtccatttttaggattgtttagaagagcttcaatggacctattttcctacctattttctatgggtattgtcttccccttcaggtaatatgatccttgaaggcagagaatgtttctacttttctttgctaatccctcagcatccaatttaataatctgcacactagacttgatgctatcaatccagttatgggtgcaaagtaatcttaggaagcagatacaaatccaatcctccttctgttagagggagataataatacctgctttttacctatcatacaaagatgtatgttcaaatcatttttttttaagttggaaaaacatactatgatttgtgtgtaagtgctttagactctctggcataaagacag

SEQ ID NO: 128227 - DNA, 464 bp, Homo sapiens
  misc_feature (33)..(33): n is a, c, g, or t
gctgcttgtttagtgactcatagaggatcccgnacgagcatccttacagtggcacagtctaccctccaggtctgcgttgcctccttgccaccaggtagcccctcacagcaactgtaggatataggcctgactcccagggtggtcatgaaggtcagatgagatgatggataggcaggagatgtataaagtctaaagtgatgaggctaatggtggctgagtgatttgcctaaggtcaccctgggggagatgggggccaagccaggacctcagtccaggtctcctggccaggacgtcgaccactagagccccagaccatcatgggtgcccctctgagaagttttacttttctccaactccctgacccacttgcagagctgcaagcaggcaggctggctcccagctgggataatcactggccgctggctgaggtgtaagatgctcgtgccttcctggtagacaggaag

SEQ ID NO: 128228 - DNA, 337 bp, Homo sapiens
tggcctaagcactctgggttgggccagggagaagtcttgatggagataggtcacgtggcagcagggttgtattttcttggggttttctcatttcctttatgggcaggcgggttccccacctctatcatgaactcagagctgtggccatggtaccgcgtgctgctcttgtgagtcactctcccgtgccgcctaattgcccagacctggggacccgcagccctgcccttccctctgttaagcttgacctgaccaacgtcacgtaactcccttcagagcctggccctgcaggaagggccgtgtgctgtgtggaggaagccccgagccagggttgactctc

SEQ ID NO: 128229 - DNA, 420 bp, Homo sapiens
actgcaacccctgcctcccaagttcaagcaattctcttgcctcagcctccggagtgtctgggattacaggcgtgaaccaccacacctggctgaactttgtatagcaatagttttttttaaaaaaaggtaacgtagcattctaaaacattttagcacaaagcaagcactcagataataactgccgaacaaatgaaagggaggagctccaagatgtgttacttttattgttttgtttttgacgtaagagtctcactctcacccaggctggagtgcagtggtgcaatcaccgctcactgcaacctctgcctcctgggtttaagctattctcctgcctcagcctcccaagtaactgagattataggcacacaccaccacgcctagctaattttttgtatttttagtagagacggggtttcacca

SEQ ID NO: 128230 - DNA, 463 bp, Homo sapiens
ctctgcacagggctgtattctgaagcaataactctgaagccatcacatttctgggcactgcaaccctcaaaagaggcacaggcaggcatgccaggggacaggggaagagtctcctgcacagggtggcaattctaaggaactaagctgtaagtggctcctaccatagggaataggcatcatccattgattgccctacagtgtggacaatcattgatgaaaacctgcggtaaagaagggaaaattatgcaacaccaataaggcagctaaattgctctcctctctgggccaagagcgcctgaaacctgctcaaatgggagagtccattcagttattcacttgtgcattcaataaaccattacagaatatctacattagaaggaagctgaatatccactgatcttggtaaattttttcttaccaacatttagtggacctttagactataactgttttttgtatagta

SEQ ID NO: 128231 - DNA, 182 bp, Homo sapiens
attgagcatgaggggcttgttagagaccagattgctagtggagtgggcagggagcatagcaggacatgagtcctagggaaatggtcacaaatagccctgaagcatcctcttacccattttcattccagaaaagctggcctggccaggctgcagaatcagaggtgcatatgggcacacagtgg

SEQ ID NO: 128232 - DNA, 597 bp, Homo sapiens
tgattagatcactcggtgtctgggagaggctatggggatcccttgcagagccagggctgtattgtcatagcagttgcctccctgctaatttatctcagggctcacactcttacatttttggtctaatcacttatatatcactcagcaataaaaaactgtgtcaaaaagattaaaattttagacattcctgcagttgctggaaaaaatggtgataatgtcataaaatatgcaatctttatttcttaaatgttcatgctatatgaaaacagttccatgtactcctccaatttctggtttacagacaatatattatattttaggtgttatttgtttaagatgagatacaggattaaagggaaactagataatgtattggcaaaaatttgagaactgttgttgatgctccagttgctattattttgcaaaaattcttttgtatttgtttatagtagttaatcataaagtatgattttggctgtttgttttccacctgatacatttatttatttattgtagaatatatttgttttaaaatttcagctttgattactgacagagaatatgaatgatggtattttaatgctttctgtcatttaa

SEQ ID NO: 128233 - DNA, 933 bp, Homo sapiens
  misc_feature (378)..(379): n is a, c, g, or t
  misc_feature (387)..(387): n is a, c, g, or t
  misc_feature (392)..(392): n is a, c, g, or t
  misc_feature (395)..(395): n is a, c, g, or t
ggcaacgtgtagaactcagaagggcaaactgtacctgatcctgtaaaagacaagctctggctgggcgcggtggctcatgcctgtaatcccagctactcgggaggccgaggtgggtggatcacgaggtcaggagtttgagaccagcctggccaacgtggtgaaaccccatcgctactaaaaatacaaaaaattagccaggtgtggtggcaggcgcctgtaatcccagctacttgggaggctgaggcaggagaattgcttgaacccaggaggtggagcttgcagtgagccgagaccacgccactgcaactccagcctgggcaacagaggagaaactccatctcaaaaaaaaaaaaaaaaaaaaaaaaaaaaaactttgtnnggcgggcntgggnccntgaagaaagttttaaacaccttggtttggggcgaggcgagcacccaaaatagggtaggggaaccgtggcacaacggtgtacccaaggaaaccggggcaagaaaagggggtgggtattcccacccataaaaaaaggccgcggggaacaccggagggttgtggaacaaccccagaagggggtggagagacaacggggacccacaacgaggagccccggggaggcgaattaaaattagcccggcgtgggtgaaaaaaagaacaaggaagacgagcaagaggaaagacgaaacaagagagagcaacgaggcaccagagaggacaagaacagaagaacagcaaaacagaacaatagaaagcagaagagaagacagcaaaaagaaacgaacacgaagcagagcacagaagagagaaacaaagcagaggaaaacaacaacagaaagaggaagcgaaaagaaagctagagaggaaacaatagcaaaacgaagggcagacaacaatacagaaaggaacaacagaacggaaagacgaaaaacgagaga

SEQ ID NO: 128234 - DNA, 412 bp, Homo sapiens
tgttgtgttaaaaccataatcatttctttttgctgtgcgcctatctttagcattccagtatctgaggtggtcacacggcctcagtggatcctctgctcactgtgatgagcctccagcctgtttcatgtggccggtgccattcgctttgtatttctgtcttctttatggcttatttcattccacggtagagatccaggagcagagaaagcctgaatatgaaaattctctctctgcgaattttaaagaatatgttcattcaggtgctagattctattttgaacaaaatcttaagaattctaactcatctaggctgggcgtggtggctcacgcctgtaatcccagcaccttgggaggctgaggcgggcagatcacccgaggtcaggagttcgagaccagcctggccaacatggtg

SEQ ID NO: 128235 - DNA, 319 bp, Homo sapiens
tgctgaagaaggtgagtgggaaagacaggctcgaggagggttgtctgaaaacatgggacaaaggaccacaggatcctctcacctgagcagcccatggggacctctggccaaggcctgcctgagctgtccaagaggaagtctgcacagcctgtcctgtgggtgcgtgtatgtgtgtgtgtgtgtgtgtgtgtgtgtgtgtgtgtggtgactgattagactcatttctaggcctctaggggttagaactaagagcaaaggatggagattatagagggagatttcaacactgaataaggagtgctctattcaagccagaaca

SEQ ID NO: 128236 - DNA, 381 bp, Homo sapiens
ataatagttaaaaccagtcaattacctttcacacacacaaaaacatgttaaatgtgcccatttggtatgttaaaactgagtgctaggctttttgctgaatgagttgtatttcaaagcatagtgcttcagttaattttatatatgattatccttcataaaataagtctaaacaggatgaattgtttttcccactgattgtgttaatctgtgattagttcttggctatgaatgatatatctttttaaactttgtcctttttagattgctactagctttcagtggatgctatttgtgatatttatttctgaagaaaagaatggacactcttttgctcttcagggggactgatagtggaaataaaatttgatttgttatctgggc

SEQ ID NO: 128237 - DNA, 252 bp, Homo sapiens
gacatatgcagtccgtagcaggtatcatgttttaaaagccctcgtctcttagataaacactgaaaaattcacaaatgagacagacatctagaatttgcttcagaagagttcaggagtaggaaagtggatggcaagggtagagacaaaaccagattggccacaagttggtaactaactgttcaattgctgaagctgggattcattatactagtatcacttttttgctttttttttttttttttttttgagaca

SEQ ID NO: 128238 - DNA, 257 bp, Homo sapiens
tctcaccatgagggggaaaagtcaacttgaagcaggacagggtcattgacaatttcctgtgattccacagctgccttgtacactatggtagctcctagccacttgttgtttagattttgtgatttagaaatgaattaaggccgggcatggtggcacacctgtaatcccagcattttgggaagccaagacccgaccggagcgcaacaccgggccggggcgcaacacccggccgagcgcaacaccgggccgagcgcaac

SEQ ID NO: 128239 - DNA, 294 bp, Homo sapiens
cttttttaaactaccagttacacacacacacacacacacacacacacacacacacacacagaaattccaccatgattggtcagaataggtgaggttttgctgcaataacaaacaactcccaaatcttggtaacttcaaacatcagaagttgtttttctcactcatgcttcatctgcagggaggtgtggggtgctctgtttcccatcaaacttgccctaagactaaggttaatgggggttgcaatacctcgagtatcaccaagcagggaacagagggagaagaatgttagagagt

SEQ ID NO: 128240 - DNA, 502 bp, Homo sapiens
catggatgtgcaagtatggcatgtgtatacatgtatcatgcatgtacatgtgcatatgtataccatgatgacttgtgtgggtgcatcatgtgcatgctcacacatactggtctctgtgtgcatgtgtgtgcattttgcagggtgtgtgcatgtgcattgtgggtgcatatgcaagcacgtttgcaacccctccatctaagaggaaatctttgctccacatccatttgtccaaccagcatatatggagcacctactgggtgccccgctaggaattaaagaaatggctgatcaagacatgagtgattgctgagcctcagaatgttgtcccacccaaggactggcacagaggctgcaggtgtgatgtggagagaagcatgcggggaaaatgtgaagtggcatacatgatagagtcctgaatcctgacaaaggaaaggcccagctagatctgagagccaatggctgctgcagggtgcacatcaggaatccccacatccccctcaag

SEQ ID NO: 128241 - DNA, 680 bp, Homo sapiens
ggggaggccaatgcctggggcagccagcccagaggcagcaaagaccaaatatgatgggggaagagggagtgccctgctgtcacagcagtttggcagagggtggtgtgagtagctgagacgctggaaacagagggtagaaccagcgagtgaagggctttcactactggatattgcagtgtcgacagggggaaatgattgttttttgagccccagaatcatatgatcaaacctatagtctgtcgtgctcactagaacatgagcttcccaaggcaaggagttcgtctagtattccctgtgtactcccagcactgagcccagcatcagtcacttagtaggtgccacgttgatatttaatagatgtgtttcatagatatgtacagccacaatatatacaatgtttatggatatatataatatatatgttatgtagtaaacattttaaaactttgataagaatacacactaatggtcaagggagtggttactttggggaagagaggaaataggattgagatagaatacaaaagggatttcagctatgtctgattttttttcttataaagaagaactgggaccaggcgcagtggctcacacctgtaatcccagcattttgggaggccaaggcaggtggatcatgaggtcaggagatcgagaccatcttggctaacacagtgaaaccc

SEQ ID NO: 128242 - DNA, 345 bp, Homo sapiens
gtagttgggattacaggcatgcgacaccacacccagctaatttttgcatttttaatagagatgaggtttcaccgtgttggtcaggctggtctggaactcctgacctcacatgatccacctgttccagcctcccaaagtgctgggattacaggcgtgagcccccgcgcccagccaggagctttctaaacaaaataaataagtaaaatattcagcatgtcacatggttaaatgagctctcaagaacaataaagcagggaaaggggatatagtgtgtgtgtgtgtgtgcgtgcgtgcgtgcgtgtgtgtgtgtgtctaggaggtagatttaatttggtggtcaggaag

SEQ ID NO: 128243 - DNA, 245 bp, Homo sapiens
gaaaattagggaacatatgccccagttgaagagggcagttttgctttgatggccagcccattgtaaccttacagaaatatgggtgcagtgtggccaaattttctgatttttccaagagaagctagaaatctaagtaatgtaaaagatgtcctaattaaacattaagaaattgatgtattcttttaaaacctcgggccaaggtaaagaaagcacacctgcaagccaaaaggctacagcctcttact

SEQ ID NO: 128244 - DNA, 131 bp, Homo sapiens
acaaacctaactccaaggctaagtcctcaaagaggaaagcaagtggaggacttaagttacttaaagtgcgggatacagctgcgggcagtagcacatgcctggggtccccactacttgggaggctgaggtgg

SEQ ID NO: 128245 - DNA, 495 bp, Homo sapiens
taggatatgtgcatttagtagcttgatttagtacataccattaagacattagctttaaatatttgaagagcaggattgactttgaggtcagtttgctgtttcattgttactaatgataaatggtttctaagcaccattccaaacctttaagaaattgttacagcccaatatttgaggattgttagatccttactgaaagctaaggatgggaatgcagctgtgcctcaggaaggacagtggaagtgggagctggaaacccctcagatacccaagtagcatatactctatctcctacctctgcttctttgtgtatctttttttgccccccaagaattccgaggacaatcaagctttgtgtatcttttaaaaacttttcctctctttgccaactggatcatgtgctcctcagttcacatgatggagtatttgttttactggtctagccacagggagacatctttccctgttattctcaattctaggatcctggagagg

SEQ ID NO: 128246 - DNA, 196 bp, Homo sapiens
ctgctggcttagaggagagtacgttgcccttggaggggaagggtggacagaaggagcagtaagcagagctatgtgttgtcagagctcgtttttcgtgtcccagtttgagcccacaaggagagggttgggtgtccgttgatgacaactatagtggcccagaggatttcccagagccctggggtttccttagcccctt

SEQ ID NO: 128247 - DNA, 204 bp, Homo sapiens
atagcccaggttatttggcccatctacagttgagacgagagcttggggagcatgacttcctaagggcacccagctggactgaggcacagttttgcagaactgtgttcacagatgataaagcacagacccaagattgggtggaggtgtggccttgggtcactgtggccagggttagtctggagctttctgagtaagagatgggag

SEQ ID NO: 128248 - DNA, 475 bp, Homo sapiens
gatgtggtgttgcaatgaacaaaagaaggaatggtattcttaactgagtcatgagattataatcataaccacaataataataatagtaacaaaataaacactgttctttatcgagcccttatgtgtacactctgcttactgtgtttagacagatatagaccgcaactttttacatgaattatctcattccgtccaacagtccattaaagttgatactatcattttcaaatgtagaaactgtatgcctagatgtgcctagaggttaagtacattgctggagattacaaaaccaagctaagtggtagactcttagagcccgtatcctactctagactacatgcttgtccaaatggtagggatgcagacaagatttataaggtttttggtaggcacttccagatttgggacacatggcattgaaagcttgttttctgacttgagaggtcaggatttgctgacagtattttgaggagta

SEQ ID NO: 128249 - DNA, 365 bp, Homo sapiens
  misc_feature (301)..(301): n is a, c, g, or t
  misc_feature (326)..(326): n is a, c, g, or t
ctataataaatggctccagggccagccaacctgcagggcatgggggtggtattcccaggctttgtctttcctgaccaggttttgctcttgctgagactccattggcaaagcttatttgagggcacgcctgcacctgcctgcagaaacacctcgaaacagctctggctgtttggaaggctggtcatttgcaagcagaagcatgggaagcattattaatgacatgtggtgtggaacaatggtcgtaccacagacctgtagcaccaagatcaaatcatccctgatggaaagcttggccaagacntggcccagtgcttccaggctggtgncacacagtgccacgatccccaaacaacagggccccaagc

SEQ ID NO: 128250 - DNA, 214 bp, Homo sapiens
agtttcaagccaaatgacattgatgtccggaaaccaggatgtgctgaagtagaaatttccagggatccctcagagttatttgctaaaatgtttattattcttcagaggggggtggaaatatttctttaagagtcttccttgaagaattttgaactccagctttggagtgatgggagcacagtgcagggaaggcgggatgtgaggtggtgtgctg

SEQ ID NO: 128251 - DNA, 481 bp, Homo sapiens
gccggtctctacctcttgggctcaagcaatcctcttgccgcagcttcctgaagtcctgggattacaggcgtgagccacagtgcccagtgatgaactactttgtatatctcattgcagtttttctttccctccctctcttccttccttttttccatacacccagcagctcatttgagagctgtggttggctcacatctcctggacaagtcctaaggatggcttgaaacataacttagggtcatatttgaagaactcttttgtcagaccagattagtttaccttcaagctccctctgctgctctcctatgctctatcccctgctcactccacccccaatatctgactcctgctgatctggtcctgggacatggttgctggctaggccagaaatgcttagggaattgagaagagactactccatggcccttctctgcctgtctgagggtgagacagggtttgaatctgtggaggcatactgtcg

SEQ ID NO: 128252 - DNA, 500 bp, Homo sapiens
gtttcatcctatttgagtcaataaaaacagtggtgaggggtggggagataaactctgatgttttagaaacaggttagtcttgtgggaatctgatcattttctcactggaataacctgtgaaagcttgactagtgcagacgaagttgtaaaaacatagcttaggtcttcctactctgaacaaacaaatacatctgaggcttttgaatggatgcttattagactttcaggacactttggtggtgctgcaaagcatggcagaaaactgatctttggggtggaaagaaaatggtatgacattggaattttaagatcatcatgtcctaggttttcccatgtagagacagcattcatctttcacatggaatagacttagaagtatagatccacacgaggtcaggagttcaagaccagcctgaccaacatggtgaaaccctgtctctactaaaaatacaaaaattagctgtgtgtggtggcacatgcctgtaatcccagctactcgg

SEQ ID NO: 128253 - DNA, 427 bp, Homo sapiens
atgtacaaaagactaacaggttacatccattctatacatgcagggatttcataaaagttaaacacttcttcaaacctgcacacacaaatccatactgtggcatccagagtttctttaagcctcacactgtatcagtacaaacatcctacagggaattaattcactgagcacagaacaaatgtgtaatgcaaagagattaccaagtcacctccaccaccttgatttatataagctcttctgttttagcaacacctggagaatccagtggtctgtgcttcagtggtctcaagagctcttcatggcagttctgtaagaaagttgctggctttaacgcagggctggtttcaatatagggcagctgttttctgctgtgagtcttctggaggaaaaagaatgggttcacggaaactgaaagtaactgaaaaat

SEQ ID NO: 128254 - DNA, 614 bp, Homo sapiens
aggcggaggcgggtgaatcacgaggtcaagagatcaagaccatcctggccaacatggtgaaaccccgtctctactaaaaatacaaaaattagctgggcaaggtggcgcatgtctgtaatcctagctactcaggaggctgaggcagaagaatcgcttgaacttgggaggcacaggttgcagtgagccgagatcgtgccactgcactccagcctggcaaaagagcgagacaccgtctcaaaaaaacaaagtagccgggcctggtggcatatgcctgtagtcccagctactcaggaggttgaggcaggagaatggcttgaaccagggaaacagaggttgcagtgagctgagatcgtgccactgcactccagcttgggcgacagagcgagaatccgtctgaaaaaaaaaaatgttttgaaaggaaggaaggaagtgtggttgctagaatttgtaggttccactaagccctttccatgtagatggggcctgcagggagttgggggctgagtgtgcacagcctgatggcctctctgctccctagatgcatttctgctctgcgtgcctttgcaattacatctatcattagctagagagaggatctgaactagacctcccca

SEQ ID NO: 128255 - DNA, 535 bp, Homo sapiens
tatatgaatcttaacattctaggttgcctaagccaatgaatgggtaccctggccaagcaaagctgttcttctgggatccctgggatacaaaacaaaactgctcatgcatagaagacaaaaagctgtaataccaagcctgtgttttttatgtgttagcataaaagacaaaaggatctggtgattaagctaaagtaggttaagaactccctcatatgaaaagacatctcacatactaaggcatattcacaacttaaatcatattacagtccttcgatctggccaagagaagccaggtactgaagtttaggtggcagccagaaagctggactgagtggtagagaggatcttggactgtgaggtggggatctggatgcagagtaagaaaaggaagaaaaggtacaagtgaaaggagtccacaaagtgagttagagatacattctaaaggtcctgagatttagaaaacagcatgatcaaatctttgccttcatacttttcattttatctagaaccctagtattatctgctaagcctatag

SEQ ID NO: 128256 - DNA, 835 bp, Homo sapiens
cacacacaagagatgatcctgcctcaggacctttgcattggctgttgccacagccagtacctctcttcctcagatatccacttgactggttctctcaactcctttaaataccacttgatcaatgagacccattctgatcactctacttaaaattgttcaccccagccctcctatattctgctttatttttcccacagaactttattactttaaaacataaaagttactttattatattaatgtttatactttctatttccaaacctgccacttcacctcagtataagatcttcaagagcagccatctttgttttgttcaccagtgtaacatcagtgcctaaaacactacctggcacatagttgaggcttcattggtatttgttgaatgaatgaatgagtggatgaatgaattaatgaataaatagaagaattaggacaagacaaatagagtgtcagtaaggagcaagtctaggaaaggagtgagactgtgtgagacagaataatggccccccaaatgtgtccacattctaatccctggaacctgtaaatacgttaccttacatggcaaaagggactttgcaaatatgattaagttaattaccttgatatgggaaggttatcctggattagccaatgggcctaatataatccaagagtccttttattcaaagaccgagaaggtgatgtgacaatggaagtagaggctaaagtgatgcactttgaagatggaggaagagaccacaaaccaaagaatgcaggcagcctctaacagctggaaagagaaaggaaactgattctcacctggagcctccagaaggaacacagctctatcaac

SEQ ID NO: 128257 - DNA, 383 bp, Homo sapiens
tccagaccaacctgggcaacatagtgagactgtctgttttttaaaaagaaaaaagtaaactgtttatctttgaactagataaggtttttctcatgctttaaagcatgtttaatgattctcagccagtctcttggattaattttgtccgtagaatgctagccgaaaccaaaagatttttcttaatgaattaccttttaattgttctttcattgttttgttccctttttttcaattggattaaaaaattattaagggcagagatcatccatctctttgtatggggtaaagtaaatggtagtttaaatgaaaaatgaaattccatcaaaatggaatcttttaatcaaatctaatttctacagctgttcccagcttgctcagatgct

SEQ ID NO: 128258 - DNA, 592 bp, Homo sapiens
gtgaattcaatatttgatgtgattttgggaagtaaaggggaatgtcagcatcctttcgataaaattgatattatcaatctgaagaatgtttcttagatcagttgtgtccataacttgggagcattagctgtgagaccttgaaacagattggccatattcttatttcacattgattatttaaatggacaattttaggttactggtctttattcacttgttattgaaaccacatgcacactgacaatcagtgaaaatcactttatttattttagagacagagtctcgactgggcgcagcggctcatgcctataatcccaacactttgggaggctgaggcgggtggatcacttgaggtcaggagttcgagaccagcctgaccaacatggtgaaacctgtctctactaaaaatacaaaaaattagccggacgtggtaccgggcgcctgtaatcccagctactcgggaggctgaggaaggagaatcacttgaacctgggaggcagaggttgcagtgagccgagatcataccactgcattccagcctgggtgacagagccagactttgtctcaaaaaaaaaaaaaaaaaaaaaaaaag

SEQ ID NO: 128259 - DNA, 507 bp, Homo sapiens
cagatcctcccatctcagcctccctagtagctggggctactggtgtgcgccaccatgcctggctaattttttaaatttttttgcagaggtggaggtctcgctatgttgcctaggctagtctcaagcgcctgggctcaagccatcttcttgcctcagcctctgaaagcgtggagattacaggcctgagctactgtgcccagcctccctgttacttctcggatgaaatcctgccctgttggtgacactttccaggctatggatggcagtgcctgtctacccctccagtccttcttcctatcatacctgccacacggctgctcacaaacagtccccacccctgccccactgccaggcctctatctagcctcttcctcattcaagcccagctggagggtcaggctccctcctccaggacggcttccttgggctgcaagacagcgctgcccaccacactgaactgactcacaatggctctctgccaccccagagcaaacccagggaggggcc

SEQ ID NO: 128260 - DNA, 295 bp, Homo sapiens
ttattttccttctttatagcttattttctttctttatgggcctcacatccatagtctaggcaagaagaaagagaaagaggaattgaaagggcagatggctctgttgttgcaagcccttgccttttttacttagcgaaggatgccctcaccatggccttctgcctatacctcattggccagaattggtcactctaccaactcagctgcagggaagggggaatggaatgatctttatggccacgtttctacctccaacaaaacagggttttggttctcaagaacaggtggaagataa

SEQ ID NO: 128261 - DNA, 480 bp, Homo sapiens
tggcagaagcgtctgtgcaggggagtgggtgggtgggcatgggagtgtctgaggagatgcagctacaaagccccacagagtgactcatgcctttcacaatgactttcctatctcagtaaagccctgtattctatgagaagttccaaattggtaatagcagcagcaatcattgcatcattgcttttctgactttttactctcagtttaacttgattatattatttaacctcagaggcaaaaaggcagaaggtcagatattgctgctcttgtttcacgttaaagatttagatagaggtttagagaaaggtgaaacctccttaagtcacacaatgagttggtggttgatctgagactcacctgagtttctttctcctagccctgtgttctttccattaagaaaggacttcttatcaggtgtggtggctcaggcctgtaaccccagcactttgggaggccaaggtggaagtattgcttgagttc

SEQ ID NO: 128262 - DNA, 272 bp, Homo sapiens
tcagtctttctagtgtgactttctctgtagagaacttcatcatcatcaagtttgtgtcatcagaaaaattaaatgaacaccggccccatctgaaagcaggtaacttttttgtacaaaacaagcccgtttccaggttaacagagcagctacaggttctgttaccactcagagtaacaaaaatatgatggaaatggtgcatgggagatctcctgacctcgtgatccgcctgtctcggcctcgcaaagtgctgggattacaggtgtgagccaccg

SEQ ID NO: 128263 - DNA, 426 bp, Homo sapiens
attccacccccaactaatattaacaagaatgacccatccagaattatacagttgtaagttcattgaaatctaggtcagtcataagtattttggggctgcaaagtacaatatcagaacctattcccaaagagcatacagtctagttgaagtggcaaagactgtgcagcagcagcagggaaatgtacatcagaaaggagcaagattggctgtaagtgacaaaaaactcaaaatagtagtgacggtataaacttatttctctcatgtaaaaatctaagaaggtagatcacggcttgtatggcacatgtcagtgtcaggaacctaagctgcttttattcttaggttggtgcaaaagtaattgtggtttttgccattaaaagtaatggcaaatttaatgccattaaaagtaatggcaaaaataaaagtaat

SEQ ID NO: 128264 - DNA, 247 bp, Homo sapiens
caaaaggtcattaattaataggtcatgctccaagactctgtctccaaagtcaacctcctcagggctgaacaacctttagaagccccaaatagactctccattttctttcacagatctgaagatgacttgtctcatgtctggggcagtgttggatttctagcctagagcagtacctctcaactagtgttttagggagagggtcttttagaaactactgttcaccttttcccatagaggttctgttatt

SEQ ID NO: 128265 - DNA, 379 bp, Homo sapiens
cttttggggtctttgctgcacatctttctccctgaggtctttataaagaaggcattgcagaatacagagaatatcctcaacaatatttcagtaatcacaatgaaatgttttatgaggttatttttatactgaacttcaggataagcctagagtaacggttgggagaaaaaaaagaaaaaaaaaatttcggggacagagagaaaaaaagaaaggaaaaaaaaaaaccttaggagagagagacctacataatggggcccaggtccccagaacactgctgatttaagagcacatttaagagaatttctggaaaaaaaatatttttttaacaagtagttactatatagaagtttataagcaaagaccccaaaatgaaaagcaa

SEQ ID NO: 128266 - DNA, 304 bp, Homo sapiens
cacagggctgctcggggtctggggtgccggcccccacctcagcagggacaccctgctccaccggccctgctgtttccatgcggcctccaaagcctccggcctccggggtcacccttcgggaggcgtcagcctcttccaagacaaaccctctcccctgtgtcacctcctccccacccccaagttcaaggtcactcctgcttccaggttagtcctgggccagaagggccttgctcgaggctcggtgacatctgctcctcccgctggacccagagggacccttcatgctctgcccaccacagacccc

SEQ ID NO: 128267 - DNA, 272 bp, Homo sapiens
aagttatgcaaaatacatattctgaaaataaaagaacaagaaataattaagccaagtttattgttatctgaatgtcaaattaaaagaaaaccaataaactggtcatttgaattacatgtaaatcgtttgtaagcccacatttgaaatttctatttcgtcattcacatgagtgggtagttcctccctgactcttaaacctacccttattctccattctctgatagagaagaagaagttagtgaggaagaactggatcacgtggcatccatcag

SEQ ID NO: 128268 - DNA, 717 bp, Homo sapiens
ctgaggtcgggagtttgagagtagcctggccaacatggtgaaacccatctctactaaaaatacaaaacttagctggtgtggtggcacatgtctgtgatcccagctactcgggaggctgagggatgagaatcacatgaacccaggaggcagaggttgcagtgagccaagattgtgtcactgcactccagactgggcaacacagtgagactccatctcagaaataataataatgatgaatttgcctagcataaccagctcttcaaaagtttggtcaaaagccggtaaatgcttagtattgtgtagacgttccacagtgtccctctcactctctttactttcggctgcatatttccacttgttatcaccatctctgtggaaagctccattcaggatcagcaatcttcttgattcagaggaccattcatgatgttaaggatctgctagtgatgacaccagtcacacagaacaatcatgaggaggaagaatatggggaagtctttaccatttcctcctgggctactgttagcttcttacctggtctccctgctgccattgtagccacctgactcccaactgactgttgtaagagtgacctctctaaaccgacatgcccctctccatggttttatcatttctgattcctttattcactcctgatgtcactgtcttgctttaggtcttcagggtcttctacctagattgctatggtcatctcta

SEQ ID NO: 128269 - DNA, 294 bp, Homo sapiens
ggggctggggagttgggggagcaggaagaaggaattgaggggcagcaactggccagctccaattgggctacggccagtctcaatgtggccggctcctctcttgggacctcaccactggaatcacaggagaagccatcttcctgccacaaacgaggcttccaaccccactttctaacctcagtcctgaggccgccttcagcactgaccatcctggaacaggcagagatcctggcctgggtcaacggggccgaaaacccagccccgagccccgagccccgccccacagccctgcgc

SEQ ID NO: 128270 - DNA, 344 bp, Homo sapiens
taggagaatgctgccctggaatggggcagacgtggagatggggcctaagagaagtgaatggagggagagtttaagaagtgtacctgggccgggcgtggtggctcacgcctgcaatcccagcactttggaaggccgaggtgggcagatcacctgaggttgggagtttgagaccagcctgaccaacatggagaaaccctgtctctactgaaaatacaaaattagccgggtgcagtggcgcacgcctgtaatcccagctactcgcgaggctgaggcaggagaatcgtttaaacctgggagacggaggttgcggtgaccaagatcgcaccattgtactccagcctggg

SEQ ID NO: 128271 - DNA, 551 bp, Homo sapiens
cagaggctgcaggcagacccagctctaccctctgtgggaaagggaagaattgccctctggtcccagatagactaactcccctgggctgccacacagacggccattctgggagacagcagtttgacctgtttgctcagctgctgtcctttccaccctgagagacttagggcttcagatgtggggagttccccccatttgccttataacgatccctcataactgcacagcgtttttgtgggatttcgtgggcatgatctcatccgagccttccaacagcccttgggaggcaggcagggcaggtgtgggaggcgactcggccccaggcgcacatgggtaggtaatcagtgggaaagtgtccctagctgcttcccttccttccccaggataagtgactgtcaccaaaaggcccccccgagatcagcaagcttggcctgtggccttttgctttttcacacccacagaaggggtgaagctggggctctttgcaggcaacagcagccgcacccgcccgagtcctgagctccacgtcagcagggcaaggggacggatgg

SEQ ID NO: 128272 - DNA, 653 bp, Homo sapiens
gagctaatgttcacattatagcaattaaggaagtagaagagagaaggggtagaaagtatttttaaagaaataatgattgaaaacgtcacaaatctggggagagatagtcacatcggggtaaaggagagtcaaagttctccagtcattttcaaaccaaagaccacactacaacatattatagtcaaactgtcaaaaatcacagagagactattgaaaacagcaagagaaaatcttcacatacaagggaaccctcaggaagttatctgcacatttctaagcagaaacttagtaggccaggaaagtgtgggatgatatattcaaagtgctgaaaataagaaagaaacctgccaaccaaaaaaccaaacccagcaaaactgtccttcagaaagggagagagaagacttttccagacatacaaaatctgagaaagttcatcatcactagatctgccttacaagaaatggtaaagggaattcttcaggctgaaaagaaaaagaatgctaattaggaacatgaaaacatatgaaagtgtaaaactcactggtaatagtcaattcagaatactctaataatggtggtgtataaatcacttgtttttattataattaaaagacaaagctattaaaataatagctacaataatttgtcatagg

SEQ ID NO: 128273 - DNA, 195 bp, Homo sapiens
cgaaagatcttgggtggaccttcagaatccttgtgcataatgaaattgacaagaagaaacaaacgtttgttgtctttgtccacataacagacatgataaggaacaaaatccaacaggtatcctaaattcagaggaatataacacaatagtgatctattcaaaactcaacaccaaggaacacatttccttatcttt

SEQ ID NO: 128274 - DNA, 363 bp, Homo sapiens
gatcacagaatcgaaaagatgtgtatgtgtttgtgtgtgtgtgcatatatatacaacatagctataccccagtatctgcaaatctgcaagggattagctccaggatccaccatggataccagagtcacagatgctcaggttccttatataaaatggaatattatttgcatataacctacacacatcctcctgtatactttaagtcatctctagattatttataatacccaataaaactatgcaataaatacccaataaatgctatgcaaatagttgttagactatattgttttttatttattattttttaattgttgttttgttatgagggggttggattttttgctttatattttctttttt

SEQ ID NO: 128275 - DNA, 629 bp, Homo sapiens
ctttgacaactgaattatatctccactgtagcatattaaggttaggttaaatctaattaactataatacctatcattgaaaaatttcagagtacatatcacctaaagattaataaaagaagaagtatatatatgtattttcatattttccatattgtagtacagatgtattttatttttaaaagcactcagtacagagccataaattattttagcattttaggggacatttttaaatgtttttaaaattctaaagctttgttcattttattagcaaaatgtagtctcatcccagttttgataaacctggatagatccatgttgatattaaaatgaaagccacagtctaatcaataaagtgattcatcagttgtgtagaacaaagtagtacttttgctttaagaggctttttgttgttgtttatctcctttagcggatattttcagataatacataactttgcttttatgtttattctaagaataataagtcatcatgccacatttgtgggtgcttttaattttaataataaagtaattatgcaaagctaactatgtaaacattaatttctgacatgattgtttagatctattctttatgaggttacatagggcaaatttaattattgat

SEQ ID NO: 128276 - DNA, 158 bp, Homo sapiens
gctggtctcgaacggctcaagcagtacgctcgcctccacctcccaaagtgctgggattacaggcataagccactgaacccagcagactgggtaatttatgaaaaacagaaatttaatttctgacagttctggaggctgggaagtataataccaaggca

SEQ ID NO: 128277 - DNA, 278 bp, Homo sapiens
ggatcctccgcttccctctagctcaggcctgagcacttgacaactggaccatgcagaggacctcagtggatccacctgcccccatctcccacagccacgcccctgcccagggttgccaggcattcagctcaatatctctctgagcacagccctcccctgctcaggagccatccatggctcctcattgccttaaaacgaagacttcattcctgaacccacccttgaaagcacctcaaattttggccccttctcaccttgacgatcttcacttttcaact

SEQ ID NO: 128278 - DNA, 197 bp, Homo sapiens
ctattgtgcctcaggactaggtcttacatgaaattagagggaatttattaggctgtgtgaaacaaggactttttaaggctactaacagtttttttcttttaaacgatacttatcactgaaagaaacctaactgggatctgcagtgtttatctttgtctgaagtaaatagaaaggcactgtagggcttgcattactgt

SEQ ID NO: 128279 - DNA, 269 bp, Homo sapiens
tcttccttccctcctttcctctgccttgggcttcctccataaaaacagagaaggggacacaggctgaataggacactgggatggagaaagctgtggtttcctttacctttccaccgatggtctttttggagaggaggaggcagaagacttggagtccacagagtctctcctgaaagaagaaaattggcaatgagactgctttgtagactagcatcagtactgacaggaaggtggggagaaagcatcctgggaaaaggccagctggcttg

SEQ ID NO: 128280 - DNA, 306 bp, Homo sapiens
caaggagctcacctgatcacacactgtgcttacttcatcaggttgcctaatgctcaagggttaaaggtgatcattcctatggaggtaacatttcccttccagatctaagacagtggatacaattaaggtttgtaactcaagcttgtaaccactttttggtgcctgaaaccatccaagtagatagtttggtttataagacattctgttgaatctggaaaacgtggtggattaagaaaccctctctgcatcacaaagcctggagtgtttgctactaattgtgcaactttagttctggttccttctagt

SEQ ID NO: 128281 - DNA, 696 bp, Homo sapiens
aaggtaattttcacagatgggtatttctggtggctatatattctaccaaatgtgccagggacagaagctaaaagaaatggaaacttaagaaccagggaaaatgaactgatattaaagaaaaggctgtcactaaaggaatttcagtggaatttttatatggaagatagttaactggtgagaagaagaaattatgaatttcacagatgagagtaatcagaaggaataatgctctttaaaatgacatgaccaatatttttaagagaatacagaattaactaaattatatattgattcaaaattttggtagattgacccagttttaagtacataaccattttaaaatttactgaatgtcaataattttatagtagcagttttattacattacataaaatgtcatattgactcactatattgtatagcttacattttttgcaatatggcatgattatcacaaaatgacccaaggtaagttaagacatttgatgacaatgtactttcttaatatacatgtgaatgtgttaaaatgtgtttataatctacattattttgttctgtgcagcaacatatttcctcataatgaagatgtcatctgtgtcttttaaaaatagtatataaaataactacgttcccgataatttaatcagttaaacttaatatggctttagttttaattcttgatttccataactttgc

SEQ ID NO: 128282 - DNA, 349 bp, Homo sapiens
cacacagattaaaattttgctccttcctttagatgtataatattattactggatactgccatatgtggatggaaaaatatacctccaaatcaaaaggcagaattccctctgagcgggtttagagtagaggaatagaaacacttgggttttacaacaatgagaggaggcagaggcaagcagggggtttggatcagaaagaactgtgtctgagcaagtttttccttggagaaaatgaaaacattgttctaagaatatttcaagaaggaaaatgtgtgttattcaacatggaactgattcagcctgtgttgaacaaacaaacttccatggctgatgatccggacactgggtg

SEQ ID NO: 128283 - DNA, 410 bp, Homo sapiens
acttacatgggctttagcttttagatttcttactgtaaaaaggaaatgagataattaagcaaatcatcactccataaacaagtgaattaactgtatacatcccatgtcttcttatacaagattaggtacaagagttccattctcctaaaacattccatttctattcagtcaagcagaatagcctattttttttattaacttatcttctatattgctccatcattctcagatcttagactgggcagtttcttcaactgactggcttgcatttcaagttatgtgtctagcttttcacagtaattttctaaaggttgtctgattttggtgaaaatctatcacattatgtacaagaatgtctacatatgctttaagtttttttaaaaaaatgaaatttattatcttgaaacaaa

SEQ ID NO: 128284 - DNA, 263 bp, Homo sapiens
aagaggcaggcctatattagcaatgcatttttaaactcctagaggcttttctgagttggaaaaggccaattaatttacttctagaactcagaaacctgctgattctgttgcaacctacccaatctgtcttcactgacatgcttccactgttttgttttgacatttccaccaccgaacaagcacatattaggctggtttatgatgtcttgacacagctactgggcatggctcccactcctgactggcatggcctggggccggcc

SEQ ID NO: 128285 - DNA, 155 bp, Homo sapiens
atgaaagggaaatcagagtttttattttttcttagtatgatgtgtcatttcatttagcattattggtatctactaattaactacaaatggcctgtatttttaaatacagaaattctcagattttgagttgtaagctttctttataggttcaaagc

SEQ ID NO: 128286 - DNA, 498 bp, Homo sapiens
aagatgtgtcagtgcttgttaagtaggctctcagttccaggtaagagcagtcatacacctagatgccatcaatgtgccaggcattttgctctgcagccggggtacaaggataagggagagtcctcatgttgctcctgagtaaaggaggatggcaagtgacttcatagtgaaagagtgcagtgtgaggatgactgtgacaaaggtctaatacccaacctgggagaagggtgcagggttcttagtaaacaactggtgaaggggaaatattagtggctagcaagcaaaaagaattgggggtacatttggcaacagtttagagggaagggtatttacagtggagagacatcataatcaaaggctagaggtgagagcacagcatggctgggctagtggagtatgggggacgctggggatgaggctggaggtcacagcagggaggactctgagtgccttgcaaaggagaatagttttatcctgaccgctctgcacttcagtgat

SEQ ID NO: 128287 - DNA, 237 bp, Homo sapiens
cacccacccaagcagacacacatcttcagacccggcgattgtgcataggtttatatccaacaggtacgcattgcttatcttccctagcaatgttctgcctgcctacctaacccgtgcctaggtatctctccttttcctgagacatccttctttcaggattaagctaataagaccaggctagcttgagaaatttgcatgtgttcttgtgttttcatccccaaaacaacagtgtactgt

SEQ ID NO: 128288 - DNA, 447 bp, Homo sapiens
ccaattaccccttaaaggccccacctgtcaatattgccacactggggattaagttttaacataagttttggagggtacaaattttcaaaccatagcattctacccctggcctcccgaaactcatatccttctcgcatacaaatatattcatttcaaccccatagccctaaagtcttaacttgttctagcaccaactcaaaagtccgtctacttttttgtgaaatcaaaacaaggcatctacttccaagacacacggtgggagagacatagggtacacattcccattccaaaatggagaaataggctagaagaaaggagtaacaggccccaagcaagtccaaaacccaagagcagacattaagtaataagactccagattagccatgtgcagtggctcatgcctgtaatacaagcactttgggagatggagctgggcagattgcttga

SEQ ID NO: 128289 - DNA, 351 bp, Homo sapiens
tcctgagtagctggggttacaggcgcacaccaccacacctggctaatttttgtatttttagtaaagacagggtttcaccatgttggctaggctggtcttgaactcctgacctcaagtgatccacccgtcttggcctcccaaagcgctcagattacaggcgtgagctactgtgcccagccagttattgatgtttattaactaatgcaagacaggggataccaaaccgtaacaggaatgtgtgatttgttcctatgccaccagtctggaactctctgtacttatcctcaaggagagtgagatatgtggttggtacttgggggacagagtaaagaattgatacaatccctgtcc

SEQ ID NO: 128290 - DNA, 383 bp, Homo sapiens
tgggagtgggtgacccgcagagatctttgcaggctggccccttaagggaggcagggtcaagagagcagaacttaaattccagtccaggaactgagactgaggaggtggagcatctttggaggatggccgaccagcaggcctgggaatggcagggtgcttttccccacgtccccaccactcccaggactcctttctggtccccacagctgatggagagcctgggaacattttttccaggtctcttcctacagccagaccatcttccaggaaagagctaaggaagtggaagaatggtggggtcaaagtacagatgattccctcttttatggagggactgagagctcaataacaccaaatgaggaggttagaaatgtttaggaaaa

SEQ ID NO: 128291 - DNA, 394 bp, Homo sapiens
ggaggaggcagacatttacagtaaacagtgtaatcacacgtcatcaaaggaagggacacacaaagggctgggtggggagcatctcctcctctttgggagaaactgacctggagacctaaggttgagctgaattttggagaatcagtcagagttggtcaagaggacaaactgggatgggtcaaggaaaatggagaagcttgagagctgtggcagctccgtgaaatggcaagtatggccagaggatggcatctccagggtgccggagatggccatggagaggcaccgaggccaggccatgccgggcctctgctgcctctgctgtcaccaaggtcaaccacaacctagtgcccaagccagtggcattttccagcctacttttactcatcccttcttt

SEQ ID NO: 128292 - DNA, 851 bp, Homo sapiens
caaataatgcttcaatgctgtttcttctttaaaaacaaagaattcagatatacacatggcaaaaagatcagagaaaaagtatcaattttggtcctcccaacttttgacagtgtttttattaaattccatttagtaagtgactatggcaaaggaagtttattctctactttttccttcaaagtagtagtgctatcatctacttacttccttaccattcattacaggctctaatctatcacaatgctagcaaaaaactagacacaaccatatgtccatcaatagggaaccggttgtataaatatggtacatccataatagtggaatatgtagccattaaaaagaattgagggagatctagatgaactgccctggaaaatggttcatgacatacgtgaaaaaagcaaattagtcaccagtatgtgtaacttttgtttttgttactaagcaaaaattgaaattatatgcatatgtatatagagatgtccatttaatcaatcaagtcaggaaggatacaaacaggctgtaagcagatgtggggaactttcacttctgacattatacaaaaaagtttaatagagattaaagatgactttttacctatttaatctttcaaattaaaaaaaaattcccactgcaacttctaggttctactacccaggcttctaagtaaaacttaagtgaattccgttaacagctatcacatacatgtacacatgctgctaaaaacctcgtataaagaatccaaaaacgttgcctcagattcaaatatttatcacaaatttcatgaataactctttgcaatttaagaaatagagagtgcctcgtgccgaatcctgcagcccgggggatcc

SEQ ID NO: 128293 - DNA, 662 bp, Homo sapiens
aaacacagagaaaaattgagaaaatttaaaaatagcctagtgagaagatattgataaacttgtaaccagaccaatttaagaaaaaaagtcaaaacacaaataccaatatttgaaaatgtaggagggcaaatcattacagattctatgaatactaaaatgataataaggaaaaattatttaaaaggggcatgtcagccaggcatggtggcttacccctgtaatcccagcactttggcaggccgaggtgggaggattgctagagctcaggcattcgagaccagcctgggcaacatgttgaaaccttgtctacacaaaaagtacaaaaattagctgggtgtggtgttgcacacttgtagtcccagtcacttgggaggctgaggcgagaggatcacttgagcccaggaggttgaggctgcagtgagccatgtttgtaccactgccctccagcctgggtgacaaagtaagaccctatgtaaaaaaaaaaaatgtatgccaacatttttcaataacttaaatgaaatggaaaaattccttgaaagacacgaactacaaaaactcagtgaacaagtaaataacctgaatagccctgtatcaagtaaattgaatttgtagttaaaagccttccaacagagaaaacttcaggtacctatagcttcatatga

SEQ ID NO: 128294 - DNA, 264 bp, Homo sapiens
ttccacagcaggtcttaggttagtcaaatagagtttactataattcaagtgcccccccaaaaaatactttagcaagagctacttatataaaaaatggtattgcccatgcaagtccaatgaaacaagtttcctgtttgaaatatcaaatttaattaccaaaatctccatttttttcctctgaacactaaaaggtttcatgtaatgaggttcaatttaaagaactctcttcactacatgatttcatctcacttaaaaaccatagcg

SEQ ID NO: 128295 - DNA, 441 bp, Homo sapiens
tcttaaagcatcacctaatgaggaaaggcttcccgacctccccaatcagatcaatactccctcttttatgctttctttgtgctatcatttataatacctgtgaagcattcactgctgtaatctgatgtttacttgtatgattatttaactaatacttgattttttaaaagatatgtcacagggtgatgctgactgacagtaagagacaaaggacgcaagttcctttaatgaaatttaacttagtaagagtttaaccaaggtcaggcatagtggctcacacctgtaatcccagcactttgggaggccaaggcaggtggatcacttgaggccaggagtgtgagaccagcctgaccaacacagcgaaaccccatctctactaaaagtgcaaaaattacccaggtgtagtggtaaatgcctgtaatcccagttactcaggaggca

SEQ ID NO: 128296 - DNA, 312 bp, Homo sapiens
ggacggggcaccacgacagacaggtccatcctgcagaagaagaaaggccaggaaagccttttagatgacaacagccacttgcagaccatccccagcgacctcaccagcttcccagcccaggtggacctccccagaagcaatggggaaatggatgggaatgaccttatgcaggcatccaaagggctgagcgacttagaaattgggatgtatgctttgttgggagtcttctgtttggccattttggtcttcttgataaactgtgtgacctttgcattaaaatacagacacaaacaggttcccttcgaggagcag

SEQ ID NO: 128297 - DNA, 552 bp, Homo sapiens
gaccaaggcccgtactttccacagggatagagagaactgtgcaaataaacaccattggtcctctcggtggctaagatttgacaaccaaaattgccaaaccggtagttaagttagacctttatgatgggattttaatgtctggttaaaccccactcattcagttgtaattataaaggggaggtcagtctcaatgagagaaaatgttcaatgaagcgtagcatactcctggtatcagcagatgctaaaacagctaaacagaggcacgtggaagacgaaaggctctgtgcaggaaaggactccgccattcactcagccactgcagatggatacacggctgcttctgagagtggcatgcccaatcctgaacactgaaagtgtttgttccagccgggcgaggtggctcacgcctgtaatcccagccctgtttaaatatctagaaaagtatgtaccaaactctgaacagtggctactctggggaggagagaaagggaatgtcactgctggccataggagactttatcttttttttttttttttttttgagatggagtc

SEQ ID NO: 128298 - DNA, 726 bp, Homo sapiens
tgcaaataggataaatttcacgatccttttctaaagcgtgtctccaaatgttagtaggcagttctaaaaataattggtttcacttatggctttaaaagaaaatcctcaaaaaggaataacttatttcaggaatgtaatgtgggctctttaaaataagtaacacaccaatgttagtttctagtattgacaccacaagttttaagtggatcccaagatgtaattgctcttactgcttgtgcttaagttgttcgagccattgtctaaacacctatcattgtctaaatggcaattattttgccattgtaaaaaaacactatcagcttggccttatagtggggtcctaggatatctggaaagcatccaattgaattaatatagtgctgaaggaaagcctggatgcactttttgctgttgtctggtgtcttcagtcaaatcagatatctggaaagcatccaattgaattaatatagtgctgaaggaaagcctggatgcactttttgctgttgtctggtgtcttcagtcaaatcatcatgctttttattaacaaacaacttctttaaaaatgtatactatttctgattactgtttcagagttaaaggggaacagtacagcttgaggttgcacatcagggtagggtagttatgacattctttattatgttattttattttaaactaagttaacacattggtgcgtgtcctgaaactgacaactttgtcactttt

SEQ ID NO: 128299 - DNA, 334 bp, Homo sapiens
gtggcagtgagctgagatcgtcccactgcactccagcctgggcaacaaagtgagactccatctcaaaataaataaataaataaataaaaataaatacaccaatatgacctgtgtctgaagatcagttttgtatttttcctaaaagcctcactgttaaagctcccagggctgggcgtggtggctcacccctgtaatcccagcactttgggaggccgaggtgggtggatcatctgaggtcgggagtttgagaccagactgaccaacatggagaaaccccatctctaataaaaatgtaaaattagccgggagtggtggcgcgtgcctgtcatcccag

SEQ ID NO: 128300 - DNA, 276 bp, Homo sapiens
gactcccttactgctgatcatgtattagctgctgacagatgaaaattatatttacggctgattgtaaggtcagatttttgaccataaactttgaggaagagtaaggttctaaacatctgtacttcataaagtataaaatgtttggtacacagcctggccaacatggtgaaaccctgtctctactaaaaatataaaaaattagctgggtgtggtggcggatgcctataattccagctactcgggagggggaggtgggagaatcacttgaacccgaga

SEQ ID NO: 128301 - DNA, 516 bp, Homo sapiens
ttcttttccacagggtggtcaaagataccctgactccaatatttaggtacctggctattactttgtgtttcattaaaaaaattgtcatttttttgctgagtgcagtggatcccttgaggctgggagttccaggccagtctggtcaacaaagtgagaccccgtgtctatgaaaaataaaaagaaataaaaataaaaattgtcgtccttcatgctcactgagaccttttgactctggtaaaacttctcagtgagttgttaaatcagggcttctcgaactttaatgcacataccaaactcctggggaccctgttaaaatgaagattatgattcaatggatttgaaaatgggccaaactaatgtatttctaacaagctccccgatgatgccagtactgctggtccatggatcatactttgcttagtgaggatgccctgcagaagctggagggaccactggaagaactggtcaggcatccatcaagatgacctcactgactttccctgtggatatcaaata

SEQ ID NO: 128302 - DNA, 494 bp, Homo sapiens
ccaactcctccatactccacactagacaacccaggatccccaaaggacagaacagactacaggagaagcaaagacagtgctgggtatcaagttctcagaataggaatttaattttggaataagactatactaaaaatttctagtgtatagcttacttactcaattcttagaatgctaaagtgacatttttatttaattatatggcaaaggctttctcagaagcataattttagggacaaactccctgcttccatgtgaacagatggtgtctgccttccctaagtacttggtaaagcaggagtcatcagacatgctaatattggtccgagctgtgctactaaacagttacactgatcatggccagtcacagcaaaaccagccctcagctcctcaacttcaaaatgacttctgacggcccttctcattaacctggatgtttagagcttgctgactggtctaggtgaactgacagtgcccacaaatggcaagctaca

SEQ ID NO: 128303 - DNA, 350 bp, Homo sapiens
aggaaggcctctcaggaggggacatttgagctgatgccaaaaaagggggaaaaggagccagctgtgaagacttcgcagcggagatgaagagctggccccagcaacactaaggtcccaagcccagcaagacccagacttatttcaggaacagaaaaaggaggtccttgctgctggggcacaaggagtggtcggagctgagatgaagctggagacgaggtggacggggccttggcaggcagtgtgctggggaatttgcggtctcttctagattggagggggtttgggttgtttgttttgttttagcaaaagatgggatcttgctgtgttgcccaggctggtctcggaactcc

SEQ ID NO: 128304 - DNA, 364 bp, Homo sapiens
gctgctgggaggctgtccagatgagcccgatagaggctgatgtgggaatcgcatagacaaggggatgagactagacttgggttcaatcccagctccagcatcagaagctggaagagtgggggctactcctttgtaaaacgcagttggtgacaccgatctcccagggttgtttcgataatgaaaagaagcagtaagtattcagcaaatggtagctgctattatcctcaattctccccaagttctgccttgcaaacaggaagggcttctaggggagcctctggcctggcctgagggcaccttggagactgccccactccaaccagtccgtaggaattggcgaacagcccaggcctgcagggctcct

SEQ ID NO: 128305 - DNA, 400 bp, Homo sapiens
acatttttttctgtagcttaccttattttaagaatgcagtatgtaacatacaacatggatgtcgatgtgtttttaatcaaatgtttatgttataggtaaggcttatagtcaacatattgaagagacatctgcacccccatatttactgcagtactattcacaatagccaagatagggagtcaacccaggtgtccaacaacagatgaattggtaaagaaaatgtggtatatatacacaataaaatactactcagccataaaaaggacaaaatcctgtcatttgcaataacatggatggaatggaggacattgtgctaagtgaaataaaccagataacttgaacagaaagttaaacaccgcatattctcactcagacttaacccttactgtctctcttccat

SEQ ID NO: 128306 - DNA, 792 bp, Homo sapiens
acttaatctatatccatatattgtactccaccaatatttatcagtggacaataaagaagttttgaatgcatgaatgcaacttaagaggcaccacacttggttattttgcaatgccagaataacggtgggtattcacaaattgaatagataatccagattatgtttcctccaatttaagtttttctgggtttttttttcccccttcctagaatcaattttatcattttacctatgtacaataatatacttctggaaaatgctagaattttcaccatgtaacagaatttgagcatgacagtaatgtaaaaatattcagaagtctcgaactataggtttgagttttcaaagtaaatcaaaatacagctgttttcattttactagattgtggaaacctatggatgttattgtaaaatgcatatgcattacactgactttcttaaaatgttttgaattaataaagaattcaacaatgtatccttagaaagttactgtttcctcattggtatataacactataggaataaaaggtacacttctatgtgttacttaaattgcttatgcacttgggggaaaataaaattctggctagattctttacattgttctataaggttttaattattaaaatgtttcaccttttataaataataaaatatattgttgaaatgacttatgttctgagaactcaactgagagatataccatgttgagttcaagtgattctcaccatttccatggttaagataaattcaaagttaagttcagacttgggaaacaattgttctaatagag

SEQ ID NO: 128307 - DNA, 143 bp, Homo sapiens
agagggggctttgggtgttgctagaagtgtaggatctggacctatccttaactcagagcactctccctgggcctcctgtgtagctcccctcacaaggctgtcacagctggggtgctatcccactgtgtagtaagtaccaatgt

SEQ ID NO: 128308 - DNA, 774 bp, Homo sapiens
gtaggaagagtcaaggatgacacgcaagttttctgcctgagtttctgtgaagggcgccatgaactgaggtgctaagcctgcaggaggagcaagtttgaaccgggggtggagtttgagacttttctttcagacatatgactgattcgacttctaagaagtcacatctggcaccatctctgcagagactgttgtctgcatgcaggagtgctggctctgatctggccacatcctgcctttttcattcaaccttgtaacagactttcatgtgattagtaaaacgaatgggctttaagtcacatatccttagtgcttggaaacagtatctctctctttttttgtttttttgagacggagtctcgctctgttgcccaggctggagtgcagtggcgcggtcttagctcactgcaagctccgccttccgggttcacgccattctcctgcctcagcctcccaagtagctgggactacaggcgcccaccaccatgcccggctaattttttgtatttttagtagagacagggtttcaccatgttagccaggatggtcttgatctcctgacctcgtgatccacctacctcggcctcccaaagtggggtgaggggggtgtggagagccccgggacccggccgaaaagtttttttaataattaaaaaaagcggggatcggggtaagctgaaaccagatttgggagtaaggggaatcaccggaggagttagaaagctggaatgtgaaccctttgtaataaaaaaaaaaaatttggggcaaataaaaatg

SEQ ID NO: 128309 - DNA, 502 bp, Homo sapiens
gattgacttctcttttctaactgaataccctttatttctttctcttgcctgattatcctggccagaacttccaacactctgttgaataggagtggtgagagagggtatccttgtcttgtgctggttttccatgggaatgcttccagtttttgcccattcagtgtgatattcgctgtgggtttgtcgtaaatagctcttattattttgagatacatactgtcaatttttgtttagacttatttctttgtggataagaccttgctgctgcggtctgtgaaccagacatttataataaatcagaaagcagctaccttcacatatatccaattattgagttctctcaaagagggatttttttctagtattttaaagctttgtttttcatagatcttatcttgttttctttcagaggtttcattccattcccctattgttaaattcttccagattgctatttttgaaatctgcctcagaagaaagctattatggagtctcatatttg

SEQ ID NO: 128310 - DNA, 578 bp, Homo sapiens
gttggctgatgacaacattcagctccacaggcaactttttttttaattttccataggaaaagaagaggggatgctatttctcagtgctcccattgggtcatgacaattaacagtcacagccgtggccatttattgataccatggataccagctactagtcagttattttgggtttttttcctttaaaaatacctgtctaataagaactcatacaggtgaccactataataaaaattcttccatttctttttagattcactatcattggaagtgctctatctttccctcatcctaagaagtgggaattagctagacttctataacaggtgaaagagaggtttgctttgacttagggaaagaaagagaaggtgagagccctaaggccgaatgctgggggcatgtttatttaaagaaaagagatgtctgctctcccgccttgcagccaggaactccaacgagccctgacccagtctaacttgaggggagggttagcaccctaaagaatatcttcacccaagggccaacagagaaatcaccctccgagtgtccaatcactgactgtctccaggcaactattg

SEQ ID NO: 128311 - DNA, 471 bp, Homo sapiens
cgagcagtggggggcacgccagataatcccagacactgatgggaggcacaggagatggatcaccttaggtcaggagttcgagaccagcctggccaacatgacaaaaccccatctctactaaaaatacacaaattagctgggcgtggtggtgcatgcctataatcccagctactcgggaggctgaggcaggagaatctcttgaacccaggaggtggaggttgcagtgagcctagatcgcgccactgcactccagcctgggcaacagagtgagactgcatctaataaaaacaacaacaaaaaaaaacttcaaactatagaatgattagctaaaaactgagtatggtagaaaaggagccaaaatcagaacaaactacaaagaaatgctttatgtttctttaaaagtaagaatggtaccatttttgaaaggtttaggtctctgcttctgtctattcacatgtctttttctttagg

SEQ ID NO: 128312 - DNA, 590 bp, Homo sapiens
tatttgttactctataaatggaaactaagatttttataggggatatatttaaaaggattttattattaactcacttaattttgtgagtgtcaaacaccaacttacgccagttaaaaaattaaggatgctttctcagagttatatgcttatctttctccttccccagatcattccgttgcctcttaagaagttttactttctcagtaaatgaggcctatcctccagaactctggaaatcactgttgtgtgactatttactgctatattagctaaacagaaactcaggaaggtgtaaaagagtagggatggttcagcactttgggaggccgaggcgggcagatcacaaggtcaagagattgagaccatcctggccaacgtggtgaaaccccgtctctactgaaaatacaaaaattagctgggcatggtggcgcacacctgtaatcccagctattcgggaggctgaggcaggagaactgcttgaacctgggaggcagtgagctgagaactagttgcagtgagccgagattgtgccactgcactccagcctggcgacagagcgagactctgtctcaaaaaaaaaaaaaaaaaat

SEQ ID NO: 128313 - DNA, 309 bp, Homo sapiens
ttcatatctgtacctctgcacaagcagctatctcttcctagaacattatccccatttacctgcacctggctaattcctattcatccttcaaaactacacgtgtaccacttcctccataaaatcttcttgtaccacaaacctcattacaggttcatgcctctaatcccagcactttgggaggccaagatgggcagatcacttgaggccaggagttcgagacacgcctggccaacatggtgaaaccccatctctactaaaaatacaaaaattagctaggcttggtggcacacgcctgtaatcccagctact

SEQ ID NO: 128314 - DNA, 694 bp, Homo sapiens
catttgtgggtacatacaataaactgttcttttctctttgagttttataaatcatgtttgatgattaaaacaaaaattataataccatctgatactcaattcaatgttattgaaaaatgggaaggacaagagatttaaatgggagtgaagtttcaaactagttaaatgttgataatgtagcctgtaacaagtcacatattaggttttagtactcagggaaaccacagtgaaaactatacaaagaagtacttcccaaaacactgtatatcaaaatgaaatcctaaaaaatgtttaggttacacacaggaaggcaagaaaagagaaacagaggaatgagaaccagaggaatcaaatagaaaacaagtaatgaaatggtatagtgaaatgctaacttatcaatagttaccttgaaggtaaatcatctaaacaccatcaaaagacagagataaacaaagtgcataatagaacataatctaactgtatgctgcctacaagaaactcacttcaaattctatgattagttaagttgaaagtaaaagggtggaaaaacatatatcatacaaatattaattttaaaaaaaacaggagtgcttatactagtatctgataaaagtggactttggaacaaagaaaatatctggaaacaagaaggaacattatataatgataaaagaatggatccacctggaagaca

SEQ ID NO: 128315 - DNA, 576 bp, Homo sapiens
aggagagaatgggatgatatatttaaaatactagaagaaaaaaagctgctagcctagaatactataccagcaaatctttgcttcagaaatgaaggagaaatagtctttcccagatcagcaaaagttgagggaactcattaccactggaccagacttacaagaaatgcttgagtatttctattggaaaaaaaagttttcatgataattgctaccataaaaaaacatgaagtataaatctcactgctggagataaatgcattatccaaattcataatgcttcattactgcaatggtgatatgtaatgtttcaaacctctagtatgaaggttaaaggccaaaacagctgggtgctgtggcatgtgcttgtagtcccagttatttaggaggctgaaatggaaggctcatttgagcccaggggtttgagtccaacctgggcaacataatgagaccccatttaaaaaataataataattaaaaaaatgcagctctgtgggatgccaaaaagtgaaaattgtaataatgattatagcaatgataagttgttaaggaataaacaatatataaagatgtatatta

SEQ ID NO: 128316 - DNA, 744 bp, Homo sapiens
caaagtgataagagttgagataagtcacaaatataacctcacaggagttcatattagtgtagcaaaagtgtgggtattattaagtaggttcttccgtacaccctactttttgttcaaggacatttctgtgggttctgatcaatggtatttagtggtatttaatatttgtatgccccacaaccgccctctagtaccctacatatttattactataaactaacctttgatctctgatactgttgaatagtttagttatatattcaaactgtgtggcaagacttgcagtggagaatataggaaatggggtttggcctgaggagaagggcgtaggaaaggcttggtgctgtgccttgttctttagattttacatccctttaattgctttcctcctatgaccattgctttgccatgactgtctaaaactgtggtatgatgtatgagttatgaggtgttcatttcagatgttatgcactgagctctaattaacttgacagaagccagattgatttttatgcagagacttttagtatagtagatttggagctagaagacctaggcttgaaccttggctgtttctcttattatttgtgtcacaaaatgtaggttttcttaatctgttttcttattagtaaagagggaatagtcattactgttgtaggttgttgtgaggttgttgcaataaggcttaaatgagatgccaagaaagcattttataaaattctaaagagctatttaaatgtccag

SEQ ID NO: 128317 - DNA, 352 bp, Homo sapiens
tcgggcactgtgctgtgtatcagtagtcccggctacttgggaagctgaggcacaaaaatcgcttgaacttgggaggcagaggttgcagtgacccgagattgtgccgctgcactccagcctgcacgacacagtgaaattctgtctcaaagaacaaaacaaaaccaaaagaattctaaatctgctctgaatagtagaagacaatgggagacatttatctttggtagcaacatattccaaagacttaagagtttaaagaaatcatcattttcctatcgcttccttcctttctctctcaatcctaaaatactctctgggcaatcaatttcggaattctttcaaggaaaggaaacct

SEQ ID NO: 128318 - DNA, 773 bp, Homo sapiens
ctttgaataatatgcattcctagttttcagccaagtcggggatgttagtgattgtaccagcccaaagcacttggataatcagggcccttcttccttttataatcaatcatcaacatcagaaaaagctacttgttttatttatattcccttccaaatccgctctggaacatgcagtaactgcaccaaacttattttagtaacaaatatcattggcaactttggaatatatttgatattccattaggatttttctaaaaggggaaataaactatatatatatatgtatcttacccccaattcttccaacagaatttctataggaagccatggatgatggcataagtttgccacatattacatgattttaaataatcctcaaaatacccaaggaactcttaaagagttttggtatgagtatactactttggtttaattttagcttcatggatgttctgcatggaaggatttttgttttccacattttcccattgctagcagagtgaaatccaagagaccaaacatttgcaagcattgtatttgagcacttttgtaaaaaacaaagaaaaagaaaaaaaagaaaatatatataatactaaaaaaaagtatctagaaggctacctcagaatgagactctctaacctacatcagaaccagagaagaatgtgcactatgtgggtctgttatcattattttcttttagtttgtatctttttggagatttatccaagtgccagattactcagtgctatacattgcttaagttaaacaaaggg

SEQ ID NO: 128319 - DNA, 352 bp, Homo sapiens
ttcacaagccaagctggaggcctagttaagacgacggctcagaggtgcctgagaagagcttagtcagggagaatcttggcccagctgcactgtctactccatgattgcaccatgcctttcatgatggcaccatcttctccatgagctgcaccatcatctccatgactgcactatgccttccatgatggcattatcttctccatgagctactccgtcatctccatgactgccccatgctttccatgatggcaccatcctctctgtgagctgcaccatctcctccatgagctgcactgtctctttcatgaactgtcttggtgagatcctagacaaggcatgatcatcactcagt

SEQ ID NO: 128320 - DNA, 160 bp, Homo sapiens
tcctagaattggaatgtccccattgtgctcccagggataatatcactttataaaatctaatatcagcacttaagatatttttcagacgctgcactcaatggatcagctgacaccacccaaaccagtaatctaacccaaccagttctgccatcacacccag

SEQ ID NO: 128321 - DNA, 336 bp, Homo sapiens
gctggggctcatcggcaggagaatagaggcctcctatccatgacagatgtggaagtagaattctgatgagtttttgttttgtttcatcttaataacgagaaactgtggggctagaaagctagagaaatatgttttatcttgtatcagtaccaactaaaagaaagccaattctgggggtggtgggagggtgtcaccagtggagaaaagggctaatttaggctaattctaggataatactcccagtagggtgttaagacaatactgcaggcccatgtctgatgatccagtcagaaagggagctcagaccaggatgcttggttgccagtaatagagact

SEQ ID NO: 128322 - DNA, 536 bp, Homo sapiens
ctgggtccagagcccaagcatattagtctgttctcacactgttataaagaaatacctgagactaggcaatttataaagaaaagggatttaattggctcacagttctgcagactgtacaggaagcatggtgccagcatctgcttggcttctggagagtcctcaggaagcctacagacatggtggaaggcaaagggcaagcagacacctcacatggccagagcaggaggaagaaggagggggaaatgccatacactgttaaacaaccagacctcatgagaactcactcactatacagtaccaaatgctaaaccatgagaaaccagccctgtgatccaatcaccacccaccaggccccacctccaatattggggattacaattgagcatgagatttgggtggggacatagatccaaaccatatcaccaagtcctctggatttccttccaatgttcctattctgtggccagagtaaatggctcaagtgaaaattcaactaggctctaatccaaggaccttgggttggtcacttacctacc

SEQ ID NO: 128323 - DNA, 128 bp, Homo sapiens
gctactacaatacggatttttaatttcacctttctgcgtctagtaatttttgcatattttagtaactgtggcattctattacatacaacagatggttacaggcattgtcttcatagagagcaaaataa

SEQ ID NO: 128324 - DNA, 321 bp, Homo sapiens
caacaaaaaggatataacaaattggtaatgcttgcttcttgggagggaatggctagaagataatgaaaggaaggaatacttttcaatgtatatactgttttgtacctcttgaattttgtaccaagtgttcatattatctaatcaaatagaattaatatatcaaatatatatgcaaacaaactaaaatctcactgtaactataccaacctttctactgataccttttaaatgatagcacagcaggttgccatcatttaggtagggtatgtggctaatctatttgtgacaaaagcagaaattcactatcctagctgcccaaca

SEQ ID NO: 128325 - DNA, 280 bp, Homo sapiens
gtatgacatgagttgcttgagattggaggatctggctctgggggggctccgtcagtcctgagcatgcagagggattgggtagctccacatatcagtaagacacacgcagcctgtgccgcagccaacaggttgcgtggctccaatagagcttgtccaacaagtatcttctaatattgataaaaatgatcgataacatgttttgatcatataattttgtttgataatcttgctagtgtgtattgataatgacatagctagcattttaattagttttatttac

SEQ ID NO: 128326 - DNA, 336 bp, Homo sapiens
gcgccacctgccccacgcctgcctagggcacacgaagcaagttggcgttcggcagccctgaagcggtaccccagcgcgagcagatttctaaaacaaacacaacagagatttttatcaaaggcaaagctgcaaaacccactggggctgagcgctgagctggtccggacacctgggtccggttcctggaccaggacagtcaacctctgcattctgaccttgggcaagtctctgtctttccctccgcctcagtttccctgcccagagcagggcaacagtgggaagcccgattgttcctgaaatacttccaccaaatgcttcactcctgggaattcccgt

SEQ ID NO: 128327 - DNA, 658 bp, Homo sapiens
agttcgagaccagcttagccaacatgattaaaccccgtctccactaaaaatacaaaaattagatgggtatggtggtgggcacctgtggtgccagctacttgggaggctgaggcaccagaattgcttgaacccgggaggcagaagttgcagtgagccgagattgtgccactgcactcctgcctgggcaatagagagagactccatctcaaaaaaataataacaataaaaaataaaaatttaaaaaatacagtaaatggaaaggtcttttttattgcttccgttttccaaataaaactgaagctcaggaagatttagatactttcccaagtttatactgttggctacacagccttacaacttggggcattatattgcagactgctatacaatgtttaacacttgttctcatagttattcttgattctccagctagttttaagttgcttagagcaaaaacaatgtttttcatatctttatcctctctacatttggaacacaattaatggatttgagtatatcaaaatgaaatgaaagattcctgttcaactgagggcaccatagacaaaatgatagaaggagatataaatgtctaaaactgacatgtaactcataacacacacacatacacacaccctgcaaatcaatcagaaaaagaaaa

SEQ ID NO: 128328 - DNA, 234 bp, Homo sapiens
cttgtcttgttggaggcagcagaggaggcccacacaggaaactcaagcaaattttcagtttctcaggtaacttcctagtgacctagatgagtcaatagatgtctttgtgtctcatttgagttctgcaaaatgggctaataatattctagacaagcttgcatctaaattaccaagttcctgttggaagtctttacatgcatcagaaagaggtaccataaaacacatcacaaatct

SEQ ID NO: 128329 - DNA, 661 bp, Homo sapiens
gtagccccatactggacgctgcccaagtgtgcatacctagagggacagatgagaggaccgtggtgcagtcacaggatggaacacagcacggtgatgagtaatgcactgtgcacagtgacatcagtgactgtcatgtcattacattacatggagcgaaggaagccaggcacaaggggagacacactgtgtgatgctgtttccatgaagtccaggaacaggcaacgctaattgtcttagctccctattgctgccataacagaggacgacaatctcagtggcttaagcaacagaagagaattctcttactgaaagccacctgtctaaaatgcagcagcaggtcctgcttttcctgcaggttacagggggaagtctgtttcctcatcttttcagcttttaggagctgccttgccccactccgacctctccatcgtcaagtgtcctctcactaggactgtcccctgcctctctcttataagggtccctgagattacacttcatgctcacccaggcaacccaggatcatctctgcatctcgaactccttaacttcatcatacctgcaaagtctgtaaaagctctggaggttagggcgtgggcatctcaggggagccattgtcttcctgccccaggaacagatggtgatgcggtttaacttggggggt

SEQ ID NO: 128330 - DNA, 316 bp, Homo sapiens
ccaaatacatttagatagattcttccaaatacagaggaaaaatataaaaagaaaaaatacataatacgaaggatcaatccaagaggtccatttccttgattttcagttcttttcactttcttttttcagtggttttttccccacagtttctagtcatctagttatttttaatggatgcattgttctcatgacatgaatttctttgaggataacacttataacttttaaatatttatgtcccattcccggaaatagctctgcttctttcaggtcagttgtttattttcatcctttctgtctgttgtgcttttacttc

SEQ ID NO: 128331 - DNA, 454 bp, Homo sapiens
aaggtgctaggaacatatcactattgtgtcatcaagcagaaatctgtgactgagtatgagatctcatatagtcggattgcctatgttctatgacttagcaaagtgacgctctatttgcaaccgtttatgattgacaccacccggagaggttaaggatgacagcaacaacaaaggcccaaggaaagatacaatctgaagaatatggtagacaatgaatccttaaatctctatcaatggttctgtaattttatctaaatttggaaatatttgttaagagctgataaaatttcatggtacatttttggtatatgattagatgcagtgcttatacgcatccaatgtttacgtatagatgcctgattgaagaacatcttcggaggactattgtcattttgcaaggcaattttaatggtgttgaattaatcagagctagattttcactgttgtatcagaa

SEQ ID NO: 128332 - DNA, 341 bp, Homo sapiens
gacctcccctgctccagcttatcaggagtagataacataacaaacataacaaaatggagaagaaaatggctctgtaaggctttagtaggcttcatggggctcccttttctgttctagtaagtactcatgtctttgtactttaaataaatgtggaaagacaagtgagccaaacattagtaatcctattaaaaaatagggttattgcaagactatgcaatcatgtttatttttatcttccctcttaccccatttcttaaccaagaccttattaggtgtgccctttcattagccaacttcgtgacagtctcagcctatcatctgaaaacatgctcttaacgtat

SEQ ID NO: 128333 - DNA, 399 bp, Homo sapiens
ctgagggcgctctagagtatacactctccctactgtatactaacaacccaaatccaactacagatataacggttatacaccatgactagttaagctatttgccaggcatgcaaggttaaaccgttcaacatccgaaactcaaacaatgtaagacaacatatgaaaagaataaaggacaaaaaccacatgatcaccttaacagatgcagaaagaacatttggtaatcttcaccacctttcctgattgaaaaaaaaaaaaaattcaataaactagggaacatcctcaacctgattaatggtatctacaaaaaaaaaaaacaaaaaaaaaaaaacccagagctaacatcacacttaatggtaaaagactgaaatcttccccctccctacctcagatcacaaa

SEQ ID NO: 128334 - DNA, 166 bp, Homo sapiens
gaccacaggcagagccatcccccaggacctcatgcccttttacctccttgaatcccccatctccaaacaaccactcacctgtctgctgtcactatagatgagcttgaatgttctagagtttacataaatgaaacaatagagtatgtgctccttttttgatctggtt

SEQ ID NO: 128335 - DNA, 376 bp, Homo sapiens
tgagtagctgggattacaggcacccaccaccacgcccagctgttttttgtatttttagtagagacggggtttcaccatgttggccagcctggtctcgaactcctggcctctggtgatccacccgcctctgcttcccaaagtgctgggattacaggcgcgagccactgtgcacggccatgaatggtttttaggggattcaatgggcttggacagcatctgttagccctggtgaccacctgcccaagtgtgttggcagacacaggtctttcttcctacgatgacctcagtgcatggaaactcagggaggggactggccgtcactgttcctttctccagcagctatgggctttaggcagattcgggggcttcagggagc

SEQ ID NO: 128336 - DNA, 384 bp, Homo sapiens
aaggtaccatatttctcttaggtcaatatgcattttaaaattctttaaaatgtaaaacttacaatattacacaaagtgtgtaaaagaaggagaaagacctattatcttaccttacagtgtcacttcaatgtttcacttttggtagtttttttccatttatgttacaacaattattgtcttcctttttaattacaaagtaatgcacgctcaatgcagaaaatatggaagcacagaaacagacaaaaattatccttagtctcactccacaaggataatataccaggtactgctcttaggcatcgaatggtcaacccaatactggtcaagcttcaaggcaggaggggacggagtatcagtgactctggattactctgccttagcaaa

SEQ ID NO: 128337 - DNA, 442 bp, Homo sapiens
ccatcctcctttactgctaggccttgtcagcctccttgactgattcctctccatttctataccacaaagtgttgcagtctttagggaagactccttggacttctaatttttaaaccatcttacttcagtctcatggctttaaatgctatctgtacactaatgactctcaaatgtaaagtctgatgttaagtcagacattctccacttggatatttaagacattttaaacttagtatatccgaaatcattctcctcatgtctgttattcacaacaaataaacagctgctcctttcctcagtcattaaatggcaatttggcagtttaggccagaaaccttgaagtcatttgcacagcttgggttctctggaaagcagagtgagataaagattagcaagctatacttttattaaagagtgctcttagcataaacaactccagaaa

SEQ ID NO: 128338 - DNA, 535 bp, Homo sapiens
acaggggggaatagagatcatgaggaaaggtatacaaaatatactggttccaccttcatattatttataacgaattaataaaaatattatcaaacaacttaaccatataacacagtacatatgaggtacatgagtatatagagtttggttacatagagaagtaagtgtggtttggatttaattatatgcaaaatttcaagtgaaaaagatgtgaagtcattttgaaaagaaaggaaataaggttaattttcaaaaaggtaaaaattttgaaatcagaattggttattgagttttatttggattgatatgtaaaaatggaagagcacaggtgagtgcaaacagaacatctttaatgtgacacagaagacaagagaagtaaatacaattccaatatgtaaaacagatgcctgtgactgggaggtggaaggaaaaggaaagtggactctcttgcatctgggcttttccaaggtaaataagcccatcgtggaaacacagaaacgtcatcacatgtacaacaatccctgtgaaatgagta

SEQ ID NO: 128339 - DNA, 391 bp, Homo sapiens
ttataaaactcagatttcccctatatgcagaaggcctctcctatttcattttagagtctaattaaattgggccacaacctatttttattgaaagagttgtttttactcactgtgtccattcattgatctactcctcacctcctccaaggagaaatgaaggcaatatgtaacccatggggctgctatttggattaaaggagatgtaagtctcagtaggtcacagaattcttattgaattcatttgtttagtaaaaatttattgagcaactgtacgtggaaggtgctatgccagatgctctaacttaactagataaaatttagcctcttccttcctgcctcttccagtccaatgggacaaagaaggagaacaaaacacacataattaagaagc

SEQ ID NO: 128340 - DNA, 372 bp, Homo sapiens
ttagaggctgcagtgagctaggatcgcgccactgcactccagcctgcctgacagagttagaccccatctcctaaaacacacaaacacgctttagataacagtaactcatttagttccttgcaaatggacgccaaatgggtgaggaaactgaggcattaagagaataagaaacttttccaaggtcccacagctggagtgtggcagaggtgggatttgaacccagccactgtgcggccagaatcccgcttggaatcacgaccccacactgcctcttggtaaagtgtagctgatgatctaagggacctggaatcatccatgactcttttccagtcctgctcttacggaatctctgcacaccactaactcggcttc

SEQ ID NO: 128341 - DNA, 693 bp, Homo sapiens
ggaggctgaggtgagaggattacttgagcccaggagtttgaggctgcagtgagctacaactgcaccactgtaatccagccttgatgacagagcaagactgtctgaaagaaaaaaaaaaatacaaatttttaaagaaaaaaaataacactcaagccctgtttggcacatgaaacctgaaaaacaaaaatagaagatactacataattcattcatcttttgcctctgaattcagagacaggatctgtatcaaccagcaaattggtatcctcctcctgcctgcattcttataataaccataagaagtaagtacgtaatataaaacaagtgggcaggaagtgtgtatgtgtacttggcttaagtggagaaggtagccataatcaggggacacagaagctattaatgtattcattgccttcagatttggcatgggcagatccaaaaattaattattttttgtttcctttagtaaacaatgcacagttctgtggatttttacttttggaccaatcagcattacttacaagtacttactagtaatgttattacttactaataagtgaattacaaaggaccactaaaatttgtttccacaaatgaaaatcagtgttttattagagtttgcttaggattctacttataagatgcctggtccctgtacaaggtttgtaattttgcaagaatgcacaaaagtgt

SEQ ID NO: 128342 - DNA, 151 bp, Homo sapiens
ttaatataaactccatgagggctaggactacttaatcttttcaacaaatatttagtgaatgcctccaaagtactagggagtgttttagataatggggatacaagacaggcaaatgctcatctacaaggagctcccattctgtgttctagtg

SEQ ID NO: 128343 - DNA, 823 bp, Homo sapiens
tgggcaacaggcaatatagaactgtgatctcagataaaccaaaacaaattgaacgctaaaatcaccgcagctttctacctggcaatttccagacagctgcacacacaaaaaaatgggaatcaatatatagtctgccattcttactgattccagaactctttaaaggattacaacaaaatctgtcacttaacaatatagtatcacatattcagcatccaattaaaatgagtggacatgagaagaagcaggaaaatgagaccataaccagtagaaacagagaagctgaagtatcagtagtataagcagactaggaattttaaaacacttcttataaatgttataaatgtgctcaaatattttaaaaataacatataatgagataaatggacagtatcaagaagaatcaaatggaacctccacatatgaaaaatatagtatctgaaattaaatgcagatttaaccctgagaagaaaaaaaaaaaaatcagtgaactagaagatacagccatagacataattcagaatgaaggaccaagatttaaaaacaaacttaaaaaattattagagtcttaggacccatgggacacatcaagcaatctaacatatgtgtaattggagtttcagagccaagagaggaagggaaaaagaaaaaagttagaaaaaaatagttgttgaaaatatgtgaaacatttttgttatggactaaatgtttatgtgccacctcttccaattcatacactgaagccctaacccccagtgtaactgtatttggagatagggcgtttatggaagcaattaagtttaaatgaggtcacaagggtggg

SEQ ID NO: 128344 - DNA, 380 bp, Homo sapiens
aatcctcctggctcagcctagctaggaccataggcacacaacaccatgcccagctaatgttttaaaattttttgtagagatggagtcttcctatgttgcttggtctgttgaacgcctagcctcaagtgatccttctgcttcagggattacaggcataagccaccatgcctggtcttgaaataaatcttaactgaactgtaatattcaaaccaggggttctcaaacgaggaaagggaaacatcatatactattagaagccaagtggacatattaaaatgggccagggtgaaaacaaagaagtattttgttcgaatgttttcatttacttttagtcatcatatttactttattttacaattaaaatgttattaaatgacaag

SEQ ID NO: 128345 - DNA, 915 bp, Homo sapiens
cttgcccagtgtcctggaagaatcaggtcacacgcaagcttgaggataaatgcaagattttattgagtggtggaggtggcagtgagatggatggggagctggaagaaggggatggaatgggaaggtgatcttcctctggagttgggccacccagcagctggactcctttctgactgcccccagccaaacttctcttggcattcagatgttcctcctcttctctttttctctgccacgttgttccaccatccatcatctggtctgctggcttgctggtctgtccctggagcctgggattcatggcttatatgggtgcaggacaggaggcatggcgggccaaaaggcaacttttggggcataaaaacaggaatgcctattctcatttagggccccaggatccaggcttgaggctggggcctttgcatggagatcatcctcttctatccagtatttcactgtgtcctgtccatatcattttttagtaatggaaccctcactctgaattttagcagagcacatagcccaaggtagagactaaatttcccaccctacccctacagcaaggtatgggcctgtaaattcgttctagccaatgggatatgagcaaaagtgatttgtgcaatttcaaagtcacttcttttttaaagcaaagtgttcctctttgcccacacatcctgaaacagcatgtttgacccattgctggaaaccacaaaggaaagatggacagagtcaacccctcagcctgggtttccggactcagcacgcacagctacctttctaccctggactactcacctacctctggactgttgtgtgataaatcacttttatcatatttaagctattttgtcttgggatctctgggttccagtactttaggtactaccccaactaatatactgatcttactagact

SEQ ID NO: 128346 - DNA, 438 bp, Homo sapiens
gtctagaggatcccgggatgagcatccttacatgcaatttacaacaataatttaggaaaacaaattctgaacggacttactagtatcttaagaacccaaaagttctctgaaatggcattactatcaaaatttcaccttttaaatttacatatacggtcacatccacagggtcaaggagagaacacatatatgagggtggtcctgtggattataatggagctgaaaaaatcctatcacctggtgatgccttgataactctgaccctgagtagacctaggctaatgtgcgtgttggtgtcctagtttttgtgttttttttttttttttttttttttgagacagagtcttgctctgtcacccaggctggagtgcattggcgctatctcggctcactgcaagctctgccacccgggttcacgccattctcctgcctcaacct

SEQ ID NO: 128347 - DNA, 303 bp, Homo sapiens
tgttgggattacaggtgtgagccaccgcgcccgaccctttgcttgcattttcactggcttgcaggatgagcttgtgagtgggcagccttattctttggcagaacagccattccctgttgtgcgtgagagagagggcagatacacgtagatagggaagtcaaggcagaatgtgtttccttttgatctgcagctcagtgacgttggccggcttcactgagttgtgttcttgtctctgtacctgcctggggacctgggaagggcccctctgctggtacttccattgtggggggaacatgcatccca

SEQ ID NO: 128348 - DNA, 266 bp, Homo sapiens
aactccacccttccccctactccttataccctggcaagcagcgatctatctatactactatacttttgtctttttgagaatgtcatataaatagaatcatatagtatttagccttttagactgataatttgcctatttttttctttgggttgtttgtttcttactcctgagttttgagagttctttatgttctgggtatctttttttctttttttttttttttttttttttatttttttttttggacaaaaaaaaaaaggggacac

SEQ ID NO: 128349 - DNA, 772 bp, Homo sapiens
gtaatactcatcatcatgaaatctaatttgtctgatattattatagccacttatacttactgtatacctgattattttttccatacctttatcttcaatttatctgtatatttgaattcaaagttcatctcttgagcctgaaagtaataagcaccttgaacccggatctttatatctaaatatgattctccagtaaaatttatcagggttctctggacaagtggctgattgattgtagagcagggataagaagagtatatgctgaacctgaatcatttttgtggtgccaaaaagtaaggaagtacacaaaaaaattgagaagatatcagaaatgcacaaaaactaacctgaagtgactctcaatgaccatatctgggacaatttgagtaaaaaaataagtaacaataatggattatatcttataagataatataaaacaaatatcaatgagtctatgatgatataaattagaatgtataaatgggaggaaggggaaaattctttgcttaagcagaataataattaattaatataaaaagaataatggaaatggtagaaatagaaagtcaacatttggcaagcaccacagtaataattgttgcaggcaagaatcatcaatggatgctaaagtttgtgagaaaaagtttgatgagaaatgggctatttacataacctcaaaggcttttcccacaagatactgttaattacaaaggggaaaatattgagaaacatggaagacagcaccttaaccaaatgattgaagttaatacca

SEQ ID NO: 128350 - DNA, 788 bp, Homo sapiens
gtcttgctctgttacccaggctggagtgcagtggcgcagtctcagctgactgcaagctctgcatcccaggttcacgctattctcctgcctcagcctcccgagtagctgggactacaggcgcctgccaccatgcccggctattttttttgtatttttagtagagacagggtttcactgtcttagccaggatggtctcgatctcctgacctcgtgatctgcccgccttggcctcccaaagtgctggcattacaggcatgagccatcgcgcccggccagagggctattctttgtcttttatttgctttgagtccggtataaccatgtggcacatacccctgtacatgtttgccaagactgctatatggtagagcttggaattctttggagctttatcaggtaattgcaagtcccccacctccaacaaagcactctctaggtcaagaatcagcaaatgttttctatagaggcccgtaaaattaatattttatactttgtgggtcatatagtctctgtttcaattacccaactctgctgttgtagtgcaaaagcagctgtagacagtaagtgaatggatgggtgtggccgtgtgccaataaaactttatttacaaaaacaggcagcaggccagaattagccctgtgggatgactcacatgagcagagagttctggcatcaactttgttcggagagatactgacatacttctactcaagtaagtcaatgtttctgtctcaactggttgattggaacaacatacaaactgacccttaggaaccttctaccaaaaa

SEQ ID NO: 128351 - DNA, 533 bp, Homo sapiens
taacagcttaaggaagacaaagaagtttttctgtctcatataaaaatccaagagatagtccaggactgattataggagctctgccccaaaaaattctcagcatctttatagctcattattccaccatcccgaatactgggcccccattctcagagtctaaggtggaagctagagctccagcaaaatatctgtatttcaggaattagggtggaaaagggatgaagaagctggagaaagggcagtgagtatcacctgtctttaaggaaaactgcaggaaactcttatgtgacactttgcatcagtcatgtgaccatactggttgccatggagcctgtctttattctggaaaacaatgtgtccatctaaaaacagagtttcaggcctgacatggtggctcatgcctgtaatccccagcattctgggaggcccaggagggcagatcacttgaggccaggagttcgataatagcctggtcaacatggcaaaacccagtctctaataaaaatacaaaaattatccaggcatggtggcac

SEQ ID NO: 128352 - DNA, 675 bp, Homo sapiens
catggtgtcacgcgcctgtaatcccagttacttgggaggctgaggcagtagaatcatttgaacccgggaggtggtggttgcagtgagccaagattgtgccactgcacttcagcctgggcgacagagtgagactgtctcaaaaaacaaaaccaaaccaaaccttaatgacttaggaaggtggctttagtggccgcatgaagcacaccctgattgccgaggaacaagagtgcaaagctaagaaactgaggcattttgaagaagttgaagacacttggctttcttatctgacccccaagaagaattctatcagccggggcagctgaaatatcctaaattaattctccaagaagccagcagtgtatctggggagctccataaagaggctcaagaggccgggcgcagtggctcacgcctgtaatcccagcactttgggaggccgaggcaggaggatcacgaggtcaggagatcgagaccatcctggctaacacggtgaaaccacatctctactaaaaatatttttaaaaattagccgggcgtagtggtggatgcctgtagtcccagctactcgggaggctgaggcaggagaatggcgtgaacctgggaggcagagcttgcagtgagctaagatcgagccactgcactctagcctgggagacaaagtgagactccgtctca

SEQ ID NO: 128353 - DNA, 437 bp, Homo sapiens
ctaccgtcacactctcaaagacagctgtcctcattgagtcaatggtagaggcatggggtgggcacagctgctctaggctcatgtgtgtctgcacgctaggcctcctctttggcattgctcttctcgctgagttctggtttgttgctctgtggagactgtgaaggtcctagcgctcagcagaaaacacagtgcccttcccccagagggtgctccattaatgggagagttgactccattcactgctgggcagaaggtggatagaaagccagtgccaagctgagttcaggctgtcaaagagaggagatgaagaagttagttcccagtctccactatcgttccgcttagaaggacactgtgaccttgaggaccaaaaatgtaaatgtcataagtcagccgtagacgttacaggagaagcctactacgcaacacctccagag

SEQ ID NO: 128354 - DNA, 610 bp, Homo sapiens
gtccgtatcctctgctttttcccttttacatcctcgacatcctgaccctcatcctcggcatggctgcaggaaagaggcagtcccttgcggggttgatgggagcagccatcaatgtggtccctttgaggggcaagctggcaacatctatgacatttacataggtgcagctgtgtgacccagtccttctttgtctaagaacttattcttcagatacacccatatgtgactaccaagatgtacatctcagtgtgttggtgtggcattaatagtaagaggaaaccctggaaaaaacctaagtatccatgagtcggggattggaagtaacctgtttccacaaggtggggactggaagtaaactaagtgtctatgagtggggaattggaagtaacctgagtgtccatgagtaggggattggaagtaacctaagtgactgaatagataagactcatccatacaaaatattctgcaaccataaagaggcagaaggatgctcttgatgtactgataaaaaggagcagacaataaattctatgaaaatggcacactgtcagcctaggcaacatggcaaaaccttctctctactaaaaaaaaaaaaaaaaaaaaaaaaaac

SEQ ID NO: 128355 - DNA, 387 bp, Homo sapiens
tatccttatcttagtccttttgtgttgctacaacaaaatacctaagcctggataatttataaacagcttaaatttactgctcatggttatggaggctgggaagtccaagattaaggtgctgacagtttcagtgtctggtgagggcctggtctctacttccaaaatggtaccttaaatgctgcttcttctggagtggacgaacaccatgtcctcgcatgggaggagggacagaaaggcaaaagggcctcaccagttctctctagtacttttacaagggcactaatccattcaccagggcacagctctcgtaacttgatcacttcccaaaaggccccacctcttaaaactatcacattgggtcttaacttctaacatgaattttgggca

SEQ ID NO: 128356 - DNA, 542 bp, Homo sapiens
  misc_feature (473)..(473): n is a, c, g, or t
agatgggaatatagtaggccctaacattaaggggtggtggtaagaattcattagaatgaatgtgtaaatgcccagtgcctggcatgtgctgaccaaaatgggagctctttatgtgaaaatgggagtgattcccatgccaacaaggcctggccagattcaagggtcctcccattaaatgtaggaagggaaaaaacttgtttgtgctgggtttgatggcgtcttctttcatacagagagttccaaattgctgacttttgaggccacagtctctttagaagcaaggaggaaggcaccgagtcagttgttttgtttcctgcatggttaattggttgtaaaatgctacctttagttactgcttctgattaaattaagtgccctgggaaatccagctgtgaacaggtgggtatgggaggttttccctgtgtctctattcactgtctgtggacagcctcatgctggtaaatatgcactgncttcacttttgcttctgggaccagatgcttttcccaacttctcccttcacccaagcggtcagctggcaa

SEQ ID NO: 128357 - DNA, 278 bp, Homo sapiens
ggatacatccccaaaactatcaaaagtgaaagaatgaacaaatcacggtgtctttatacaatggaatactactcagtaataaaaaagtcactgatctacacaattacatatgggtactaggcttaatatcttggagatgaaataatctgtacaacaaacccccatgatacaagtttacctgtgtaacaaacctgcacatgtacccctgaacttaaaagttaaaaaaaatagatccaactatatatggtcaactgactttctacaagttacccagataa

SEQ ID NO: 128358 - DNA, 184 bp, Homo sapiens
ttctcagactgggaacagttttctttggcttaactaggagaccagggatcttgctggagttccagatttgagctctctgcccttcctgactaagcagccccacagtgtcctcacttgacacatgctgttttatggggcgccacgtcttcttcgttccttctctctcctctgatccacttttttc

SEQ ID NO: 128359 - DNA, 497 bp, Homo sapiens
tctcactatgttgcccaggctgacgttgaactcctgggctcaagcaattctgcaccttgaccttccagaatgttgggatgacaagtgtgagccactgtgcatggcttgacctttcttaccactttttaaggtcactgatattcttgttagtattcctagtatagaactatttcactctccatatttcttcttccttgtttatttccccatggttatgaacgttctgtatcagccctcagaatcaatgttcctgaactgcagcaatataagatggtgatatggtgctgaggcttagcagagggattatatattgaaatcattttaaaatcagatatcttacattagaagaagggtgcaagaataaaggttttgtcacaacttgtcataaatgtgaatatggattttcacttgcttttggataacaagtgattttctggagaagttgtctacaatgtggttacctttatcagtatgtttcttctctcccaggattgtgt

SEQ ID NO: 128360 - DNA, 442 bp, Homo sapiens
gctggctcggggacctttccctgctgtctgctgcatcatgtgtctccctgggtcctcacttggtgtttgctttggccacttcctgttgaaagctttcctgttgtgtctggtgatctttggccatctgttcactcctgcgtgtgaggcaccacaaggatgagaggctctgtgcgaggcagggccagagggcgtgggctgtgctgtgtcagtgggcagggcctgtgcccttctctttgggatggttcagtcctgtctcctgcggatggttgtgaagatctcaggaaggccagggtctccctgccctgtgggaatattccctttcccctgtggtctagctgacacctgccctgcctctgctctgaggtgacctggatgggactggtctctatacccacttccccagcctggaggggactgggagcagagtgggccccccccccac

SEQ ID NO: 128361 - DNA, 302 bp, Homo sapiens
aaacagtgtgtgccaaggtatcgagtcacaaagtttgtgctgggagctttgtggtattaaatgtggccagagcttagtgtgagaaggaggagttgatcaatataaaaggcaacaggttaggccaattcaggtaaggttttatatagcaaactaaaatcctcaaactttgccgcataggcagcaggagggcagcattcagatttttaagcttgttgctaatacatacagacctgaattttagatcatgctgttatcattgttgagacacacagagggctgcataagaatatgggcaaggagtt

SEQ ID NO: 128362 - DNA, 480 bp, Homo sapiens
ttcctctagatatccataggatgcgctccctcacccgcacagaccttttcctggcagcccgcacaccctgcaacctcttcttgaaaggcctgggtctgacctgagggagagagtttctcttgggcagagggaggggtcacggccccgtccctcctatccacctggcgctttccaccttcctgagagcagaggccactgtaaaagggaccgtgtgctgggggttttctgggtgctggacttgtgggcacacaccccatccactcctgcctggtccacacactggctgctgtttcacagacaaagatctggcggccagaggggctccaggtttgagaagggccctcaaaggagcagccccttcctattgctgcagcgtcttccacacgtggagaggggttcaggcccacgctgctctgggcctgcagggccaccccctggaggccgcgggagtgcgggaggggacgccgggcctgcaggggt

SEQ ID NO: 128363 - DNA, 451 bp, Homo sapiens
ttcggagttctgccactgcttgtctgagtaattttatttaagatttgtagcctccctgagcttcaatactctctcctgtaaaatgggaatagtaaaatgggctactgtgaggataaataaggtaatgacttcaaaacatctagtaaaattgttagctcatcgtaggtacgcaataactatagctactccactaaagttcctaattggaggaattcccaatcccttctgctccctagtccattcacttcaaatctattttttccccaaggtttggtcattcggtgtccctggaactctaactcagatacccaaggcactcaaaaaatattcgcacacaccccgcattcactcttgggaggattttgagatgccaaggctggttaccaaggaaaacgtttaggagtcttccctggtgttcagcagcaacgtttcagtgttggttaaaagacag

SEQ ID NO: 128364 - DNA, 454 bp, Homo sapiens
agatgatctacggaccttagctcagtgatctctggaccaggtatagtcatttacctatgcctacatcttagcagaattcaggcccctctcataatcctaaccttgtggactttcattagttttacaaaggtggtttagttttgagaagggctattatcatccttgctttaaggttaaactctaaactaaatttctcccaaagttagcttggcccatactcaggaatgaccaaggacagcctggagcttagaagcaagacagaatcaacaatgttggatttctctcactgtcataatttttgcaaaggcagctttagaagcattagatttcatttaagcctcaatatcaccccattttagatgaacctgtggctgagtgaggtcaacattttctcagagtaatacaaggataaataatgggccaggtacagcagctcatgcctgtaatcctagca

SEQ ID NO: 128365 - DNA, 236 bp, Homo sapiens
ctctgtggagcgacttacttaccaggcatctactgatcttaagcttccgtgtttggccttgtgagggatatgacgatatgtaaataatgtaaggccttcagcgactaacaggggttgagctcagttcatacagataacaagctggcaagtcgtgtgccacaagtgatacctgggagcttatcacaaaggttctgaagctgtgggaaaaaaaccaaaattattccctgagaaatgaa

SEQ ID NO: 128366 - DNA, 282 bp, Homo sapiens
tcccaggttcaagtgattctcctgcctcagcctctcaagtagctgggactacaggcacataccatcacacctggataatttttgtatttttaacagagatggggtttcaccatgttggcaggctggtttcaaactcctgactttgtgatctgcccaccttggcctcccaaagtgctgagattacaggcatgagccactgcgcctagcctcaaagtttctatttttttagaagaaatttccatttgtgaagagtcatgtaaaaagtcccaacatgatttttac

SEQ ID NO: 128367 - DNA, 411 bp, Homo sapiens
caagcacccagcagactcaccaaaggcttttatcccaatgaccaggaaaggaagacgggcaccccttttgctgagggactcccatgggtgttattaaacttgggcattacaaaacctcttccaggtagggacctttggccccacttctcagctgggaagacagagattcaaggagataaaagaactgctgagtatctcacctttactctgcaatgcagatgggattgaaaacctggtgggcccagggtcagccagggtctgtctgactcttggcctggctggggccgcctctctaagcacatagcctgtgcgtcagcacacgcagggccccactcttgtaagctgctgcttctgaaatcgattcatgctaccctcaaaggcagagcaaatatataacttagggagatttct

SEQ ID NO: 128368 - DNA, 502 bp, Homo sapiens
agtcctcactttgcacactcaggagggacctcgaacaacttcacctctggggaccactggttgaggtgcagcacgtggtccccagggactgagcctgttccagctgtagtcacccgccctgctgcccaccctccaccccatctgcagtcactgttgactgaaggacttacatgctccaggcacagaagtaagcactaaactcagaggggccatggtcactcaggttgtaaggagcagagctgggattcacactcagccgtgtttggcttcaaagcctgtgtcctttccttcacacctcactgccattaactgggagccctactttctgcattttccaactgtcagctttctgcatggcaaggctctggtgagaccctgttactgttcctctctgtgactagggccaggactggaatgtccagtgaatgctgaggatggtagtggtggtggtggtggtggtgatggtggtgatggtggtggtggtggtggtggtgatggtagt

SEQ ID NO: 128369 - DNA, 431 bp, Homo sapiens
cgtagtagccaaagaactgtgcttgttagatctgaagtcatccggactaatgctcaaatgcgaggtaactgagcacgaattgttgattgtggtccttacatgctccaggcacagaagtaagcactaaactcagaggggccatggtcactcaggttgtaaggagcagagctgggattcacactcagccgtgtttggcttcaaagcctgtgtcctttccttcacacctcactgccattaactgggagccctactttctgcattttccaactgtcagctttctgcatggcaaggctctggtgagaccctgttactgttcctctctgtgactagggccaggactggaatgtccagtgaatgctgaggatggtagtggtggtggtggtggtggtgatggtggtgatggtggtggtggtggtggtggtgatggtagt

SEQ ID NO: 128370 - DNA, 831 bp, Homo sapiens
ctcatccacgttacttgaagaactccctggtttaccacccacagctgcgagcacaggtttggcgctacctgacatacatcttcatgcatgcagggatagaacacctgggactcaatgtggtgctgcagctgctggtgggggtgcccctggagatggtgcatggagccacccgaattgggcttgtctacgtggccggtgttgtggcagggtccttggcagtgtctgtggctgacatgaccgctccagtcgtgggctcttctggaggggtgtatgctctcgtctctgcccatctggccaacattgtcatgaactggtcaggcatgaagtgccagttcaagctgctgcggatggctgtggcccttatctgtatgagcatggagtttgggcgggccgtgtggctccgcttccacccgtcggcctatcccccgtgccctcacccaagctttgtggcgcacttgggtggcgtggccgtgggcatcaccctgggcgtggtggtcctgaggaactacgagcagaggctccaggaccagtcactgtggtggatttttgtggccatgtacaccgtcttcgtgctgttcgctgtcttctggaacatctttgcctacaccctgctggacttaaagctgccgcctcccccctgagggctggaggcccaaggtcggggaggggagggaaaagcagcacccacagggagcgcctgcgaggtttcttctcatcatcagctcagctaggccgggcagacaaggacagaagactctgggccactgtaatgtttgtgtttagatttggacacacagtggagacccttttctgaaaggcatctggcggagg

SEQ ID NO: 128371 - DNA, 280 bp, Homo sapiens
cactacaggagatcataactggtagggacgtagaaggtcagagacagtaagagagctgaggaaagctagcgtaagagcagacccccctgagggctggaggcccaaggtcggggaggggagggaaaagcagcacccacagggagcgcctgcgaggtttcttctcatcatcagctcagctaggccgggcagacaaggacagaagactctgggccactgtaatgtttgtgtttagatttggacacacagtggagacccttttctgaaaggcatctggcggagg

SEQ ID NO: 128372 - DNA, 626 bp, Homo sapiens
actaatatttgctcttttagaaattaaatgacaatttcaaatatatttattaatttaaactgtgttgtaaatagaattttttatgaagaataaatatgtcctaaaaccaaagaaactagaccagtggcattgttttatatttttgcaaatcaccttgatttctggcttacttggagaagacagctggattttttgtctgccttcagtctgttatgatgttttggttgagatatgtgaagagaatccagcttcatgtagatatatggttggaaaaggaaagagtgagtattcttctttggtattacatcaaaattcaacaagtggcagttttttgttttttgttttttaagttactgacaatgtgaaagcatattgtattccaaaaatgtctctaggacctacaggaagtctatggaagatacatttaaagaagagactaacggttgggagacgtgatagctgtctccaggtatttaagaaacttggatttcagtaaataggatttaaaaacctgttaattttaataaataggagggagaatagatccattctcctgctttagaaggcagaccaacgggtgaaaattaggaagacattgaggtcagtctaattttttaccagaatgt

SEQ ID NO: 128373 - DNA, 695 bp, Homo sapiens
aaagtatatgaagagaggttctaggttcatgaaatgttagagttggaaaaatgggcctttggggttcttcttattctacctcctcattttaaagaaatgcaagtgggaaatggatgctcagagctgacttgcctgagaggtgaaagggctagtggagaagccagagcccctgattcctagtctagtgcttttccctcccggtgtgatcacctctttgtttctccccctcttctgggcctggtcccggaatgggggttgggagtccagcagggtgtcgtggttcatatttttgggaacaaattcaagttacttctgtgattgtagttttgagtctaatagtgaaattacaaaggcagtgagtcattaagtccaattcttctgaaagaaaactgttcttaaaatgggtgcagagccctcagggctgctctgcctatggagcagccattctttattcctttactttcttaataaacttgctttcactttaaaaaatcggtgtagttgtgtttaggctgtgcctgcttaacttttaaatctctgtgctgtgtatctttgccattcaaaaatgccacctggcctggtacggtggctcacacctgtaatcccagcactttgggaggctgaggtgggacaattgctcaagaccagttcaagactagcctgggcagcatagtgagagtccacatctctacaga

SEQ ID NO: 128374 - DNA, 259 bp, Homo sapiens
aggaaacaagcctgttatgccttcaccaaggcagggcagagctggataagggtgaacagaaagggacaaattattgatgagagttctgtgagtagaaactcctttctcttctttagaatttctgcctccagtttgttaatgccacttccaaaatacactgctctgagctgaagataatactgcatgcagatagagtgccatgaaggcattggtttgcagtgatctataaaggactaatgtgccaggctctgtgttaagt

SEQ ID NO: 128375 - DNA, 437 bp, Homo sapiens
ttcagtccagcactgcaagggtgatcctggtttcctcccttctatgtttgtaactcccttctccacatggaggagccgggcactggttctcctctgtgtttctgacgggagtaatccctctgtgaatgaccatcctcctgtcactgctgctctgctcccagcaggtggatgcccattcccacacttgcctggcagtgtgcctggcacagacttcctcctcacctcacttgatctgcaattaggacaggctcgggacttaaattgaataaaaaggcatccctgtctgggggatgccctttgtgccctgcttggccccttataccacttacacccttatacctctgtgccagccccaaaatccttcatcatctcacttggggcctcacatcttgttctgtacttccctctactgccacctggacaccctcctcactgct

SEQ ID NO: 128376 - DNA, 297 bp, Homo sapiens
ctcaaatacattatcctaagtgaaagaacacagtctcaaaaggtcacatactgtgtggttccatttacgtaactttctggaaaaggcaaaattagagggatacagaacagatcagtggttgccaaggattaggggtggagggagcatttgactacaaaggagtggcagcaaaaaagaatgcagggggagggtggaagttatctacatcttgactatggaggtacttagaagatagaatgcatttgtcaaaactcagacctgtacatcaaaacgagtaaattttgctactcaggaggc

SEQ ID NO: 128377 - DNA, 643 bp, Homo sapiens
ctgcctgtgctgctcggacatcctctaaatccatctatccagtgggttagtccagtatgaagaaagcagggcacgccgaggctgcggccggttttcccattcagggtgaaccctctccctccaccccgacaggcttcagccaggggcttcaccaaggccagtgcatcccactaggcagatcatccttcaaaaaggcagaccggggctggtctggggctgccctgtccctccctggagggagacggcacatggaatgggcacataagagtcacctgcagggtccccactccccaccccaggaatggggttctgagtaggaagtgatgtgggaatactcagccctcagccccatgtaagggtcctccttccctgtgactcagccggaagcctggagctctctggggtgagacaggaatagggctcagcaccatccccaccctggttagtccccaccccaggccagccagctagctgcagcagcgctgtgactcagaaccccaccccacctttctctctactgtggctccgggcacggcagcaagacgctgacctggccctaacatcccaccctctacaggccccagcaggatcaggccagaaaacaccagcttccctgtggagtcggtggggaaggggcctccaa

SEQ ID NO: 128378 - DNA, 286 bp, Homo sapiens
aaaaggtgaggatcccggcagagatcttacatgatgtgtttcgagggagttaatggtggctcttaggttacgtgtatgcaggggatggaacatctttatgaataagagtgttcctttctttccatttcacatatattggcttccagtaagcccggagtacaaagacaagagatcaatagaatatggattcaaggttctgtgtggattcagggcaaaggtctggcaagtatgattctccgttgtttttttttttttttttttttccggggggggggtagggttgccc

SEQ ID NO: 128379 - DNA, 130 bp, Homo sapiens
ttcagctttagtttagagaactaaacgtaacagacttgatggtcaggggaaataaacaaaaggaagaaaacagacatggaaggtatcactccggggccctgggctgatgcctccattaatattactgcat

SEQ ID NO: 128380 - DNA, 340 bp, Homo sapiens
gaaagtttaccagtttgtgttgggccacattcaaggccgtcctgggcctcatggattggacaaggtttttctagatcatgtgcaatgggaaggaaaatgaggcatattttagaaactaaagatgtagacaactggaatgtgacatacaagagaaagaaggtcaagaatgtttgagggctgtcaagctcattggaagacattacagtggaatgacatgggcatttgtgttttttaaagtcagtggctgcattgtatagaattacttgggatgcaagcagggaaccatttagaagattattacagacagcggtgttggtatggagcagaatgatagcagagg

SEQ ID NO: 128381 - DNA, 469 bp, Homo sapiens
gggcacacagggcctgctggggggcacggcaggggtctccagtggggcaggcctctgagagtagaggctcctccccggcggaggctggggagcccttggcctcccatctggcacatgtcagggtccacagggaaccaggcatacaggccagggagggagagccaactgcagtggtgggcacgctgtgaggacagtggactccggcctctgatgggcagctggctgggatctgtggcagcccacctgcccaccagctgtgtgaccagagcaagtctcccaaactctccaaatctgtcccatgaggccaaagtgcccgccttgcagggtccttggcagatgagatgacctaacgtggcaaagtggttagaccagcgtgggcccctttggaggtcccataggagcaagacgccagccctcagaggccacgctgtcatggtaggataagacgccagccctcagaggccacact

SEQ ID NO: 128382 - DNA, 140 bp, Homo sapiens
ttaacatattcagtttccaaattagtctaaatgactagctgataacgttatctgaatccatatgtggaaattttcttttgagtaaatcagaattcctatgtgaaagttaaaaaataaataaataaagatgggctttggac

SEQ ID NO: 128383 - DNA, 405 bp, Homo sapiens
ttctcttattgactaataaaaagaatcaattaatctggggcttaagaagaagaaaagcaactctctagagcaggggggtcaacaaactgtggcccccaagcaaaatctggtctgtcacgtgtttttttgtaaataaagttttattggaacatagccatagccatttgtttatgtactatttatggctgctttaattttgagtgattgcaacagaaataggtcttttgcatatggttcataaagcctataatgtttattatctggccctttatttaaaaagtttgctggccagacgcggtggctcatgtctgtaatcccagcattttgggaggccaaggtgggtggattgcctgaggtcaggagttcgagaccactctacgcaacatggtgaaacccctctctact

SEQ ID NO: 128384 - DNA, 954 bp, Homo sapiens
ctcacaccatgcaggatgatctaaaaagcttcaagtataatgtttagatgaaacttactatgaaactgagtcactgttacatgctgcacattgtgcaagcccccgggtctgtatagtagaaagaaaaacagtccttgttagtcacggagctttcattctaacgtcagagctgttcagcagtgaatcagtgaatgatcacaaaatgctgagtgccaaggaggtatgagggtagcgcctggggagagatcctgtgaacggtacctagacaggaacgatcaagcatctgaaggaaaggcccacgggactggagtgcagcaagcacctggtggcgtatgaggtcagagagccaggagggccaacaccatagaggtcttacatgctgtgacagggatttttaaaatttaattttattcaaagaaaaatggaaagccaaatcgaccttttttgaatataatgcatactaattttagaacactgtttgttgaaaaggtgaaggatttaaaatgaggttttttttttttttttgagatggagtgtcactctgtggcccaggctggagtgcagcaatgtgacctcggctcactgcaacctccgcctcacagggttcaagcaattctcacgtctcagcctcccaagtagctgggactacaggcatgcaccaccacgcctggctaatttttgtacttttagtagagacacggtttcactgtgttcgccaggctagtctcaaactcctgacctcgtgatccgcccacctcagcctcccaaagtgctgggattacaggcataagccaccgcgcccagcctaaaattaggtttcgaatcaaccaagggattattacattgtttgatcccattgaaaattggtacttagggttaactgtaagcagttgagaaagaaaaagattcgatattttcgccatacagccccacagctctcttttctttggtcac

SEQ ID NO: 128385 - DNA, 758 bp, Homo sapiens
agccttcaaatacacccaacctgagcactattattttttcaattctgtgatgactcaatgtgtttagttttatatatatatgatatacttacatatgaaatatatacacatttatatataaatgaataaataagattagtttgcatttttattatactatgtatttaacatttataaaatgaattggtaaactttttaaattctcctgggaaatgaatatcatgtgattattattccctggaaaatctccttgggctttatgcctttttccgtatcaatctgataaattaattcattaatcttatggttattggtctctttagtttttatttctagttgagacaaataaattatcttttcctagaaaactgtctatttttctaaattcaagtttttgaccatttttcttttatagtttcctgtttattagtagctttaattccttttgttgttgtttttacattttatatttctctctttctttctctgttccttccttactctgtcccttactctctccctctcttcctccctctctttttcaactaagattagttgtaaatgtgtctattttattgtttttttaactcaagaactaatgctgatattcatttcctttattttgtactttcttatatctattgttttcaaatatatgtatatttttaataatacagttttcatgagtgtcttttacttttctttttatgctgttttggatgaaaactttatttgttgattcccatcttggcatgtca

SEQ ID NO: 128386 - DNA, 131 bp, Homo sapiens
gtgtttctttctaacatccactttaaggcactcaaagctttatgtttataaatctaagggttttgtttgtttttgagacacagtctggctctgtcactcatgttggagtggagtggcacgtactcggctca

SEQ ID NO: 128387 - DNA, 846 bp, Homo sapiens
gcaatcctttaaaactacagactatctttgttgtattccagtaagtagtcaaaactgacttcttttgaagatgagaaatatccataagccaatctatcccatgtaactccctatgagagatgtgatattatggaaggacctagggcaacaaacatactttagcctcaatttacccagctgtttaaatgtttgcctctgaagttgttatagaagttgacaatattacagaaaggttgtgggactgggactctccaaagaaatccccaaagtagttatttttcactctgatttacttttagacagatatcaatgtcaaaatgtcttcatatagtaatgtttcactggcttgcctgatgataagattctcatggagttctataaaaagatatgcccaagtatctgtatttatagcatgtttggaaaataccgcatcaaaccagcgtgatttaattaattaaagaagaatatattttaagagtaattttagaatttcaggtagttttgctttgtaaaatactttgggcagaatcttgaatattggagaaaaatgattgctttgcttataccaccagtattgtttgatgtttatttctataattctctttttgaaagcatgtattacatatccaccagaaaaagttatggagcaaaggaactcctgcacattgctgatgggaatgtaaattaacacaatcattttggaaaactaagtagcagtatccactaaagctgagcaaacacatacccttgacccagcaattccgctcctactgcacacccaatggaaatgcataagtacgttcaccaaaagacacgtactgagctattcttagtcattattcataa

SEQ ID NO: 128388 - DNA, 314 bp, Homo sapiens
accaattcttgattaaaccagcagtgccctttccataacctccgtttcacaggcaaagaaggagctccagatccaactcgcaaagattgctgtgtcccttgtgaagcatgtggtgtcaacataaatcacttaataatgggaatgctagagtgggacctggtgacgcccaaagatcaaaagcacagtcagggctgaccaagcagccccatctcagcccactcctcccagagcgcatggttgagtggccctgacgtgggctggggggagctagcagcctagtctctccctggaaaacaatggagtcagcagtcaca

SEQ ID NO: 128389 - DNA, 490 bp, Homo sapiens
tacccatgtgcccccgagttccccagttcccaaacacatgcagtgccctgcacaggattccctccacaaaatgcagtgaagtgtaagtggatatgtaattaacaggagtccacatataacaccgccaataccacactccctgggtggtctcaagcagcaggtaaatttctcagctaagcaatcaacgatactgaaatcaaaaacgtcaattctgttgagggtgcttaggcagtcagatcaataatatcaaaacaacactatcacaggtaacttattctaatatttaaggttttgctttgtagacgacatccaggcagacatatctgggttaaaatgctgtctcaaagcaaatgttccagggcagcagctttaggcctagtgactctccctttcacatctcctaagctgtggtcaccctacccaggtgttacagtaccacacagaattctgtggcttcacagaaatactcatcgaataggccccagcacta

SEQ ID NO: 128390 - DNA, 499 bp, Homo sapiens
ctggcctccttccctctgcctacatctgctttctcccaacccctctgccctctcctgcctctgtgtcctccctgtgcgatgccttgcctcccactccagtaacgttcttgctaaggcccaaagctccccaacacccttaccttttccgcacttccctctggcagagccagctacccgcttcctcccagctggtacggaggccaccacacctcctagatgaagccacaaaccaggacacattggccccaccggaaagtcatcctcaagggctccaaacgagcctacagcactgccaggcaatgtttccaggcccctctggtcacccacaccctcaacagtgggccacactcccctcacctcccgctctctggtcagacgacattgaggaaatgaaatccccagaagggaatgccctcatctctccaggacctctctgcatccccacgcaccgtgtttcctctccttcctgcccgcccttccctccaggttctcacctcca

SEQ ID NO: 128391 - DNA, 660 bp, Homo sapiens
gagaaataaagtgaggtttcattaatatgagagatcaacagtagttcagttataagttatcactgcagagggagagcagcaggttcagctcctcaagttggaaataaaaaagatgaatgggaggaggaaatgaagttagtgatctaccgcctgggcactttgtcaagggtgcgtgaggagagaggggaaagccctttctaaacacagattatacaccaaaggcaattaataattgtttaatccttctggagagccatttgttgtggtgatattcacatgactgtctttaacaccatgacaccaggagggtcttacttcgccagccaccaagctgggggcatcatgctgggtaattgtctgcaggtgcatttaactgaaacctttctctaagattctggagttcacagcacacaaagaaaataggcatagcatcattccagtctgtctactttctgtgactgaggtgatttttttctggagctaaatctgtcttttccacttgttctactctcattcactcactggctaattcaacagatacctacttggctcttactacctatcaatcactattcaaggcactcagtaacagcagtgaaccagagtttccaccctcagggaacttacagcagaagagcaggcaggtgatgagaaatgccc

SEQ ID NO: 128392 - DNA, 568 bp, Homo sapiens
atcctcagccccttccattaacttccccctcaccttcttgctgtaactgaaacttagctcccccttagacagatcattctggtgatttcaatattcatacgaattgtccttccaatttcttggtttctcagttccatgttgtcctgtcattcacttgttatatctggctatacctgggatcctcacttctgtagacacaccccagaccagctgtcctcaaagtgtggcccagtggcttctggggggtctctaaatactttcagaaggtctgtgagaccaaaactattctcataatcatataaaaacattatttgccttttggacttttattctgttatgagtgcatactagtttttcagaggccactaaaggaatttgtacttgtatattcttgcattttaaacttttctgttttaatttctaatatggtaaatattgagaggcatgaccaaaaacttttgggagtcctcagtaacttttaacaatgtaaagcagtcctgagaccaaaatgtcggagagctgctgccctagactttaccattaccaataactacaaccctgtcaagta

SEQ ID NO: 128393 - DNA, 312 bp, Homo sapiens
cacttcttgtataacactactctatttacatcaacaatatgtagttgcctatagttctccaaatttaccaagtgatttcagacctctaggcccatatatgaggattttttgttttcctagaaatgtgttttaacagctagtaagccttcatttatcttttccaaaactcagctcagggaacaatgccaccataaaattctcagcctcccccaaatccctatagaattatttttcttgagttgtatctatttcttggttttatataaatatttatcagctgggcacagtggctcacgcctgtaatcccagcac

SEQ ID NO: 128394 - DNA, 284 bp, Homo sapiens
  misc_feature (214)..(214): n is a, c, g, or t
gctgccttatcccattctgctacatctattgtaaggaatgaataaaaaataaacaacttgatggagtgataaagccaaaagtaaatattaaaaacggcgaatagagttgtggctacccacacaaaaggagaaagtaaaatgcccccttggcatcacaggttttgaagaccctttggtcctccgtgacaatgattacctatgtacaaggactggnatggaaatgctaccaaacatcttcaaagtgaaaagcttaaataagtcaggtattcattcaacacactagc

SEQ ID NO: 128395 - DNA, 875 bp, Homo sapiens
atagaatgacttatgttttttgggtatatacccagtaatgggattgctgggtcaagtggtatttctggttctagatctttgaggaatcaccacactgtcttccacaatggttgaactaatttacattcccaccaacagtgtaaaagtgttcctatttctccacagcctcaccagcagatatgcaaagcatatgaacagacagttctcaaaagaagacatttatgcggccaacaaatatatgaaaaaagtcatcactgatcattagaggaatgcacatcaaaaccaaaatgagttactatctcatgccagtcagaacgatgattattaaaaagtcaagaaacagtagatcctgctgtgttgaaatttctaagagagaattgatattttatctcttacaaaattcagaactaatttaggagtagatgtataattcaggcacacctttattagtaatacaaagattgaagagtattactttatatgtgtgaacaatatagcttaccgatcattcacctcagaagaaaagatttacctacccagttactgactatcctggacaattccagccctcctgccccattcttcatggagcagaacccactcccctaaacttataccttatagctgaatagaatatgccttcactgaaagcagacaggttaaaatgatgaaaataataaataataactatgacagtgatggtgatgatgttgaggagaagggtgcactagaagaggaggaagagagagagattaaaagaaaggaagggactgagcacctttttctcaaaccctccatttacaaacatatccatatagatgtcactttctctcacttggaaaggagttggaaggagagtggaaagattccaagaa

SEQ ID NO: 128396 - DNA, 701 bp, Homo sapiens
caactccaaaatttaattggtgacttaggattgaatgtattatggaatcttgtttttctaattgtaccatatcattaatcagctaagaactgaaatatttggctaggcatggcggctcattcttgtagttccagcactgtgggagactgaggcgggtggatcacttgaggtaaagggtttgagaccagtgggccaaaatggtgaaacctgcctctactaaaaatacaaaagaaaattagtgtggtgtggtggtgcatgcctgtagtcccagctactcaggagccttaaccaggagaatcgtttgaacctgggaggtggagattggagtgagtcgagattgtaccaccactacactccagcttaggtgacagagtgagactctatctcaaaaaaaaaaaaaaaaaaaaaaaacaaaacaacatttggggggggccccgggccccgaaaaaaagtttttaaaaccccatgcgtctgggggcggccgcccccccaagagttagtccaaaactggccaaagctcggccccaaaggaaacatctggccaggcactgtcgctgtgttcccacccaaataaaaaaagccgcggggacccgaggcttcgggaacaatcccaaggaggttcgagggccagcggtctcaccacggctccagggatccgaaaatacgcgcgcggggtgggaacgcaaacaacagcgccagca

SEQ ID NO: 128397 - DNA, 577 bp, Homo sapiens
ctttttatggttggcatgtagttttctcctctatttctgtatgtatttccttaatatgtagtttcagaagtggaatttattagagataaactaaactcattaaatttagagtttcttattgtctttcatgagaacatttttccttttcattcataaatgatattgaaacactatattcttactttcatattcctgtttatatttttgtttttcatgttaaacattttacattctaatagtaacctcatcgacctgttaaaaggcaatataagatttagattattaaatagcatgtaatatatgtgatcagtaatcttcaatgagcttgttcttcatttaattgcaacgttatgtctgattttttttgttgcaaagctttcagaatcttgacttgtggtaatcttcttttaaaaaagcttttaacagaattaataagtcatcacgttatgataaatgattaaggaaatgatgcctctaatacattgaattattaaaactatcattttgaaaaattatattggtacaaactagtgtctactgctattactcatacatttcagaattcatacatggatat

SEQ ID NO: 128398 - DNA, 405 bp, Homo sapiens
cactgcaagtataattttatcacctataaaatcagaacttccccaagatacattttaaatggttatacttaaaatgttataacttcaatagttcagtagtttgctttgctttcccattttttttcatatattacataaaagggagattaagccttcagtatgcaattatcacaactatgtattttttggacttctacagcaatattctaagaataaatgcccaaatcccacaggtctttcagaaaggcaagatgaaggacaggcatggtggctcacacctataattccatcactttgagaagctgaggtgagagaatcagttgagcccaggaattccagatcagcctggtcaacataatgagacctcatctctactaaaaataaatattagaaaaaaaaattaac

SEQ ID NO: 128399 - DNA, 501 bp, Homo sapiens
tactctaatgattatttcttttgttgtgcagaagctttttagtttaattagatcccatttatttatttttatttttgttcatttgcttttgggatcttagtcataaattctttgcctaggccaatgtctaggacagtttttcctaggttttcttctagaatttttatgatttcaggtcttaaagtctttaatccatcttaggttaaattttgaatagggtaagagatagggatccagtttcattcttctgcatgtgactagccagttttcccagcatcatttattgaatagggtgtcctttccctaatttatgtttttgaatgctttgatgagtgaccttttttttttaagagcacagatcagttattttataaatatctctccgtttgggtttgtgtgatgttttatcatgattggattcacattatttatttttgacaggaatattatggaagttatgttgtgtcctcactggtatatcataccaggagatacacactg

SEQ ID NO: 128400 - DNA, 430 bp, Homo sapiens
tgcagagaagggaatctcactatgttacccatgctggtctcaaactcctgcctcagttgatcctcctccatccgcctcccaaagtggttaaattaagccaacctgcctggcctttatgaggattctttatgcatgttttacccattggttgcattgtcatttgaaattgttaacctaattgtcagactaatttgtggcagctgccctaaaccagagctgagggattgcctgctgtgctttcctcctgagcaaggggaagttgagccggagccaggtagtggcaatcaataatagtggtactgttgacctctagctttgtggtaaaagatattaactttattaactccagacaaaaaatatttgccctttgacaaatatttgttcattgctataaagtaaattgccatttaattatttcataaaaaaaaaa

SEQ ID NO: 128401 - DNA, 143 bp, Homo sapiens
tgttcatgttttctgcagtagaaatttataaacccttatttatttgccagacatgatccctttagagaaatctagtatctaaaacctgaatttttaaaacaaaatttaaaatttttgtttcataaaaacaaaaatgtgattac

SEQ ID NO: 128402 - DNA, 122 bp, Homo sapiens
gtaagacacctctggggacgctgagtatgggaatcaaaggccagatctctggggtggcagcggaagcccaaagcaccaaagcaagcatgctggaaacccacagcctcctccacttagcagag

SEQ ID NO: 128403 - DNA, 913 bp, Homo sapiens
gtttcttgatctaaaatgctatgttatccaatgtgcttattaccttattacatttaaagttaagattctctgttatttctttgcagtgcagattacttaggacaaagacatatagacaattataagtttatcccatttactattcattgggaaatatcaaaataataaatttagtttagaaaaacatatctcctctgggtatatatccaaagaaaataaaatgagtatctcgaagagatatctgctcatgctcattgcagcattactcataatagccaagatacaaaaataatacgtgcccattgatggataaatggataaagaaaatatggggtacacacacacacacacacacacacacacacacacacacacacacacggtagaatattatttggccataaaaaaaaggaaatcctgccatctgtgactatgggaataaacctggaagatattatgctgagtgtaataagccaaatacagaaaggcaaatactatatgatctcacttagatgtggaatcaaaaaagtcaaattcatagaaacagagaatagaacagtgtttgccagggtccaggagatgaagaaaatggggagataacagttataggttgaaaactttcagttataagatgaatacgttctggatgtcttatgtacagcgtggtgactatagttagtaatactgtattctatgcttgaaatttgctaagagaacaaatttcctcaccacacacacaaatacacatacaaaatagttaactatgtgtggtgattgatgtgttcattaatttgattatggtaatcatttcacaatgtacatgtgtggcatattaagtcaacaaattattataacacctgaaatatatacaacatttatttgttaatcacaccccaataaagctgggcaaaaa

SEQ ID NO: 128404 - DNA, 450 bp, Homo sapiens
gagaggagaagaatctcaggaatgccaaggaggcatcatttaggaaacttgagaaaaactatccctggttgaaagagaactactactgtagtgtagcagaaagcattcatttcaagaagcaaggggatgtcagcagtgtcctatgccctgtagtgagggaagggtgagaataagactgagaaagaaagaaaaaactgacttggatggtttgagagtcatcaatggtaaaatcattacaccaccaattatgtttcaatattgcaatttgaccagaagtaagatcccaatcagaattgcaatctgcagattggaaagagatgaggtgagaaagaggagctagtcagtgcaggctgctaatttaacaattctaaaaggaaggaaaagaaaggtagggtgcacattgagagggcattgtgtgggaaagactgagggtccttcttacagaaaggg

SEQ ID NO: 128405 - DNA, 779 bp, Homo sapiens
gtacatttaaacaattctcaaattgcaatgaaatatgataccatattaaggtaggaaaatttagtaaataaaagaatgaatttttttttcttacaaatcattgcattttgctctactgaacttggtcaaattacatttgcttccatttccaaatgatttctttgaggatagagaaatcttagcttttgtggatacaacagtaaaaggttgaatcatttttcaatcattgcttttaattgagccctctgagcctcatgacgcagctaaataatgtttcctttaatgacatctcaacatatttcatgactttttcatctctttcagtattttaacaaactcattttagttgctgagagttggtccccctcattttaaacgtcattaccttgtctgatttaacatgctttcattccttccccaaaattcatttaccatcttggaatggagtgaaagagacatgagcttctaccatgcactttttttttctcttttactaactttatcctctgaagttggggcagtgctcaaggtcaattccatggaaattaatttgctgaaatcagttcaccaaaaaacaattattctaatggtcagattgccaaatggttgattggatgaaaaacctatttgtttcttttaactatacataaattctatagcaatttcatattgcatgctatttctgtgggttttaagttttttatgagggttattttaatgacttttcattttatcttcttttacagcattttatactttcctgccacatatggttgtgt

SEQ ID NO: 128406 - DNA, 568 bp, Homo sapiens
cgcattggctcacacttgtaatcccaccactttgggaggctgagggggcagatcatgaggtgaggagtttgagatcagcctcaccaacatagtgaaaccccaaatctactaaaaacacaaaaattagctggctgtggtggcgcgtgtctgtaatcccagctgctcaggaggctgaggcaggagaatcacttgaaccccggaggcagaggttgcagtgagccaagattgcaccactgcactccagtctgggcaacagagtaaaactccatctcaaaaataaaaaaagtcattcatgatgaagcctccctgtttacttccatctattctgtagtggtccacagtacactggtaaatttcttttaagttttattcaaaaagtacatgtactgtttgaatcctgaaccaggggcagggccatctatctgcccatgaacacaacttccttggggccaggccagaagagaaatgttttgttagaaagaaggtcaaaaaaaaaaaaaaaaggagaaaaagcccacacacaaaaaagttacagaagctacactacccatacagagaaagatgcagt

SEQ ID NO: 128407 - DNA, 400 bp, Homo sapiens
cctggtcagtctcgtggttgggttggggtattcctggtcagtctcgtggttgggttggggtattcctggtcagtctcgtggttgggttggagtattcctggtcagtctcgcggccgggttggggtattcctggtcagtctcgtggttgggttggggtattcctggtcagtctcgtggttgggttggggtattcctggtcagtctcgtggttgggttggggtactcctgagtcagcttaatgtcccttgactgcttcctcccacacccatatttaagcctcagtcaccctgctgcaggggctgtcacagcagcaactctggcaaagccttccacacagctctttgtctcccctgccagctgctgggggatcctgactgccaggctttgaaaggctcacctg

SEQ ID NO: 128408 - DNA, 260 bp, Homo sapiens
ttgtagtgagccgagatcatgccattgcactgcagcctgggcgacaagagcgaaactccgtctccaaaaaaaaaaatcttactactcctctcaactcctgctattatctttgttattttcagcaaccatgtagatgaatccatccaataatatcctggcatagttgttgacctcattatcatttctagtccacttagctctctgccttgtcatacctctgaaatgttccttcactaaaatcgtaactctaggtaacctcc

SEQ ID NO: 128409 - DNA, 196 bp, Homo sapiens
atcctgaaaattccagctcttgcagacactatgtggagtacagatgagccatccatcaagccctgcccaaattgcaaaatagtgggcaaataaacaactgctgttgatttaagccattaattagaaaggtgaattgttatgtaccctagaaaaccaaaacacttcatttctctccctcctttcaccccatcctacc

SEQ ID NO: 128410 - DNA, 712 bp, Homo sapiens
tgcctttcactttcactcacattagaattctctcccaccctttttgggggaggatctattaataattatctttcaatatttagttcaacaaacctggaagcatcacattacctgacttcaaagtatactacagggctacaataaccaaaacagcgtggtactggtacagaaacaggcacatagaccaatggaacagataagagagaccagaaataaggccacacatctgcaaacatctcatcttcaacaaagctgacaaaaacaaacaatggggaaaagactccctattcaattaaaatggttctgggataactggctagccatatgcagaagattgaaactgtacctctttcttatactgtttacaaaaatcaacccaatatggatgaaagacttaaatgtaaaacccaaaattataaaaaccctgaaagacaacccaggcaatacaatcctggacataggatgggcaaagatttcatgaaaaaggcaccaaacgcaattgcaacaaaagcaaaaattgattaagtggcatctaattaaacttaagagtttctgcacagcaaaagaaactatcaacagagtaaacagcctgcagaatggtggaaaatatttgcaaactatgcatctggcaaaggtctaatatccagcatctataaggaacttaaatttacaggagagaaacaaccctattaaaaagtgggcaaaggacatg

SEQ ID NO: 128411 - DNA, 686 bp, Homo sapiens
gtcactcccaagactgagttaggtgcattcctatatcgagatactctattgtaatttctgttttcctgtagatatttccatagtcatagacctgtttcctgtagacagaaattctgccttactcgtgattcgagcttcagctctttgcatagcgtctagcccatggtagacactcagtaatcactgactgagttaaaaaagaaagaaagaatgaaataaatgacttaatggtattaatcatacaaacaacagctttaaacaacagtgaacctcttgaacatccaattttttttttttacttcttgagtgcaatactgacactagagaagcctaaaaggtaagggaatatacccctcttatttcacacaggatggtatgaacaataatagctaaaatgattgggtgcttagtgcagacaccatgaatgaagacatcttatttaatatgcacaaaatccttgatacaagtataattaacatcatcattttatggacaaaaaccctgagttttagagttttctaatctgttcaacatttcacagctagtgagcaatgaagtttggtttgtgaccaatctgacacccaaaccactacgtaattgtctccaagccccaacctctacagccaactcagggtctgaactacgactgcagttctaaacgttgtcccatacctctagcacattct

SEQ ID NO: 128412 - DNA, 463 bp, Homo sapiens
acaccccccaacacacactcacacctgacttatacaaaggcctccaagccaacagaggtgcccttagccacagaagcccaggagccactaaaggaatgaggaccatcaaggcatggcaactcctggccaaagatagcagctggagccccttctaagaggagacgaaatcaggggcatggcacccccgatgagaaaaagaataaaagaggtttggggagggggtctggggagacacagggtagcagccaaacgttttctaagacagtgagcagtcaggagggtgaggcagaatgatcaagccctccaaacccagggggcgggcccaccatgccaggctctttggagggaggaagggcaacatgagatggaaggaggggttccctgaaagctggcctgggagcggtcgacacagacagcccactcagcaccaactgcacacacagcactcctagctgtgggtcca

SEQ ID NO: 128413 - DNA, 511 bp, Homo sapiens
tacaccattttcagaagatgtgtctccatacgcgcctgtggtagtgtcaaagagctcctcaggcaacagtgctacacatagattgctcaatgcccaacagaaaataccactgtcagaacatgaaggttaatttgtctggagcacagaacatttttggagataatcctggaaagataaccagcctcaatatggaaaaccacagaaatattccactccattcctggcagatgaattccaaactgtatgcagagacttaattaccccataactataaactatgtttaacaaatttgtaggggtattttagccccagaaactttgtgatctgtttgtagatatttattcatcactcataatttcctcctaattttcctgcaccttgtgcagcatttagaaggttaaattttgtttctgttagaatccaaggcccctcatgtaaattattagtggctatcagcttgtcttttgaaaactgttgctaaactacagatcagccctgtgataaatgtga

SEQ ID NO: 128414 - DNA, 290 bp, Homo sapiens
atggcacatgacatacatatagtatgattccatttatatgaagtatctacagtagtcaacctacacagaaaacagaacagcagttaccaggaggtaggggagggaacaaagcgaagttgctcaatgggtacagggtttcagttccctaagatgcaaagaggtcttacaaatatgtttcttagtgtaagttcacttaacactactgaactgtacacttaaaaatggttaacatgggccagcacagtggctcacatctgttatcctagaaccttgggaggccgagtcaggca

SEQ ID NO: 128415 - DNA, 2294 bp, Homo sapiens
ttcctggtggtcagatgaaagggcagattaaatggactcatcagggtaagaggaataatatgggtaaaacaagaaatggcccgatagtttcacactattcctatacctccaggtccggaagacaggtaaaaaattctataatgtaagaatggaggtagttaccctgatttgaccctgtgtgggaaatgctgaaagcaccaggaggaagccggttcccgtgagataagttaacccggcctgacagaatcaagaaaattgagatgagatttgaaaggacccgaaaatgcaggggttggctttctgactgggaacttaaaaatcactcttcatgcttccctggtcctatgtgataacagagttagagacttgagtctgatttcagtcatcttcagggaccagtctgatgttgtagcaagaagactccctttaaaagtgttactgttcaaatcatatatcaggttgaatcacattcaacagagatatattctagaatacttttttagaagaggctaataaagggaagaattatattgaatggaattatttttgataatgagaattatttgggtagattcactgaggctatgtcaacatgatatttagaccaacaggtgatcaatgtttggaaaatacaacaatgacttatttaaaaattacccttcctgctatttagacaaaaacaactgatcagtggttctgttatgtcagctgactttgttagtatcatgttgaaatagcttgaagtaatatcttttatccccttgcaaattcttgtcttccaatcatctcccatatattttcataattagttgtttatgacacctttgtttttctccctctgttcagtatttcaaggaaaattatggatgccagtcttggctgcacaagatatccattacgtacttatacattttaaaatgagtactaattttcactgctaataattctgtaaggacacatcaaagctggccaaaataatgaattttttttaaaaagcaatacctggtttccaccttggactgactttgatcctgttccacttttgaaattttatttgttccttttccatcgtggatgttcctctactttggcaattgtggagggctaatcaatcttatgttagcaggacaacccatgaaaaacaagtcagagagtgaaggctttttcccctaatcctggcagagcagggcgtagaaaagagaggatgtccatgcttaattctagatacttttgagacaacaccttcagaaaacacataatttaatctttgccatccttagatagagaagggctatagatcacatacgttatcaaaaactactcccttggaaaaaatatctttcgaaaatcaaatttaaacatttcactctgtgctgcatatttcttttaccattgaccattattatagggacccatgaagtaaatgtcacaatcatcttactagctctctctctctcagcaaaataaaactgtgatgtgtcttctttgtaaaagtttaggtataaaatgctatgcaactttttctttatagtaagagctttattttctttaataatatagcccaacttatatgttttaatctcccttgtccctcagaataagcagaaaatataactgcagctgtatgtcgtagacacaagaattgaaactgtgcagtcagtagagctgaacttagctatgaattaatttaaattaattctaaagtgactctggtttccattttagtctattagctagagggttttggctgttgctttttttaaagttaggtccacacagtgaagggaaaagagtctgtgaaggtgatcagtgtagcagtaagacatctaaaatcaagacaatgacatgggggctttgtgtacttagctggataattcccttctactgtcctcttccccttggctgtgtagataaaattgtgcattcaaatgatggtactttgacttttgagggtttttatttctgttattcacaaaatactcattctcatttatgtatattgtatgtttaacccccagtgggatttctggctgctgaaaccgctttgggccaggaagaacaaggatgaagaggttcctgtcatttcttatggggttcacagaattatttggggcttaaatggtacaatggagacagtcatgtgcaatgcttaagatggtctgacagggtcccttttgctggaggtgttcctgaagagattgaacctagtaacaggctttattttcaccttgtgtacaacatggcaaagactgctaagattaaaatccgtctcccatttgttacagcctcacctg

SEQ ID NO: 128416 - DNA, 629 bp, Homo sapiens
ggtttcactgggatcattataaaatatttgctttggttgatgcagtgaatgcaactctttatttgggaaaaaaaaatttagtaaaatataaaagaaaattcgatatttaaaattccttgtgctgtgaaaatttatctacttgagtcagctaaagatagtaaaattacatttaggttaatatcattccgctctctaaactacttcctaagactattccggtgagagtacttcagatgataaggggcaaaatttcctaggaaaacttatttaggtggaaatatcctaaagaaactcaattaaaactgaaatcggtcagagaactaaaaagttttatctttaaatacacactacatcctacaatttcttccattgtgccctattttgagaatttatcttacaaaacattatttctattatagcaagaataagagcatggtgaaaatattattgattattgccaatgaaaaacactggtttttgaggattctgttccaagtagccttcatgatcttcctgaaaaacctgttcttcatgctgggatttgcagaatatatagaatgatcttctgtgggtgtcagaaggaggaaatgcctaaggaaaagaattctgtaaaatttatttggattacc

SEQ ID NO: 128417 - DNA, 545 bp, Homo sapiens
tgacgcaaaccatccattgagaggggggctgagctgcgatggagacccagggtctcacttcctactcccatgctttttcaactacaccctatagacaccttagacaccagcttaaaacctggaaaggttacatttagtatgtttatgttcttacccatcatccacattccattaagacaccttagtatccagagaactgtgataaatgctgtaggggtccaagatataatctctgtcttcaaggtgcttgtatcctgtgattcaatgacattttgttacagtcattcaagagaagttaggaaaggtttaatgatggagaagggatgcaataggcttttagcataagcaggctttgtaataatagaaaagagctggtgggctggccagacatgtagtgataatagggtaaataaattgaagtgggaagatgttgaggagatgcaagaaagatgtgagtctggttggggcttcatgaaggtagatgccacagttttttcttcagactgtagacactgaagactcgggctgatttagaatgaaagaat

SEQ ID NO: 128418 - DNA, 641 bp, Homo sapiens
tgacgcaaaccatccattgagaggggggctgagctgcgatggagacccagggtctcacttcctactcccatgctttttcaactacaccctatagacaccttagacaccagcttaaaacctggaaaggttacatttagtatgtttatgttcttacccatcatccacattccattaagacaccttagtatccagagaactgtgataaatgctgtaggggtccaagatataatctctgtcttcaaggtgcttgtatcctgtgattcaatgacattttgttacagtcattcaagagaaggcaagagggcagatgactaatttccctgtaaaccacatagcctataaggcttccatgagctctgagaaagggcaggatcactgtggtttggagaagttaggaaaggtttaatgatggagaagggatgcaataggcttttagcataagcaggctttgtaataatagaaaagagctggtgggctggccagacatgtagtgataatagggtaaataaattgaagtgggaagatgttgaggagatgcaagaaagatgtgagtctggttggggcttcatgaaggtagatgccacagttttttcttcagactgtagacactgaagactcgggctgatttagaatgaaagaat

SEQ ID NO: 128419 - DNA, 232 bp, Homo sapiens
ttttaggctagcttattcacacaggggagctacaaaatacccaaacatttcctcacgtcattctgtaggttaacatatttatttgcagagaaattctaagttgtgattgtgacttttttttttttcccgctctgtcacccaggctggagtgcaatggcatgtctcttgggtcactacaacctccacctcccgggttcaagcgattctcctgcctcagcctcctgagtagctg

SEQ ID NO: 128420 - DNA, 368 bp, Homo sapiens
ttggtcaaagaaaaagagtcattagtttctgaagggcactaataggccaagtaaaggaacttggattttatcctaagggtaatacggtaggaagccactggtgtccaaatgtcactaccccctctctaatgataacacccgtttcttcctcttttgacttttatcttttactttttttttttttttgagatggagtcttgctctattgcccaggctggagtgcagtggctcaatctcggctcactgcaacctccacctcctgggttcaagtgattctcctgcctcagcctcctgagtagctgggattataggcgtgtgccaccactcccagctaatttttgtatttttagtagagatgtggtttcacc

SEQ ID NO: 128421 - DNA, 170 bp, Homo sapiens
atccgcccacctcagcttcccaaagtgctgggattacaggcgtgagccaccgcgccttgccaatatgtattatttatatgctttgttgaaataattttaacaaaatatatgtttttgttgttgttttcaagtctttcctttctgagtaggactgtgctatgtgtccaggg

SEQ ID NO: 128422 - DNA, 126 bp, Homo sapiens
caaagtgctgggattacaggcgtgagccaccgcgcccggccaaaaaaaccacaattttaataagcttgtttgtgtggctgctgtcagacagttatgaccagggaagggaggacacaggaagctcta

SEQ ID NO: 128423 - DNA, 604 bp, Homo sapiens
cacttcaggatgtgattcaggttcaggtttactctattcaggccctgggctgaaagagaaggtcctacctgggctatgcccttgtagtggcagagggcactaaagcaagagaactggcagcactgggaaatgcattgaaaagctcatcaagtctgtttgcattgtgttgaccaagcaagtcatgtggctaaacccagtcattggtcagcaaagctactcttcctatagggaactattgtaagtcacatccaaaggttttgggaacaaataattctgaataataatacccaaggtactacaatgtactacaaatatttcagctttctgtaagtagccaaaatatcttaatataaaacaaaataacctcttaattttaaaaaaataagtataatattgaatacactggtttaggttcagaatttttagaaagatcctcactgtaagattttcccaaataatcacctaattccatgggaaataaaaaataggataaactaatagaaatatttctgaaacaagagtcatgaggaatccataatcaactgtgctaccttttgactatttaactttgcatctcaacttcctcatctgtaaactaagaaag

SEQ ID NO: 128424 - DNA, 574 bp, Homo sapiens
tacaaaagtgcatatttgtgggctgggtgtgtatataaggggtgtgtgttggtatgtttgtgtatacatgagtatgtattgcatgtgtgtagtcggatttgtgtgtctgtgtttatgtattctatatacacacaccacacacacactgcagcttgatggcttaagccactggaggtgtgagatagagaagagaacattttttttttcatgattagaacatttaaatgcctaatgaaataggtcattttagaggaagctctttggaagatatgagcacactgtaatttgtcgcctttttcactgatgtttactttccccttgccactcctctctgaaccttagtctggaagcccttccctcggcttgtcctcaggctttgatcttggctctggctaggcccgcctgctgtctattaatggttattaatggattatggattggcctgtccaccactttggcccatcaggctggtcgtatgaaaagcgacgtcgtattttgtttctggtagtttcgttgctcttagatacctgctccctttcctgagctcatttcttcaaggcttcttcattcttct

SEQ ID NO: 128425 - DNA, 459 bp, Homo sapiens
gagtgaagtggcacaatctccgctcactgcaacctctgccccccaggttcaagcgattctcctgcctcagcttcccaagtagctgggattacaggcctgcgccaccatgcatggctaatttttgtatttttagtagagacggggtttcgccatcttggccaggctggtctcgaactcctgacctcaggtgatccacctgcctctgcctcccaaagtgctaggattacaggcattaccgcacccggcctatcctggaactctctattatgctccagatgcatagactcagctgcctatttgacacttccatttgttccccaaactgttctgttttgtaagttttcaggtaactacactataaccaacccaatttttttttttttttgagacagggtcttgctctgttgcccaggctgtagtgcagtggcaccatcatggctcactgaagccttgacttcc

SEQ ID NO: 128426 - DNA, 894 bp, Homo sapiens
  misc_feature (477)..(477): n is a, c, g, or t
ttatggggggtggggggaaggccagtcatattatcaatgcccttgtggataagaaaactaacatccagagaaattaagccacttagtaaaaatcacataattaaaccagtggcatagctagtaataattttcaattaataatccaggatactctcctaattaattttgcttccactcctcttaagataatggcttctgagataagaccccagttgctgggccaggcacagtggctcatgcctgcaatcccagcactttgggaggctgaggcaggcagatcacctgaggtcaaagggtttcagaccaacctggccaacacggaaacccccgtctccactaaaaataaaaataaaaaatcagcccggcgtggtggcccgcgcctgaataccagctactcaggaggctgaggcagaagaatggcccgaacctgggaggtagaggttgcagtgagccgagatcgcgccattgaactccagnctggatgacaagactgaaactccatctcagaaaaaaaaaaggaaaaaatcaatttgtggggggcttgggcctgggaaaaagttttttagacacatcgtggggggcgcgggccggaggtacgtggcactgggcatagcggttgccagaagaaccggctcagacactaggcgtcgggattctcaccataaaaagccgcgggaccgaggttggaacaccgaggggctcgcggccttcggcatcacacggagtcaggacgctaacacaccgcgtcgcgcaggtgacacgacaggaagcccaagaacacgcaaccaacaacaacaagacacccagagcacgacacgaacacatgaccaggacaccacgcaagaagacccgacacgaaaccacaaccaacacatcaacgaagagacaccacga

SEQ ID NO: 128427 - DNA, 499 bp, Homo sapiens
ctgctccgcctctctctgaattccaaggccccatcagatcagaatgaaatgagaacaagccccagagtaccattcctatcaactcctgtcttctccacaccaaagaaaggtagagcattttggaagcttctacatgaagtggccccagcagggtggacaggatctagctagatggttagtaactgaaatcaccatgctcctctgctgtccgcctccttggggtcacaaagtactctcccctccacaacagcattaatcttcccacctgcatgggaggaaggcagggcacactcagatcactatccccattttacagggaggaagcaggaacccagtaggggaagcaacttgcacagtgacaggacaggtaaggggtggagcctgggctggcagctctgccagttgacagggctgctccaagcttttaattgtgggggtggggttgctgggttgagtttcatcaagggcagctgctctcaaagccagcactgggctgagc

SEQ ID NO: 128428 - DNA, 513 bp, Homo sapiens
ccacttcatcctcctgagtggctggtactacaggtgcatgccattatgccatgctaatttttgtattttttgaagagacggggttttgccatgttgcccaggctggtctcgaactccttggctcaagtgatctgccagccttggcctcccaaagtcctgggatcacgggtgtgagccaccgcacccaggtaaaacttgtacaattagtttctaagttcttatttgtgtatttgcttgtttgttttttgtttcctgttgtctgtcaccagactataagccctgtgcgggcagtgaccatatctagcttgttcactgttgttatactctagtacttatcccatggtaggcactcaagaaatacttacacatcccactaactctgggaagttgttgattatctggtgtcgtggtggcaaaaccacctgaaagtaatcaaaggaagccacttggttacatttgaacttgttgttattgttctgagctttttggtttctgctgaggatatccttttcc

SEQ ID NO: 128429 - DNA, 727 bp, Homo sapiens
gaacacacaaaaccaaaaattttaaaaacccacaggaagtcaaaaatttttttaaaaaagacaaatcctcaattgtggttacagactgaaactcttttctttcgtgtgtgtgtgtgtgtgtgtgtgtgtgtgtgtctgtgtgtgtatgtgtattttatatatatatatatatttttttaaagcaggcataatattggtaagaatttggaaagactactgttaactcaatttacctaatgacatttgtaagttagtatgcaagaacatctggattattcaccaagatagactatattctgggccataaaataaacctcaccaaatctgaaagaacagaaggcacatgaaatatgatctcaaattgctagggatttaaattagaagttaatatccaataggtatctagaaaattcctaaatacttgggaattaaacatgtttctaaataacctgcatgtcaaaaagaaagtttcaaggaatttaaaaataatttgaactacatcaaagtgtaaataaactatatcagaatttgtgtaatgaacaaagccatgcttagaggaaaatttatacaactaaattcttatgctggaaaagaagaaagatcttaaatcaatgatctaagcttccctcttaagaaacaagaggaaaagcaagttttacccaaggcaagcagaaggaaagaaataataaagatggcaacaaagacaaaaaaaaaaaaagaaaataaa

SEQ ID NO: 128430 - DNA, 186 bp, Homo sapiens
agtgggaaatggagttacggtttccccagcggtggagtagggtaatgagtcaggagggctggtgggtgctcagtgcttcatagcatcaggcacacaggtggtcccagggattcgagaagccagaaggggtggctgggagtgttgccatgtggttagcacagacgggccgtggcccagggagaggat

SEQ ID NO: 128431 - DNA, 386 bp, Homo sapiens
ggtaagattatgcctgcctgccctcctcgctccctttgttccccgtgggaaacttaaacctaaattattgactgtctagcctttcagaaagaaaattctggccaggtgcggtggctcttgcctgtaaccccagcactttgggaggtggaggcgggcagattgcttgagcccaggagttcgagaccagcctgggcaatgtggccaaaccccatctctactaaaaatacaaaaattagccaggcatgatggtgtgcccctgtagtcccagctgcttgggaggagagggtgggaggatcacctgagcctctgcgggttgaaggtgcaatgagctgagatgatgccactgcactccagtctgggcaacagagtgagatcttgtatcacca

SEQ ID NO: 128432 - DNA, 766 bp, Homo sapiens
ggataacatttcctggtcccctttagaagaataatacaagattcagtgtcagtgtatggaagccaatcaatccccaattctgtcctggagaacacagggaaggcttcagagagaaggaaatttgagctgagaagtgaaaaattaacatgtattaggtatacatttgggataagggtatttaagttgaaacagtagcatatgcaagagaatagagacataatggtatggccttgtttactactggatgtaaagtgtgtgcatggtagattcttggaggcatgatgatgggtgggacaaattagcagggggctataccatgaagagtcttgattgtcatgctcatcactaatttggatatttatttatttatttggccatagcagttggaggattttgaacaggagatttatgtgatcatctgatagtttggtcaggggcatccagactagagtgactccatcttgattaaaggccagataaagccaaacctcctgggttacattcccaaggggttggacactgttggtcacaagatgtttagggttgagggaacaagttaatgatgctaactaacgaaaagatgcttatgaaacttatgaaatgtttcagtacttgaagatcaaaaagcattcttagtttaagaataggttttgctttcatacaaaattagctgggcgtggtgacgcgtgcctgtaatcccggctactcaggaaggctgaggcaggagaatcgcttgaacccgggaggcagaggttgccgtgagcca

SEQ ID NO: 128433 - DNA, 172 bp, Homo sapiens
ctcacgatccgcccgtttcagcctcccaaagtgctgggattacaggtgtgagccaccgtgcctggcctaaaggcttcgttttaatgtccatgagccttaggcctgtatggaacagagttagaaatgcaaatctctatataaagcagggagccttgaaggttcatactcaaga

SEQ ID NO: 128434 - DNA, 328 bp, Homo sapiens
aacaattacttcttggttttaatggctctccatttggttacaatttctctggattggctctgggttggtcgaggtcccttttaaaatgtggccccagggctgcacaccacctttggatgctccctgaggctgcaggagcacaggccgtagttcctgtgactggacctcatgtttcctatgcagaggtctcaagagaatgctggtgtggctggctgttgcatcactctcatctctcatctccaatctgtggccaaccgaaatcctcagacattgttcacaatgactgctatgaaaccacatcactctcaccctgtactcaggcagctga

SEQ ID NO: 128435 - DNA, 463 bp, Homo sapiens
cagggctggggctgagcgggtaggagcaccccaacagcacccgccacacccctccaccttgcctgaggacagccgtggaggctcctttcaccagtcggggagaccaggccagggtgggatgcagccgatgggaacaatgtcccgggggagactgcgccaggcactggttccaagcccagcctaccctgaagcccgttcagctctctgagttcacatgtatgctgaggtaacagcacacctcctgggggggttccaggagtcaagggtcaaggctaaagccagggtggcctggtcctaataaagctaactggcctgagccaacatgttctacagcttcatagggtgtgttgaaccaaatggaattgctgctatttacccattttgaaccataaaaatggtaatttctttttcttttttgagacagagtcttgctctgtagactggagtgcagtggttcgatctc

SEQ ID NO: 128436 - DNA, 217 bp, Homo sapiens
cattttagaaatacttttgcggaaaatagctaaattaagaaggttcctcattaatgatactagtcattttattgttttactgataaagtgatacccctgaagcaattgaaatatgtaaggctgaggaaacttgcaataaaagccccagtatgctgtactttgaatctttttttgtgtgttttctcctattgtctgttatgttaggcattatgcctac

SEQ ID NO: 128437 - DNA, 482 bp, Homo sapiens
tgagtttataggagtctaccaggtgagttgagggggttagcatgggcatcaccacctctgcattcctaagtctttgatggtggtactcatcactgcattttctcctgggatgcagttttgcttcggatttactattttgaccagggttgtgttgccagggaggaagagcagtttcaggagcttgtgtttggccctttctgccatattggctcttacttcacaggtcatagaaccaatgtgagggtatgcttagctgactgttaagcatacctatgccaattttgcatttctcaagtggaggaagttatctcaagaatggattcatggacctgttaagcccagtatgaaacggtgctctaacctgaggccatggtagcatttggggtccccacatatcagtgccagctcagaccttgtagccacagcccttgaaaggtctgagtattttcctttcccagttactctggtaaatagccacagat

SEQ ID NO: 128438 - DNA, 331 bp, Homo sapiens
attgttcccatccttatgtacatgtgttttcaatgtttagctccgactttcaaacgagatcatgcagctaggtatctaagggaacatctaatatcaacggcaatactgcttaaaaactgttcaagattcatcagtgacacaaggatttatttattatcattttctataacactgatggtcttctatttctctctacatagtacattgaaatgcatttcacattatattacttagtctaaactactattttccccattattttatattactaccagtttactttatattgccaaggttctcataaagaaagtggaattgcataaggttcact

SEQ ID NO: 128439 - DNA, 541 bp, Homo sapiens
taaaccagagccctgctccgcccctctctggggtggagccgcaagctccaggttaattcctgagtttccagaaacactgaggccagcttcccttagacttgctctctagccagtgccgctgatgatgattgggggctgaacattcctagggtggggccctaggcctagggcctggcagggctgagtgtcagagggagttacaccttgaggggtggccaggcatggtggaccccatctccaattaggggacatcctttgtatcagtagaactgatgactctcaagccagggctctgaggttgggcttgagagcttgactcagtagagtgagtaggaatcttggaaacctggaatgcactacaaagtatggaatgcagtagatagatagtaggattaggacacaggatttggaatctgattgtcctgggttcaagtctcacactagccactaacagctgtgtgatcttggggaagttacttggcctctctgtgcctcattcccttacctttaaaatgggatattgttacctatttcacagagt

SEQ ID NO: 128440 - DNA, 721 bp, Homo sapiens
actggagtgggaataagaatgagagaagaaaagatggaggcagttacttatagacaactagctcaaatgtttttctacggaggggaacaaagaaacaagatggtagcttataggaaatgggatcagaagtatttcatgtttttctggctttgggtcatattaataaaaagttaaagactgaaaaccacaaaaccacctagtatacatgatttcaatccttaattttcaaaattaaaaaaaaattcttttcgtgcaaggccattgatatataaatattcaatagtggtacccctttaaaaagttattgtaagaaatgttaggacaacctagagatgtgagactttgttgttacctgcgtgtacagctcatttaacctctctctgttgcaggacagagaggggagaattgctggagcagtgtagcaaaaaacttgtgtgaccttgtgtaggcaaaaagagagggtatattataccagtaggaggggataggctttagagaggcacataggaagctcctctatggttaagaggtgggaaggcaaagtaagtgagtgtggatgctgccaaggagatagatctggtgttggctggttgtggatgtcttcttttcctgaacaaggagataaaccattatccccattttcctcaaaagaagaaagaagctcagagaggttacacagccagtaaggggcacagcagaactaaaattcagagtttctgag

SEQ ID NO: 128441 - DNA, 309 bp, Homo sapiens
agagtggcttaaattagatattttaggtgcttccaaaatttcaaatttctcaggaagcttgtgaagttctaaatttacctggatatctagaatgagtttgcgatttggtggcaagattatggaagaggatgtatgctggtttggaaacgggttaagaggaagaactgtgtgaattacttcactctgacagtgggatttaaggagaatagaagtgatggtcactgtttgttccacaatacataatgctcattgaatatacccaaaatgagccttttggaaaaagccctcagaaggagaaagagaaacact

SEQ ID NO: 128442 - DNA, 200 bp, Homo sapiens
tgggacaatctcctagtgttggacaactcctccaggatgggaaaagacacagaagtctacagggtccagggactcagatccaagtccactccatccactgctcagaggtggagggcggcccccgagaccgctgtccacggtgctgaaacacagcattgcactaatgcggtgcttctccaccttggctgcttattagaatc

SEQ ID NO: 128443 - DNA, 210 bp, Homo sapiens
aaaaagaaacactcttggcagttgtattctttattcttccatctactgtctgtctcccctttaagagtaatgatattggacacttgttaagcacctccccatgccaagcaccatgctgaatgctttattcacacaataaaggtgaataaatgcatggagaagtcactcagggctgggcgtggtggctcacacctgtaattccaacaattt

SEQ ID NO: 128444 - DNA, 844 bp, Homo sapiens
gcctaataaaaaggagcgtctatacaggagcttaaatgggatgtaccttgtagcattctgaggacaggcctgatttctgagaagggaaagtggtaaaagtattgtccagtcctttttaagctggtggctgagcttggtgaggtgtgtttttaaaagacctttagtccgttctacttttcttgaagaaggaggaccgtaagggatataaaggtttcactgaatactaagagcctgaaaaactgcttggctgatttgactaataaaggctggtctgttatcagactgtatagaggtgggaaggctaaactgaggaattgtgtctgacagaagggaagaaatgactgtggtggccttctcagaccctgtaggaaaggcctttactttattcagtgaaagtgtctatttagactaagaggtattttagtttcctgaatcagggcatgttgagtaaaggtaatttgccagtcctgggtggggcaaatcctccagcctgatgtgtagggaagggagggggcctgaataatccctgaggagtagtagaatagcagatggaacactgagaagttatttccttgaggatagatttccacgatggaaaggaaatgagaggttctgagaggtgggctagtggcttgtactatagcataacctgcctttgctggtgtgtggcgattaggcctggtggaacttccatcaataaatcaagcgtgatcagggtgaggaacaggaaagaaggaaatatggggtgaatatcaggtggatcagagagatacagtcatggaggtcaggtgtggtatcaggaataatgtgggaggccagattgaagtccaggccaggaacaatg

SEQ ID NO: 128445 - DNA, 635 bp, Homo sapiens
tctctggactcaggcgatgaatcaccaaatagagcactcagtattgatgaattataaaatacgctaaataaaaatctttcttgagatttgccttgaataagcaaggcgcagtggctcatgcctgtaatctcagcactttgggaggctgagggggtggatcacctgaggtcaggagttcaagaccagcccagccaacgtggtgaaaccccgtatctattaaaatacaaaattacccaggcacgatggtgcacggctgtaatcccagctagtcgggaggctgaggtaggagaattgcttgaacccgaaggcagaggttacagtgagccgagatcacaccactgcactccagcccaggtgacaagagtgaaactctatctaaaaaaaatattaggttaagaataaaagatgagaggaatttattaatatacactggctcttgtcacatataccttcttaaagtcagttttttgttaatgcaacgttagattttcttcatatatctttatcaataccacagcatgatgatggccttggttttgacacagggatcttgcctaaatgccagcgtttagccagatggtgaactacaaaattgatcttcctggggttccacatggcactgctgctctacagcc

SEQ ID NO: 128446 - DNA, 509 bp, Homo sapiens
taaggatctactactgtatgcccagtggtgtgctatatgcaatgggtaacatgcattgaatactgtaagtgatcttttctcttaagttactaataaactccttgtaaaggtaaagctaacacacaggaagcaagtagagaagtgcatggtactgattatcaaagctcagagaagttgctatttattgagcacctattatatctcaggtacgttaaatatttaagtgcagtgcctcattgagttgtttgacaatgatatgagggtcatactattgttatccccattttgcaaaaaggaaatggaacctcaggctaagtaagttgtgtccaaagtcacaaagccagtaagcagtagagtagcaagctgggccctgctccatgtgactgcaaaggtttcattctctcaagtacaatgacttaacaaatagagccaaatgggctgaaatagctaggggaagcttcctggaggaggtggaaactgatctaagtcttgaagagaaggtaggatac

SEQ ID NO: 128447 - DNA, 552 bp, Homo sapiens
gcccttagaaactctgcccgagccgttgccctcggggtaaagtcagctctgagcctgacgcctatccgcctccacagcctcatggaggcctctcaaccccttcccagcaccccctggttggttggttggtcggttggttggttgagtggctttattgagatactgtataatccatatccatttatcagtgtccaacttagtggctttagtacgttgacagagttgtgcagccatcaccacagtcaattttagaacattttcatcacgctaaaaagaaactcctaggccgggcatggtggctcacgcctgtaatcccagcaccttgggagaccgaggtgggcggatctcaaggtcgagagattcataccatcctggccaacatggcgaaaccccgtctctactaaaaatacaaaagttagctgggtgtggtggcacgcgcctgtagtcccagctacttgggaggctgaggcaggagaatagcttgaacccgggaggcagaggttgcgatgagctgagatcacgccactgcactccagcctgatgacagagtga

SEQ ID NO: 128448 - DNA, 632 bp, Homo sapiens
ggagccttgatgccaaatgaccacagacgaacatttccagccctggactatgtactgtcaaattggagagagaaataaatgtctctcttgtttaaccagtttatttggattttctgttatttgtaagcaaaccttgccatttatgttgaagatggcattgtctgtctttgttaatgaggggtgtctctttaaaacctacgaggtgttttcacaggtgactttgtaagttcattgtaaattattccacatgtatcactggatccccgtcatcttacatcttttctttcttcttcttttcacctagtgaaatagtgtgtcttttggagtcaggtacacctgttttatttttaacaagtttattgaggcgtaattacagaacataaaattcactgcttttaaatttacaattcagcagtttttagtgaatttactggtttacaaacattaccgtgattcagttttagaacatgtcaacccatttacgttatcccttgtgcctgtttgcagtaaatccccacctcagcctcagaagaccaccaatctaatttccttctctatatatttaacttttgggacatttcttataaatagaatcgtgatgtggtcttttgtattaccttgttttagtgagc

SEQ ID NO: 128449 - DNA, 677 bp, Homo sapiens
ccattgtaagctaaggttgagaataagttttagatagccacatgcatgggggcacattcaaaggatcctatgatcttaattggtaatatccattttttgataattatctttataatttctcttacagtaataagaccaaattgtacttgaagcccttttattttttcctatcagtatctgcttctcatgactactgaaaggatgaattgccaaactgtgccagtcatttgcatttttgaaggtgatacataacttatatgcaggctccttttataacactgggtattttgtaatcaaacattgtgtttgttagagaacctgatattttaagtccactttataaaaactgtaagtttaagtagtaataaacataagtaactacctttttgaacaattgtgtgttgaacagttaaatctcaaccttgactttttaaaaaatttacccaacaggtagagtcaacaaaaaattatagtccacatgtgtttaacaactctcttgttgaaacaataaaacaagccataggaaaggtgttttttatttttttaatcacttccttttctgctgagttaatggcacaatcattttggctaagagggaggggagagttgagtgacttattgtcgaactcttgggatgaacagatcatgtacaagaaaggatattcaataggatatag

SEQ ID NO: 128450 - DNA, 269 bp, Homo sapiens
atgctggtcctgtgggacggtggcgagcatgatgtaagtgtaggaggggtccagccgtctggctgtgagctgtgcagtttgtgcccacttgtggtggcatccccgtgtgcccgtcagtgtccctgtgtgtgtgtccccggtcctccctaccagtggggctagtcggctggatggctccaagttcatgctggtgatggtggtggggcccctaggtctcgagttcatgctggtggtgggggtggggcccctaggtctcaagttcatgctgg

SEQ ID NO: 128451 - DNA, 199 bp, Homo sapiens
agaatgtgccaaataggttgacacagagtagaatattgctaattggacattaagccttagaatccagaaatccagcaggaacccccattctggagttagatttcattctgagtcatccacttcattgtaaagtggccattgagaagcacatcctgtttcccttcccttctgtctgagctgaaccacagagagcctcagt

SEQ ID NO: 128452 - DNA, 309 bp, Homo sapiens
ccttacccttacgtgtgatgcatctgtagcttcggtatgttgttgtgttcgttcatttgtgttgctatgaaggaatacttgagactgggtaatttagaaagaaaagaggttgaattgtctcatggttctacaggctgtacagaaagcatagtggcttctacttctggggaggcctcgggaaacttagaatcatgacagaaggtgaagtgaaagcaggcacctcttacgtggctgtagcaggaggaagagaggggaaggtgttacatacttttaaacaactagatcttagaaaaactatcacaagagtag

SEQ ID NO: 128453 - DNA, 166 bp, Homo sapiens
ctataattttttggccactgtattttggagctctttgttacattattttaccctgtaccctaacaacagcttcctacattagaatgtagagacaaaaaggtcagagattcctgtctgttttgctcatcagtccatccctaccaagtagaacagtgtctggcatgtg

SEQ ID NO: 128454 - DNA, 649 bp, Homo sapiens
caataacaaaaccatgttttcacttcttatattctgaccatgacctcatcatcacacacttcaattattgcatgtctagttatatagaactcttacattgcatagtgtagaattggccaactttttgccagaaattttttgaagtacagtaagtcttcaatgttatggataggtcttggaaactgtgactttaagtgaaacaacttataccaaagctatttttttcactcatcattatagtgaaacatttccttcaatgtttttttcaataacactgaaggaaacagtgttattcaaaaacctgctgtacgtggtttcacttaaagttatagtctcccagaatctatcattcagattaagtgaggatttactgtagttattccactatgtggaatggctctatgtcagttaaactaagtagagttattattttatgtatgtgctatatgaaaactgattgattatagttgtaatttctcattttcacatttggaccacttaaactagtacttatgtacaacatctttacagatgacatgaaatatggtacttttttctgtgaaaaaagtttgtgattctgtcaagtattacttcactgaaaaataatgttaattacaagctgttcatttttattgaagaatttaaaaat

SEQ ID NO: 128455 - DNA, 476 bp, Homo sapiens
tgctgcaacccttgatagtgaaaaggggagacaatttctgaaagcatcttaaggtcacggtacaagtaatgaaactgaggctcaggaggaacagcttgcctgagttcacccagcctctccttagcagagatgtggctggaaccctgaagccacttcccctctctaagtctcagtttctttatctgtgacatcaggataagcaagcaaacaaacaagcaaagcctgcacggtggctcacacctataatcccagcactttgggaggccaaggtgggcagatctcttgagcctaggagttcgagaccagcctgggcaacatagtgaaactctgtctctataaagaatgcaaaaattatccaggtgtggtggtgcctgcctgtagtcccagctacttaggaagtggaggctgcagtgaggtgagatcgcaccactgcactccagcctgggagacagagtgagaccctatctccaaaaaaa

SEQ ID NO: 128456 - DNA, 324 bp, Homo sapiens
gtcggtagcaacccggtcgggaaatcacgtgatgtgcccaaggtcatgccgttgtctgaaatgcttggcagctgcctgcacacagctgttgtgaatcccctcctgccccttcataccgtgccactgtcttggattgacccactgtgactgtgtgcactgtcttctataaggaaaccccagaaaacacccgtcatgaaagttcacaatggagagaggtcaccggtggggtctttgccttcttcactgtgactcttgcttccaaggtccaccttctcgttggccagcgctcatcaattaccattgcccctgcctgcctgttctcag

SEQ ID NO: 128457 - DNA, 386 bp, Homo sapiens
catggagaaacaaaagttacttgaaaatgctattctctaagtgaaaaagagaaatactgcaagtagctgtttttctttttgccacccagattaaaccagttttcatacattacaagagttcttggatgaattcatttattacaatgtattttgatgtggacatatgtcatgacttgacacttatttgcacatcatgtcattatgccatgaattgctcacttctgttgatggtgacaatgacagcagttacactcgtttctagcattatgttggttgctctgtgtataccatagctaatcctcccaataatcctgcgaagttgagatccatatcctcatttgtagaagaggaaactgatgctccgaggggttatgtgctttggccga

SEQ ID NO: 128458 - DNA, 791 bp, Homo sapiens
gacctcactgtaactcattataattacctccttaaagatcatatcttcaaatacagtcacattatgagatatgggaattaggacttcaacaaatagacttacaaaaggacacattactgcgtcagattttgtaaactatactaaagaaataaatataatttcttaggttataggagtatatattactttcttataacctgcttttcttacccaatatatatttgaacatttctgtgtatatttaaacacttacaatataaattttcatcgctatctagcattctatcacatagatacctaataatttatttagcagtcctaacttaaacttaattttttgaataagaaaaacattcatatggttcaaaatcaaaacaatataaaaagataaatacttccatcccacccctgttccatataagtaaccccttttattagtttcttgtgtattcttccaatgtttccttatgcaaataaaagcaaatgcaaatacatgctcttatttcccctactttcttacacaaagggaacacactatttacgctgtgctgcaccttactttttctaaaaagcaacatatttctgaagcttctccattatcagtacataaagagcttccccattctctcctatagccagaaaatatacaattgtgtagctgaaccatggtttacttaaccagtgtcttctatacaaggttgtctctaatttttcttctgttgcaaacagaggggcaaagaataaactcatacatgtcatttcctacaagtacagatgtattgctaagataa

SEQ ID NO: 128459 - DNA, 455 bp, Homo sapiens
ccttttttgaaggcattagatcactccagaaatgaaccatctgaaaaaaatctttgatatttatgttgtctcatgaaatccttgtgtatgctttcttcattcatgttgctaatatgaaagtgaagatgcttttgcataaaccctgggtttgacaatattaaaatatatattccattttcttaactgtcatgattgagcttctccagccaaaccaggtgaagtctgaattttaatcaggatctggcatttcaccttggaattaattagctaattccacactagggccaggatcttgagaactctctgcctctgatactgggagtggcatcctgaaagaaaggaactgtctaatctttagtgcaaatgagatttatcctttgtcctgggctctaggacttaaaaaagaatctttgaaattttattcagatcacaattgtgcagtaaaagtgagttgc

SEQ ID NO: 128460 - DNA, 317 bp, Homo sapiens
tactagctgtgcgactttgggcaagtgacttttgcttggctgggcttcactttctgcactggtcaaatgcagaaagggtaatagacccttctggggttgtttggaggattaaagggagagcagtatgtccgtaataatcgcactgctggcacacagctagtgcttgaaactgtgagctgctgttaggttaggggcagcagtctggtctcctctgcagagatgggtctcagttaattgtgaacttaaacagtttggcactgaggctttggggtcattgccccagggccacccaagtaagcttgtctaattgagaggaa

SEQ ID NO: 128461 - DNA, 338 bp, Homo sapiens
cagaaatgttctttccctctgtgcccttctgtcgacttagcaccctgctaaattcaaaagcgaactctaaactccatctatatcatacattctttcgaggaattaactgttttctctcaaactgacattctgggctccacctctagcagttctatgtttgtaagcaccttcttcaatctctgtttccttccttaaaactgtggatagtcaccacagtaccaatttcccatgtgggtactgatgatgacttgggcatatatgtgtaagtaaattaggatagcgcctaaatgtttcagattaatctctaggcacactgaagtgattcccaaactaattta

SEQ ID NO: 128462 - DNA, 310 bp, Homo sapiens
tctttcctgcaaaagcccacagagcaaagcagatgaggcatcagggcccagatagcacaatgtacctggaaaatgtcacccctctccaaagtctgtgacataaacacagaataaacatccctcttctgtcctgctgctagactctccattccaagagaacaggatcagtatcttgtgctcatttgtttaatcaatatcaatcgccagtctattgtgcccaccaggtacactcccaaaggagtgcatgtgcccagtgcagaactgggtcttcatgagcacctgctatatgagcagactctttcttcctgtc

SEQ ID NO: 128463 - DNA, 273 bp, Homo sapiens
agggcagcaccacagagctccttccaaacgcacagccatggaggttattgtaaaacttcccgcacttggcattcagggtcacttgtgccttatgaggtttctatcatattcattggggttcagtgggagccctagatcctaccattcacttccagtggccctgactctgaatggtgtgaccttgagcaagttgcttcctagcagtgctgggtcttggctcctgatggaggaaacggaccagcccttctttaacatccccttgagtccacattt

SEQ ID NO: 128464 - DNA, 1870 bp, Homo sapiens
agcagataatggcaagcatggctgccgtgctcacctgggctctggctcttctttcagcgttttcggccacccaggcacggaaaggcttctgggactacttcagccagaccagcggggacaaaggcagggtggagcagatccatcagcagaagatggctcgcgagcccgcgaccctgaaagacagccttgagcaagacctcaacaatatgaacaagttcctggaaaagctgaggcctctgagtgggagcgaggctcctcggctcccacaggacccggtgggcatgcggcggcagctgcaggaggagttggaggaggtgaaggctcgcctccagccctacatggcagaggcgcacgagctggtgggctggaatttggagggcttgcggcagcaactgaagccctacacgatggatctgatggagcaggtggccctgcgcgtgcaggagctgcaggagcagttgcgcgtggtgggggaagacaccaaggcccagttgctggggggcgtggacgaggcttgggctttgctgcagggactgcagagccgcgtggtgcaccacaccggccgcttcaaagagctcttccacccatacgccgagagcctggtgagcggcatcgggcgccacgtgcaggagctgcaccgcagtgtggctccgcacgcccccgccagccccgcgcgcctcagtcgctgcgtgcaggtgctctcccggaagctcacgctcaaggccaaggccctgcacgcacgcatccagcagaacctggaccagctgcgcgaagagctcagcagagcctttgcaggcactgggactgaggaaggggccggcccggacccccagatgctctccgaggaggtgcgccagcgacttcaggctttccgccaggacacctacctgcagatagctgccttcactcgcgccatcgaccaggagactgaggaggtccagcagcagctggcgccacctccaccaggccacagtgccttcgccccagagtttcaacaaacagacagtggcaaggttctgagcaagctgcaggcccgtctggatgacctgtgggaagacatcactcacagccttcatgaccagggccacagccatctgggggacccctgaggatctacctgcccaggcccattcccagctccttgtctggggagccttggctctgagcctctagcatggttcagtccttgaaagtggcctgttgggtggagggtggaaggtcctgtgcaggacagggaggccaccaaaggggctgctgtctcctgcatatccagcctcctgcgactccccaatctggatgcattacattcaccaggctttgcaaacccagcctcccagtgctcatttgggaatgctcatgagttactccattcaagggtgagggagtagggagggagaggcaccatgcatgtgggtgattatctgcaagcctgtttgccgtgatgctggaagcctgtgccactacatcctggagtttggctctagtcacttctggctgcctggtggccactgctacagctggtccacagagaggagcacttgtctccccagggctgccatggcagctatcaggggaatagaagggagaaagagaatatcatggggagaacatgtgatggtgtgtgaatatccctgctggctctgatgctggtgggtacgaaaggtgtgggctgtgataggagagggcagagcccatgtttcctgacatagctctacacctaaataagggactgaaccctcccaactgtgggagctccttaaaccctctggggagcatactgtgtgctctccccatctccagcccctccctctgggttcccaagttgaagcctagacttctggctcaaatgaaatagatgtttatgatagaa

SEQ ID NO: 128465 - DNA, 2160 bp, Homo sapiens
agcagataatggcaagcatggctgccgtgctcacctgggctctggctcttctttcagcgttttcggccacccaggcacggaaaggcttctgggactacttcagccagaccagcggggacaaaggcagggtggagcagatccatcagcagaagatggctcgcgagcccgcgaccctgaaagacagccttgagcaagacctcaacaatatgaacaagttcctggaaaagctgaggcctctgagtgggagcgaggctcctcggctcccacaggacccggtgggcatgcggcggcagctgcaggaggagttggaggaggtgaaggctcgcctccagccctacatggcagaggcgcacgagctggtgggctggaatttggagggcttgcggcagcaactgaagccctacacgatggatctgatggagcaggtggccctgcgcgtgcaggagctgcaggagcagttgcgcgtggtgggggaagacaccaaggcccagttgctggggggcgtggacgaggcttgggctttgctgcagggactgcagagccgcgtggtgcaccacaccggccgcttcaaagagctcttccacccatacgccgagagcctggtgagcggcatcgggcgccacgtgcaggagctgcaccgcagtgtggctccgcacgcccccgccagccccgcgcgcctcagtcgctgcgtgcaggtgctctcccggaagctcacgctcaaggccaaggccctgcacgcacgcatccagcagaacctggaccagctgcgcgaagagctcagcagagcctttgcaggcactgggactgaggaaggggccggcccggacccccagatgctctccgaggaggtgcgccagcgacttcaggctttccgccaggacacctacctgcagatagctgccttcactcgcgccatcgaccaggagactgaggaggtccagcagcagctggcgccacctccaccaggccacagtgccttcgccccagagtttcaacaaacagacagtggcaaggttctgagcaagctgcaggcccgtctggatgacctgtgggaagacatcactcacagccttcatgaccagggccacagccatctgggggacccctgaggatctacctgcccaggcccattcccagctccttgtctggggagccttggctctgagcctctagcatggttcagtccttgaaagtggcctgttgggtggagggtggaaggtcctgtgcaggacagggaggccaccaaaggggctgctgtctcctgcatatccagcctcctgcgactccccaatctggatgcattacattcaccaggctttgcaaacccagcctcccagtgctcatttgggaatgctcatgagttactccattcaagggtgagggagtagggagggagaggcaccatgcatgtgggtgattatctgcaagcctgtttgccgtgatgctggaagcctgtgccactacatcctggagtttggctctagtcacttctggctgcctggtggccactgctacagctggtccacagagaggagcacttgtctccccagggctgccatggcagctatcaggggaatagaagggagaaagagaatatcatggggagaacatgtgatggtgtgtgaatatccctgctggctctgatgctggtgggtacgaaaggtgtgggctgtgataggagagggcagagcccatgtttcctgacatagctctacacctaaataagggactgaaccctcccaactgtgggagctccttaaaccctctggggagcatactgtgtgctctccccatctccagcccctccctctgggttcccaagttgaagcctagacttctggctcaaatgaaatagatgtttatgatagaaaaaaaaaaacgacagagaacaagcatcaaaaaacacaaaaatagagaacaaaaaaactgtgtgcgcgcacaaagacccagaaaaagaataagacaaactgtagacagacgcggagcacaaaaaaaggaaacacgggcgcagcagtaggacacagaaaacacgggagaagagacaaggaagggaacatcacccaaaaaaaaaccccggggaacaacacagcggtgcagaaaacaacaagggagaagaaggaagaaacagggcaaaacaagagatgcaaggcgagcgaaaaa

SEQ ID NO: 128466 - DNA, 704 bp, Homo sapiens
aagcttttttgttaaaaaccaagacacaagcacacaaattagcctaggcttacacagggtcaggatcatcaatatcactgtcttccacatccacatcttgccccactggaaggtcttcaggctccataacatgggtggagctgtcatttcctataataacaatgccttcttctggaatgcctcctgaaagatttgcctgaggctgttttacaattaacttttaaaaaaattcataggagtacattccgaaataacaataaagagtacaggatagtaaatacataagctagtaatatagttgtttattgccattatccccaatattatgtaccatacatattagtatgtactatacttttatatgactggcagcccagtaggtttgtttacaccagcatcactgcaaacaggtgaataacacattgcactgtaatgttatgatggctgtgatgtcactaggcaatagggatttttcggctcccttataatcttatgggaccatcaccatatatgtggtctgtcattgactgaaatgccattatgctaacacatattaaatatataaattaatttagtccttattcaaactcaggaaagtaagagtttggaataagctttatggcattacaaaagtatttatcctctttgtagaattcatcaaagcagcatagagatcttttatgaatatgcctaagtatgtggca

SEQ ID NO: 128467 - DNA, 352 bp, Homo sapiens
ctgggtggatagacagttgcttgtttgaaacattgatgaggataataataacacacttgtatggagaatccctggatgccaggcactgttgtaaacatcttacatgtaatcacttagttaatcttcataacaactcatatggaaggtacttctgttctccccagttttatatatggaaaaatgaggcccagatagagcttaggtaacttgcccagggtcacgcagctagtaagtggcagagccaggattctgattccagaagtcaggccccatgtccgtgtttataccatgtggctgagctgcctctcttcctggcgggtggcagacaggtgatggaggaagaccatttcct

SEQ ID NO: 128468 - DNA, 382 bp, Homo sapiens
cttccttgttcattagcctccttgctactcaaaaactaacatctcctgcctcagaacctttgtacatgcagtttccttcctttggacgctcttgcctcacatacgcttgtgcttgattcctcatttcactgaggtctctcatcaaacgccccctctgtacacaggccttatggtcagggactctgttttgagtctgctgtgtccctagagactagagcagagccctctctataataggaatgcaaaaccttgttgaatcataggattcatttattaatcaattacttcatgaaatttgtttttcttctgagtcaagatcttcccgtcacccaggttggaggacagtggcacaatcgtaactcaatacagtcttgatttctgg

SEQ ID NO: 128469 - DNA, 356 bp, Homo sapiens
attgttctgaataaattcactttttcctgcaataatgatataaggaatttatacacatctaactttttttaaatgttactttttatcacttttgttcgatttttactgattgttaatatacccttttaaatatctctattggcacagcaaagtaagcttttcagtttagtagctctctaacaaaatattttctaattctgtgctttaagtgaaataaaacggggatgaaagtggcaaaaccatattatcatgtccatgagcagccaaaaagaagtctttagtgaccagagaaaccttaacgtaaacagtaagaagcaagtaataggacagaaacaaacagattctttactcagaat

SEQ ID NO: 128470 - DNA, 654 bp, Homo sapiens
atatgaagaagtgtcattttgtttttcatttcaaaaatacaggccatgtgcagtggctcatgcctgtaatcccatcactttgggaggccatggcaggggtattgcttgagatcaggagttcaagaccagcgtgggcaatatggcgagacactgtctctacttaaaaaaaaaaaaaaaaagctgggtatggtgatttgtacctgtagtcccagctgctactcaggaggctgaggtgcaggaggtttacaccttcagtcacttcagtccatgaggttacagtgaaccacgataatgctgacagtaagatcttgtctctaaaaatccattttttaattaaaaaaatacacacaatcatatgtctgacaatggtttaatatgcagaatatataaagaacttctaaaacttgaacaacaggaaaacaacccaattttaaaatgggaaaagggcttgaatagaaattgctacaaagatatgaaaatggccattaaacataaggcaagatcgtcagtatctttacgcaaatgtaaatcaaaaccactgtgagattcaaacttactaatatgactataatttttttaaaaaatacaaaacctggaaaacatcaagtgttggagaggattggagaaattggaaccttcatacattgatgatgg

SEQ ID NO: 128471 - DNA, 693 bp, Homo sapiens
aaggtaaaggtaacaatttttaccttgataatataaaggtaaaaatgtagtagacagtatatggggacagaagaggaagtgtgtaggaagggcagagtgggaatattaatagcatcatcttttatagagagaacacactgatgtgattgaacaccaaataggggtatatgcatctgaaagtcacttttggtatgttgaccttgtatcctgcaactttgctaaactcatttattatatgaacttttatgtatatttcttggcattttctacatacagtggtgtctgtatagtttactatttacatgtgaatatggatagtttaatttcttcctttccaatttgcttgccttttatgtcttcttgaaatactgcgttggctaagacttgcagtaagaagttaaaagggaatgtttggagcacacgtatttgccaagtctctgatcttagtgtggctggggggaagcatttagtatttcattaagtatgatgttagctataggttttttgtagatattctttatcagtttaagaaaatttcctacgattactagattgttcagaattgttttaagatcatgagttgatatttcaattttgttaaatactttttctgtatccattaagataatcatgtgtttttcttagtcagtcattgtagcccattgtattgcttgattttctttattaaggtat

SEQ ID NO: 128472 - DNA, 387 bp, Homo sapiens
ttctgtttctttccccacctaacattttgtttactataaatgattgcagtcatcatcctaaagcatatgcaaaatctcccttcccctgactcacgtttgatgtacctgcctctggatatttttgaaataccttagggggagaaaaacagtagttttaagagctagtggacagtttccaggtcttaatgaatctgacaacctgcagcccagggccaagaggaatgaattctcttttccctgctctcttgatgaactcactgaccagccatgggcgggcaggtgggcaggcaaggacccctggccaccaggtgccagtgcatcagctgcatgaactcctggcaccagaactgccacctctacagacatgctcaaaagacaagtttggac

SEQ ID NO: 128473 - DNA, 549 bp, Homo sapiens
gcacacatgtgaacagctagcgccaatagctttggtcagcattaatatgctgggtgtagatcttctccctccaagactccatacattcagcgtcttaagaagcagacccagagttccagggcacagcctcagcagcccaaggccagctccaaggtcactggcctttcctgatttgaccttcacttgggatcaagtcttcctgaaccagaaacaagctgaatccgagaagcccaggcaggctgtgctgctagcatcctgtgtatttcgcttcatctctccccgttacagaccaggaattccaaattcctagcccaaggtcagagaggtctcactgatgcctgtgtagccacgtgaggatgggaagtctcatttgccagtaagcactacaggaagtgatggttgaacacgatgggactaataagaaggaaacgtagttagagtgatcttattcatttaaaaacaaaagcagcaacaatacagcagtcgaggaaaagaatcaattctatttaagcaaagcaatttaaagtaataaaaaatgtttccagcatt

SEQ ID NO: 128474 - DNA, 368 bp, Homo sapiens
tctgcgtcagcctcccgagtagctgggactacaggcgtgcgccaccacgcccagctaatttttgtacttttggtagagacggggtttcaccatattggccaggctggtctcgaactcctgacctcatgatccgcccgcctcggcttcccaaagtgctgaaatttacaggcgtgagagccactgtgcccggccgtgtttttggtttttaaaattatgactgataaattatttctgtaaatatctgaatggaatatcaacattttgattcattttttgaaggcaaattttaatctggtgatcaaatttcttaaagcatacttttaactccaaatttccactttaaagatagtaaagttcagaagattata

SEQ ID NO: 128475 - DNA, 419 bp, Homo sapiens
tgctcgcccctctctgcgtctcaaaagtgatctcttctcttcctctaaactcacctgaagctttcaccaagtatgctggccggttcttgcttccttttcctaactcctctgttgagcagagccatgggcggtgtgctgagaaacagcatcgggtccttggatgggttttctagggaaaatgcatgaccaatggcctaagcgtggctggacctagggtaggaaaagaatggaaggtagctgaggatggagctttgggaccctgtgtagcactgtggttaagatctcaggcatggttagcaacaaatggcatggggatcctcaacacctgtcgggtatctactatatgccagtctaggaatttcaacaatgaacaaatagacccattccttctcttcatggacttacaactttgtggggca

SEQ ID NO: 128476 - DNA, 653 bp, Homo sapiens
ccctcccccactttgtccaagagaccacagtgattgccctacacctgccccaacccatcctctctgcacatctgggtcagggcaagctttccaagacttacctggccagtcctcactgcccaccccctgcagtcctcttacctgatcatccctccatccctctccatcccatgtcccagcctgctcctgcccccgactcagctccttcctgccaggcttctgcatgtactattccttctgcctggactgccaccccctcagctcaagcctgctcccccgcaacggctctagggcagcatctccctccagatgccatgaccccgtagttgttgatcattgcccccactgggacataggctccaggggagcaaaggaagaggctgttcttggtcgcctctgtactgcccgagtccggcacagtggtcggctcatagccaatgaataaacattcccggaacaattctatgactctcaaattagcctgagcaccaaaaagaggagcagggtctgagttgtgggctgagctatcctggtgccaaggcaggccttccactgccacgtacacaccctgaaggcagagtcagcacgcccaaatcctgtggggcctgatggtgaccactcaagctcggacaaaccccaagtgtgatctcact

SEQ ID NO: 128477 - DNA, 481 bp, Homo sapiens
ggccagggctgaaaatggggactggggcattctactcactgacagctgcagccaggaggaaagcagagagggggaggaaaatgagacatttgtgtaagggatggactggggaaggaccaatgcagccccaggaatcaggggcccccagagggcagtgtttctaggagtgatggttaaccatggttattgaacaagagcattataaattcactttattacatttttggaattgatagtactctgtggaacagatgtgttctcttggaattgtccccagtcagagaggcgctgatggtcagcacgcagttttgatgaccaagggtgtgctccttctacctgactgaagctgcgggaagtgttgtagaaagagcctgctctgtctgctctcatattgattgtatgtaggcatttggggttttaaaactgatttcaatttggagcagtctttgcttcttgtttacaagatcgtttccaaaaatgg

SEQ ID NO: 128478 - DNA, 296 bp, Homo sapiens
caggacccaggcaggtaacctgggctggctcctggactcctttgtccaatcagaccacccacattttctgacatcagtgctgtccctggatgcactgggcacagctgtgagtgctttctcctgcagatctgggatagggctacaggaattcagaagaggaagctattactttgggagaaaaagggaaaaaattaaaaattaaggaagcttcatggaaaaggtgacatttaagctaagtcttaaaaagatgaggaaaatgtgtgtgtgtgtgtgtgtgtgtgtgtgcgcgcgcgcgt

SEQ ID NO: 128479 - DNA, 227 bp, Homo sapiens
acgtggccgcttctcaacacaaaaagccacaagtaactaaaaatatataacaggaatgtgcaccaaacaacacggaaacaggagatgcaagaaaacacagaaacatattaataataagccacagaagacaggccatgaggacacaaaataaggatatacagaagactaaacaacagaattaatgtatcatggaggtgtatacatatatgtatctccatatgtaaata

SEQ ID NO: 128480 - DNA, 155 bp, Homo sapiens
ggtcatgaactcttggcctcaagcgatcctcccactttggcttctcaaagtgctgaaattataggcatgagccactgcccccagacacaactaacttcttgaagctcttaactaacattaggcaccctcaaaaccattccttctcccagctgagc

SEQ ID NO: 128481 - DNA, 175 bp, Homo sapiens
tgatttggtgatccctttaagaaaccgcaggcggaggaatttctctgagagaaaataatcctactcacggggccccttggaggccattaaccccccgagtcccggcccccaccccgtccccgggcaggccctcccgcccacgcgcggacccgtgggatctcagaagctgcggccc

SEQ ID NO: 128482 - DNA, 529 bp, Homo sapiens
gagaaaacgtggcccagagatgagatgttacaaggagatatgactgctcccctcatatttaagagctcccaaggtagaaaaaggaacagacacccttgggtgatcaaagaaaacagaaatagggtcgaagaaaatcaaaactagagggagacagaggtaggttcaatacaatgaagaacacagaacaattattccagaagagtcactgtctcatgaggtagcaaggtctgcatctgtacaggtgagagcccacctatcattgagatgaagtcatctagaattcaagaaaaactttcagctcccttctaactgaaactccaggctcagttatctggtatagaaccctccagtaacccccaggtccctccaccttcttcctttgaggtcctgaccaagaaacacggtgccttgatcactctgtgacctggacacctgcatgttttccactctgggctcgaacccaagctggggtcttgaacattcccaggcactgataaagttgttgaggttattgcttgaagcacggaga

SEQ ID NO: 128483 - DNA, 676 bp, Homo sapiens
gtacagggctagatgtcagggtagtggttatgttggcaggtaaagaatgggtagtaactggaggggaagcaaaagagggcctcctgagctgtagtgatgatgcttatttctgatttaggttctgattacaaacgtgttcactttgtaaaggtttattgaactgtacacttaaaatttatatactttttatgtaatgatttttaaaagttttactttaaaaatatctgtacaagaagacaaccttgaaataaaacaattatggttcaaaacactttgcatttagatagtgttagactattaataattgccttgaaaattttgcaaagttgaataatctctgaactttgtgcttgagaataacaaagctttcctgcagagctaatgtttggattgcttatttttaatggcatttacaagggcttctctgaagtctcgacatagggttgtcatttttcccacttactgctttttcactgaggtttatagtgctttccttcgcgtccagaagaacgtgtttattagataattagagaaatcttgatactaaagttgcttttcagtataatcacttctgctggtaagtaaggttctactggtaaaagtaatgactacctacctccttggtattaaagggtagagagagaactttgaaaaatgctagtattaaaattaatta

SEQ ID NO: 128484 - DNA, 418 bp, Homo sapiens
ctagaagtctagttcgttctctcattgtgaaagcagttttcaaggcacaagataaatttttatagactcttgctatgttaatacaaaggaaaacacaactttggaaatgtttctaatgaattattctttctgaaggtggaaagttttcaaaatgacttttttaaagaggaaattatatattttttcctatagcgcatttataagataaatgaatatacctgaagggcttcttttttattgttgttttcctattaacatagcagcttttgttgtaaatattttcagcatgtttcacaacaaaaattctagaaaatttagttatttatatatggcttaacatacgattttccaaaagatacaatatgtaactttttgccaaatgtacactgttcacaaattaccaatttctcttgggtta

SEQ ID NO: 128485 - DNA, 395 bp, Homo sapiens
tccttgtctgctttaaatcatctcacgtcttcccatacatgatgtggcccctacctacttgtccaacttgttgcctttatatcctctccctcatcacaaggctctttccagccacagtggcctttctcttcctgaaacacaccacaatcacttctgctacagggcctttcatttgctcttccttttgcaaggaatgttcttttccaagactttgacacacatggtcccttctctttagatgttactccaatgtcaccttctctgagagtccttccttgaccaatgtgaaatagcccccctcataatcacttttacatgattctctattattacaatagtcacaactctattaatatctggatttatttatgtcttgtcgattttagaatttaaaa

SEQ ID NO: 128486 - DNA, 719 bp, Homo sapiens
actctcatgaacttttttaattgcctttccctggaccagctctagttctgctacagcagtcagtaacacacacagataagtgtacatcgccactagccctatcagtactttaacagtgagtcatatctttctcgactttctctgtgcctgtactaatttatatatactttttctccccctccacaatgggatcattctttatctgagtcatttgctatatctgtatatattgttttaaggggtgcatcttgtgttattttctgttctgcatttatatcccaaaactattgaaaataattttttttcttccagaaggaatgttcaaagtaatatttcttgttttgtaaagttaatgtctcttctttaacacagtggtcacaaagaaaatattttcattttgtctctgcttttaattatttctttaaacttaggttctaaggttctaagacagcctacatttatctcacaaattaattaggactatctttatgttccagtcatttgctcaaaatcctacactggttttgtctgggagcttgagacttgagaggactggtctagatctgcactatccaacttgatagccactagccacatgtgctattgagtgcttgaaatgtggctagtccgaattgagatgtgctgtaagtgtaaaatacacaccagattccaatgatgtagtgccaaaaaaagtaaaatattaataattgttttgtatt

SEQ ID NO: 128487 - DNA, 693 bp, Homo sapiens
catgcatggcttttcaaaacttaaatagacattcttcattatgggcctttatgtttgctttatttttttatccagtaagccctgaattcttaagatgaatttaaatttggtctaacagttaagtgacagagaattcatacagattcttgaacagtaaggtggtataatactctaaaaaaaggattatttttggtgtacagcaagatgcatgaggatggctccaacagaatagaagtgttcatgtaggaaaatcaagggactttaggacctgaggctgggacagactctccaggatgtggttggattttgggctaaacagtctttctgtggtcttgaggactgcctttatagtctgtgaaaccctatccttcaattgtggctttacagagtttaagaaaattttgttcgtatgcagatttctgcagtcttcctgttgccaggaagaacctacagttacacaggagtgtgtgtgtgtgtgtatgtatgtgtgtgtgtgtgtatgtgtgcagacacgtgtgtgtaaacacacaaagtagactgaacttaaacctgatttataggagtcaggaaacctgagtttctttgctttctccttgtgtaattttggttaagttgtgtaacttctttctttggagtttcttgtctgtaatctggaaattatttcccactcactccactgtgatgttttgagaa

SEQ ID NO: 128488 - DNA, 299 bp, Homo sapiens
agggtggtcatcctgctaagtcatctaagtaaatattcaccttcagaaatgtacacgctacacctcaacagaacaagcaagacagtgacagtgcctcccttggcccctttcccacctggaagtgaagacctaagggatggttaagcctgcatgcaggctgggcacggttgttcacgcctgtaatcacagcactttgggaggccaaggtgggtggatcaagaggtcagaagatcaagaccaccatggccaacacggtaaaaccccatctccaataaaaatacaaaaaaaattagccggtt

SEQ ID NO: 128489 - DNA, 263 bp, Homo sapiens
aggatctgggtggggacacagcaaaacaatatcatacgttgaacttcgttgtgtgtgtgtgtgtgtgtgtgtgtgtgtgtttgatgatcatgtgatatttttccttctgttaatatcatgtattacattgattgattttcttatgataaaccatccttcattcttgggctaaatcttacttgttcatggtgtatagctgggattataggcgcatgccaccacgtgtggctaattttttgtattttttagtagagatggggttt

SEQ ID NO: 128490 - DNA, 596 bp, Homo sapiens
acagtatcccattgtatagatgtacataatttatttaatcagttctgcattggcgaatattacagtttccaatttctgccagagcagtgtcataattgtatccatatgtcattttgtacttgcaagtttatatgtgggaaaattaatagatgtggtactactggccctgctaggggtttgtgcatagtttagatactacttttcatagaggttatagtaattgaccatctcaacagcaataatgaattggagtccctgtgtcccacagtttttcatacaacgtgtaaaacaaaactttataactttcccaactcattaggtgaaaaatactctctcagtgtagttttaattgtattcctcttcttatgactgagtttaagcctgctttagtccattgagaatcttttgtatagtactatttctataaattctattttgtaataacatttaaaatattagtagatattgccaattgtgatacacaaatggtaagcaataacatgaatattctctcattctcacctacactggatgttaaataattgactgagaaatgtatattcttgagtccttttctttagctaaaaataatagtc

SEQ ID NO: 128491 - DNA, 159 bp, Homo sapiens
agtgctttaaaaatcacttgaacaatacagtagagtagaaattatattatttttgcagacttggaaactgactctgttagaaagtgaaaaagtgagttttcaaatgatgctagtgtcatggttaagagcctgggtgtaagtcaaactgcctgaattcaa

SEQ ID NO: 128492 - DNA, 348 bp, Homo sapiens
atctcctgacctcatgatccgcctgcctcagcctcccaaagtgctgggattacaggtgtgagccaccacgcccggccaaatttttcaacaaatacatactcaagccaaaaaatggtgctttaacttatgacttaaaattgttgggactataactctagaaaaaatattgcagttgagtaccgaaagtattgataaatgaaatctgttttcaaagtgcaataattttgtagaggataaaatagaaattgttcacctaggagattaatacataaataatatttacagagcattgtcttgagaaatgcagtttgatgatgtttcagtttgagcaaaagatgaggctctaaa

SEQ ID NO: 128493 - DNA, 399 bp, Homo sapiens
ggaatagcaattcaatgtcataggagtgtggtgaaggccttagaggcaactccaggtcaaaggtggggaaccaaggactaagatcctgctcaaaggcccagagagaccgggaccagtgtcagagcctggagtcaggatggagtaagagtcagccttggtttggtaggacaagcaggaaggctggggcaccagggctgggactagggtgtggaaagagaggcaccaagggcttgaaacttaaggaggtcatgaacttgcagaggacatgtgagtgggagagggatatttcttccctgtctggatgatcccaacactcatgggcatacagggtcatggtagcctgtgtctctcaccccatgccttggaactggtgagttctggactaccctttcagacctt

SEQ ID NO: 128494 - DNA, 334 bp, Homo sapiens
tcagatgtgacccagttatcagaattagagttcacaaagatggacgtgggcttggaacaagcaaaatccccgtaatcagaattaaactccaaagggtgaggctagcacaatttaaggagctgttgctttaggccagatgtcataaactttctgcacaaggctagatagtaaatattttaggctttgtgggtcatacagtctctgttacaactacttagctctaccattgtagcagaaaagcagaaggcagccatagacaatatggaaatgaatgggcattactgtattctttatttacaagaacaggcagtctgtggttttctgacccctgttt

SEQ ID NO: 128495 - DNA, 462 bp, Homo sapiens
cgtgtggcttacacttgtaatcctaccactttgggaggcagagatgggaggatcccttgaggccaggagttcgagaagctatcagctttgtcagcccaaaagtggatatttttacttaaaaaacaaatgcagaagtgaaaagatgaagagcacttgtattggagtacactggcctgggtttgaattcagactccctcactaactagctagagtaaccttgggcaagttatttaaactaagccccagcttcctcatctgtaaacagaaataacagtgaacttttaagttgatgcaaagattaaatcagatgaaatacagactgcaagaggtataatgcctcctgtacattaagttaggtaactgaaaagattagggtaacctccccaaatgccaccttccaaatctgcaaaatgaggataattataccaatttaataggactgttgtgaggactatgaagata

SEQ ID NO: 128496 - DNA, 782 bp, Homo sapiens
ggggaggggatatattgaaacccaattttccatgacctggcgtcatgtgggatactgagagatcactgacacatggaacattctggtctgtagcatttagggaaaatatggatatttagcaaagatgtatctaagggacagcctaggtaacttatcagttcaatagtgaggtttctgatgtgcatgacatccaggggtgagatttctgctgttatatggtaggaaaaggaattgtatgctgttttctttactttaattgtttttagccaaagtagctgttatagctatatgctatggtaaaacactgcagcttttggttgttaggaaactgttgggttatctgggctcttctttttcccaagttctgaagatgaagagctgcctatcagaaggcacaaaaagaataaaacagtttgtggcttctgagacaaaaattgttatctatgacaataaataaatactcatgcatactgtattttttaaagttaaacaatatttattttcatttgtcttattagaaaaaaaaaaaaaaaaaaaaaaaattggcgggggacctgaaaaagcttccagacagtccggtgcggcggggccagtatgtaagggaaaatggccaaaggggtccgaaggacctgggcagcatgggggggtccaccaaaacacgcggcggccggggtcggacaccaggggtcttggctcggccttacaggccgacgacgccccgccgccgcccggtgaaaaaaaaaccccaaacagaaaccaaccaaaccacacaccaacacaag

SEQ ID NO: 128497 - DNA, 610 bp, Homo sapiens
cataaacagatatcccagttgctgcctcttgtctagtcatagtttctcctttcactctcaactgtcctggtttggaagataattgtatgtgttatgaaacaatgggaacattgaaaagagacatttacctctgcctggcagagatcagggaaggcttcctggaggaaggtgctttctgagctgaatcttgaagggtaactaggagttaggccaatcacagagggcataagcaggagctggtgacaacacatagcaggagagaaagagtcagagtgggtgagagggagtgtgtgtatttgcaacgtgtgggaattaggtatatctacaaattattggaacataaagtttgtagagtgtcactgtggatgggtagagaggcagagaccagattgtgagggttccatatgccaggccagtgagcacctactctgtgccagacattgtaggcattacttacattgtctctaatctgtccaacaactcgagaggaagacatcagtatccttcaaaagagaacctaggttcaggttgggttgtaattgccccagtttagaatgtaaaaatttgaatctaactctagatcctgttctttaccggtgggccagtggac

SEQ ID NO: 128498 - DNA, 237 bp, Homo sapiens
catgagatacaaatggtgaacacaggaattaactaggtaagtataactgatggaaagtaaacaaggggaagtgtgtcctgggcagagagtgggaacagcatatgtaaagcctgagatcaaagaaggccaagtgcagacaaaatgccatgggacacaacaagagatgtggctgaggaagtcagcaggggccaagtcatagggcacaggagggggccaggccagcagctgggcccatag

SEQ ID NO: 128499 - DNA, 591 bp, Homo sapiens
gggatgactgaggtatccagagccatctctgggccacagagtttgggcaaggagactgggatggtctgtgatggagccagaaccatgggacccagcatgtgggaccattgcctcctgggcctgcctttgtccaccctctcaacatgaaagaaaaggggccaaggcagggagaggcttcactgaaccagagggaaggatgtgccccagcttctccctcactatctaccccaatcccatcttgctctattccctaccctgcctggctggcatccctggagccagatgcttaccaccttccaggcagtgcccattctggcaggggaaaggcacttagaagttctgggctaggggaagccaggggccaaaggagcccagagtagtcacatgactcagacaaggagtcaaggagtgcttcctggaggaaggggtattgaagccaagacctgaagggctaggaatggtaaggcaggcaaaggggtatagggagaggaagtgtggcccagaggtgaggtcttgcaccacaagttcagagaaaagaaaggtccaggggaagggaggacaagatggaaggagtgagaggacagaggtgag

SEQ ID NO: 128500 - DNA, 197 bp, Homo sapiens
aaagtaaaataaaacaaaacccgactttcttttctgttagtctaatgtattttttcactggctagcttttgaatcaattttacaatgatcacgacaatgtcatctttatttaagctgaaaaatctttgttgggttcggagaaaaaaaaatctatcactcaaaggaaaaacaagaacaataacaaaaactagacatta

SEQ ID NO: 128501 - DNA, 449 bp, Homo sapiens
agatgaaaatgggggagggaggagtgtgaaggtcaggcgaagaatatgatgtatctttgtttttcctattaatcttcatttaaaatttgtgtgtcctggaaacccatgtctcttcctttccagttctagagttgtgttcctgtacgttacagcagggatcacactagtggcacactcaagtgttcttttgataaatgacatttactcttgatgtatatcaggatagcctccaaatttgggagcagagactataaatactagaaatagtcatcctttttaatcaaggaaggaaagcattttttggtatgggcagctgactggagattcttccgcatccattctccctgttaccaggtgatctcttgtattaataccttttaaaaagcccagttaccactgcacatctccctcagcatacttccccggattaggcccccttttctgcattt

SEQ ID NO: 128502 - DNA, 650 bp, Homo sapiens
cctagtgttgagatgacaggtgtgagtcaccatgcctggcccacctctggctattgtgactaatgctgccatggacctgggcatacacatatctgtttgttcatgtcagtttttgagccccccttattcagtttggtaaaatgtatccttcataaataagatgggcagggccacgtattatagtatttattaccatgctttcctccagagtagcatggaaataagaatgcagggaatgtgggaggagggtgttgttgaagacacctgaaggcagcacgtgcctctccttttcacctgcagctgctctcactgagctggcagtcatatgccattctttctttctttctttctttctttttgaggcggagtttcgctctgtcgcccaggctggagtgcaatggtgcaatctcagctcactgcaacctcaacctccgcctcccaggttcaagtgattctcctgcctcagcctcccaagtagctgggattacaggcacgcaccaccatgaccgtcatatgccattctatcatccaactggtctgtgctatgggtgactctttcctctgtgtcagggtgggtgtaaaagccccagggttgtggccctactatctggccatctctgctaaccacagccaccttccagagatgacat

SEQ ID NO: 128503 - DNA, 237 bp, Homo sapiens
tttggttaacggcctaaccagcatgtgtggttagacactttgcctgtttccttcattcactaaaattataacgtattttactgcaaatgtctctccatttaggcattgagtgtaattaccgttgagtctctgctgcttctagtgaattacctaattcttcttaattacttgctaaggagcctgacagccaaatggttttagtaatagtttaaggtaagaaaaaatgtaaacctggac

SEQ ID NO: 128504 - DNA, 177 bp, Homo sapiens
tctctcttggttctggaggctggaagtccaagacggtaacaggtgggaccctgtctgctctggcactcgggacgtggtgcgcaaacatcactgcaatccacccagctgtcctgcacaacgggattccagcaatggccaaaataaggctcacggaagagagcctgaggtcctccagca

SEQ ID NO: 128505 - DNA, 345 bp, Homo sapiens
gttctttacttattccatctcattttatcctcatgaaattcctgaaaaataggtattatcaacatttaacagatgtaaggaaactgagaaaggctaaataacttgtctagctttcagttgcttccctagctttccgatgctcccctagttttccgatgctcccctaactttctgatgctctcctgtttacctgaggagactcaggcgtggtttgcataagagttaataccatttctttttctttccctcatttcttcctattgtaggctttactgagaaaaatttgatgttacctgaggtcaggagttaccatcctggccaacgtggcgaaaccccatctctact

SEQ ID NO: 128506 - DNA, 192 bp, Homo sapiens
cacactaccgcagtccagcccaagtgacagattgaaactccgtctcaggaaaaaaaaaaaaaaaaaattagggcctttggtattttgctataccatcttgcttatgtaatttgtataattgtataggttggatttgtaaagtatatttagagtcttatcaagtggagtcatttgttatttttatttctttca

SEQ ID NO: 128507 - DNA, 874 bp, Homo sapiens
acattcccaccaagaacatatgggcgatccacttcatccgcattctcaacaacatttagttgtgtctctgtgttttattttaggcattctggtaggtatatagtgatagatatataacttactctggttttaatttttatttctttaattggtaatgttgttgagtatcttttcatgtactcattttgccatctgcatatcctgttaggtgaaatgttactttatatctaattggatttttaggtttttttttatttttgagttttgagagttctttatgtattctacatactagttctttgtcagatatgttgcttgcagctgtttcctcccaatatatagcttgtctttctttttttttcttttttaagacagtctcgctctgtcactcaggctggagtacagtggtgagatcacagttcactgcagcctcaacctccagggctcaagcaatcctcccacctcagcctcttagtagctgggactacaggtgcctgccaccacagccagctaattttttttttttattattagtggaaacgaggtccctatgttgcccaggctggtctcaaactcctggtctcaagcagttctcccgctttggcctcccaaaatgctgggattacaggtatgagtcaccatgcctagcctccaatgtatggcctgtcttttaatagagttttgtagagtacaagattttaatttttctgcagtttatcagtttttccttttatggattgtgcttttggtgtccaaaagtaagaactctgccgagcactagcttccgaaatttttctcatacttttaatttttttaaaaaaattctctagttttacatttaagtctgtgatccattttgagatttttttttttt

SEQ ID NO: 128508 - DNA, 765 bp, Homo sapiens
acattcccaccaagaacatatgggcgatccacttcatccgcattctcaacaacatttagttgtgtctctgtgttttattttaggcattctggtaggtatatagtgatagatatataacttactctggttttaatttttatttctttaattggtaatgttgttgagtatcttttcatgtactcattttgccatctgcatatcctgttaggtgaaatgttactttatatctaattggatttttaggtttttttttatttttgagttttgagagttctttatgtattctacatactagttctttgtcagatatgttgcttgcacctcaacctccagggctcaagcaatcctcccacctcagcctcttagtagctgggactacaggtgcctgccaccacagccagctaattttttttttttattattagtggaaacgaggtccctatgttgcccaggctggtctcaaactcctggtctcaagcagttctcccgctttggcctcccaaaatgctgggattacaggtatgagtcaccatgcctagcctccaatgtatggcctgtcttttaatagagttttgtagagtacaagattttaatttttctgcagtttatcagtttttccttttatggattgtgcttttggtgtccaaaagtaagaactctgccgagcactagcttccgaaatttttctcatacttttaatttttttaaaaaaattctctagttttacatttaagtctgtgatccattttgagatttttttttttt

SEQ ID NO: 128509 - DNA, 744 bp, Homo sapiens
gaggtgggactaccacctccagccctggaaactctgctctgaaactcagccacagaagatgcaaattacagtggatgttcagcagcaccatgctgtaggagtttcatcccacaggtcccctgggtacaaacccctagccagccttcccacactactgggatatccctttgggacttccccacctctaactcgagaagagcagtgctctaaccatttactagagccaaggggagcttgtttttaaggtaccacctagagccataaaggaggcctgcctatgtgacctagcattagagagcctctaagcttgggaataagatagctgactagagatgcctggtattcatctcctccccacccgccaccccagacaagaaggaaccaaagcaaaaaataaacagctcagtgttgactggagtgttgaaggaagagtgctggtatgcaaaagaggagtggaaatgcacctgtggtgattagaagtccaggagggcagtgtggaagcacttggcctctgaaaccccttgtccctcatcaagatcagaactgcctaatgtcaggagtcacttattgcagataaacaaaagatccccaccatccctgattgccactgcaaacacctaaagtccttacaacaggagaatcccaccgtcacccagtttggagagctgcagggcattcacacagcttcattgccctagattaggagcacaatatgtgcactccccatcccccaactatcccctg

SEQ ID NO: 128510 - DNA, 690 bp, Homo sapiens
aaattctcaacaaatggtctttgatggaggtccttggaaggcaggtatgctcaccactataccaccagcaccatcagatggaggtctttggaggattaagtttgatgcttgggattgagtggtagtgaactgtatagaacacctaaattttggacaaatttatttggaaactacatgatgacagagtgcttctgaagtcatgtgctgggttcacattagttcagtaaatgttgaataaacttgtactctaaccaatttataaagagccataaaacagcttagttaacaaaattaaacacaatagaaaacagtttatttttgtatccaacgaaactagttaaatatagcagagaagtagatgtcagtagacatttgaaatgtgtgttcagattagtagaataaacatatcagcaagatccctagaagccaaggaaagaagcaggaaacttgttaagtcacatatctttgataaaaagtaagcaccaagctaactgaatcactctctaatttctggatttaagtagattatttaataggatcagtaaatgacactattgtaggggaaatttttatcaaccttctttaaagttgagaacttaatagtaaaggcattcattgaagaattagatgaaatgatgttttctgatgatcagatttaacaaattagattttagagactctagagaaata

SEQ ID NO: 128511 - DNA, 222 bp, Homo sapiens
tcaggaagatgggtgcaatgattcctcccatacaaggttgtgagaaataaaggacatcgaggctgccacacagtgaattctcatccaaaagttattttatcttcctgttccaaggagattattttacaagaatgggcacaatctctgggctatatcttcacatgcttagtatacagaaatagaactaaaatcctttaagtctctttcttttgaatcctgagt

SEQ ID NO: 128512 - DNA, 212 bp, Homo sapiens
gggctccgtgagctcctaactctagggcatgagaaggagacgatgccctccaggttgtaaatggcgttgcacctgcacctcacatactggcctcattcatcctccgaagacacccccatcctgagacgcagagccgacgccgcttgtctccagtcggagggcccctgagaatagtggcgttgcggggaggtgctgcagaggtgggtcaggag

SEQ ID NO: 128513 - DNA, 215 bp, Homo sapiens
caaatggacatctcctttcatcctatttactggcttctggcacaatgctaggtactggtgtggtcccaggaactgcccctagcttctctccctcacctgcaccatttacatcctgttagaatctctcagcttccctaataactgggtcttaattctatctctaaaagcccttcaccatgtggcctaactttccattcccactgcgactatctcag

SEQ ID NO: 128514 - DNA, 316 bp, Homo sapiens
agttttaccttagatgtttggttgcttttgaatatgaattgataacctttcatttactaatgttcaaactccttgcttttattttattaatgaaaatgaattccaatataacaatttcagaggggaaaaactatcattaattgcctaacatttttagcttaagtgtaatcggatgatcctttttttttggattacaattagggtttttttttctgtgccattgagattgtatatcattatatccttaccctgaaattattttatggtagtttatttatctgatcccttcacttgtctaggaagtactttagtggtt

SEQ ID NO: 128515 - DNA, 258 bp, Homo sapiens
ctcttcaatggcttcctatgacattaaaaaaaaatctctttactagggtcttcgagaaccgatgtgatccaaccctacctatctttcaacctcttatttcctccttattcactatgctccagccaagcagggctcccttctgttccattaacttgccaaattctctctttcttcaagacctttgctctggtgtttccctctgctttggatgctttctctcctaatcatagtgtgattgctttttttttttttgagatg

SEQ ID NO: 128516 - DNA, 273 bp, Homo sapiens
tagccagttgcctactctacctcttcacctgatgtcctacttttcagatccaacatgatgaaggccaaacttatcatttctctactgtggacagtaccacagatcgattcgctcagcaccactctgacactctttttttttttttttttgagacggagtctcgctctgtcacccaggctggagtgcagtggcgtgatctcagctcactgcaagctccgcctcccgggttcaggccattctcctgcctcagcctcctgagtagctgggactaca

SEQ ID NO: 128517 - DNA, 362 bp, Homo sapiens
aacctagagaagaccgagatgggatttaaaaaattgctgtcatggtcttaccttgcccagggctatggagattaatgggatgatatcagcaccaggctctgggcttctttgaaaaaagatgtccaacaataataacaaatactcagctggcatttatatatagtactgtaaagcttctcatcaaggagcagccatagttatggagaatgcattcgtcagcacacagggctgctattattattttataatccttgaaactgaataacaagagcaatacgaaattacccagaaagccatctcaacaaattaccatcacaatggaaacatcataaaatcttgagaccttgacagttgtgtggacc

SEQ ID NO: 128518 - DNA, 291 bp, Homo sapiens
tggcctatcatatggtctatcttggagatagttccatatgctgatgaatagaatgtatattctacagttgttgggtagaatgtgttgtaaatatctgttaagtttatttgttccggggtatagtttaaatccattgtttctttgttgattttctgtcttgatgacctgtctagtgctgtcagtggagtattgaagtcccccactattattgtgttgctgtctatctcattacttaggtctagtagtagttgtttcataaatttgggaacaccagggttaggtacatatata

SEQ ID NO: 128519 - DNA, 179 bp, Homo sapiens
accagcttcaacttcccactcaccactccatcctgactcccccgtaaacctgacatgtcttagagccagtaacactgaactcttcagccttcctcagatataccaggcctttgaggaagtttgtgcacacactattccctgtgcttagaacaccctggactctgagtcagattgcctgg

SEQ ID NO: 128520 - DNA, 437 bp, Homo sapiens
cccagatttcaacatattgttttcagaaagtgttctttctaatgatgaatgctgatgattactagaaattaaacatttattcagttgtgctaaatggatgaccaagcatcttttaaacgacaacatgcatgagctctttccctcatttagaatttgatttggaggatcagcggtccttgatattggaaccatcttaatccaaaacacagtaaaagcaccaaggacaagcaccggtgccaccgccgggctggaagaatcacccacaagagcggatgccctcacagctgggctcctgaggcccagggcccggaccctctcaccatcttctagcttgtctacgatcgaggcaaaagagtgagatgcctaaaggggtgtgctgtgagcatccacagcctacgggaagccctgttatttatcctccatctctgccttccaag

SEQ ID NO: 128521 - DNA, 137 bp, Homo sapiens
ggaaaggaacttctaagaacacatgttaggaagaagactgatctcaaaagaaatctctaagatatgaaataaaatgtgaattttcaaaaaataataactgaggctgggtgcagtggctcacacctataatcccagca

SEQ ID NO: 128522 - DNA, 442 bp, Homo sapiens
gaaaagactgtggcaagaaagggctaagttaactttcttggtatcagaccttgctcttgttaattggactctacatgtggcaactaacccacatttcagtgacacgactatgcaatttttgccaagggaagagtacacttgtataacgactataattttttctgtctttcccaaatcacctcaaaaacgtttttcttctaacctacctgatgctgccaagaccagctcagtcagggagaccctaacccagcagcgctagaggaattaaaaacacacacacaaaaatatagaggtgtggagtggaaaatcagaggtctcacagccttcagagctgagagccttgaacagagatttacccacatgtttattgacagcaagccagtgataagcattgtttctatggattatagattaactaaaagtattccttacaggaaacaaa

SEQ ID NO: 128523 - DNA, 558 bp, Homo sapiens
gcttcccaaagtgctaggattacaagcatgagccattatgactgtgctcagccctaagattctttacagcattgatagtttatggttccagtgcaggtgaaacaaaaattttaatgtaattacatatttattttcctcagtatgcttagattctgtcctaaagatctgaggacaaaatttagtaataaccgttgtgtaacttaattgatttctggttttgttgttagaggcagtctctgaagacggattgcattctaaaatgtagttagcaaacgtttaattctcagaatgcagttttccttggataaaactttcttccctgctcaaggtctcccaaatccctctcaaattggcttctcttttgttacaaattgtcgtgtatggcacctgattgcccaaaccagaaatcatctactgagtccaacaatttgcaaagagcagttggtacattgtctcaatttcctttcaatacactcaacctaactcctataagcagtcaaaccttttctgaattattgtaggggtcccgtgaccccaggctcttcttcagtctatatc

SEQ ID NO: 128524 - DNA, 733 bp, Homo sapiens
tgcggtggctcaggcctgtaatcccagcactttgggaggccaagatgggtggatcacctgacgtcagcagttcgagaccagcctggccaacatggtgaaaccccatgtctactaaaaatacaaaaaattagccaggcgtggtggcgggagcctgtaatcccagttactcgggaggctgaggcaggagaatcacttgaacctgggaggtggaggttgcagtgagccaagattgaggcattgcactccagcctgggcaacaacagcaaaactccaactcaaaaataaaaaaactcaaaaggataagtctgaggatatacaagaacttcaatatgactagacaaagaagttcaacacaacagacaaaggtctgtctgccagcaaggtcttgtacaaaagcagtatttgggctcaatcccatgagattcccagagaagactcgagcaggagatggattgtacaggaccttgctggctatgtaagagatttgggctgcatcctaagaggaaggccggggtggggtggagggctcaagtttctaacagaggaatggcatgattagtttcatgctttggaaagaaactagggctgcagtgagaatagaccggggaatgcaagactaaaggcagggaccccaagcaagagactgtcagggtaatgcaggaaacaagataatggtggccagactagggcaatgacaccagggatgggagaaactgcaaagcgtaacataata

SEQ ID NO: 128525 - DNA, 153 bp, Homo sapiens
gaatcctcctgcctcggcctcccaaaatgttgggattacaggcgtaagccaccatgcctggctgccacatattttaaatagatgagtaccactttatgcatgactccacgataagtgcgtatgtatgctacacagaacctagttggagttctg

SEQ ID NO: 128526 - DNA, 111 bp, Homo sapiens
agaggggggtggtgagaggggaggaagggaggaggcggaggcagagggcagaagacggggtctgtttgccctaaaacctcaggcagaatgataccctcttcccagcactac

SEQ ID NO: 128527 - DNA, 428 bp, Homo sapiens
gaaggtgaagagaaagtgaaaggattagaaaatctattactaaaacaacagaggaaaatttctcaagtctaacaagaaatgtagacatcctgacacaggaggctcagagatcaccaagtagatacaatttaaaaaggtcttctctggcccggtgcggtggctcatgcctgtaatcccagcactttgggaggccgaggcaggtggatcacctgaggtcaggagttcgagaccagactggccaacatggtgaaaccctgtctctattaaaaatacaaaaattagatgggtgtggtaacacacacctgtaatcccagctactactcaggaggctgaggtgggagaatcgcttgaacttgggaggcagaggctgcagtgagctgagattgcgccactgtactccaggctgagtgacagaatgagactctgtc

SEQ ID NO: 128528 - DNA, 221 bp, Homo sapiens
cagaacacaccacaaagttctgaacgtgctgttctaccagatttttggcaacattacatttcctgaatttgatcattgtattatgattatgtaagagaatacccttgctctcaggctacacacatgctcaactattcaagggtaaaggggcacaacgtctgcaacttaacctccaatgattcagcagaaataattacacacacacacacgcacacacacac

SEQ ID NO: 128529 - DNA, 472 bp, Homo sapiens
gcacccagacccggcctgtagtttttctttgacatctgcctaaattgtattaaacttgggacaattatcaccacccccccaagggagctggagaattgagtcacggatccctaaaaggaggcagaattgtctgtgccttgctggaccattaaggctcaatctctacaggcctttacattctcctccgttgctttgataccagtgggtatcgaggtccccaagcccgggtgggacctccccctcagccagtgttcaggctcttgacacagtcatgaaaatgaattcaaggacgagttggaaaagagtgaaaatacaggatttattgcaaaggggaaagtccacactcatgaaaggggactcgagagaatcacgtgcaaggggggttgaggctgctaccgttatgggttttttgtttgtttgtttgttttttaaagatggagtcttgttctgtccagcccaggctggagtgtag

SEQ ID NO: 128530 - DNA, 648 bp, Homo sapiens
accaatgtaaaagcgtatgaaggaaagtatgtaaagctcaggagtaaatgtacagtcaaatatagaataacataatactgtaagggtggtacagaaataactggtaaccccaatataaaactttaaagaaggctgtgtgtggtgactcacacttgtaatcccagtactttaggaggctgaggtgggaggatcacatgaggccaggtgtctcacaccagcctggacgacatagcaagactttatctctacaaaaataaggaacaacaaaaaaattatcagttatggtggtaggcacctgtagtcccagctacctgggaggctgatgcagaaggatcgcttgaacctgggagtttgaggctgcagtgagctaggattgcaccattgcactgcagcctgggaaatagagccgcatcctgttactaaggtagagtgggggaggggacttaaaagacaaaaaggtattaagggtaagtataatgacaaaaaattgataatggattcactgtatgaaaaatagtaaactctgacttcaaaaacacatagtgtaatggtaggtaaaagtgcagagttttgtaggccattgaatttaaattaaattcaaattaaattaaagtagacatcaaattaaagtagacagttgtaaccaca

SEQ ID NO: 128531 - DNA, 589 bp, Homo sapiens
gacggggtttcaccatgttggtcaggctggtctcgatctcttgacctcatggtctgcctgccttggcctcccaaagtgctgggatgacaggtgtgagccatggcgcctggtgtgatttttctgtaactacatcctacttattctggactaatgagaaaatagcaagggtgtccatcttcatcaacactgccttgtttgggacagtttggtacaggcttcaaggtttcagggccttaagcttttgcaaatcacttgctcaggaaaaactgggggacagcaggcccatttatattcattttaaacacttgacaagaggaagatgtcattttacaaagggtaaatgtttctttgggttatgctgataggttactgttagtgctaatttaaaaagacatggtgtgtcaaaatatggctaactggttcttatatatttcttgctaattcagccatgaataaaatggacttgtacatattgatacttcttatctattaaagaaatccactcattgttttaatcagtatataaatgtaataagtattagttttggaaatacaaattacaataaagagggaaacagaccatgtgtta

SEQ ID NO: 128532 - DNA, 575 bp, Homo sapiens
gtgtgtctatttagagtcatgagattcaatataaattttaggacagatttttctttttctgcaaaaatgtcactgagattctgaaggaattgcattgaatccacagctcactttgggtagcactgtcctcctaacaatattgagtcttccaattcatgaaaacaaaatgtctttccatttattgatattgtctttcatttctttcagcaatattttgcagatttcaggtataatcatttcacctctttggttattcttaaatattttattctttttgaggttaatataaattgaaattatttttcttaacttcccttcagattgttcatggttagtgtattgaaatacaactgatgtttgaatgttgattttgtattgtgcaacattactgaatttatttattaattctaataagtttgttccacctttaggattttctacatataagttcaagttatctgtaaacagaaataattttactccttccttccaatttgaatgtcttttttaaaattcttgcctaatttttttgactagacctttcaatactatgttgaataaaagtgtcaaaagca

SEQ ID NO: 128533 - DNA, 495 bp, Homo sapiens
aatgggtgccgagagtttcccaggctctggctgccttagctgcacagatgcaagctcggctgcagtgcagtgtcctggtgagtctctcctctgctggccctgtcaccacctaggtaggccttccagcagctgagaggtcccattcctcataagaccagtggtctgcagtcgctcccactgccctctagtgggacgaggtccaagctcacagccccttggtgaccttccctgaggccctgctgacctcttggccccccgtctggcccataatctaccccgtcccagacatggctgagcctgagctcatggctggcctgtgcaatccacccctttccttcctgctcggctccatcaaggaggcaccatgtacccgtggtgtgaggcagacaccgtggggaactttgatcccacctattccttgaacccatgttcagtacatcaccacgtcctcccaggtgtcccagcaagaaagctttcaaacatatcttgtttttc

SEQ ID NO: 128534 - DNA, 188 bp, Homo sapiens
catacaggaatgctgatgtcccctgccgtgcctgcgggtcaggaaagtataggaacttccagtgagctgtaagaactcagtaggactcccacatttgaaagaaacagacacagcacacaggaacttggcaaagcatcagaaaagaggagaggaaaaaagatggtaccaaaaaagtagagtttaaaaca

SEQ ID NO: 128535 - DNA, 493 bp, Homo sapiens
tcaaagcttaggggttttaagaggaaagaaaaatgagttgtacaaggcatctgtctagatggctcagtgggtaatagatttaactaactggaaactgtgcattccttcatagtttctatgtttcccttttgccacctttgactagttaaggaagatacatgattgatgatcattgctcagaaaatcttttacttatatttgaatttctgtttttaagatagtaccatttgtaggaaatctgacatctacttaaagtggtagttttttccaccactattttttatattttgtgtagtcttagacatagaaaggcactttaatctcccatttcagatttcctgtagattgcaggggacaagtgagatgtttcatatttaggaatattgagtatatttttcttcatttctttggtaataggcagtgttttgtggcatacttctcaactttttaattaattggactaaagtgtgtagtaatgtaggtaatgggtctt

SEQ ID NO: 128536 - DNA, 682 bp, Homo sapiens
gagaacagtaaacaaattattctttctcgggaaacactggaataaatgtttcctatcccatcctggctgttcaaacactggcctaaccacttggttagcacaggtaccatgtgggatttttttgtttattttttattttatgttcttcatctctctcacctagcacagtgcttgctacataaaaggcccacagtaagccaggcatggtggcacatgcctgtaatcccggcactttgggaggccgaggtgggtgaatggcttgagcccaagagtttgagacaagcctcagcaacagggcgaaaccccgtctctataaaaaatacaaaaattagccagccgtggtgtcacgcgcctgtagtcctagctactcagcaggctgaggtgggaggatcacctgagcccgggaggtaaaagctgaaatgagccgtgattgtgccactgcattccagcctgggtgacagagtgaaaccctgtctcaaaaaataaataagtaaataaataaaggctcacaataaatgtagaatgagtggataaattaattaagttgtcactcagattattaggttaatttgagtcacggaaaataacctgacactaactcaaggatctagtatttcagatgttcttaagaacagtctgaagtttgcagagcggaagagatgagcttgtttaaaatcagtga

SEQ ID NO: 128537 - DNA, 700 bp, Homo sapiens
tgacttatgatattttcagcttatgatgatttatcagggtataaccccatcataagtcaaggagcatctgtattatgttttgtttttttatattctgtcttcaccctcacataaatcatatggccgtcagaaaatccgttgtgtgataagtgtgcaactagcattggatcccataaatgtaccaaagtacctactaagtcatgtgatgtgcaggctgttactgccactgttgccaggtcgtcctcctgtctcccaagagtttactttgggagtctgcatagattgatttctctgaggatgtaggtgttggagtctgagtcatcttaccacttagagcaaacttgagagtgtctgagacttgcccgaagaacttgttcaaacagattgctgattccccaccctgggttttggactcagaagttctgtattggggccaagaatttccatttcttaaaattcccaggtgaagttgatgttgctggtctgaggaccactatttgagaacccctgtcttagagaaagtggttaccaatgggaaaatctataggccccggggcctgaaataacttgtcttttggtgttgaccatacaaactttttaaaagaatactgactctgatagaatcctttctgtgcaatatcgtggaatacgtaactggtgtacacaaagaggtaagtgttctcaaacaagatgggtaagt

SEQ ID NO: 128538 - DNA, 619 bp, Homo sapiens
tttcctatttcagtcaatagcacaacagtcactcacacttaaaaacttcatgtcacccctgagccctctcttgccactgttgttcacatacagttagcattattaccttcataattaatccaatagggagtcaaagccgggctgatttcactgtattaaggcaaaaatcaaatgcaaaacaatgtgtaacatttcactttttctcctcaaatacaaagtagctgttgggcagccagtagctacaaaactgatttattcctcaaaggaattttataatcagcttttttgcagcccttaactttctgtcctgaagatgcttttgtgcaatcatcatgtatcatctggcatctgggctggcttcagtagcttgctcaatgaccaagagaatgccgtggatgtgacacatgggacttctgatactaggtcaggaaaggcttgcagcttccatttgccgctctgggggttcccagctgtgggcaagaagcctgactacgtacatgccactaggctccaagaagccaaagccacagggagagggcctggagaatgaaatgccacatggggatagggaggcctgggagcaccaagatgcagacatgtgcatggagaagcctctgtg

SEQ ID NO: 128539 - DNA, 807 bp, Homo sapiens
gtatttaagcctctcaggaatttccttttaagccttcaactgatcaatattatgcctgtgaacacaaagcatattgtggaacttactgagtaggtctagcaactcttggcaaaattaacctgacctgtttaaaaaaatttcttttggctggccactgcgcccagccactttttttaacatcccaaactgaaatttatccaagacaataattccctattcctccctctttcagcccttggtaactacttttctactttctgtctctgtagatatgattattctaggtacctattgtaagcgggatcatatgtatacttttatatctggcttatttagggtgatgtcttcaagattcatccatgttgtagtgtgtatcagaatttcattgctttgtaaggctgaataataattccattttatgtatatatcacattttgtttatccatttgtcagtggacacaggttgttccaccttttggctattgtgaataatgccaccataaatgttgctgtacaaatagctgctcaagtctttccttttttgtgtatatatacagaagtggagttgttggataaaatggtaattcagtttttaaatgtttgaggaaccttcatattagcctggcttggttttgctttcagcctctaaactcttaggtactttccagtattttctttttctttttctttttcttttcttttctttttttttttttgagatggagtcttcttgctcttgtttcccaggctggagtgcaatggcatgacctcagctcactgcaacctccgtctcccaggttcaagcta

SEQ ID NO: 128540 - DNA, 504 bp, Homo sapiens
tccccaactgcaagactcattgcagaggtacctatacctgccgccatggtcctgaataaagtcttcatcaccatgaaaaaaacccaaacattgacattggttgtgcagtaaaaggcacagcagcccaatgtcattaaaaacccaatttgtgattaacagacactccccttccccagagcagtaaccagacccaaaagcatttcttcagaatgaagactccaaaagaggtaggaaggaaaagtacaatgttcagaacttcaaactgcaattatgcaactctctcatgatgctctgtgttcaggcatcatggctgaaaaccctggattattggttgtaaatcatactacaaataaccaagcttcagctatctcatctttgtcaaatacaattaaatccagtggtcaattctcaccttcatcccactttgacctatcagcagcatctgacatggcaggttccaacctccttgaaacactcttcacccgacttccacaacacaaattt

SEQ ID NO: 128541 - DNA, 222 bp, Homo sapiens
taatttgtggggaccctgctcaaaaatcgttaagaattttcagatagtgatagtgtagtatgaaagccagcacagtgcccttttgagtgtggtgccctatgtgactgcacaggtcacacactcattaagttggttctgtctggagaggtggggacccaagattcaataagatagatgcatagggcaaggtttaactccaaaagtattattcactgtaaaaaa

SEQ ID NO: 128542 - DNA, 327 bp, Homo sapiens
aggctgagatggacagactgggggaaaagcagtccagatgacaggaacagcatgtgcaagggctctgaggcagggctggaaaaggcttagtcttaaattgggtgagtatggatccaggagtcctagagcaatctgaagaagaaactggggaaaacggaagccctagagacagtgctcaagagtgacacctgagccacaagttcaaatcccctgtgggtcagccagctgtagactattctagaccaggggctgcagaggcctgtgcagtagggggatggctcaaggtaatgagaactcattaaaaaccatggagagcccttcctggac

SEQ ID NO: 128543 - DNA, 172 bp, Homo sapiens
ccatactcggtgtccaaactcagtgtgcattttacacttacagatcatctccgtgcagaccagccacatttcaatgctcatagtcacacgtacgtgagggtagtggctactgcattggccaggcacaggcttagatctagcattggttcccccttcctgggcaccttctgtg

SEQ ID NO: 128544 - DNA, 374 bp, Homo sapiens
ggacaatctgtcatagcttagcatgaacttcagaatacggacatagtcttcattacacttcacagaactggaatccctgtgtcctaaaagcaagctaagactgatgggttctagggatctaaatcactcagtaatgaaaaagtgtgcctcaaagttaagggaagaaatcagaggatgggcaggatggggaaagagcacagctcattactctcagttgatctggacaaggaggcccaccataaagagccctcctcaaaaaaaactgataaataaaaaataaaaaaataaagagccctcctccagtagaaactatgagaaagggagagaaagtgttagtgacagtcagacgggctaagacactaaggcatcatccc

SEQ ID NO: 128545 - DNA, 391 bp, Homo sapiens
ccacctcggcctcctaaagtgctgggattacaggcttgggccacgatgcctggtcacctgttgggttttagcgacctggcaggaagctggatttctcaagcttttccaataaagaagaagcagttagatcccaaaagccatgaaaattccacttgtggcttagaaactaagatttaccaaagtccactttgggaggctcccttcctccctaacacacacacacacacacacacacacacacacacacacacacacacaccctgcggataatttatcctgtaatcacagggatagactaattttgtctgcattcacttgatgagagttttgacaacagtgacttctgctatagtaactatagacagaagaattaactcccaagtcttaaaag

SEQ ID NO: 128546 - DNA, 166 bp, Homo sapiens
tctcttcctcccacggctcctcagcacaggccgtgccctctagctgggctactcactgcacgcagcagcaccgtgtgcttgctcttgtctctgggcttcccgggccctacctcctgcacaaagccctcccttggtctttcctgccctcctcgtgctctctgtctcc

SEQ ID NO: 128547 - DNA, 359 bp, Homo sapiens
ggatctcagccctgacaacttgcccaaactcaaacatttagtttgcaatgagcccagaagtaaaactgatttcatctgagcttttctcaagtgtatttccatttgatgggcagtagggttttgttttgagaaaaatgaaaaggtggcaaatagttatttaaggaaaccaaatactgggggaggatgatctcccaggcatggttcaaaggaccacacacctctgccttcaggtctctggaaaatagtcttggggaatctgggtcttaattaaaacaagactttggaggctgggcgcggtggctcatgcctgtaatcccagcactttgggagccaaggggggcggatcacgaggtcaggag

SEQ ID NO: 128548 - DNA, 607 bp, Homo sapiens
attgttgtcacggagatttagggtggctcatgcagcaaaagccagttgatggccgtaggtgggattataatcccggatacattaaaatgccagtcagaaaaacaaaacaaaaaaaaacaaacaaaacaaacaatgggtgggcgccggccctcgggcccccggaaaaaactttctaaagaacaatccgggtggggccgcgcggggcgcccagaagggcacaggtggacaagtgggccacaaacgcggtatccccagagagggagagaacccgggggacaaggacacaaaagagggcggggattcttctcccacacatataaaaaaaaggcccggcggggggcacacccgcgaaagccgttctcggaaacaaaattaccgagagagggcggagttccgagaggaggcccacatatacaggggggaactctctatatctcccacagggagggagagattctccagagagagagagaagaccgcgcgaaatatcactcacagaattaaacgaccccccccacccctctgggggtaacccaacaacaaacagcgacgcaacaacaacaacaacaaagaaagacaaaataaaccaaaacacaagccacacaca

SEQ ID NO: 128549 - DNA, 578 bp, Homo sapiens
aacgagccaccacagccaccagtcccagaacctgccaatgctggggaacggaaaatgagggagttcaactctggccctcacaatccagtggaggagacgaaactcatctgcctctgtccctctgggcacgcctcatgccaggtgcatctgtggacaggggccatgctcctgggcttccaaagttggagagagctgccaggctcaggtctgaaggccagaattctacagtaagtcctactgagtcaaggtgggagcagggtcggtagcttccgaggctctgcgggagaatccgtttcctggccgtagaggtggcctgcactccgcagcttgtgctgcccgtctcgaatgactggagtttcctgcttctgtcactacacctcccaccctctccatcacctgctctgctcttacaaggatccgaagaaatggaatcatcgtatcgctgatctacgtaaacaaactgaagaattgtctgaaagaaaatatgacatgaacttatgaattcaacaggtgaagatttacaacttgataaatcactttgtcagctcgagctgtaaagccaaggagtcccggttgga

SEQ ID NO: 128550 - DNA, 273 bp, Homo sapiens
gaagtgagtagaataaaaggtagagtggcgacccacccgctcaaatatattgagtagcctctccttccccttaccgccacccaccccacacttacccagagacacagagaaggttcattaagctggaatagtcatctttccttcctgcgtgccttgagactggggctcctcggctttcgagaccatctgggctcaagtcctgctggctcagaacgcctctcatttgctcctggagcggggtgttgccctggggaggcaggtttctctcgtgcg

SEQ ID NO: 128551 - DNA, 233 bp, Homo sapiens
acgcaaaacagatgtagcctgagattttcttccatgtgctgtattctgtggtttcattttcaagtgaggaaaatgttttgaaggagaagaagagatgaaaagcctccattatattccattgcattaaataaattatgaaggattatatacatgagtctataatatttagtatgcaaggattaataacatcttcaaaaaattaaagtgtgacaggataacagcatatatgtgga

SEQ ID NO: 128552 - DNA, 213 bp, Homo sapiens
tcattgccaccatgagatgtacaaaatggagccaaatgtgtcttagggctgtcagttacgagagctagcgaagtcagggtcctgatgtgctatgggttgaaacagcattcagcgtagtgagagtcctgcaggactgaccacgtgggcagtgcacccagatattttcatcaagacatgaagaactcacctttctcttctggttgccttgaccga

SEQ ID NO: 128553 - DNA, 398 bp, Homo sapiens
ttgcacaatacacccaaagtaaaagaacaagattgccaatagccagctggtggctccagtggccccagggatgagaggaaaattgtctttgcacaccttggaaatttgccactatgctacaacccaaccacaggagttctgattcaactctgaccagtcacctgcagaattttcaaccactttagaactagcaccaagaaactttggaattaaggaccttctaagttttttgtttgttttttgttttgagatggagtctccctctgtcacccaggctggagtgcagtggtgcaatcttggctcacttatccaggttcaagtgattctcccacctcagcctcctgagtagctgggactacaggcgtgtgccaccatgcctggctaattttttctatttt

SEQ ID NO: 128554 - DNA, 579 bp, Homo sapiens
cacatagtgggtgctcagtaaacagctgtgtttttcctatggggctagggaatgtctttcaggcttttgacatagcctgttgctggggtcgtattgtgtccggaattggtgggttcttgttctcactgacttcaagaatgaagctgcggaccctcgcgatgagtgttacagttcttaaaggcggcgtgtccggagtttgttccttctgacgttcggatgtgttcagtttcttccttctggtgggttcgtggtctcactggctcaggagtgaagctgcagactttcacggtgaatgttacagctcttaaggccgcgcgtctggagttgttccttcctcccggtgggctggtgggctcgtggtctcgctggcttcagaagtgaagctgcagaccttcgcggtgagtgtttcagctcataaaggcagtgtggacccaaagagtgagcagtagcaagatttattgcaaagagcaaaagaacaaagcttccacagtgtggaagaggaccccagtgggttgccactgctggctcgggcagcctgcttttattctcttatctggccccacccacatcctgctgatt

SEQ ID NO: 128555 - DNA, 294 bp, Homo sapiens
cctccagtcggcctcgtggtcttcctgtccctccccagcctctcaggtgacccggacaatttgctaaggctcttggagaagggcagcccgaggaggctgggcctgccgcccatcgggagcggcagctattttccatcacatcctaaaaagcccagggctctaccgctcctgcagctgggcatagctcccaccaaacacattctcccgaggtcgccctggacgccttgctcggagatgacagaaacgagaaaagaaatacctaagtggacataaagacctagctcaccctggccg

SEQ ID NO: 128556 - DNA, 170 bp, Homo sapiens
agtcgtcgaaaggctggagctgaagagcaaccagcaatagattgtgtctagatgatgagaattgtgaggcgccattgaaaatctcaggacatggagccagcagcaggtaagctgagcgtggcagtgaggctttctagggtctactactctgcaatttgaaccaggtatgt

SEQ ID NO: 128557 - DNA, 159 bp, Homo sapiens
cctcgttatctgccggtcacagcctcccaaagtgttaggattataggcgtgagccaccgcgcccgcctgcctggctttctttctaagaaccccatagagagcttctcttttggacagtaggggcaactgttttttactggtgtgtgtgtgtgtgtgtgt

SEQ ID NO: 128558 - DNA, 327 bp, Homo sapiens
ccacagcaaggaagcagggctgggaggggcccagtggccacctagggtgaggcagctggtgagtggcagagctggggtttggacccaggtctgccagacccggggaccttcttcgtatcacctcccaggcttttcttcctggctagcagagctgggaggagttaatgatgaagacagatactcctggctagcacctatttagttagtttaactcaacttcctctgagcattgttctcggcaccttacacatgctaactcatgtaatcctcgcgatggatccctatggggtaggtgctattcaattccatcttgcagttgatgaaatt

SEQ ID NO: 128559 - DNA, 471 bp, Homo sapiens
attaagattccattcactaatttaaatgttatgctaattaaagtataattctgaaaatgtaaaaaggagttaaaaataaaaagaaagaaaaaactgggttggcctttaggaattacattaaatttattgcgttgtaacaatggtaagctgggtaattatttcattcgcctccgtgctgcattcaagcttctgcttattcatcccattctcacacttcagctcattaacacacacttcccctctcccgctctaatgggagttttcttgtgatggtttaagatgagttgtgagttagatccttgaagcaatgtttagaatttcttcagctgggccacacagagtgttgcaagctgctgcttgatttgatgtttagagagaaaaaaagagaaaacatctggatttctgctttgtaaaccaatttctggagccaacttgctgttactccagcttcttctccatcctctctagaag

SEQ ID NO: 128560 - DNA, 578 bp, Homo sapiens
ttcagctggccccaaggaatgggatcagcagatgggccaggttgtaggaagggtatgggagttctggggaaatggggtcagtggataaggaaggttataagaaagatttgggggctcctgagaatatgggttcggggagcaaggcagattatagggatggtgtagggggttctggggcaatggggtcaatggatgaagcaggttataggaaagatttaggggctcctgagggaataagttcagggagcaaggcagattataggggtggtttacaggattccagggaagcgggttcagggagcaaggcagattatagcggtggtttaaagggttccagggaaatcgggtcaatggatgaaacagataataggaaagatttgggggttcctgagggaatgggtgcaggttacagggctggtttaaggggtcctggggagatggggtcactggatgagtcaggtcataggaatgggattggaggttatggggaaatggggtcaggttatagggaggatttgggggctcctgagggaatgggcacagggagcaaggcaggttatagggatggcttaaggggt

SEQ ID NO: 128561 - DNA, 473 bp, Homo sapiens
ttcagctggccccaaggaatgggatcagcagatgggccaggttgtaggaagggtatgggagttctggggaaatggggtcagtggataaggaagcaggttataggaaagatttaggggctcctgagggaataagttcagggagcaaggcagattataggggtggtttacaggattccagggaagcgggttcagggagcaaggcagattatagcggtggtttaaagggttccagggaaatcgggtcaatggatgaaacagataataggaaagatttgggggttcctgagggaatgggtgcaggttacagggctggtttaaggggtcctggggagatggggtcactggatgagtcaggtcataggaatgggattggaggttatggggaaatggggtcaggttatagggaggatttgggggctcctgagggaatgggcacagggagcaaggcaggttatagggatggcttaaggggt

SEQ ID NO: 128562 - DNA, 308 bp, Homo sapiens
cttcttcttctttgtctttctcttcttccttcctcttctttctttttcttcttttcttcctgttgggggcaggtgttgcaccaaaatccataatgctgacatgtaaaccagttcacaatggaggaactctgattgaagaggatgtcagggatctgctaattccttctccacttccgttttaaaaccgctgcttgaaccaaatggttctgatcactgttgctctcaaatacctccatgctggctgggcgcggtgcctcatgcctgtaatcccagcactttgggatgctgaggcaggacaatcacctgag

SEQ ID NO: 128563 - DNA, 139 bp, Homo sapiens
agtgctgtgaggactgggataggacagctgctttctaagctccttaaattggggaccaggcccagagcccacaaacagaatgctgccctcctcaccaccccaccaggcagcagagggcagggtggcactgccctttcag

SEQ ID NO: 128564 - DNA, 763 bp, Homo sapiens
ggggtttcaccatattgctcaggctggtcttgaactcctgacctcatgatccacccacctcggcctcccaaagtgtcaggattacaggcatgagccaccgcgcccggccgagcaagtgctaacatttatacacttgcctcacgtaattataaattcagtgcaattgtggatcttacatatttagcatgcaccacatgacactagaaaagctgagaaggactaaagctatgtataaagtagctggtgcattgtgttaatgaatggtgttaaccacaccaaatctttattctcaaaatttatttatgcctcacattgttctaaaaaagatgtgagatagctgaaaattgcgtagtatacaacaaaagaaaatgagtcatgatatcaaggcaaagaaaaaaaagggggaaggaaaagtaaaataaaaccaagaaaacaatgtctactgtgggggtccatgcatttgttagtttgtcatgaatttggctttagatttctagaacctgacccaaagagggaaatcagttctgaaatttacactgcttttatgattaaaaaacacatttgttaaggtaaagcatatctatgcttcatactgaaacttaagaaaattaatctcaatattccttagtgtggatagacactatgctgccaaaatatatattgtaaagattctatactatcaagaagtccagatagatcattcttttatgtttagagaggtagagtatcaaagactatatatttttcaggcagtactccatat

SEQ ID NO: 128565 - DNA, 696 bp, Homo sapiens
agtgattagtctatgccagttttctactctgtcgcagaaagttttcttgaccattcttctactcatcatttaaaaatttaaaagcttctatatgtttttggtaagagttctttgctcagatctaatagcatttatcagtgtttttctctcctttaaaatgagattaattttaaaatcctttcgacgaactaactccttattctcggttcccctctttccttatatttgaattttattaattcattttgtctgttcctcttttctccttggtctgcttgctctctttctgcccttttgagttgaaatctcagttcatttattttctttttgtcttgcttaatagcaaaagcatttaatattatgtatttccctcaagtatggatcttgctacagctcataagtttttatatgtagtgtttgagttgtcactgttttctagatagtgtttaattccagactttctttcctctttggtctaagagttatttagaagtatttttaaaaaccaaatcaattttttaaatataagcttctattcttaatttatttcaccgaattgtggttttttttgtttgtttgtttttttaagaattaaaattttgatttgggcacagtggctcatgcctgtaatcccaacacttttggaggccaaggcaggaggatctcttgagcccaagagttcaagatgagcctgga

SEQ ID NO: 128566 - DNA, 333 bp, Homo sapiens
cctatctctgcacttctgccctccatcctgctccacgccgcctctgcttgttattccagcacattccagggtgatgcctgctgaagccacgcagccagtgcctccaccctaccccccatctgacccaccggccccttccgcacgctggaagcctgcccggcctgaagtgtcctcacctgtcgccctatcctcccctccactccagcccaccggtgactcagccctcacagctctctcctccccgagggagccggtgacttggctctgatggtgccgggacccagccccggcatgttcagaatccttgtcctttaacctgcgtccacatgtagt

SEQ ID NO: 128567 - DNA, 544 bp, Homo sapiens
ttcgaggagaggttagaacatctcctggcatataatcacatttctcagccagtcccacactcaagtcagaggagaggtgcctgcagggatccagcaccaaacccaagggagacaagggtggctcatactgttgccagcccaggacaggccaggatccactgagtgaaggccaggttggcttctgtgggacccatccccacagaccctgataaggagaaagggtcctctcagctccaaaagtagctgtgagagccaaggacagtcaagagctgggctgagctttgtatacaggcatccagtctgattcaagggagcaaacatcaagactatctgctttagggtttcctaaggccacaagagaggagacaggggccccatggcacaggtctctcaaaaaagctatgctggccatgaggaccttgagggagcccatagccccttctcacacgtctggtcaaagcagtccatgtgtgagttaagctggggtcaataacagaatatcaattctcaaggcagaactggagaacagcattggttaagcaac

SEQ ID NO: 128568 - DNA, 274 bp, Homo sapiens
aattttatagaggtataaaattcacacagaaaaccgcagaaattgtaagtatttggctagatgaattttcccaaagtgaaacgtatctatataatcttctaggttagaactagactatttacagcatcctagaagccctccttctgtccgtctttgtcacaacccacccttttgcccaaagatgactaatatttgacttttaatggtctaggttagttttgcctgtaccgttacatgaaatttacacaatttgtaatctatcgtttctggtttc

SEQ ID NO: 128569 - DNA, 453 bp, Homo sapiens
acatggtcaaaggtcggtaaatggtaatgatacatggattataatggaagtacaacattaatcccttaatgctggccaggaggtgtgggtcagcgatcctgaagacaggggaaggggccagtcgggccagaccacaaccacaactactcttctcagcatgtgaattaactgattgaatctttttgtccccatgttgcatatgaggaaactgaagcacagagaggttagtgacttgccccaggacatacagccaagaggtagtggagccccgattcaaattctagtcatctggctccaagcctgagctggccaccactgttccatagggtatctcaagggaagtgtggaaggaggctctgagaagagtctctggcgtgcagaggcagacctacagccggcttgcacagctctgacttccggacatgagcctctggaagtcctagggaaaggtct

SEQ ID NO: 128570 - DNA, 219 bp, Homo sapiens
aagaatagaaaattgagaaatcattatgctagagtagtaatcaggaaggaagccattgcctctgatctcagcgtcttggcttattgctgttcccactactggaatgttctctcccatttccacctattaaaagcctgtccagtcaaaaggtagcatggtcaagcagtccaaggtgcaggatgtagttggctttagtctctgtggagccatgggtttgag

SEQ ID NO: 128571 - DNA, 307 bp, Homo sapiens
actatgatcataccactacactccagcgtgggcagtgagctatgattgtagcaatgcactccagcgtgggcaacagaaagaccttgcttccaaaaaacaggtagatgaggccaggcatcgtggttcacacctttaatcccaacactttgggaggcagaggcaggaggattgcttgaggccaaaagttcaagatttgcctgggcaatataggaagaacgcacctctactaaaaatttaaaaatcagtggccaggcccaagggctcacacaggtaatcccataacttggggaggccaaggcaggaggac

SEQ ID NO: 128572 - DNA, 419 bp, Homo sapiens
aactggcacaaagacatgaagtgacttgcacaaggtcagaaagttcagttgtaaccgagccaggcctagaactcaggtcggccgactccagcctagtgccctttccactaccccattgcatttgattgttgagggttgtgaaatagctgctctcttctccagggcccacagctttctgagaaactctgtactcatacactagtgggcaggagtatggatttttcttagttggatttaacacgttggggagcccagggttgagcgtggtttcattcatagatccagagcccaattttgttcatgtgacattcagtaaagtgttagctcccgggtttgtagctgtacttttcttttcatctttcctgctctcatctctcattccatcatccaagggcttgggagcccttctcaaatgccct

SEQ ID NO: 128573 - DNA, 141 bp, Homo sapiens
cgaacaaggattccccactgcttcacatgaggtaagaggaaagaaggggagcagaagcagagatgactaggtgtgagggagcttcaaaggagtggagaaggtttcaaagagggctggagggaacaggaaaggagaggctgg

SEQ ID NO: 128574 - DNA, 396 bp, Homo sapiens
ctggggtcagaacttggagttcccagatccccaaccccactctggggcctgtctgccaccacacagcagatggagccacagggagatgggggctggggtgactgtgatggagtcggagagccagagggagagggtttgggtgtggctgtgagtgtgagacccagagaaggtggtcaagtgtccaaaagagccagccgggcgtggtggctcacgcctgtaatgccagcactttgggaggctaaggcaggcagattgccagattgcttgagcctaggagttcaagaccagcctgggcaacatggcggaacccccgtctctactaaaactacaaaaattagccaggcgtggtggtgcgtgcctgtaatcccagctacttgggaggctgagacaggagaa

SEQ ID NO: 128575 - DNA, 329 bp, Homo sapiens
cttctaaagatgatggatcccaaacaaaaggtaaaactaggttgcgacatgagaatgtaaattgtacaagcccagagaaaagtaaaattgctctctataagaaagggggcagacgtggaatagaatctaggagagggcaggagggcagagaagctggagagacagaaatattagaggaaagaggaagggaaaaaacaggggaaaatcagataggaagaagactttgggtgagatatgtccaataagggaatcagattaaatttccctctgttatgcacaatgtaacccagtcttccatttccccatgaaatattcagcaaaatgcacat

SEQ ID NO: 128576 - DNA, 356 bp, Homo sapiens
tggttgccaggagctggaggcaggaagaatgggaagtgactgcttaatgggtacagggtttccgtgtggggtggttaaaaggttctggaactagatagtggcacgggttgcaaaacatcgtgaaagtacttttaacgccagtgaattgcacattttaaaatgatttaaatggcaaattttccgttatgtgtatttcactacaataacaaaagaatgattcaatgcctggcacagtggcacacaactgcaatcccagtgctttgggggctgaggtgggaggattgcttgaggccaggagttcagagaccaacctggacaccatggcgagaccctgtctttacaaaaaaatttaaaaa

SEQ ID NO: 128577 - DNA, 473 bp, Homo sapiens
caccctgcgagagccccgtacaagacaacagattaaccattagactagatatgttgaaaatatacagcttcaacctttccccagctagctcagagcgatatatagatgattatttcaaccgtcagctgccgcatagatttaaacctctgcacaataactcctggattcatctgccccttgtcaaacttgcacagctttagttggaggatacatggtgtggcagtttcactgtgaatccagaatgatccagacggctgctgtctctttgttaacaggaagccaaactgatgagtttgtaatgcatttcttatcaaaggtagtttcagaaaagaaaatgtgccccatcagtttggctagaatttcacatacacaagattataggcttaatcagaatatctctgttattttcttgaggaaatagataattccacatccattccattaaatcattttatgccaatgaattatgtatt

SEQ ID NO: 128578 - DNA, 281 bp, Homo sapiens
gtttgactcctcattgcactttttctatctgttacaggtctttcctactttgttcttttgtctcaactccaccctctccctcttgaagtagacctgaatttgtgccgatacacaatttttatcagactggggtatctgaggtgagctcaaccgacctgtcacttcagacttggtttatagactcctttattgcagccctctcctttttactaatctggcagataaacccagtcctcagagacatttctcctctgttaccttccatggtttgcccctttact

SEQ ID NO: 128579 - DNA, 678 bp, Homo sapiens
ggaattacacaatggcataaatgccaggagacagggatctgcaggggccctttgagagactgcctaccacacctgtatgactgagtagatggcagtgcattaatgaagattaggaatgcagttgaaagagattttagggggttaatgaagagacttgtttcagatagaaactgttgcctattcaaatggatctgtgcagcagcattagtaatggagaagtagattggagggtggtcatcgttttataggtagcatgtgaaaccatacaagtgaccactaccttacctccttacaaatcattgctcagaggccaccctttcgatgaggtctgtcttcaccaatctcttaaaattttaactcttttttcactctaatatcccatctccaccttttgagttatgcatagcacttaccatcttctgtcacgcccatgatttacttattgttcattgtctgtttcttccaccagaatgtgagctcgattaaagcagagttctttgttttatacactgatgtacacttagtgcttagtagagtacctgatgtatagctgatacgcaatagttatgcaaagaaggataaaactttgtaaaagtagtacatctaagccaaaggtggaaataatccaagtattcattgatggatggatagataaaccagatgtggtacatacataca

SEQ ID NO: 128580 - DNA, 249 bp, Homo sapiens
acaaagcaaactggcacggatgtgattgtagttgctaacaattctccttactgtgcccagctgtatttctctcagtaccaggagccagctgacatgtctaagctgctcacacatctctgctgagcaagccactcaaatacaccatacccagtgaagccccactatacatccccagtacgggacaatgtgtctgaagccccactacacatccccaataagggataatgtgtctgcagtgaagtacttttt

SEQ ID NO: 128581 - DNA, 470 bp, Homo sapiens
taattaaaaaaaataaataactctttttgtagaaacaagtctcactatgttgcccaggctggtctcaatctcttggcctcaaatgatcctcctgcctcggcctcccaaagtcctgggattacaggtgtgagccattgcacccatcctccactttcttggtgaataatttgagtcttattttttcacttggccattctaactaaaggtttgccaagttttgttgatcttttcaaagatccaatttttggtttctttgattttctctattgtttttctgttttccatttcatttatctccattctaatctttattatttcctgtcttctattggtgttgggtttattttgctcttatttttctagttccttaaggtgtaaagttaggttattgattgaagattgttcttctttaacttaggtgtttacagctataaattttgctcttagcactgcttctgctgcatcctata

SEQ ID NO: 128582 - DNA, 329 bp, Homo sapiens
caacacggcttttatagtagtaataatggcctttgtttttgcatgtatttcatcaatttacatgcttaattaaatttggtgttaattgcaataaaagatacaattggaataaacaggtttgagaacaactacaaccaacccttggtttggtaagcatagaactcaactggagggagccgaagattgtcatactaccagcaagcatttggcagaccatgagcattagaatgaccgtgaggttagaatgttttatagagggaagggaatgtgccagttagtatgttgtgatagctaagtggttgttgcatagaagaacttgtacaggtctg

SEQ ID NO: 128583 - DNA, 730 bp, Homo sapiens
gtctttgtggcacctccttccacccaaccttgctcccaccatgtgagatgctggcttccccttttgctttccaccatgattgaaagctccctgaggcttccccagaagccaagcagatgctggcacatgcttcgggtacggcctgcagaaccgtgagccaattaagcctcttttctttataaaatacccagtctcaggtatttctttatagcaatgcaagaacagcctaatacactgggatagtccattcattctaagtctgttgttattcaacaaatatttataaatcatatcctatgtgtcacacctatgattttctgccttaaataatagggttccctttcatcattttttttccttgccacttatttgacaatactggttgcttctgctttctgacattgaattcagttaatcttattctgcttttgccatctgtgataataagttattatcctagaaatatgttttgaatttaaactgaatatccatcttgaagttgccttaaattctttatgataaaatccatttagcataataatccgaaaagacagagtgaaaaaaacattatttaaaatagttgatttaatgttgttatgaaatataacaggactcttgaaaaggtgattaatattcttacacatgttgaaacagaacaatatgagttttttcttatctacttttcttatctggtcttctctggcttctaactttattagcattcgtatat

SEQ ID NO: 128584 - DNA, 581 bp, Homo sapiens
tttaaaattaaaatttaattaatttatttatttttgagatggaatcttgctctgttgccgaggctggagtgcagtggcgtgatcttggctcactgcaacctccaccttttgggttcaagtgattcttctgcctcagcctctcaagtagctgggattacaggtggctgctaccacacctggctaatttttgtatttttagcagagacaaggtttctccacattgaccaggctggtctcaaactcctgacctccggtgatctacccttctcggtctcccaaagtgctgggattacaggcgtgagccactgtgcccaacctaaatttattaaggcggggtctcaccatgttgcccaggctggtcttgggctcctgagctcaagtgatcctcctacctcggcctcccaaagtgctgggattacaggtgtcagccaccatgctcggccacaagcttgtctttataacaaagccattcccatgataactgatccatgttcacaataatggcaatccattcatgagggtggaactcccatgacctagtcaccttttaaaggcctcacttctcaataccattacatttg

SEQ ID NO: 128585 - DNA, 809 bp, Homo sapiens
ccagtggtgtcttctctccagtacacaattccaagatccttaagggcagggatcagatcatggtgatacatacaggaggggttgattactaagtgtttgctgaatgaatacatgaatgtaatgctatttcttatgttcatggttcattttattctttctcctagaatgagttctcccttcacttccagcaattcaaattttgcttaactctaaactaggctcaatttcactttctatgtaaaattattcctgaaggtttctttttctgtgacttttccctcatgtaaatgcccatacatgtcacacagtcaaccttgctccagattacattccttctaatactcttccacccaattaaacttaagggcctgcgtgtcttccactttctcaacacttagcatgcttaatgatactggaaatgtatgtaattaataaatatttactgctgtgacaggacaaaaacagcacattaattgggaaatccataaattatatatgcatgcatctagtgttccttaaacttaaggatttaaaaatattttattataatgtttatgcaaaatgcaaaagatagggctaagtaatatttgtattttgcctaagatataaaagccttcaatgatccatgccaactctaaatgatattctggattccatattagcatttaagataccagtaatggtttgaaatcacaaatatcctttaaaaagctgtaaatgttctacaatggataccgacactggctaacctttattgggaacttactctctaatctattgggcagcctgtgctgagtgctttcaatgtg

SEQ ID NO: 128586 - DNA, 394 bp, Homo sapiens
gtaattgggtaatagcagtctgaaacttgagttttgtcaaaataactccctatggaggttagttgaaaaaattcttgatgagaacagtcaagaagtaacatgattaattttgaagagaatcaattatattttttatttttttgagacatggttttgctgttgttgcccaggctggaatgcaatggtgtggtctcggctcactacaacctctgtttcctgggttcaggctattctcagcctcctgagtagctgggattacaggtagagacagggcttcactatgttggccaggctagtcttgaactcctgacctcaggcgatcgtggcctcagcctcccaaagtgctgggattacagatgtgagccactgtgcccaccacaattatgttaatttt

SEQ ID NO: 128587 - DNA, 512 bp, Homo sapiens
ttcatccatgttgccacaaatggcaggatttcattcttttttatgcctgaatagtattgtattgtgcatatatgtcacattttctttattcattcatcagctgatggacatttaggttgattccatatcttggctactgtgatctcttcagtatactgatttcctcttctatggatgaattcccaacagtggaactgctggatcacatggtagttctatttttaaattttttgagcaacctttagactgttttccatcatggctatactaatttacattcccactagcagtgtaaaggatcttttattcttttattcttgagggtttttccttgacttattactcttcctgatggatgaaagtatgtgtgggttagcagctctgctatatactataccagaatctcttctattacacagtcctcaccctaccccaccctccatcctctatcaccactctttgaagtttatagatcaaagtttgtgttcttttttgcttgtttgggtgttacc

SEQ ID NO: 128588 - DNA, 846 bp, Homo sapiens
agtgtggagctggctttccaaacacctttctcttatgcaaaccccattccaagaccttttcccagattggaattaaataccaagcttatcaagtgtcttattgttaaatctgtgtttctccccaccccccaccatacaaatagcttcctttattaagtcagttatattttttttcataagtactttttaccagtacatttgttgttgttgttgttgtttttctgtataccaccattggcacctgtaaaatttgactttattatggcttgtgggtacttgaaagctttttgttttaatgtatttttaaaatctaattttgatgattgtaaaaggtgaaaatgtaacttgggtctttttttcttttaaccaaatagcatgtgattgctttactgctgcaagatttttctatttaggctagttagaactttgctagtacagtatcagttcctagttattgccttcctgccccccaagaaagccacacattgcctctattttgtgaacagtttagtgccagacattttttaacctgattcagattttcataaacattttggcagttgtctagatcagtagctattaacaattgtctttctttttaagacagtggaactcttaaaaatgaaaatgtagaaatgtatataaagtgagtaaaagctgagcaactctggcagaggcccctctgcccctgaaattattaggctgagatctgttgagtgaggtttattgagcacagtgctatttgccaggtgctgtactagataccagtgagaaactgttgaaaaggacactggtttcctctttgtgagttcagagattcccggacacggtggagagtctagagat

SEQ ID NO: 128589 - DNA, 505 bp, Homo sapiens
gctccccctttcccctccaccatgactgtaagcttctgaggcttctgaggtttctctagaaaccaagctgatgacagaccatgcttcctgtacagcctgcagaaccatgagccaattaagcctcttttcttgatcaattacccagtctcaggtatttctttagaacaatgcaagaacagcctaatatacacaccattctgcctggacccacattggggctcccagaacctccctatatgaataaaacccagagtgggtgagggcagaatcttagttccaccacaagacaagtggcaaaacgcagtaggatgcgttcatgaaccctttccagggacagaaagacccgggagggccaagcacagatgctccagtgattcatctgagagaagcagagggaaggggctagaaaactcagtaccaaacaccccacttcaccacggcctccccccaggcatctgctacaacttaagactggtttcctttttaatggacacctgttccactc

SEQ ID NO: 128590 - DNA, 423 bp, Homo sapiens
tagcggtccgaatcggcaggcacaagaggacaggctgcattctgagaagtaattttcagaacactggagagcatagttctattcagcacctaaggtactgtccgtttctgggcttcattttaaaagagacacccaggcaaatgaagccagtctggagatgatctccaggacagtcaagggttttgacatgatgccacgctaagaattgctggagcatgtgtggatgtttagctgggaaagagactctggggaggagaggcataatagcaaatgtccaatagattggtgcagttgaaagcagctgggaaggtggtttggaccagataatgaagggatttggttgccttgctaaagattctgcagtttattctgttggcaatagggggctactggaggcttctaaggaagaagcaatgagattta

SEQ ID NO: 128591 - DNA, 458 bp, Homo sapiens
aagaaatttattttgctttttttctctctctcctgtttttttttggaagtggtgggggacaaggaggcgaggtggtgagtggtgaaaacacaagctagatagctttggagttcaaattggagctcggcctctcactaacatggtaaagttgaggaggaaacttaaacccatgggcctgtttccttgcttagaggacgtacacatccactgcaaaggactttacaaataattaacgtgataaaaataaagtgctcagcacaagatgggtacaaaataactggctgctattttcataatttaaaagcaagcttgtcacaactcaaaagttacaatcaagcaacattgatttatttgtgtttttaccctcccacaccttgttccatattttatttcataaaaataaaatatgaaaagataaaactggccaggcatggtggctcacgcctgcagtcccagca

SEQ ID NO: 128592 - DNA, 172 bp, Homo sapiens
actgtcacccgggctgaagggcagtgatgcaatcatagctcactatagcctcaatcacctgagctcaagcaaccactctcacctcagtctctgcagtagctgggacctcagatgtgcaccaccacgcccagctaattttattttttcatagaaatggagcctcacgatgttg

SEQ ID NO: 128593 - DNA, 172 bp, Homo sapiens
tttatgtcacctctctgagcctcagtgtcttcatctatgaaatgaggctaatggtgcctgccttggtaagtttcaagaattcaatgagctaagtagtgcctttgccctaggaattagaggtgacaacagggccctactgcagcccgagaggagcgggtgtaagacagcctgt

SEQ ID NO: 128594 - DNA, 881 bp, Homo sapiens
taactaatctaggaatttaataaaaccttgtaacagcaatatgagaagagaaaattatagtttttcacttatgaacacagaaaaatccaaaataaaattttaacagttgaatctaatagggcattgaaaatgatacacagtgactgagtagggtatatcccagaaatgcaaaagtaaacattagaaaactcttttgggattgtggtagatttttaaaactatttgatagccattgatgatacctacttttagcatattaggaacagagcattatgttcctagtttgataaaaagttatctgtcaaaaacttaaatcacattacaattatgaaactttgagaagtattcccatcaaagtcaagaacagggtgatattgttctgaaggttttagccaatgcagtaggacatggatggagctggaggccattatccttaaccaactaacacaggaacagaaaaccaaatactgcatgttctcacttataggtgggagctgaatgatgagaacacgtggacatatagagtagaacaacacacactggggctgttggacggatggaaggagggagaggatggggaaattactaatgagtactaggtttgatacctgttgatgaactaatctgtatcacaaacccatgcagagttactatgcagaaaatgtacatgtacccttgacttaaatagacttcgcaacaattttttgcaaaaacacaaaaaaagaaaacatttggggcggcgcggaagttttaacattcttggggcggccagttaaactgcaaagtccagacaccggcagagtggggcacaaaacggggcattgacaaaggttggtaggtcaggaccgaaccccgggaggggaaagggacaagagcaaatc

SEQ ID NO: 128595 - DNA, 663 bp, Homo sapiens
ggctgaggagagggggaaatgaggagttgctgttcaatgggtatagtttcagtcatgtaagacacaaaaagctctagagatctgctgtacagcatggtatgtatagttaacagtctgtactgcacacttaaaaattggttaagagggtagatcccatattaagtgctttttttaagcacaataaaaataaataaaaaataaagatgaaatattaagagttggatgatttaggatatacttaggccctgaaaaatctagaactttttactagaaaaatcaataggtcacaaagtctccatgaatgtatttttgataacaacactgaccaaaagaatcttccaatgttctaaactaaaaatgaaagaaaaaaaacaaggattcccatagccagggtaaggctaactgaggagacactccagaattatgttcttctctcctaaaaatcaggaagggtggcccttctaactctactccaattctcaaagcatttaaaaaaaaaaaaggcagagaaatcctatgtccaaaatcagtaaaaatttaggtgctattaatacacgggtgaacacaacagacaataaaattaaataagtaaataaaatactttcagatgataacaaagctatgaaggttaacatacaatgtgactgaatagatactaaaggg

SEQ ID NO: 128596 - DNA, 1314 bp, Homo sapiens
attgatttgtacactttaaatggctgaattttatgatatatgaatatctcaataatgttaaaaaaatttccagttgaaaaagtatattcccatatctgtgttgttctaaacctatttaaaaatcctctagtaacagaattaagttgtgtgtttttttttttttttttttttggggccagaccaagaacctcggtttccaaagagaaacccccaacaaaaacacccagaacaaaaaagagaaacaatgtgtatgggcgttttaacaatcttcacatcttcaatataaatctcccaaatattgagtttttttatccccaggtgcctatttggctcttatgggtttaagaggtggcctcaatatagctaaaccatgtgtggcgcatagggggcatactcatattgtggggagagtgcccaattctcttagaatctcattccatatttgtggcgacaacacctttacaatgtgtgtggggagaggaccttctctgtggagcgcggcatgtgatctccttttaaaaattattaagcggaaatctaaccctttgtgctgtgacccccccccattttttcttttcttgtgtgcgtatctccaggtctgtcccccaatatatcttcctgtgcacgcgagcagggcgcgccgtggttgagcacttgttttgtgtcgccaacacaaaccctcttgtgaacccgcggtgggtctcgccctgttgcacctgtcgcctgtgttggaaccaacttggtgcctctctgttggacccatcctcgtgcgggcgaacatctccccacgaggagagaacctctcgagatattttcccacaggctgtcgggccggggggagactcgtggctactacacaattttctcttctgttgtacactcccccttcttataattcgtttttattttacacccctttaaaccatcttcacgcggggcggcgaacaaaactactacccaattttttttgggcacccatcacagcattctttttgtgccgcccccaaaaaacatcaatgccccccagagggacagtgtctctaaaacagagaacaaacaccgtgggggggtcgtgggaggccgaccacctcttgggggcgacgatctcgcaaggggggcacagacaactcttttcttggacacatttgtgtgtctccgagtcggttctcacacacaacatcctcccctgtgggattttttgtaatgaaacccccccaccggcggtttgtttcttgcgtcacacccaacgtctggttgtttcttccttggggcctgaaaatttccacttctacccgtgcgacactcactcccgag

SEQ ID NO: 128597 - DNA, 429 bp, Homo sapiens
taacaattgttagtgaggatgtggcaaaattagaaccttgtgcaccgctatgtgaatataaaatggtgctgctgctgtggaaaatattacgacaattcctcaaaatattaaacacagggccaggtgcgatggctgacgcctgtaatcccagcactttgggaggccaaggcgggcagatcacctgaggttaggagttcaagaccagcctaaccaacatggagaaatcctgtctctactaaaaaaaaaaagaagaagaaaaaaatacaaaattagcagggcatggtgatgcatgcctgtaatcctagctactcggaaggctgaggcaggacaatcgcttgaacccaggaggcacaggttgcagtgagccaaaatcgcatcactgcactccagcctgggcaacaagagcaaaactccatctcaaaaaaaaaa

SEQ ID NO: 128598 - DNA, 446 bp, Homo sapiens
  misc_feature (388)..(388): n is a, c, g, or t
ttgcattcaacctctgacatacttctttcttgaggactttgccacatggaatcttcaatggccatgtgggtggaatggcatccagtaataatggccttatcaccagcaacctttactgacatttcacataatccctcgtggtcaataccaggcttgcatcatggctcagacggttgtgtacaggaatgttttgtcaatatgtcatctctaatatccccatatctgcctgtaatctcctatccttccaattctcatcccttgccattctcaccacctgtgtgtttcagcctcagagaaaagcatcagctattgatgtttccatattctcctcatcaatcaacctcttctggacttattttctaggtggctcaggaagctacgtaggctntaagaagtttgtctgagaagtgaagaaaagagagaaaggaaatggaggagcgaagtca

SEQ ID NO: 128599 - DNA, 1180 bp, Homo sapiens
caacggtactcaccacaatgtccgcctactcatgctggatgaccaacgcttgctgctgccccactgggcaaaggtggtactgacagacccagaagcagctaagtatgttcatggtattgctgtacattggtacctggactttctggctccagccaaagccaccctaagggagacacaccacctgttccccaacaccatgctctttgcctcagaggcctgtgtgggttccaagttctgggagcagagtgtgcggctaggctcctgggatcgagggatgcagtacagccacagcatcatcacaaacctcctgtaccatgtggtcggctggaccgactggaacccatcattgtagacatcaccaagcacacgttttacaaacagcccatgttctaccaccttggccacttcagcaagttcattcctgagggctcccagagagtggggctggttgccagtcagaagaacgacccggacgcagtggcactgatgcatcccgatggctctcctgttgtggtcgtcctaaaccgctcctctaaggatgtgcctcttaccatcaaggatcctgctgtgggcttcctggagacaatctcacctggctactccattcacacctacctgtggcgtcgccagtgatggagcagatactcaaggaggcactgggctcagcctgggcattaaagggacagagtcagctcacacgctgtctgtgactaaagagggcacaacagggccagtgtgagcttacagcgacgtaagcccaggggcaatggtttgggtgactcactttcccctctaggtggtgccaggggctggaggcccctagaaaaagatcagtaagccccagtgtccccccagcccccatgcttatgtgaacatgcgctgtgtgctgcttgctttggaaactgggcctgggtccaggcctagggtgagctcactgtccgtacaaacacaagatcagggctgagggtaaggaaaagaagagactaggaaagctgggcccaaaactggagactgtttgtctttcctggagatgcagaactgggcccgtggagcagcagtgtcagcatcagggcggaagccttaaagcagcagcgggtgtgcccaggcacccagatgattcctatggcaccagccaggaaaaatggcagctcttaaaggagaaaatgtttgagcccagtca

SEQ ID NO: 128600 - DNA, 646 bp, Homo sapiens
caacggtactcaccacaatgtccgcctactcatgctggatgaccaacgcttgctgctgccccactgggcaaaggtggtactgacagacccagaagcagctaagtatgttcatggtattgctgtacattggtacctggactttctggctccagccaaagccaccctaagggagacacaccacctgttccccaacaccatgctctttgcctcagaggcctgtgtgggttccaagttctgggagcagagtgtgcggctaggctcctgggatcgagggatgcagtacagccacagcatcatcacagtaagccaccccagtctcccttcctgcaaaggagacctcagacccattagtagtctcaccaaagactgatagaagcccttcctgtccagctttccccaggtagcctgcccttttgggcaactctggggaaccatgattccctgtcttgcctttccttcacaggtctgcacacctcattgccccttttgcaactactgaggcacttgcagctgcctcagacttctcagctccccttgagatgcctggatcttcacacccccaactccttagctactaaggaatgtgcccctcacagggctgacctacccacagctgcctctcccacacgtgacccttacctacact

SEQ ID NO: 128601 - DNA, 523 bp, Homo sapiens
tcaggattcctacaagaggaactagaagttccagaagcctgtgggcagggtccagggtgacttgttcttcctttgcaggtactgacagacccagaagcagctaagtatgttcatggtattgctgtacattggtacctggactttctggctccagccaaagccaccctaagggagacacaccacctgttccccaacaccatgctctttgcctcagaggcctgtgtgggttccaagttctgggagcagagtgtgcggctaggctcctgggatcgagggatgcagtacagccacagcatcatcacagtaagccaccccagtctcccttcctgcaaaggagacctcagacccattagtagtctcaccaaagactgatagaagcccttcctgtccagctttccccaggtagcctgcccttttgggcaactctggggaaccatgattccctgtcttgcctttccttcacaggtctgcacacctcattgccccttttgcaactactgaggcacttgcagctgcctcagac

SEQ ID NO: 128602 - DNA, 977 bp, Homo sapiens
gcgggcacccccattccataccaggcctatcatctcctacatcggatggcttacatcactctacaccacgagggagcaggaaggtgttcagggtggaacctcggaagaggcacacccatccccttttgcgccatggaggcaggaagtgactaggtagcaacagaaaaccccaatgcctgaggctggactgcgatgcagaaaagcaggcaagttcattcctgagggctcccagagagtggggctggttgccagtcagaagaacgacccggacgcagtggcactgatgcatcccgatggctctcctgttgtggtcgtcctaaaccgctcctctaaggatgtgcctcttaccatcaaggatcctgctgtgggcttcctggagacaatctcacctggctactccattcacacctacctgtggcgtcgccagtgatggagcagatactcaaggaggcactgggctcagcctgggcattaaagggacagagtcagctcacacgctgtctgtgactaaagagggcacaacagggccagtgtgagcttacagcgacgtaagcccaggggcaatggtttgggtgactcactttcccctctaggtggtgccaggggctggaggcccctagaaaaagatcagtaagccccagtgtccccccagcccccatgcttatgtgaacatgcgctgtgtgctgcttgctttggaaactgggcctgggtccaggcctagggtgagctcactgtccgtacaaacacaagatcagggctgagggtaaggaaaagaagagactaggaaagctgggcccaaaactggagactgtttgtctttcctggagatgcagaactgggcccgtggagcagcagtgtcagcatcagggcggaagccttaaagcagcagcgggtgtgcccaggcacccagatgattcctatggcaccagccaggaaaaatggcagctcttaaaggagaaaatgtttgagcccagtca

SEQ ID NO: 128603 - DNA, 438 bp, Homo sapiens
gtagctgggactacaggcacgtgtcaccatgcccggctaattttttgtatttttagtagagacggggtttcaccgtgttagccaggatggcctcaatctcctgacctcctgatccgcctgccttggcactcccaaagtgctgagattacagacgtgagccaccgcgctcggccataagctttttacatgggatcaattgccactgccaccagaaaggctgtcacagtgttgagttggggtatctttctgtcaagtttgaatccaaccttcctccacttgtgaatgaagttcttaatcttcatgcctcagtttcctcatttgtaagttggtgcaataatgatcaagggttgttatgagagctacataaattaataatacatggtaaggtgcctaaagaacagtacctagcgcatagtattcaggaaaagtcactgttta

SEQ ID NO: 128604 - DNA, 292 bp, Homo sapiens
tccctactaactacctttaaactagaacacactatgtcttcttacttctaggacacaatccctgatcaccccagtcttggttaactccctgtactgggatgaatagcgccctttaaaaattcaccagtacctctgaatatagctctaatccaatgactaatatccttttaagagggaaatttggacggacacacacagggagaacacaacgtgactacaaaggcagagactgggatgatgcagctacaagccaaggaacagcaaagattgggcacagccactagaggctagg

SEQ ID NO: 128605 - DNA, 362 bp, Homo sapiens
ttagggttctgctatgagaagggctagaatctgagagcctgtcgttcagctttaagtcagagtacaaagcaaaagaacctaccatatccgagggtgagagtgtatctttgactctgcttctttgggttaaggaggctggtagagagctagcacgcactgggtggaatgaggatagctggcagcttaaaccccgcttttctccttctgtgtaaaataccttcatgggaaactgtgggcctctctctgaacagtggaactgctactgtgctcctttgcttcagctggtggcacaggtggcgcagtgaggctagagcaagttcaggctggaataccagggaaaggtgtcccaagaaagcctgtga

SEQ ID NO: 128606 - DNA, 360 bp, Homo sapiens
ccgcctgctgtgtgtagtcagagccaaatatattagtaaagttgacataatgactagtgcacacttaactgctgacatttggtttactttagaggttatggaaatagtgactggttatattatcaaaatctctttttgtccaagttgtcgttaatatttcctacactgcaaaatttcagcactttgttaatgaaaggaaaatatttttgcttattctaacccagcagaatctgaaaaggagattttaaaacccaaacatttggtaatacagacatagacgacctattttaggaagactatttctatttttttaatttttaatttttttttttttttttgagacagaatgttgctctctca

SEQ ID NO: 128607 - DNA, 302 bp, Homo sapiens
ccaatttccctatagtaaaaaaagtttatagataccctttagccattttgctaatgagatgtgactttatttttctagagaatttttgtatattgatgtgaatctttgtcaagtgtgataaacattttttttctgactgttatttacattttttggtttgggatattttttgcatacattttaaataaatgtgtcttttcttattctttgtgactttttatgtcttttgttctcctgtaattcaggtaatattactctatatggcattttatttagtcttgctagaatttattttaaaattt

SEQ ID NO: 128608 - DNA, 708 bp, Homo sapiens
gataatgtatacataggaccatgcctcaaacttaaagtgcactcagtaagtggtagcaattgctttgattatattttaatgttcttactactatttttttatgggttccttcacaaattcattccttgttttccttctacccggagtttttttaagtagacagcagaaggacgttttaggcaaaggaactgcataatcccaggcagagaagaatgaaaatacttgattatatgaggaaatagagagtattctgatatagctagaaggcacaataaggagcagtgactatggaaaattagcggtgagattggggccaacccatgacaggccttgttccattgttgtggctttatcttctattcttgcttctcaaagtgttgtctttgaaccagtagcatccgtagcacctgggagcttattagaaatgtagaatctcagacctgctgaatcagattctgcattttaataaattatatggggatataatttatatgcatgttggtgtttgaaaagctctattctagatcattgaaagctttttaaggagaagagtgatgtggtcatctttgggttttagaaaaagtattctggtggaacaatagagaataaattgagattagactagaagcagtgaaagtacctaagaggctaccgcacttataaggctacttcatgtgagagaagaagagagtggactagagcagaact

SEQ ID NO: 128609 - DNA, 421 bp, Homo sapiens
agacagtcttttgtctggaaaataaataaaatgcaaggcatcagactctccaagagagtattgcatctggagttcatgttatcatagtaccttccttctaaagaagtgtagctggtaaataatcaaatgtaacagtccacactcatgattgaccttgcctggagtatgccgtcagtcaacattaaggtgttcattacaatggaggaggtaaatttaaagagtcactgtattttttgccttccaagatcactttaggtgtccttaatgtactgtaaaatctttctctttttctgaacaaaggctgagcctttaatgaccatcagttgttaaaaagaccagtgctaagctgggcacactggctcgtgcctataatcccagctactcgggaggctgaggtgggaggattgcttgagcccaggag

SEQ ID NO: 128610 - DNA, 348 bp, Homo sapiens
aaggagcaccgtgagggttgtgtgtcccaggattgaaaaggtcatcatacataaatcttctgtaggtgaagtgaaggtgaatgaaagttacagcagtctaagaacagagaaaatgccatgggctcattgtcttgatgaatttggctgtgactctgctcctaaatgctgggctggttctgacctgggcacaggagtttagaagaggggtctgagaggacccagagaggtaccttgatttggaacatcccagggcattgcttctggccttagcaacgaccctttgcctgaaaccatggactggtcttaagaattgaatctgtctgccctgtaatggcgtgcgtttaggaa

SEQ ID NO: 128611 - DNA, 1031 bp, Homo sapiens
gtactttcacttctttctttcacaatcaaggactcattttctgtccagttttatactctaagaacaattattgcaaaagttcaaaatagatttatttaaaattattgttcttcagtcattcccaacatagagtaagcttttctttctatatgtttctgttagtttgttgtttttaatctcatattaaagcttttttttttttctttttttcttgagacgggggtatcactctatctcccaggctggaatgcagtggtgtgatcttggctcactgcaacctccgcttcccgggttgaagcgattctcctgcctcagtctccctagtggctgggattacaggcgcctgccgccatgcccagctaatttttgtatttttagtaaagacgaggtttcactgtgttggctaggctggtctcaaacttttgacctcagatgatcctccctgagccaccgcgtgagccaccagcgtgagccactgcgcccagccaaaagcttttacacatctttgaaaagtcttctgtgtgataaccatttgtttcttatataagataaaagctttaatctgttagataataagaaaattctgaagaataactatgatgtgtgctacatattaatatcaattattctctgccaagaatgtgcatataacatacttaatactaatattaaatatatctttcttttccttcaattatttagaaaacatttcaagattttgctgtatgaacattagtcattgcattataagaagataaaatggcaccttggtgacatgatttgttttcagaacaatatgactcactgtcactgttagctatatgacttcagatcacttttatcatcactattaactaaatgagctacatgactctgtaaagtttattaaaatacccttatatggaaattagcagtcttgaagagatacagtgaagaatcacatgctttttgaaagaacattgaggtcgggtacggtggctcatgcctgtaatcccagcactttgggacactgaggcgggcggatcacgagg

SEQ ID NO: 128612 - DNA, 769 bp, Homo sapiens
gggcataaacccagacttgagcaaacactaagacaatggctcctgcaagaactgtctcctctcaatatttggagtatgtcagatacagcagtgcctttcagaatgtgcctaacatccctaaagaatttgaatatgccactctttttttctgatttaaaattttcttactgttgcaaattaagaaattaaaaagatgtttaagattttccataaaaataccaccccccaggaaaaactatagctaatatttggtacaaaattagggtcatatgctgtgcatttattacagtacatcatctgcatctttccatgtcaaatttatatatctattttttaaattttctttatcaaggtatctaacaattacagttttgagaaaagcaattaaaatttcttcctatctgctagagtttgttttaattttaaaggtagccaaagaaataaatgcatttttcaagcatcatggcaatatttgtcaggaaaaatataggcagcagtgtaattataaggcaaggattatattctggaatattgcagggtttatgagctggttacttgcttcactacattaactgaactcattagtgaaaccaagttttaagggcaagcttaatttgttttttaaaatgggattttataatattgaaacatgtttaaatgatcacagttattggcaattaatcatttggtatttaaggaaaaggttataaatattcagtataatttaaaaatcataaaagtgagttttggctcatttataagaaggaga

SEQ ID NO: 128613 - DNA, 264 bp, Homo sapiens
tctaggtacacagaattaacaaaatataagttgaggccaggattatttaaagaaaatttacgttatgtagaaaacaaaaaaaaaagtgcctatggtaatattcaggctgctctgctaggtggtggtgggggtagatgtgggtcttacctttgaagttcttatagtctaataggatatgtgtacagagttatggtgttataagcacaaggcagaaagtgacaagtgacttaatcaatgttcaccaagtgttctttgagaattcag

SEQ ID NO: 128614 - DNA, 347 bp, Homo sapiens
catgctattaactttgcctgaaattctctccctccttttcccacttaacctgaattcctacacatcctttaaaaatccgacttaagaattacatctctcaaaactttctctgcctttctttcctcccagatggttaatactctttactaagtgcaatctctgtttcttgtatacttctactgtaatttattttatctttctcccctacctatgaacatcttgaaaccattatcaatttcttattcattcctaaattcttggtacctaaaaaaaagtaccccagtaaagtgtttaatgttaaactgaataggggctgggcgcggtggctcacgcctgtaatcccaaca

SEQ ID NO: 128615 - DNA, 406 bp, Homo sapiens
acgagactggggcctaataaaaaggagcgtctgtctatacaggagcttaaatgggctgtaccttgtagcattctgaggacaggcctgaattctgggaagcgaaagtgataaaagtattgtccagtcctttttaagttggtggctgagcttggtgaggtgtgtttttaaaagacctttagtccgttctacttttcttgaagacggaggaccgtaaaggatataaaggtttcactgaatactaagagcttgaaaaactgcttggctgatttgactaataaaggctggtctgttatcagactgtatagaggtaggaaggctaaactgaggaattatgtctgacagaagggaagaaatgactgtggtgaccttctcagaccctgtaggaaaggcctttacttattcagtg

SEQ ID NO: 128616 - DNA, 302 bp, Homo sapiens
cactgcagccacatggggccagaaagtgccgtcgtccacctagctaactgctccctccgcttcgagactcagctcaagcgtcacctcctttagaaagcccttccagatcttctctccccctgaatccgacttccttctctgagccctggtaatccctggacatggtgtgccaggggtccttccgccctgccagaccccacctaagctgcagggtcattgagatgagtgtgacccccttcatctatgcagcctgtgtctggcacacagtaggtctcttagatgaatggatgaacatcatttgt

SEQ ID NO: 128617 - DNA, 358 bp, Homo sapiens
aggagtatcagacctatggtgctgctgagcacttaggtttttattctaaaggctatatgagttattgtggcattctgagaaaggaatgatgcatacaacctcatgttttctgaaagataagcctgactgctgtgttgagacaaggacacggcacacgagaagcagataggtctgttaagaggttgttgagttaaacaaaacaaaacaaaacaaaaaatgtgccgttcaagttttcagctttaagatatctttggataatgttatttctattctttatttttttcattagaagttaccaaattaagatggtaagacctctgagaccaaaattttgtcccatctctaccccctcacaact

SEQ ID NO: 128618 - DNA, 712 bp, Homo sapiens
ctcaaatatttgaaatatgtgaattctttaataatatgttctattatttacctcagagggattaatttgtactgattgggtaaatattggttagtgtaaataatgcacccgagattagaaagtggttaaatattcattgaaaaaatgactatgcagtgaagagaagaccgtcactcatcatagcttcaactttccctagccaggttagctcttgtgtccagggtttggttttttcttttctaccctaaacccagttatgagagcagcagcacagtacaagtaggcacgctgaactcttcattgtccctttaagctgtcaggttcctactctttcttgcctcctagaatatttgatggtatcagctgtggaaatgacattggacatgctccttggtataaaggtaatgagaagggaaagtataaattgatgttctaaatttttttataaatcatataggcaatactttcttttaaaagattacctagactttggcaataaagtgaagtggattattttaaatatctccacaataatatcgatagataattttattttttttaagacagtgtctccccatgtcacccagactggagtgcagtggcacaatctcggctcactgaagcctcgacctcctgggctcaagtgttcctcccacctcacccttccaagtagctgggactacaggtgcatgctaccacgcctgggtaattt

SEQ ID NO: 128619 - DNA, 394 bp, Homo sapiens
ggctcggtaccacaacgctgactcttcctctagataatcaccttcagtctgcctaactgatgctatggaagaacaaacagagactcagaagggtaagagggtggtggtggcgggtggtagatgatgaaagattacttactggtgtgaaccttcaagatttgagacaagtcttagttaatttggaaagtttattttgccaagatggcattgaggatgtgcacccctaacagcctcaggaagtcctgacaatatatacccaaggtggttagggcatagcttagttttatacattttagagagacatgagacatcaatcaatgtatgtaagaagtgcactgattcagtctggaaaggcgggacaacttgaagcaaaggcaggaagactggaagcggg

SEQ ID NO: 128620 - DNA, 579 bp, Homo sapiens
gggcttcctgatcgtgcacaggaaatggaggagatttaaatcaaactagtttattgttctctgctggtggtcttggtaactaagatgccttcacattgctggatacaattcttattactcttatgctctgtgcttgttcatcgcctgactacttcaaggctcaatattcttgtaaaatataaagtgaacattatgtgactactctaataataaaattactgtgaaaccaagtcctcaaagagaaaaggacataatgtttctactagacaagccacatactaacatgtcattcgaagttaaagttctaagccagattaattcatgaaccagatagatattccagggtaatctttagcatatggtgtattaaatcaatcttggtagtctgttccttcaaccctgtttggtttgaggtttaaaaacgtggaaaagaccacgtattagaatgcaggccagttaaagactaataaaacaataatagttattataaccattatgttagttatatgaccagttctctctgagggcaagggagtgtgtgtagcctcaaaccacaaagggtcacaccctgtgaatgta

SEQ ID NO: 128621 - DNA, 321 bp, Homo sapiens
ggcttgtgcctaacttagatctgtgattttggcaagatttcaaagaaagtgattcagagtatctgccagaatctcagtttcttattgccaggtctgtgccctttccactaattgtttgaattaatcacaattacctatgaagcctcttctcattctttggacatcttttccctattctgtgttaggcatcatttgtaaaaatctcaggagagtttattctttgggaaccatattgccttttcatgtctgtagtcaggagaccttttgtttccagatgagttccatccagcttcgacagctgcattcgctccaaacattttt

SEQ ID NO: 128622 - DNA, 352 bp, Homo sapiens
aaaaagcatctcactttatggtcaaaggatttttgggaagggagccaagaccattcaatgggaaaaggacaggtttttaacaaatgttgctgggaaaactggatatccacatgcaaaagaatgaagttggacttttacataacacaatatatgaaaactaactcaaaatgggaaaataatggcagacagggcgcataactaacttggagctcccactcagacacaccgagtagtgtgtggagactcacaccgtgaacttttactcgaagaactactaccacgggaacgtaccaggaaagccgagagaatccatagacctttcaaaggaagcagtttacagctgctggtcccc

SEQ ID NO: 128623 - DNA, 858 bp, Homo sapiens
gattattctgtttattttcagcctgactcaatttgtggatgaaaaaactaacatccagaaagtaattaattaaattccaggccttttaatgaacagtcttctgctttttctcttaacaatataatttctcctatggaacaatttgaaagccatgcatgcaaatttagactaaaagcaatggacataaaagaaacctgtatacattcttcggtattacgcacatgtgatgagtggtgcttttgggcacttgcctgacagtagcttggacagaaaagacactggagcctcagagaataactattgaagcaattctggaattaagaaataaggcctgaaatgagatggtaaaagatgttagaggaagagaagcaaggtaagacaaggtgacacacagaatcagaaatgatgaacaggaagcaacttttaaaataaatgttttctgagtagctactaatatgccaagccctgtgctgggcattgacattgcagcagtgaacaaaacagacacgatcctggctctcgtcaagtttatattttatagaacaaaaaaaaaaaaaaaaaaatttgtgcgcggctacgaccccagaaagtttttaacccattcgttggggcgcggaccatatgtgtaattgacaattgggccaaggtcggccaaagggaatcttgctccgaatatggtggtgtttccccaaaaaaaaccgcggggaccgggttttcgaacaccaagggttcgggctcacggtctcacaggcacagagctagctaccccgcgcggcgggaacaaaacaaacattcaaacacaacaacacaatatcacacatgtagccacaaaacaaatcaaccaacacacacaacaga

SEQ ID NO: 128624 - DNA, 716 bp, Homo sapiens
gattattctgtttattttcagcctgactcaatttgtggatgaaaaaactaacatccagaaagtaattaattaaattccaggccttttaatgaacagtcttctgctttttctcttaacaatataatttctcctatggaacaatttgaaagccatgcatgcaaatttagactaaaagcaatggacataaaagaaacctgtatacattcttcggtattacgcacatgtgatgagtggtgcttttgggcacttgcctgacagtagcttggacagaaaagacactggagcctcagagaataactattgaagcaattctggaattaagaaataaggcctgaaatgagatggtaaaagatgttagaggaagagaagcaaggtaagacaaggtgacacacagaatcagaaatgatgaacaggaagcaacttttaaaataaatgttttctgagtagctactaatatgccaagccctgtgctgggcattgacattgcagcagtgaacaaaacagacacgatcctggctctcgtcaagtttatattttataggaaatagatgataaagaagtaaaataaaataatgtcagatggcgatgagttcctggaaagaaatgaaacaggttaatatgatagagactggcccaggatggctagaagaggggtagaagtcaatgggggagtgttcaaggcaggaaacagttttaggcagagctcctaagccagt

SEQ ID NO: 128625 - DNA, 380 bp, Homo sapiens
ctaatgatgacttagagtttcacaggttcttaattgaccattttcattcaccttggctgatgcctagtgttacttaatgcttagtaagaaatctttaggccaggggcggtggctcacccctataatcccaaactttgggaggcagaggccggcggatcagctgaagtaaggagttccagaccagcctggccaatgtggtgaaaccccatctctattaaaaagtacaaaaattagccaggcgtgctggcgcgtgcctataacccctgttactctggaggctggggctggagaattgcttgaacctgggaggcagaggttgcagtgagcggagatcatgccactgcattccagcctgggcaacaggagtgaaactctgtctc

SEQ ID NO: 128626 - DNA, 543 bp, Homo sapiens
ctgaattccatgtacaaaggtagggtcagtggaacacaaaagcattatcagtggttcaaaaactaactccttgcagcttgttccctggatcatagtttgagttggtgtaaagggaagggaagaggagatgctcaaaaatatatccagtacacagtccacatattgctggatcaatgagctattgttttaaatgaaaaaatatgtatccattcccttcctccttggaaggctcggcacagttacacattattaagaactactttatcatacacttccggaactggaaaagactttgaatggccactggttcaactctgtccttgttacggtcaagggctaggaaacctgcataatttcacccagtagtcacaaacggaagtgctcactccactctcccacgaggctcagtcattaaacggaagtgaaaggtggaggaagcgaacagccactcagactgggacaagagaggcaaggacactttggaggtcatgctgtgtcccaggagagcagtacggggtaaggcatggggagcccagaggatac

SEQ ID NO: 128627 - DNA, 318 bp, Homo sapiens
ttcggtccttctgacaggtaggaatgagtcactgctttggctgccagcgacagaaaccagccctggctaatttagcacaaggagaacatgctggagggtgggcgcctgttgcatagtccagcaggcagctcagagacgggaccccggggtgctggtggctggggggccggttactgtggccaagaacacaaacatgccctgcagcttcaaggatgctgccctccaaatggcccctccttgccttgctcgctccagagtcaaagtgctgggaagagtgttttatcagtcaaacattaggccatgggcctgccctcagcg

SEQ ID NO: 128628 - DNA, 253 bp, Homo sapiens
tcaaatctcagtgtatgttaataactattagaacacaaccatgcccaggcatttacatgtggctgttttccccatataatagaagagttgaatagttggcaatgaagactgtggcctacaaaacctgaaatatatactatcggtccctttacaggaaaaatttgccaaaccctactctaaacaatattccatgactggaaatgtgttttctaaaattctcgtattaatgcagagaataaaagcaacagatgtc

SEQ ID NO: 128629 - DNA, 389 bp, Homo sapiens
atgctttggcaatgggcttgacataattttctggctaaatcattctttcctcacttatttgaaatgtcaactttatcatcctgtgaaatattaccctttttttcatttttggattctccagtgttttccatggagctgtctgtcaacacccccattaatatcagtctgtaatattcattatgctttatgctttaacaacaagcagggctaccttatgggtgctacatgccccaatcacaaaggtgccacctgctacaataatataatagcatttaaagaaacaaatgccaaatttaaaatcattcttcaaaataacaaccttacatattcataacatggaaagacaagaatattctagcaaatattgtagacatcaacacagaaatcaa

SEQ ID NO: 128630 - DNA, 477 bp, Homo sapiens
tgaatttagggagatcatttaataattgttctcggtaaaaatagacacaaaaagtacacattttacctattattttaacattaacacattttaacctttagttctgcttttattgcaattttccacataaattaagcattcctatttataaaattatactagtttaaagtctgatattcctacaagaatagtaggtatattgaaggtattaaaaataggcaatcatttaggctgggtgcagtgactcacacctgtaatcccaacactttgggaggccaaggcaggtggatccacctgaggtcaggagttcaagaccagcctgggcaacttggtgaaccccgtttctactaaaaatacacaaaattagctgggtggggcggcacatgcctatagtctcagctactcaggaggctgaggcaggagaatcgtttgaaccaggaggcagaggttgccgttgagctgaaatcgcaacattgg

SEQ ID NO: 128631 - DNA, 392 bp, Homo sapiens
taatttgggttgtaaattgactgttgtctcctgagcagtctcctggtgagggagagtttcactggagctttgaaacacatgttagacagccttgccctgtagggagtgtctcgtgaaggagaggtaaacaattataattgcatttctaaagggctaagtaggacatgggaaactggaaaatggagaaaagaagagaaaaaaatagtaactcattctctttttcttagaaaaatgaggatacttggtcacatcctcacatggtgaagaataagatggtctcttcatttcccttcaacactagtcccatcgtgaggctctgccctcatgacctaatctaatcctaactgcctcccaaaggtcccacctccacatcccattattggggattaggg

SEQ ID NO: 128632 - DNA, 243 bp, Homo sapiens
gggacatgtatgaagtctactcgaaagatgtgtcctttaattactcctgcacttggcgaggcctctgcttcccagccttgtgttaactgtggcctctgttcagactcctgcagcacacggaggagtcagcgtcatggggtctacagatccaaaacacaggccgggcgcggtggctcacgcctgtaatcccagcattttgggaagccgaggcgggcagatcacctgaggtcgggagttcgagac

SEQ ID NO: 128633 - DNA, 116 bp, Homo sapiens
ggaaatcgcaccactgcactccagctgcctgagcaacggagcaagacactgtctcacaaacaaataaaacaccagctaactatatcaataaatttctctcagccattgcactccgg

SEQ ID NO: 128634 - DNA, 250 bp, Homo sapiens
aaaatgtgtaccaaaaagcccccaggaaactataaatgctgagcatgggacttgggtgcctctggaatgtccttctgcctcagctactctgagataacatggttccctgtgttcatggaacccagatggccaaaagtcaatgatccagcacttaaaagaaaagaaagcgattcaagagcctctgtacccacctaggcctcagcctccccaggacctactcacctatactcttcacaacaggtaacgttgc

SEQ ID NO: 128635 - DNA, 960 bp, Homo sapiens
agaggcttgtttgaggcccgcggggactgggcgggcggaggccgggctgccgaagtgtgaggggaggagcccgagccgtcgctgctgccgccgctaagggagaggagcatgtctgcaactcgagccaagaaagtgaagatggccaccaaatcatgccccgagtgcgaccaacaggttcctgttgcatgtaaatcatgtccttgtggttacatatttattagcagaaaacttttaaatgcaaaacactcagagaaatcaccaccttctacagaaaacaagcatgaggccaagaggaggcgaacagagagagttaggagagagaagataaattctacagtaaataaagatttagaaaacagaaagaggtctcgaagtaacagccattcagatcatatcagacgaggaagaggaagacctaaaagtgcatctgccaaaaaacatgaggaagaaagagagaaacaggaaaaggaaattgacatctatgctaacctgtctgatgaaaaggctttcgtgttttcagtcgccttggcagaaataaatagaaaaattatcaatcaaagacttattctctgatacttgtttgcaaaatctgctgaaacttctgtcaggataacatcagcaaattctcaaacagttatggactctcaggagcattctgactgcatcaataagggccatcgattgtttctttctcgcctgtcgtttagcctgtgccacacttcgggagcaaagctgtgtaggtggatgtctggattctgttacaggagtatgcagggtggtggaattagaaggttggcaaaaaaaaggcaaaatgtgtggtgttaggtacagggggttggggttaaaggaaaaagtgggtgtgccaggaggttaagggagagtacattttagtggagaagtaagatataggagaggagggaaaaagagtttgagaaaaaggattaggtttgaaaatattgc

SEQ ID NO: 128636 - DNA, 1318 bp, Homo sapiens
agaggcttgtttgaggcccgcggggactgggcgggcggaggccgggctgccgaagtgtgaggggaggagcccgagccgtcgctgctgccgccgctaagggagaggagcatgtctgcaactcgagccaagaaagtgaagatggccaccaaatcatgccccgagtgcgaccaacaggttcctgttgcatgtaaatcatgtccttgtggttacatatttattagcagaaaacttttaaatgcaaaacactcagagaaatcaccaccttctacagagaaacaggaaaaggaaattgacatctatgctaacctgtctgatgaaaaggctttcgtgttttcagtcgccttggcagaaataaatagaaaaattatcaatcaaagacttattctctgatacttgtttgcaaaatctgctgaaacttctgtcaggataacatcagcaaattctcaaacagttatggactctcaggagcattctgactgcatcaataagggccatcgattgtttctttctcgcctgtcgtttagcctgtgccacacttcgggagcaaagctgtgtaggcttggactgttctgggatttccttgtttaccaaggagtattgtcagtgttttgtgtttgggatataagtaagtgtatttgccaacaacaaaaaaaaaccaacaaaaatgctggatggatgttaaaggataaaaagtgatggggtatggggtaggtatgaaaactagggtaataagatgcttgattgttttcaggtttgccaccagagatgcaatattttaaatactgtcagaaagagtgatttttaaaaatatatatttcagattttcagtgctaacagattgcatatatacagttcatttacttttattaaattggcaatcgatattttattgaatggggaattaagaatataaactgtaaattttgtcttaaattgattttttttcttggcctttatttttattacttaaggtatgagttatattttaggagatactttctagacagtttgaagtttgggtgctatatgaagaaaaacatttaatgatatactcagatataaacaccttgttttcttgaatgtaatttatttattagctaaaaaaaaaaaacaaactgctctcaagatggtgcctgttaacctaaacatgaaatatatttattacatgcaaaatatttcttagccacttttaagcagtaatgttttatctgaatggatatttgtttctatatcctgataattatttaaattgttactttcaatctggaagaaaaaataaaccttaatattgaaactaagtagattaaatagtgtgata

SEQ ID NO: 128637 - DNA, 1452 bp, Homo sapiens
acagcggtgggagcctgcgggccgcagccccggcgagagtgtgccgcacgcccgcctccgaggccaggccctagctccgagaacccctcctgcggccggggcggctttgttcccggttccgacgggttcctgttgcatgtaaatcatgtccttgtggttacatatttattagcagaaaacttttaaatgcaaaacactcagagaaatcaccaccttctacagaaaacaagcatgaggccaagaggaggcgaacagagagagttaggagagagaagataaattctacagtaaataaagatttagaaaacagaaagaggtctcgaagtaacagccattcagatcatatcagacgaggaagaggaagacctaaaagtgcatctgccaaaaaacatgaggaagaaagagagaaacaggaaaaggaaattgacatctatgctaacctgtctgatgaaaaggctttcgtgttttcagtcgccttggcagaaataaatagaaaaattatcaatcaaagacttattctctgatacttgtttgcaaaatctgctgaaacttctgtcaggataacatcagcaaattctcaaacagttatggactctcaggagcattctgactgcatcaataagggccatcgattgtttctttctcgcctgtcgtttagcctgtgccacacttcgggagcaaagctgtgtaggcttggactgttctgggatttccttgtttaccaaggagtattgtcagtgttttgtgtttgggatataagtaagtgtatttgccaacaacaaaaaaaaaccaacaaaaatgctggatggatgttaaaggataaaaagtgatggggtatggggtaggtatgaaaactagggtaataagatgcttgattgttttcaggtttgccaccagagatgcaatattttaaatactgtcagaaagagtgatttttaaaaatatatatttcagattttcagtgctaacagattgcatatatacagttcatttacttttattaaattggcaatcgatattttattgaatggggaattaagaatataaactgtaaattttgtcttaaattgattttttttcttggcctttatttttattacttaaggtatgagttatattttaggagatactttctagacagtttgaagtttgggtgctatatgaagaaaaacatttaatgatatactcagatataaacaccttgttttcttgaatgtaatttatttattagctaaaaaaaaaaaacaaactgctctcaagatggtgcctgttaacctaaacatgaaatatatttattacatgcaaaatatttcttagccacttttaagcagtaatgttttatctgaatggatatttgtttctatatcctgataattatttaaattgttactttcaatctggaagaaaaaataaaccttaatattgaaactaagtagattaaatagtgtgata

SEQ ID NO: 128638 - DNA, 1576 bp, Homo sapiens
ggccgggcgcgcgggcgggcggcagtggcttggcggccgttgtctgtggaggggggcctcgccgggctcccggaggccgagcggttcctgttgcatgtaaatcatgtccttgtggttacatatttattagcagaaaacttttaaatgcaaaacactcagagaaatcaccaccttctacagaaaacaagcatgaggccaagaggaggcgaacagagagagttaggagagagaagataaattctacagtaaataaagatttagaaaacagaaagaggtctcgaagtaacagccattcagatcatatcagacgaggaagaggaagacctaaaagtgcatctgccaaaaaacatgaggaagaaagagggtgcagaaaacctatgccgaggactcctattttagaagggaaactaggtaaagaaaagtcagcagagaaaaaggaaaagagagaaatactgcctggctcagaaaacaacattcttttcagttgaaatagagggaatgcagctgaaagaagagaatgcttctggtgagaaacaggaaaaggaaattgacatctatgctaacctgtctgatgaaaaggctttcgtgttttcagtcgccttggcagaaataaatagaaaaattatcaatcaaagacttattctctgatacttgtttgcaaaatctgctgaaacttctgtcaggataacatcagcaaattctcaaacagttatggactctcaggagcattctgactgcatcaataagggccatcgattgtttctttctcgcctgtcgtttagcctgtgccacacttcgggagcaaagctgtgtaggcttggactgttctgggatttccttgtttaccaaggagtattgtcagtgttttgtgtttgggatataagtaagtgtatttgccaacaacaaaaaaaaaccaacaaaaatgctggatggatgttaaaggataaaaagtgatggggtatggggtaggtatgaaaactagggtaataagatgcttgattgttttcaggtttgccaccagagatgcaatattttaaatactgtcagaaagagtgatttttaaaaatatatatttcagattttcagtgctaacagattgcatatatacagttcatttacttttattaaattggcaatcgatattttattgaatggggaattaagaatataaactgtaaattttgtcttaaattgattttttttcttggcctttatttttattacttaaggtatgagttatattttaggagatactttctagacagtttgaagtttgggtgctatatgaagaaaaacatttaatgatatactcagatataaacaccttgttttcttgaatgtaatttatttattagctaaaaaaaaaaaacaaactgctctcaagatggtgcctgttaacctaaacatgaaatatatttattacatgcaaaatatttcttagccacttttaagcagtaatgttttatctgaatggatatttgtttctatatcctgataattatttaaattgttactttcaatctggaagaaaaaataaaccttaatattgaaactaagtagattaaatagtgtgata

SEQ ID NO: 128639 - DNA, 1501 bp, Homo sapiens
agaggcttgtttgaggcccgcggggactgggcgggcggaggccgggctgccgaagtgtgaggggaggagcccgagccgtcgctgctgccgccgctaagggagaggagcatgtctgcaactcgagccaagaaagtgaagatggccaccaaatcatgccccgagtgcgaccaacaggttcctgttgcatgtaaatcatgtccttgtggttacatatttattagcagaaaacttttaaatgcaaaacactcagagaaatcaccaccttctacagaaaacaagcatgaggccaagaggaggcgaacagagagagttaggagagagaagataaattctacagtaaataaagatttagaaaacagaaagaggtctcgaagtaacagccattcagatcatatcagacgaggaagaggaagacctaaaagtgcatctgccaaaaaacatgaggaagaaagagagaaacaggaaaaggaaattgacatctatgctaacctgtctgatgaaaaggctttcgtgttttcagtcgccttggcagaaataaatagaaaaattatcaatcaaagacttattctctgatacttgtttgcaaaatctgctgaaacttctgtcaggataacatcagcaaattctcaaacagttatggactctcaggagcattctgactgcatcaataagggccatcgattgtttctttctcgcctgtcgtttagcctgtgccacacttcgggagcaaagctgtgtaggcttggactgttctgggatttccttgtttaccaaggagtattgtcagtgttttgtgtttgggatataagtaagtgtatttgccaacaacaaaaaaaaaccaacaaaaatgctggatggatgttaaaggataaaaagtgatggggtatggggtaggtatgaaaactagggtaataagatgcttgattgttttcaggtttgccaccagagatgcaatattttaaatactgtcagaaagagtgatttttaaaaatatatatttcagattttcagtgctaacagattgcatatatacagttcatttacttttattaaattggcaatcgatattttattgaatggggaattaagaatataaactgtaaattttgtcttaaattgattttttttcttggcctttatttttattacttaaggtatgagttatattttaggagatactttctagacagtttgaagtttgggtgctatatgaagaaaaacatttaatgatatactcagatataaacaccttgttttcttgaatgtaatttatttattagctaaaaaaaaaaaacaaactgctctcaagatggtgcctgttaacctaaacatgaaatatatttattacatgcaaaatatttcttagccacttttaagcagtaatgttttatctgaatggatatttgtttctatatcctgataattatttaaattgttactttcaatctggaagaaaaaataaaccttaatattgaaactaagtagattaaatagtgtgata

SEQ ID NO: 128640 - DNA, 2629 bp, Homo sapiens
agaggcttgtttgaggcccgcggggactgggcgggcggaggccgggctgccgaagtgtgaggggaggagcccgagccgtcgctgctgccgccgctaagggagaggagcatgtctgcaactcgagccaagaaagtgaagatggccaccaaatcatgccccgagtgcgaccaacaggttcctgttgcatgtaaatcatgtccttgtggttacatatttattagcagaaaacttttaaatgcaaaacactcagagaaatcaccaccttctacagaaaacaagcatgaggccaagaggaggcgaacagagagagttaggagagagaagataaattctacagtaaataaagatttagaaaacagaaagaggtctcgaagtaacagccattcagatcatatcagacgaggaagaggaagacctaaaagtgcatctgccaaaaaacatgaggaagaaagagagaaacaggaaaaggaaattgacatctatgctaacctgtctgatgaaaaggctttcgtgttttcagtcgccttggcagaaataaatagaaaaattatcaatcaaagacttattctctgatacttgtttgcaaaatctgctgaaacttctgtcaggataacatcagcaaattctcaaacagttatggactctcaggagcattctgactgcatcaataagggccatcgattgtttctttctcgcctgtcgtttagcctgtgccacacttcgggagcaaagctgtgtaggcttggactgttctgggatttccttgtttaccaaggagtattgtcagtgttttgtgtttgggatataagtaagtgtatttgccaacaacaaaaaaaaaccaacaaaaatgctggatggatgttaaaggataaaaagtgatggggtatggggtaggtatgaaaactagggtaataagatgcttgattgttttcaggtttgccaccagagatgcaatattttaaatactgtcagaaagagtgatttttaaaaatatatatttcagattttcagtgctaacagattgcatatatacagttcatttacttttattaaattggcaatcgatattttattgaatggggaattaagaatataaactgtaaattttgtcttaaattgattttttttcttggcctttatttttattacttaaggtatgagttatattttaggagatactttctagacagtttgaagtttgggtgctatatgaagaaaaacatttaatgatatactcagatataaacaccttgttttcttgaatgtaatttatttattagctaaaaaaaaaaaacaaactgctctcaagatggtgcctgttaacctaaacatgaaatatatttattacatgcaaaatatttcttagccacttttaagcagtaatgttttatctgaatggatatttgtttctatatcctgataattatttaaattgttactttcaatctggaagaaaaaataaaccttaatattgaaactaagtagattaaatagtgtgataaaagttttttgttctggtgaagtttgtgaaatatatttaaattcttaatttttctagtgttaagtcataatcgtttatagttgatttatattaaatgcttttgcattttggcatatcaatttaatgattaacatattcaaacttggtaatcactccccttattttcagtcgctcttcccccaatctgtttagaaatccttttaaagccttcttacagaagatagtcatcagttagatttagcccccttttaagagaatctccctttcaattttagccgtaacattatcaatttcagacttcatcctgcatctcccatcacctcctcaaagaaaaaaggtcaacattttttcctactttatttaaatggtaaccagcagaggttgcagtgagccaagatcactccactccactccagcctgagtgacagagctagacactgtgtctcaaaaaataaaaataaaaaataagactcatcagataatgtattttttccttacaactatcatagatatttttaagaacccaagaggaaaacagtctatcacatttaccacaatatttatcatttgtattaatcttccttaattcttgatgttccaagtttacataggtatcagtccttttcatctggaaaatttcttttagtgcaggtctgttgacatttaattctcttattttttcttcatctgagaatgtctttattttgccttaattcatgaaagatatttttgctggatataaactactgtgttgacagttctttcagcctccatggtttctgatgagaaatgtgcagccattaaagtaatatttcccctgtatgaaacatgttatttttctctgagtattttcaggaatctttgtctttggtttttattggtttgattatgatgtgcccgggtgtttgaatttattctctttgggatttgttgagcttaaatgtgtaagtttatgcctttcatcagattatgtaaagttttaaaccattcagatattttctgctctactttctcctccctcttaggctccagtgatgcaagtgttagactctttggtattatctcacagatctcagaacctctgttcatttattttattttaataaatcatttcagttaacaaaatca

SEQ ID NO: 128641 - DNA, 1183 bp, Homo sapiens
agaggcttgtttgaggcccgcggggactgggcgggcggaggccgggctgccgaagtgtgaggggaggagcccgagccgtcgctgctgccgccgctaagggagaggagcatgtctgcaactcgagccaagaaagtgaagatggccaccaaatcatgccccgagtgcgaccaacaggttcctgttgcatgtaaatcatgtccttgtggttacatatttattagcagaaaacttttaaatgcaaaacactcagagaaatcaccaccttctacagaaaacaagcatgaggccaagaggaggcgaacagagagagttaggagagagaagataaattctacagtaaataaagatttagaaaacagaaagaggtctcgaagtaacagccattcagatcatatcagacgaggaagaggaagacctaaaagtgcatctgccaaaaaacatgaggaagaaagagagaaacaggaaaaggaaattgacatctatgctaacctgtctgatgaaaaggctttcgtgttttcagtcgccttggcagaaataaatagaaaaattatcaatcaaagacttattctctgatacttgtttgcaaaatctgctgaaacttctgtcaggataacatcagcaaattctcaaacagttatggactctcaggagcattctgactgcatcaataagggccatcgattgtttctttctcgcctgtcgtttagcctgtgccacacttcgggagcaaagctgtgtaggcttggactgttctgggatttccttgtttaccaaggagtattgtcagtgttttgtgtttgggatataagtaagtgtatttgccaacaacaaaaaaaaaccaacaaaaatgctggatggatgttaaaggataaaaagtgatggggtatggggtaggtatgaaaactagggtaataagatgcttgattgttttcaggtttgccaccagagatgcaatattttaaataaaaaaaaaaaacaaactgctctcaagatggtgcctgttaacctaaacatgaaatatatttattacatgcaaaatatttcttagccacttttaagcagtaatgttttatctgaatggatatttgtttctatatcctgataattatttaaattgttactttcaatctggaagaaaaaataaaccttaatattgaaactaagtagattaaatagtgtgata

SEQ ID NO: 128642 - DNA, 577 bp, Homo sapiens
attttagacatctacttgagtggattaagagacacacatagctggtcaaacacgatttctgggcatatctatgagggtgtttctggaagacactgagataaccatgacccaatgtggatgggcactgatatggtttggctgtgtccccacccagatctcatcttgaattgtagttcctgtaatacctacatgtcgtgggagggacccagtgggaggtgactgaatcatggtggtggttaccgccatgctgttctcatgacagtgagtgagttctcatgatctgatggttttataaggggcttttcccctttgggtcagcacttcttgttgctgccatgtgaagagggatagctttgcttccccttctgccatgattgtgaggcccctgcagccatgtggaactgtcagcccattaaacccctttgttctttataaattgctcagactcaggtatttcttcatagctgtataaaaatggatgaatacaggcaccatccaattggttgagagcccagatagaataacaaggaagaggaaaggtgaattatctccttctgaaatggaaacatccttcttc

SEQ ID NO: 128643 - DNA, 290 bp, Homo sapiens
ctattcctgctctcagagcacagtaccctcagtcagagaacctcatcagtcagcccatcccccgtgttgtagagatgggcaaatgagtgcacagagatctgattgtcctaaggttacaaagtgaatcagcaacagatccaggaatgaggatactgcctcctggtcctgggctctcgagtgggtccagagccctgccgtcgatacatcagccttcagaagggacttccaggcctgggaaagcctccccaggaggcatccttatagctaagcagtctagacagaagggtgca

SEQ ID NO: 128644 - DNA, 1306 bp, Homo sapiens
  misc_feature (912)..(912): n is a, c, g, or t
  misc_feature (924)..(924): n is a, c, g, or t
  misc_feature (999)..(999): n is a, c, g, or t
  misc_feature (1039)..(1039): n is a, c, g, or t
cgacgaattatgtatgagcgtcgatacgctggtgttatttcagtcacggggctcggagtttgcttgtttctgactgtgcccttgtgtattcttccaaaatcagagtcagactgctcccggtgccatgaacggagacgacgcctttgcaaggagacccacggttggtgctcaaataccagagaagatccaaaaggccttcgatgatattgccaaatacttctctaaggaagagtgggaaaagatgaaagcctcagagaaaatcttctatgtgtatatgaagagaaagtatgaggctatgactaaactaggtttcaaggccaccctcccacctttcatgtgtaataaacgggccgaagacttccaggggaatgatttggataatgaccctaaccgtgggaatcaggttgaacgtcctcagatgactttcggcaggctccagggaatctccccgaagatcatgcccaagaagccagcagaggaaggaaatgattcggaggaagtgccagaagcatctggcccacaaaatgatgggaaagagctgtgccccccgggaaaaccaactacctctgagaagattcacgagagatctggacccaaaaggggggaacatgcctggacccacagactgcgtgagagaaaacagctggtgatttatgaagagatcagcgaccctgaggaagatgacgagtaactcccctcagggatacgacacatgcccatgatgagaagcagaacgtggtgacctttcacgaacatgggcatggctgcggacccctcgtcatcaggtgcatagcaagtgaaagcaagtgttcacaacagtgaaaagttgagcgtcatttttcttagtgtgccaagagttcgatgttagcgtttacgttgtattttcttacactgtgtcattctgttagatantaacattttcantgatgagcaagacatacttaatgcatattttggtttgtgtatccatgcacctaccttagaaaacaagtattgtcngttacctctgcatggaacagcattaccctcctctctcccnagatgtgactactgagggcagttctgagtgtttaatttcagattttttcctctgcatttacacacacacacaaaccacaccacacacacacacacacacacacacacacacaccaagtaccagtataagcatctcccatctgcttttcccattgccatgcgtcctggtcaggcttccctcactctgtttcctggtcagcatgtactcccctcatccgattcccctgtagcagtcactgacagtaaataaacctttgcaaacgttccc

SEQ ID NO: 128645 - DNA, 1399 bp, Homo sapiens
  misc_feature (1005)..(1005): n is a, c, g, or t
  misc_feature (1017)..(1017): n is a, c, g, or t
  misc_feature (1092)..(1092): n is a, c, g, or t
  misc_feature (1132)..(1132): n is a, c, g, or t
gctcagagtacgcacggtctgattttctctttggattcttccaaaatcagagtcagactgctcccggtgccatgaacggagacgacgcctttgcaaggagacccacggttggtgctcaaataccagagaagatccaaaaggccttcgatgatattgccaaatacttctctaaggaagagtgggaaaagatgaaagcctcagagaaaatcttctatgtgtatatgaagagaaagtatgaggctatgactaaactaggtttcaaggccaccctcccacctttcatgtgtaataaacgggccgaagacttccaggggaatgatttggataatgaccctaaccgtgggaatcaggttgaacgtcctcagatgactttcggcaggctccagggaatctccccgaagatcatgcccaagaagccagcagaggaaggaaatgattcggaggaagtgccagaagcatctggcccacaaaatgatgggaaagagctgtgccccccgggaaaaccaactacctctgagaagattcacgagagatctggaaatagggaggcccaagaaaaggaagagagacgcggaacagctcatcggtggagcagtcagaacacacacaacattggtcgattcagtttgtcaacttctatgggtgcagttcatggtacccccaaaacaattacacacaacagggacccaaaaggggggaacatgcctggacccacagactgcgtgagagaaaacagctggtgatttatgaagagatcagcgaccctgaggaagatgacgagtaactcccctcagggatacgacacatgcccatgatgagaagcagaacgtggtgacctttcacgaacatgggcatggctgcggacccctcgtcatcaggtgcatagcaagtgaaagcaagtgttcacaacagtgaaaagttgagcgtcatttttcttagtgtgccaagagttcgatgttagcgtttacgttgtattttcttacactgtgtcattctgttagatantaacattttcantgatgagcaagacatacttaatgcatattttggtttgtgtatccatgcacctaccttagaaaacaagtattgtcngttacctctgcatggaacagcattaccctcctctctcccnagatgtgactactgagggcagttctgagtgtttaatttcagattttttcctctgcatttacacacacacacaaaccacaccacacacacacacacacacacacacacacacaccaagtaccagtataagcatctcccatctgcttttcccattgccatgcgtcctggtcaggcttccctcactctgtttcctggtcagcatgtactcccctcatccgattcccctgtagcagtcactgacagtaaataaacctttgcaaacgttccc

SEQ ID NO: 128646 - DNA, 912 bp, Homo sapiens
  misc_feature (518)..(518): n is a, c, g, or t
  misc_feature (530)..(530): n is a, c, g, or t
  misc_feature (605)..(605): n is a, c, g, or t
  misc_feature (645)..(645): n is a, c, g, or t
agaccaacacagcctggaccaccacagccaccccagcagaggccttatggatatgaccagatcatgcccaagaagccagcagaggaaggaaatgattcggaggaagtgccagaagcatctggcccacaaaatgatgggaaagagctgtgccccccgggaaaaccaactacctctgagaagattcacgagagatctggacccaaaaggggggaacatgcctggacccacagactgcgtgagagaaaacagctggtgatttatgaagagatcagcgaccctgaggaagatgacgagtaactcccctcagggatacgacacatgcccatgatgagaagcagaacgtggtgacctttcacgaacatgggcatggctgcggacccctcgtcatcaggtgcatagcaagtgaaagcaagtgttcacaacagtgaaaagttgagcgtcatttttcttagtgtgccaagagttcgatgttagcgtttacgttgtattttcttacactgtgtcattctgttagatantaacattttcantgatgagcaagacatacttaatgcatattttggtttgtgtatccatgcacctaccttagaaaacaagtattgtcngttacctctgcatggaacagcattaccctcctctctcccnagatgtgactactgagggcagttctgagtgtttaatttcagattttttcctctgcatttacacacacacacaaaccacaccacacacacacacacacacacacacacacacaccaagtaccagtataagcatctcccatctgcttttcccattgccatgcgtcctggtcaggcttccctcactctgtttcctggtcagcatgtactcccctcatccgattcccctgtagcagtcactgacagtaaataaacctttgcaaacgttccc

SEQ ID NO: 128647 - DNA, 1183 bp, Homo sapiens
  misc_feature (789)..(789): n is a, c, g, or t
  misc_feature (801)..(801): n is a, c, g, or t
  misc_feature (876)..(876): n is a, c, g, or t
  misc_feature (916)..(916): n is a, c, g, or t
agaccaacacagcctggaccaccacagccaccccagcagaggccttatggatatgaccagctttcatgtgtaataaacgggccgaagacttccaggggaatgatttggataatgaccctaaccgtgggaatcaggttgaacgtcctcagatgactttcggcaggctccagggaatctccccgaagatcatgcccaagaagccagcagaggaaggaaatgattcggaggaagtgccagaagcatctggcccacaaaatgatgggaaagagctgtgccccccgggaaaaccaactacctctgagaagattcacgagagatctggaaatagggaggcccaagaaaaggaagagagacgcggaacagctcatcggtggagcagtcagaacacacacaacattggtcgattcagtttgtcaacttctatgggtgcagttcatggtacccccaaaacaattacacacaacagggacccaaaaggggggaacatgcctggacccacagactgcgtgagagaaaacagctggtgatttatgaagagatcagcgaccctgaggaagatgacgagtaactcccctcagggatacgacacatgcccatgatgagaagcagaacgtggtgacctttcacgaacatgggcatggctgcggacccctcgtcatcaggtgcatagcaagtgaaagcaagtgttcacaacagtgaaaagttgagcgtcatttttcttagtgtgccaagagttcgatgttagcgtttacgttgtattttcttacactgtgtcattctgttagatantaacattttcantgatgagcaagacatacttaatgcatattttggtttgtgtatccatgcacctaccttagaaaacaagtattgtcngttacctctgcatggaacagcattaccctcctctctcccnagatgtgactactgagggcagttctgagtgtttaatttcagattttttcctctgcatttacacacacacacaaaccacaccacacacacacacacacacacacacacacacaccaagtaccagtataagcatctcccatctgcttttcccattgccatgcgtcctggtcaggcttccctcactctgtttcctggtcagcatgtactcccctcatccgattcccctgtagcagtcactgacagtaaataaacctttgcaaacgttccc

SEQ ID NO: 128648 - DNA, 1253 bp, Homo sapiens
  misc_feature (859)..(859): n is a, c, g, or t
  misc_feature (871)..(871): n is a, c, g, or t
  misc_feature (946)..(946): n is a, c, g, or t
  misc_feature (986)..(986): n is a, c, g, or t
gctcagagtacgcacggtctgattttctctttggattcttccaaaatcagagtcagactgctcccggtgccatgaacggagacgacgcctttgcaaggagacccacggttggtgctcaaataccagagaagatccaaaaggccttcgatgatattgccaaatacttctctaaggaagagtgggaaaagatgaaagcctcagagaaaatcttctatgtgtatatgaagagaaagtatgaggctatgactaaactaggtttcaaggccaccctcccacctttcatgtgtaataaacgggccgaagacttccaggggaatgatttggataatgaccctaaccgtgggaatcaggttgaacgtcctcagatgactttcggcaggctccagggaatctccccgaagatcatgcccaagaagccagcagaggaaggaaatgattcggaggaagtgccagaagcatctggcccacaaaatgatgggaaagagctgtgccccccgggaaaaccaactacctctgagaagattcacgagagatctggacccaaaaggggggaacatgcctggacccacagactgcgtgagagaaaacagctggtgatttatgaagagatcagcgaccctgaggaagatgacgagtaactcccctcagggatacgacacatgcccatgatgagaagcagaacgtggtgacctttcacgaacatgggcatggctgcggacccctcgtcatcaggtgcatagcaagtgaaagcaagtgttcacaacagtgaaaagttgagcgtcatttttcttagtgtgccaagagttcgatgttagcgtttacgttgtattttcttacactgtgtcattctgttagatantaacattttcantgatgagcaagacatacttaatgcatattttggtttgtgtatccatgcacctaccttagaaaacaagtattgtcngttacctctgcatggaacagcattaccctcctctctcccnagatgtgactactgagggcagttctgagtgtttaatttcagattttttcctctgcatttacacacacacacaaaccacaccacacacacacacacacacacacacacacacaccaagtaccagtataagcatctcccatctgcttttcccattgccatgcgtcctggtcaggcttccctcactctgtttcctggtcagcatgtactcccctcatccgattcccctgtagcagtcactgacagtaaataaacctttgcaaacgttccc

SEQ ID NO: 128649 - DNA, 1016 bp, Homo sapiens
  misc_feature (606)..(606): n is a, c, g, or t
  misc_feature (618)..(618): n is a, c, g, or t
  misc_feature (693)..(693): n is a, c, g, or t
  misc_feature (733)..(733): n is a, c, g, or t
ataaccctctgctgcagaataccctgatgcgacagaagtctctctagagtttggaaacctttaccaacaaagaaaaattctgatgtattctctttcagttgaacgtcctcagatgactttcggcaggctccagggaatctccccgaagatcatgcccaagaagccagcagaggaaggaaatgattcggaggaagtgccagaagcatctggcccacaaaatgatgggaaagagctgtgccccccgggaaaaccaactacctctgagaagattcacgagagatctggacccaaaaggggggaacatgcctggacccacagactgcgtgagagaaaacagctggtgatttatgaagagatcagcgaccctgaggaagatgacgagtaactcccctcagggatacgacacatgcccatgatgagaagcagaacgtggtgacctttcacgaacatgggcatggctgcggacccctcgtcatcaggtgcatagcaagtgaaagcaagtgttcacaacagtgaaaagttgagcgtcatttttcttagtgtgccaagagttcgatgttagcgtttacgttgtattttcttacactgtgtcattctgttagatantaacattttcantgatgagcaagacatacttaatgcatattttggtttgtgtatccatgcacctaccttagaaaacaagtattgtcngttacctctgcatggaacagcattaccctcctctctcccnagatgtgactactgagggcagttctgagtgtttaatttcagattttttcctctgcatttacacacacacgcacacaaaccacaccacaaaccacaccacacacacacacacacacacacacacacacaccaagtaccagtataagcatctcccatctgcttttcccattgccatgcgtcctggtcaggcttccctcactctgtttcctggtcagcatgtactcccctcatccgattcccctgtagcagtcactgacagtaaataaacctttgcaaacgttccc

SEQ ID NO: 128650 - DNA, 1022 bp, Homo sapiens
gctcagagtacgcacggtctgattttctctttggattcttccaaaatcagagtcagactgctcccggtgccatgaacggagacgacgcctttgcaaggagacccacggttggtgctcaaataccagagaagatccaaaaggccttcgatgatattgccaaatacttctctaaggaagagtgggaaaagatgaaagcctcagagaaaatcttctatgtgtatatgaagagaaagtatgaggctatgactaaactaggtttcaaggccaccctcccacctttcatgtgtaataaacgggccgaagacttccaggggaatgatttggataatgaccctaaccgtgggaatcaggttgaacgtcctcagatgactttcggcaggctccagggaatctccccgaaggtgagtgtctctcagatctaaaggaccagagaacctttgtccctccacggatgcgaacactggtaagagtgggagaatatcaaaaatgccctcactgccttcttctccccatgtctatcacaacacctgatgtcgcaccgacggcttgatagtaccaacagttgcgattgttaatacttcttttgttttcatagtgatgccagatactatttcaagcagttcacatggattaatttatttaatccttaagaagacattgtttctattatctccaaataataatgagtcacacacttcagttttcatccatatgaaagccatgtgacttgacacaaatcttctaagttctctgagctccagattcctggtccatgaaatggaagtaaagaattatagttcatgttttagatcatagttatcagcaacataataataaaatgaggctatcgtggtacagagatgttaaagaattttcctggggcgcagtggcagtggtagtctaatccagagctccaagccatttaaagctcattcacatttgcatttgtctatgaagttcagatgttgctcactagggcttcaccccatagggcctgctggtgcttccaatgagacacccac

SEQ ID NO: 128651 - DNA, 298 bp, Homo sapiens
cttaacattatagcacacaccttttgtgatggtataacatggtctaatcaccatggttaatatgtgtattcctattagtggatgttccataatctacttggccttttccctaattgttaggcatttttagttctttctgcattctgctattgcaaatgtcactgtactttggtccatgatgaatttccaggagggcgagcagggtagaatgagtactgtccagtgagtactgtccagcagtgaccactattgtgccccactcctccctttcagaatagccgttggcatacagtaggag

SEQ ID NO: 128652 - DNA, 124 bp, Homo sapiens
gccactaactgattgtacagggtgctaggatgtggctgtctggaccttggaggttcaaagagctattcctgtcccacaggggttttatcaagggcaagatcggagtccacaagcacacccagga

SEQ ID NO: 128653 - DNA, 537 bp, Homo sapiens
aaagaggctccgatgagctcacggagtcaggaaccaggtcttggagaggcagtaagagtgctgtggcctctcccagtgcctgcctcccggtgcagggcccataggctatgatgggcgggcaggaattcaagagagaagcagggggacccgaggccacagggcaggtgggcagaaagggggtcctggacccgctcgaggatgactctgagaggacaagtactaagcagatggcagatggcagccttcggtgtagacggcttcaagcagctggcagcatccccagggcccggggccagcctttgtgtcctgcagtcagaccaggcgcatgaccaagctggtcacctaaaacttatctcacttcagggagactgaaccccaagatccccgtgctctgcttgagggtattaaattggcagacgaaacggccagccagccatgctgaccagtgacaggacagcccttcccaggcaagtttgatcttgttcccacactcccaagatcctcttcccataatcccaataacccatgaaaatgtcc

SEQ ID NO: 128654 - DNA, 505 bp, Homo sapiens
acaaagacaacgaaagcagccattaaatggctctgcaggaggcagagggagagaagtgtttttgctccagagaggaaaggggagagggaaggagggctgggaaacggactgaagaggagaccagagccaggagctggatagtgacaggaggctgggtactggtgggccaagtcaaactctgcaaagccagggcccagaggatgcccaaggatggagaacatggaaactgacctctgtgtttctgtcaagtgtgcctttcgtctcaccctccagcactaaagggctcaattcacttgtgttaccaaggtttggtgactgcggagttaccaaggtttggtgactgcagagtctaaggggagcctggcagagatgaaggggaaagactgaactgtggaaactatcaacttagtccattttgtgcttctatgacagaatacctgagactggtaacttataatgaacagaagtttatttggctcacagttttggagggtgggaagtccaa

SEQ ID NO: 128655 - DNA, 431 bp, Homo sapiens
attcggcacagggctgaggcgcaccctcggagctccccctgcctgcctcctcctcctcctcctcttttctgcttcctgaaggttacctgccttttagggggctcttgtctaaaggatcttcttgctttctcagctatccttggcttctttttcgtcttcctcctcctttaactctttctctcctttcctcccttcacccgttcgtcccaagcccttgggtgcatcccgccctagggcacaccagacggccagaatggggaccctagggtggagggaattcccccacgccatctccgcacctgtgcccgcctctcccccctcgaggccccgtcgagggagggaaggggcagtaagcggggggtcgacaaccccccccaaaacctttaaagtcttccattttctggctctcctcctcattgacgtccctcttc

SEQ ID NO: 128656 - DNA, 1157 bp, Homo sapiens
cgaggcgtggcgccgcggccggagcccctccgacatctccagcgacgtgtccatccaaatgacgcagaactaccctcccgccatcaagtacccggaccacctgcacatctccacctcgccctgctgaggcccgcccctcggagctccccctgcctcctcctcctcctcgtcttagggggtctccctgcaatgcagcgcccccttccgtcctcgggactcctcgctcccacccggaggaggctgcgccagctttaggccccgccctcctcccaatggctccgcccacagactcccttatttcaatggccgcgccctcttttcccgacctctccttttcattggtccctctcactcccaaatgactcctccccttcgttggcccgcccctttcctctggcccctcctctccaagaaaattagctcctccctcgttctccacctgctctgagctgggagcagccagaggcggtgcaagcgcccagctccccagagctccccaacctcggacctcaccgcagggcgctgggctggagagcaggttcgggcagccgtcgggaataccgaccatcctcttctcccttctaacctgggcttcctttttccctgcctaatctcacctcctgacctgctgggtcctccggtgcagtgggagggccggcttgctccacccgcagccccggggtggcgtagggaagggggctggaagccacgggtacggttaacctggcccttccctccccatctcccctacttccctggaaggtcccattctttctcaccggctgggctcttttctgcttcctgaaggttacctgccttttagggggctcttgtctaaaggatcttcttgctttctcagctatccttggcttctttttcgtcttcctcctcctttaactctttctctcctttcctcccttcacccgttcgtcccaagcccttgggtgcatcccgccctagggcacaccagacggccagaatggggaccctagggtggagggaattcccccacgccatctccgcacctgtgcccgcctctcccccctcgaggccccgtcgagggagggaaggggcagtaagcggggggtcgacaaccccccccaaaacctttaaagtcttccattttctggctctcctcctcattgacgtccctcttc

SEQ ID NO: 128657 - DNA, 533 bp, Homo sapiens
ttgcattatcctcccacccgcccactgccaccaacactgctgaattatgggctagaagagctggtctccagtcttgccagatcccaatactgtctggaattaggcaatgagaggaactctggtcattcaacccatgtcggatgtgcaaggtgaaacttcacaaaaataatgtgtaaccaagaaaggaccacacagaaccacagaaaagtcctctctctttctcatccatctgtcgttctttgaagctcagcattatcttgcttcccagaagaggaaaaagaagtagggagatgaaaaagggtgctcagatcttaatctcagtgtcccaaaggaaggacagactgttccagctgaatctgggatgatcaaacacatctcaggcaagcaaagctgacagtcaggtctgtcatccgactgaaaactagacagggaccagggatcctaactggttgctgggtaaaaactacagggacgtctgaccaagggcactgggtctgcagaagaaaatggatccccttctcttgatgtctagt

SEQ ID NO: 128658 - DNA, 235 bp, Homo sapiens
aatctccagtgctacatgagggcgaggtatgactgtgcgtcgcccacagcctctgccttactctcctctcacatatacacacacaagcacacctctgccctatacctagcataagatttgtgtacgtgggagggccttaagtgtttgggtgtttttcgtttcttgccttataagcttttttggaaaagattccagaagacacttagagtaatcaaacatcgtgcagctggcatgg

SEQ ID NO: 128659 - DNA, 720 bp, Homo sapiens
ctgggctgacctctttcagctggagaaagccataagcgctcactaacctgccgtgctcaccatgaacttccacttgaccacataggcatccccctcgtggaactgcccgatgctttgtttggggagcctgctatagtcaaattccaggatgtaccagacatccacggagacactggtgatctcaaactgcctcctgtggtgtccttccaccaggccatagccacagccaatgttcaccctgtccaggatggcacctgctgttgtctggggcacggacaccatccgtgtcacgttgttccgcttgacatcggccctggagtcttcctataggggaacatgaagacatcggttcagttgcctgtttccgcagctattccttgtcacactcaacgctgcttcagctgttcatgggacagcataaaaatacaccttccacactctgtctcaggatgtttaactgcagtcagggaaaggctgcattttcagaaagactctggcaggtctgaacacccattggccacactggtgcatggggtgcctgaaaacaggtgcaaacccgactcttcacctcccagagtcagattagaattggaggccagtctgctgttctattagtgaatcctgggaaggcctcttagctttaaggggtgtgtgtgtgtgtgtgtgtatgtgtgtccattttttttaattaaaaaagtattttagttgaaaaaataaaaa

SEQ ID NO: 128660 - DNA, 410 bp, Homo sapiens
cctgaaaaaaaaaatttataggaaaatttccccaaaaggtaagcacaataaaaagtcaaaaggaggtacgggctgaagaatgacttcctgcaatgtgtaatttcaagttcccatacagataactcctctgaggatctgaggaacatgtgttcttaccttgtcctgattctcctatacatcttcttgggagagaactgtgcaacttaaaggctaccttattttgtactgtgaatgtctctggagctccttgggaaaaaagttatctgatttagctactatgtgccttttgaaagaaaagggctatgtaagaagacagcagtctcacactgtgccagaaaaacactccaaactgaaaatgaaaacaaagtttcacttttggctctagtgatacttgttgtacttgctataga

SEQ ID NO: 128661 - DNA, 303 bp, Homo sapiens
ggcactgctggataacagggaccaggacttataaagtctgattcccatgtgcctaggacgctcgctggcacatagggagcattccgttgttgatgaagatgatgagagagatcgtgactcatctcatggtaaattccactagcatccctaagtagaattggctgggcactttttaaaaactgatgactatttcagaccattacgcccagatttcatctctacattttaaaaacagtgtagtaaagctggcaatgacacaaaagagaacaggagaaaaacaattatagtgataaaaaaaataag

SEQ ID NO: 128662 - DNA, 245 bp, Homo sapiens
ctggcctacgtgcacgtccaggcatagtaccttcccttgaacttaattatgatatagattcttttgctcacatgttttttttgttgaccttctccttcttatcaccctgctctcctactacattcctttttgctgaagtaatgaaaatcataataaaaaaaactgagggaactcagaggccggtgccggtgcaggtccttggtgtgctgagtgccggtcccctggacccagtgttgtttccctat

SEQ ID NO: 128663 - DNA, 122 bp, Homo sapiens
cgccaccctccccagcacctagctccgctccttggaaatccaaggttgtctcccaggcccagggcgaagggcctaactgtgccaaacagactcagggagggaagacaaaccgccaatgctcc

SEQ ID NO: 128664 - DNA, 313 bp, Homo sapiens
gtgatccacccacgttggcctcccaaagtgctgggattacaggtgtgagccgctgcccctggccctaaatagattttaaataagttttctggatgcacacactagtaaacacaaatgccaaagacttgccttccaattctctgtctacctctaactcaggctgttgtcttggcacagttaaacaacttttctagcctcaatattttcatcttcaaaatcaaaaataaaatgtattacatatggatctatgacaaatagtgatatattccatgtgcacgttatcattaaacatgaattaaccaatatttaaatc

SEQ ID NO: 128665 - DNA, 382 bp, Homo sapiens
ttaaatgttgaaggtatggcccaaagtacagcccagtgaaagtgatttgggaaaggaccaagctactgaactttttactgaatgattagcattattggatttgaggatagaacaataaattcctagatcaatgctcctaaaatgcagtattgcgatatactactgggtcatgatctattaataccttccccagaggtaattattattctgattatcaccatggttaggcttacctcggaagaaatggaataatacaatatgaacttgcttgtctggcttctttcccttaatgtgtctgtgagattcaacccatttgtcagtgtaccaattacttattgtattgctgtgtaattttctgtatagtattatatgaatataacac

SEQ ID NO: 128666 - DNA, 302 bp, Homo sapiens
cggtgccctcactgcgaccgaggcgccctggagtcgtggcggaggacgtttcctgcgttaagacaggtgtctgtgctgcgctcaaagaaaatgtaccccctaagtttgtgtgtgtgtttaaatttattttaaacttttagtaagattcactttttggtgttcagttcagtgagctgtagcaggtgcatggactgtagtgacttccaccgcagtcaggatactcaggaaggcagcctctctcctccccgctcttgcagccgcctgtctgttcctcagtcctcctgctttgcccattccagaat

SEQ ID NO: 128667 - DNA, 312 bp, Homo sapiens
cagtgagcagaaatagctcttcactcgtatcccagccatgcttcatccttggctgggaactatcttgggagagtgtaagcatggtttgaatattgcagtggatccccagtggggaagccatcagctaactgcattctttgaaacatgttaatttaagtggcacatctccatggctgccacaaaggctgtgcgtgatacattttaatttaacaaacatttattgattgccaattttatacaaataatatgctagacacttgtatatcttcttttgagaattgtctattcatgtcctgggcacacattatggag

SEQ ID NO: 128668 - DNA, 888 bp, Homo sapiens
tttgggcagcagcactggttatctccctggacatatgcccagacagtgtaagtgacttgctcagggccacgcagccagcaaaaaatagaacctaatgaaatagggttctccttgccacacccccaagctgaaactgtgcccagaagctggtccttctgtttacaagttcccattattaggacaacctgtaatctttttttcctccatgtctcagagttcatttttggatcatggcagagttaaaaaagtggagaggctatagacatgcctggctttctggccactagatctttgtggcggtctagggtgtatttgttgtgccccagtttgtctgcattttaaggcggaactggccctggctgggaacgaggaggtccaggagcagtaggaatgttgatcttaggtcttgggcctgcctccagcacccaccaaaagtcaccggatgtggaatattagactcatgtaaagcaggaagtttgcaccagagccaagaagagagcttgcagctgccagggaatggcctggcggaggaagcgcagcctcgcccagctcagcagacctgcttcatgacagaggcagctcttctgcactctactggggccacgccctgccagcatatatcactcccttcacctggtcaggcccaggtaccttgcctcaacagcaagttctccagaattgaggggaagagagggagtgaatttgcttctctaactccagccacctgtctctgccctctcctggtctataatgctactttgcattccatttgtttattgtctgcccacctctcaaaggatatcagggccacaaaggaccttaaagaccaccttatacaatggtttcaaggtttctcctttcccatcacgaccagcccacctgccaaat

SEQ ID NO: 128669 - DNA, 514 bp, Homo sapiens
agcagtctgtacagagaggggaataaggggaatgaacacagggagagcagaggcaggagaccacatgtgctacacgagagaagaaagggagagccacagttcccaaacctccagctcagggccccacgcagcttcactgcactttatttccttccttcctgctgtagatcgaggctatgtaccaaacaaatcaatcccacacatgaagggtcactgagatgaaaggaaaagtttcaagaaagggatgaacagtgtcaaacaggtaaagtagtaaagaggaaggcagatgagggaaagacaaataaaaggtcactagtgccttatgaaaagggccgttgaggtaaaattttagagactgaagtcagattatcgggacaaaagagaagcaaagaaacagacattgaatataacctacttgattgagaagtttggcaataaaaacataggataggctgggtgtggtggctcaggccagtaataccagcattttgggaggccgaggtgagcagatgac

SEQ ID NO: 128670 - DNA, 184 bp, Homo sapiens
gtcatagccaaggagagcttaaggaggcaggatgaataaatgcaatgtggaatcctggagggggtcgtgggacagaaaaaggacattagattacaaatgaaggaaatctaaataaaccaaggactttagtcagtgatcatattcttgactgaataattgtgacaaatgagccgtattaatataa

SEQ ID NO: 128671 - DNA, 631 bp, Homo sapiens
gaacacggattatccccagacccttgtcatttctctcagtgagctctgagttctagactgctttgaaaatgccatattcattttgctaacttagtatttggggaccctgttccttggctgttcttttcttggaacccttctcagtcaagcctgtagggtatctttctttacccaccactcattcaattttgtttaaaacatgcacgcaaccctaaggagtctcaagaataagcttacttggttagtgtgttatttattgagcatagcttgtcccaaccactgtgttagattataaaaattagtggattgagtccactttgttgtgttgttttcattattgaaaataaatataactttgtatttgaaaaaaaaatgaggttgtgttatggcatgataaaacagtaaagttgtacctcagcattttgatgtagggattttctgcttatcttatttatacttttatcactttaatgtttatccgtatgcatttatcacttattatcttaaataaactcttaatttctcgaaaagttttagatttgcagcaaaagtggagaggaaggtacagagattacataacttatatcacccctgtccctcacccacattgagaggtattatgaggacctcg

SEQ ID NO: 128672 - DNA, 450 bp, Homo sapiens
gcctcccaggttcaggtgattctcctgtctcaaccttccgagtagctgggactacaggcatgagccaccatgcctggctaatttttgtatttttagtagagatggtgtttcacatgttggccaggctaatctcgaactcctgaacttgggtgaaccacccgccttggcctcccaaaatgctgggattataggcatgagccactgtgccctgccaaaaataaaacaaaattttaaatgcttgtgatcctatgatatcagtcttttcagtttcctctttctctgaaagtgggtaagctttattgtgattattacctatgaactttgttcctccctttaggaaagtgagatttgactttgattgaatgaaaaatatttaatgctagtaatctgaaaagaggaaatatactcatttttcctctcacatttgaattgggatgaattttatatcta

SEQ ID NO: 128673 - DNA, 489 bp, Homo sapiens
ctgccctcgtccctgctgcaggtgcaccggccctgccagcccagtcccagccctgttcctccatggtgaatgcacgtgcttctctttctgctcaaattcctttcctatccatgtttgctggggaagttccagttctctccagacgccacctctgtgagaagcagcctctgacaagcttgccctctgctgcaacacccagggctctcagggcttgcagcacctcatccaaacttccgcttgacgccccactcctgggctgaaataacgtgcagacacgtctagtccccctactgtgtgcattcctgcaggagaggccagtgcgcactgcaactcatgggttttgaatgaatacatgaagggaggggaggttcctccagcattatctgaaagtgggtggcaacaaaacacaggacatcctgagcccacactgacttaaagcaagtccttgctttgctgtagacagtgcaaataaagagactagtctgttgt

SEQ ID NO: 128674 - DNA, 260 bp, Homo sapiens
tcccgggcccagcaaacaggtaatgtgactctcctgcctagtccctggcctccaggaagattttgacatattcctggctccaaaaaacaggtgacgtgactctacttatcattccctatccacgggtgtaattgtcacatttatcttggcctagctcacagatggcataagtctcataccttgaaccagccaatagcagagatcctgtgtctcttagcaaggcttaggcaaataggtgagttcatgggcctccgctttat

SEQ ID NO: 128675 - DNA, 337 bp, Homo sapiens
ctactcccttccccacaataattatgctagttttctattcatcatctctatctaagtattccacatagtatttcaggttaatgaatatttttatatctcctatttccagataaaaccatataaagttctctcaggtcagacgcacagaaacacatgtataagctacatcatcatatatcatcactttggtgttttaagtcatagaaccattgctcactgtagaacaagacagcaaaaatgatgctttatgaaaacagaaagtaaatttcacatctatcattcatcttataaattctttgtatcaaaattttaattaattagagtgacctagtttcct

SEQ ID NO: 128676 - DNA, 267 bp, Homo sapiens
atgttgcgcaggctggtctcaaactcttgagctgggattacaggcatgtgccaccgtgcccagccccaatctagtttaaatataaaactggagccaagatataaaagtaaaagaaacttttttccctagataggaaagtttaaaaacttgggaatttagatagatgtggaggtttaagtttagatcctaccagtaagtagactctccccatgtagcacttgtggtatatcttagcactttggagagaaagttgaactcttttcagcc

SEQ ID NO: 128677 - DNA, 489 bp, Homo sapiens
gatcttgggcagatcacttaacctctctgagcctcagtttcctcatctgtaaaatgggaatgttaatcctatccacattttaggatggttaggagtctggaatgaaacgatagacatatagtgttgggcaaaatgcctagtgcagtggctgattcaacaaatggtaatgattattacactaacttgatggagaaataaagatcggatcactctgtgatcacctgtggcctctgtgccagcagccactcatttgttattcctctgaaatattcaactcgtgtaattttatatttatggcatgtgtcagcctcttttgctattaatgcattaaaataggtttcattttttattacagataaattgctgatgctgtaaatcctacttcttttcctttacactctagggagaaaaagaaaggggtaaagccattcaagagaatcagggaatagagaaaaatgtcttgggaatctcctgttgggactcagagaa

SEQ ID NO: 128678 - DNA, 334 bp, Homo sapiens
cttttatccccccatgctaaattactatttacccttcctaatagtgaagatgcatctgcaaacaaaggatcagtagcttcaagaggactggttaaagcatgatatcttttttgtattatttattttatgtctagctgattaatagggattttagagttattttagcctaaccagcccctttgaacagttgaagaagctatgatgcatggcaggcaataagttttagacacaggtcttttgattgtgtggttgacctactcaagccaactctagagaaaaaatggtttattttagagaatctcatgaaaatccaaggacaggtatcaaaaattag

SEQ ID NO: 128679 - DNA, 375 bp, Homo sapiens
gttccctgagaagatcctagcccttgtaagatggaagctgacatcactgtaatgttcaaggggcacagacattaggatgggcggtgtgatctgaacacaggataatgctgctagtgtcagcaagaggtcccaacacccgccctgcagctgccaaacaatcactgacagactagaaggctttccagacccctgcagtgtaacaccattgtatggcagccttgatcttcgtggggccttgtgggactccagaatgatgctaggggaaccagggctcaggccctggtccactcctttcctgtgatctcaccatttccatagctgtaagtatgtatgcagtacacacaggtatgaatttcacatttatatttctagcct

SEQ ID NO: 128680 - DNA, 451 bp, Homo sapiens
atcctcccgcctgaacccgaaaaagtgctgggacttgagctaccacacctggccctgtgtttccaatgaaaatgttctaggcattcataccaataatcttcctgaagttttgtcctttttttgttttaactccataccacctattggctaaatgcatctctttatacaatagtgtccaaaatgttgggcatatttgttcacagtttctaaaatcagagtgataccaccattaaccattctttttttgttggagatttccacaacctgctagacaagctcttgcagagctctaacactctgtgtgaattatttctgcgaatattgaggaaaaattgatggcagaaaatgtcttcgagttatgttgagttcctgcttttgaaatacgtgtatattgccacttattcagactgaatcacagtactgtaatgacggcgctgagtttcttcccaaa

SEQ ID NO: 128681 - DNA, 228 bp, Homo sapiens
tcacgccatcgcactccagcctgggcaacaagagtgaaactccgtctcaaaaacaaaacaaaacaaaacaaaacagatgaatctcagctgcagatacccagccctgcccctcaggtggcgactgccccactgagcctcggtttcctcatctgaaaatgggaggtcagatattgccctatcatatgggatggactgggtcagaggggttcacgggggacagtgccaaga

SEQ ID NO: 128682 - DNA, 672 bp, Homo sapiens
ggcacccagctgaagtgacttgtttttattaaaagctttattatcagaagtagaaattatgtgaaacatagagagatgcaatataggaaattccaggaagatggtgtaactgaaaacgttagatagatacaaaaccttaaacacgtatctgggaaatttggagagcagtgcaaggaggtagaacagcatgatcttctctggactaaatcaagaaagggaaaacaagggagtttttctggaaagacaaaatgcaatctcgtagtcatagaatgatcaactctatgaaatgcaggctcttttttttttgccccaagtagctttaagaagtagaagttccatccttgtctgttctttacttgaccattgtggtagttaggaaaattctgagtacaatggagtgagaagtgaaaaccagaggtcctgtatctctatgtcttagtcatactaaaaaatttaaacatatcttatagagtcatttgtttagaaggaagtgtttgattaatttgtaaagaagagaaatgttttaaaaataacgaaagtacttgttaaaagcagtacttggctaccaggttgtgatgcttgctctctttaccctcactaaagattaggatttaactattgtatttacatacaatttgttattagtaggacagatagtcagttttaaataat

SEQ ID NO: 128683 - DNA, 537 bp, Homo sapiens
gcaagcacatgattcactttcagtcattaacttccatttagcagagtgtgttatccagttgcccgtcaacctcagggagctccctggggcagtggcccattctcccttagggtctgagctctgcttctcagactcaggttctgtcccctctcatacaaggagcttcccaaaggcagccatacgtctcacagcaaatcacaggagaggatgtacggagagtggatggcccttctcactagtatttctttttgaaagatgtatgtggccgggcacagtggctcacacctgtaatcccagcactttaggaggccaaggtgggcagatcacctgaggtcagaagttcaagaccagcctggccaacatggcaaaacccaatgtctattgaaaatacaaaaattagcagggcgtggtggtgggtgcttgtaatcccagctacttgggaggctgaggcaggagaatcgcttgaacccgggaggtggaggttgcagtgagccgagattgcaccactgcactccagcctgggcaacaagagcgaaa

SEQ ID NO: 128684 - DNA, 281 bp, Homo sapiens
ctgaaagtttcagatagactcctgaggttctaaagtctccttaggactgtggtactcagcgagccagccctggagtgactccctcctgagggcagcctggctgtgagcattccttggggagggaggtacaagggctagataggagtgacaggggcgaaagtcttactctgaatcctagggtgtagtgtgattagtggcatcttagctgctataagcagatgtctatcctggaagatggctgtagaagggacccctcttgaggtgggtggggataccagggg

SEQ ID NO: 128685 - DNA, 709 bp, Homo sapiens
taccctaaattctctgtttattgtttttcttgttttttctctggactttaccacattgcttagttttgcttgtctttgagatgtgtaacagtgttagtgtacagtgtgtgttctgcaccttggtgtttcattcaatggttacctttctgggatttatccatgttgatgcatgtagctctggcacattcattttcactgctctccagtatttcactgtagaaacataccacaatggatgtttgcttttgtttccactttttttgctgttttgaacagcactgccgtgaacatgcatgtacatatcagtttagcctgagtgtgaatttctctaagacactggttctcaaacattttggttttaggacctttttaccaggacccctaaactccaaaaaccttttgtgcgtatgcattgtatctatttatctatatcatggtagagattaaaactggcaaattaaatatgttattaaaaatactgattctaacccattacatgttaactataaatagcatattttaataaaaatatattttccaaaagagatttagtgagaagagtagcattattttatatttttgcaaatctctaatgcctgagttaacagaagacaacgagagtctcctatctgctacggcattcagtctttttttttgagatggagtctccctctgttgcccaggctggagtgcagtggtgcagcctctg

SEQ ID NO: 128686 - DNA, 799 bp, Homo sapiens
tcctgacttcaggtgatcctcctgcctctgcctcccaaagtgcaagtgctgggattacaggcatgagccaccgcacccagcctagcaatttattttctaaagaaaatttcctagatggtggactgtctggatagtggaaataaaggacagggatgagttaagactatctaaagttagagccccgaagcgtggttggaacattaagatagtagttttggtttagttggaatgaaggtattttgcataagctgaatctgagatttcattagacctaggttcattcagttgatacctattaagcatgttctaggggttataaagatgcaacagaacagacatcgagttcatgttctaatagactctgagatgagaagatagaattgtttggaaatctttcgccatgagcatgaattaaagtcatgggaatggatggagatttgggcctagttctaggtagcagataatcctgtagtttatttaaacctctatatttagggtttgatataataacgtaatgattataatcagctatacagcagttgatattaaaataaggatacaagagaatattggggaattacagtggatcttttaagcagctatgttccttttctgtatgtggaagacgataaaagacatttctttgtctttaaattctaagctgttatttcattaaagttcagtaacttaatgtctctggctgcttattacttggcaatatctcactagctcatcgatgtcagtgtaggctggtctacaataaatgcataaaagaaacagaggccagtgattcatatga

SEQ ID NO: 128687 - DNA, 710 bp, Homo sapiens
gggataaaagaggcaaagggcatgagaaatgagtctttggaaaattattgtaactaacactaatgcttatttagcatctttcattcaaagaccttcagacatttcctaattgagttctgtagtacttctggagtgtgggtaaggaacatttagagactcctgtgcccagtgctgtaaggcctgccatccccgtgtggcatgttgcagctgttttgtagggtacatcatattccttcctgggccagagaatggaggagacagcgttatccagctgaaatcccagaaggattaggggaacaggagtgaattacctggattggaatttggccagctttctgggtcagaaatcctattcctataaaaatgttctatctttaaaacattttatatcctgctttatctccaagaaaataaacgctacatcacttattttctgcaaatacctttgggagcttaacattaatattgaggaatgtgacagcctatatctactattaatgaggaaagaaagcgaggttaacattttatctaaaagatattagaagagaaaaactatttgtattatgcctgtcgaaagtaagctgtgggggacatgaagataataacatatgaccagttcccacaaaaaacttacaaactggtttgatgaataggagacatacatagataattatggggaagatatatatgtatcttcagtatcagaagaa

SEQ ID NO: 128688 - DNA, 451 bp, Homo sapiens
tgacattatctaatcctaattacctcccaaaggccccacctccaaatgactcaacatacggattttgggattaaatctccaacacatgaaatttgggggacacattcaaaccattgcatccatcctctgcattcagaaagatagtccaacagaaagatctggaatcaagagacccagctgattaccaattccagttttgctctgatgtgctgaatgaccttagacaagccccttcccctctctgggcttctctttgctatccagttcaatgaaggaataggactagatcagggatgcgtacatgtggtgagcctgctgatcatccccacgccttcatccatacctcacagcaagccgtaccaatctctaaggaatcactgcacggctgagccccatttgccaggtgatctttaaggaaagtggttctcaaactttagtgaatcagaatcag

SEQ ID NO: 128689 - DNA, 164 bp, Homo sapiens
gtgctcgcccctgagcctgaggagatctgggtggcggagatgctgtgtggcctcaagatgaagctgaagcgacggcgagtgtcgctcgtgctccctgagcaccacgaggccttcaacaggctgcttggtaggaggacaccccagagagcacctccaatcctgtt

SEQ ID NO: 128690 - DNA, 198 bp, Homo sapiens
aggccccgggggagacccagctggactctccagaccttccccagccagcgagctcccatgctgcacgtggggacaggagccaccattcgcccattcccgggggaaacagaggcactgccctcagccactgcctggggagcgctagggcgccacacactgcacttcattgcctcctgcgacacaggtggggagcaaagg

SEQ ID NO: 128691 - DNA, 453 bp, Homo sapiens
aagaaaaacacttaatgccgtttctactcaaagtttatcttttttcatcctcaaatttaataaataggacagtgttttgtcgtggaaagcctgtagactttgcagtcattagactctactgccagtgagttgttggatgactttagaaaatcagtctctgtgcctctgtaaaatgacaatgacatctgcctaacagggctgagaaaatcaaattctgaaccacacataaagtagctaaagtaccctgcctaatgccttgtagcaactcaataattgctatttcccttcctttctcccttttgatcccagtggctttaatgttaagtttatgtagcttatgttggggaccttaacaaaatttccttaagtatctaattctagaaataagcagtttggattgatagtccacttttttcttggaagaatctgtaaaacataagatgtttattggct

SEQ ID NO: 128692 - DNA, 353 bp, Homo sapiens
acaacactgcaaaggcaggcttcatgactttgtttgggattcttcctcttacactcgtgtgcacactcatagctatgcatgctcacatacatgttcagggcattgtaaacacacaggaaaataacagttacacccatgaatcaacataatatggctgagtaagccagtctcactcatcattcatttaaaatttcaaaactaaatgctggagctcttgaaattttagcactcaccttctacacatatgtacatgcatgtgcatgtatgaatacacacatgcatgtgtgtatacacatgaaccctcacaacatacacatgcatgcatgcgcaggcacatgggcacacatacacac

SEQ ID NO: 128693 - DNA, 339 bp, Homo sapiens
ttaaaacttgtttctgtatgactgaacatgctacaaagttaaaaggaaagcagcctgggcgcagtggctcatgcctgtaatcccagcactttgggagaccaacatgggcaaatcacctgaggtcaggagtttgagaccagcctggccaacgtggtgaaaccccatctctactaaaaatacaaaaaaaaagttagccaggtgtggtggcatgtacctgtaatcccagctactcaagaggctgtggccagagaatcgcttcaacccgggaggcggaggttgcagtgagccaagatcacactgctgcactatagcctgggcaacaaagcaagactccatctt

SEQ ID NO: 128694 - DNA, 201 bp, Homo sapiens
aggcagcaaccctgctgacacctcagtcttgaacttctagcgtccaaaactgtgaaacaatggatttctgttatttaggacatccagtctgtggtactttattataacagcccttgcaatctaatacagcaggtgacatgaaatccttacttaagaagctggaaaaacaccagatgcaggatcacgcctgtaatcacagca

SEQ ID NO: 128695 - DNA, 705 bp, Homo sapiens
cacccacaagcaggtatgaaacaacagcaacataagaaaacaacatttgaattcaacagcttgttatttgggggtgaggaggacaggttttaattaacagttgtatttttgtttttccaaacagctttgtgtttaccaattcaaacttggacttcagagaaaacagagagcactctactatgataacacagaactagtaccataattttttttggttaagaaaggtatgtacgttctggaagttacctgggtagaataaaaaacagaataaaagtggaaagaacaaaagaatttaaaaaatgaatagaatttattttcaaataaatgtgcattttgttaaccaaaataataaacattaaatgtgtttgtgttttgtgccacataactattttttaatgtcctattattcacagcctagttagaggaccaggggttcattgaagtcagcatgtttaagagcagtcccacaattcttaccaggctgaaaaccactgccttcaccagctctggttgcaattatcatatgcaatacattttgttttaaatggaagcttttataatgaaatttagaagccagcgtcatttctcttcctttgctttctactaaaaaagaatttgaggacagacaataaaggaaatggcaaggaactattctatgaccttgggcaaatctcttcggtagttcggccttgtatacacacacat

SEQ ID NO: 128696 - DNA, 718 bp, Homo sapiens
tatacgttatttgctatactgctggtgtaaaatcatttgtttgtcttatctattctaaagaatataaacacataaagagagaatctactgattattttctgtgtcatcattatatttaaaccagggctataaatatatagacagtaaaaaattatgtatgtcaaataaacggtgtttcttgcttctgcattatagagataatgctcttgataacttcattaaaatgcatgtgactttaagtgtttcttctaatgaaaataagaaagtttcatctaattgcttcaagatgatgctaccgtcgaagacctaagaaaaatgggagctatgtttcaaaatgcgaacctggggttagtgttaccaagcacactgtcttcctactgaagcttcaaacaaacctgaagcatccagcagtcataaaaattcatctcactggccaggcacggtggctcacacctgtaatcccagcactttgggaggctgagggggtggatcatttgaggtcaggagttcaagaccagcctggccaatgtggtgaaatcccatctctactagaaatacaaaaattagccaggcggtagtggcatgcgcctgtaatcccagctactcgggaggctgaggtaggagaaccgcttgagcctgggaagcagaggttgaagtgagctgagatcgcgccactgcactccagcctgggtgtcagaatgagacactgtctcaaaat

SEQ ID NO: 128697 - DNA, 203 bp, Homo sapiens
cataattcttacatcataatattagagtgtgtatattctgcttctaagctttgaaactggtgaaaaaaatatgccttctgggttcaaggaggaaatatgagttaagcaatataacagggagtagtggtatatattgctccaatctactaaagagtactggggttctaaagaattagaagtgcatgctctaatgaatcctttct

SEQ ID NO: 128698 - DNA, 390 bp, Homo sapiens
aactgatacttgttctatgttagtaaagcggatatgtgtcttttgacaatttacatgtgaaataactgcagctgttttctaattgaatttcaaggctccattccatgggctcagagaaatctgattctctactgctttcagcatgatatcagacaatttagagtttctctccagtctgggggttgcatatgatttctggggtttggggtggtgtgaagttggtataatatcactacaactgtctattcttgctctagtcactgggacctcagcctgagggactacacagattgctgccgcaaatccccccgcttccttttcagcaatgcaagggaaaacatcacattcttttgatttcccaccaattcatcctctttccaccccggcaaa

SEQ ID NO: 128699 - DNA, 137 bp, Homo sapiens
aacgaaaatagccaataaagtcatagatgagaaaattcggaggtcttaagtgaatagatcttaggcattaagtaaatacattctacggatgatttatcaaaagagaaatagtgcagtaaaagtaacagattcaaaat

SEQ ID NO: 128700 - DNA, 218 bp, Homo sapiens
tggagttagagaccagcctgggaaacatggtaaaacctcatctctacaaaaaaaacagaaaaattagctgggggccgggcgcagtggctcacacctgtaatcccagcaccttgggaagtcgaggcaggaggatcatgcggtcaggagttcaagacaggtttgactgacatggtgaaacttcatctctacattgtaaaaatacaataattagcccggca

SEQ ID NO: 128701 - DNA, 457 bp, Homo sapiens
ataacttacatatgtgtgaaagtttattggtacaggctagttattgtagcattgcttgaaccaggtaaagactatgacctccctagatgccatcagtagggaactagccaaataaacaatggtaaagccacacaatgaagcaccacgatgccatcccaaacgaagaatgcggaaactctgagaccactgttataggaagatctcagagatacttagtgaagtgaaaaggcaaggtacaggccgggtgcagtggcttatgcctgtaatcccagcactttgggaggccaaggcagatggatcactcgaagtcaagagttcgagaccagcccggccaacatggcgaaaccccatctctaccaaaaacacaaaacttagccgggtgtggtggcagacccctgcaatcccagttacccaggaggccaaggcaggagaattgcttgagcccgggaggcaaagg

SEQ ID NO: 128702 - DNA, 686 bp, Homo sapiens
gatcaggaaaggtgcacggggggagatgagaggcctgagcggcttcccagcgaaggtttttgaagcacggtttgattttctctctccccctcaccatccccagattttagttgtgactatctccaggtacatggcttgcgacaggcggtgtataaaaactaatgtgagtttaattttaaaaccttagccattttctggaacttaaatatcaaagagaaaatgtccacatatgatgttaattgaggtttgtctcactggtgatttgtgctgattcaattcctgtttctttttttttttcttaaggggtcagttttagaattgggagataggtgtataacatatgactatacagcgcaggttggttttttaacatagaaatatctgcctttaaatgagaactgaaaacggagcttcttggaggccacctgctggtggcagtgatctgaccgctgtttaagctttctttgaactcctttttgtaaaacagcctccataatcaatggtgtacgatctactctctggtggtaaaacttactcagtgaagagtgtgttttattttctgaggagctgaactgttccaacctgagtattctgaataaggacagtggtcgagcatgagtgatgccatctgggcttagaaataagtgggcctaaaatctgattgttttcatacattgttcagatat

SEQ ID NO: 128703 - DNA, 165 bp, Homo sapiens
taagtgatgggacgtttgagctgggcctccttaaaatagggcctgcgaaggttttggcaagaatgtgcaggtatggatcctcagaggggtccatgatcactgaaagttagataaccattacaggttttggaagagtagattacaaaaggcagacaaacagggaca

SEQ ID NO: 128704 - DNA, 291 bp, Homo sapiens
  misc_feature (45)..(47): n is a, c, g, or t
atctacgaggatcttgagctcagtaggtcatcaggggtgtcatgnnnaggcatgtgtgtgtgtgagttctgtgacctgacttttgatctctgctttctgatcagagtgaaagcagaatgtggcccttgtgacatgcacttctgaaatgtttccacagagtggcagcactctcccactgagaaatctgcctctacctggctgtgccaggatccccttcaaccaggttctgcggaccagaggtgaccagccctcagcacacccacatgcctggccagtgacacccctgatgta

SEQ ID NO: 128705 - DNA, 156 bp, Homo sapiens
ctgaggcaaaacataatacaaaaggaccaactgaggaaatggctccaaagacccgtggctgcagaaccaactataagaagatcttattgcccactgccttcctggagaagcttttcagaggtggttctagacgccaaagccctgagacgaaagagc

SEQ ID NO: 128706 - DNA, 536 bp, Homo sapiens
aatgtcactgtgatttataaaaatggattagaatgttgaggtaattttctttcatttgttaataaattcttgaattagatgtgggagtggagttgtactgtacagtaactatcatctagagttgaggtagtcatacttgataacatagttgtctctttttgatttttgaatgagccttgttttagttattatttatttaaaacattttaataattcagatgaccttacagcctagatttttttttaagtacatgaggaacgttttcatctggatgccctatcagcacatccagtgtgactttgacataatttgcctgataacagtttttacagtttacctccctggttccactaatggcagagatactacctgtgaaatgtctcttagagccatctcctccttgctgtcactactaatatattcttccaaccaatgataataatagctgttatttgttagggctttgtatgttctagatactgtattaataagcatatatcatctaattaatcctccctacagtgctccaagagag

SEQ ID NO: 128707 - DNA, 469 bp, Homo sapiens
ccatgtggggcatcacgtgtgacaacgtccggcacaaaagttttaaatttggatataatttaatttactcattttttcttttctggcgtatgctttgggtgtcatatccaagaaatagtaatcacggtcaaatccagtatcatgaagctttttggtcctataatttttctaagtgtcttataatttcattaggtctcaaaagcattgaatctttcaggtattatttgattaaaatgatgtctgtttagagttcttcacacagtcagaaatggcttccttagaataaacattcatcaactctggtttggtttcttgaaaaggttcagaagttaatgtcaacaagcaaagatcctttgaaagttaagtgagtttctctaagttttggtgcagtttaaagacataggatcctctaatattgccttaacgctgagctatatttgggaagttggcatacagagggtctgtcttg

SEQ ID NO: 128708 - DNA, 452 bp, Homo sapiens
gtggctgactgtgtgtcatcatgattagatcatacactcgagcattttagagctgtaagtccctatggaaatcaccctgtgtatccccctcctctgccaggtgagacccatgaaggacagagaggccctaaggcagccccaaggtcacacaacataaaaatctaacagcaagaatggaaaagaaactgccttctaccacattgggttgccatgaaacctaacagctgggggcgcctgggaagagagaaaaagtcacgaagtttcttcctgacactcccactgacaatcgtgattctgacaccagaaatgccttttcttcatagcatttcccttacatggagaaatacacctcttgtcttgcttcattcacagttaaatatgcttaggaagacgaggagacggaggcccgtactcttgagccacccacctctgaatccacctgcctctggatc

SEQ ID NO: 128709 - DNA, 452 bp, Homo sapiens
gacaactgtcacttactgtaagacttttttttctttacattctgacactttccatcatttctacaattagcttatggacctggctgaaaagccactgcctgtctgccacggcacaatgaaagtacgaaacagtaacaccattttcttcctgacaaagatgacaaacctcccaaaaggataatttctctctggggataaaaccacacaaggctctgaattggatctggtttaagagtcttctgagcctgaatgccaattatgcaggaaattgtgcaggaactagtatagatgactaaatcctcactccttgaagttagaaagaagagccttggtacctggaagacaaaacagaacatatgcactacatataaaggtggaaaagtcatacgatttaagagcatgaaagatacaagaataggatattataaatgcattctctcattcacttccgt

SEQ ID NO: 128710 - DNA, 153 bp, Homo sapiens
gaacagggaagaggaagagatttgggctgccgcctgtccctcatttaggaactagtggaaaacgatttaggtcagctatctcaggtgattctaaatgttttcacttgttagcagagcatgagccctcttccccagcccagcggggctggggaa

SEQ ID NO: 128711 - DNA, 532 bp, Homo sapiens
gaaggacaaaattgccatctttatgaaagattaggaagagggctatgaggaattaaaggaatatgaaaatttagtatatgggtgaatgagacttttggtcagcaaccacagaagactgatcctttgtagagaagtatttgttttctgtcttatgttttctatggagtactataagagttctggacaaaaagctaaaaacgatgtgcctatctacagctatttttcttgaataaaaaataggattatttaaactcttttttcacatttcctaggatgatgtgtaggagagttatagtcctttgaattttatgctttttgtacctgagtttatgaaatgagttaatggccaactggagaaggaaggaaggaaggaaggaagggaaggagagaaaaggaagatctataaagctatattaaaggaaggtggatgattttcataggccattatactttataaggactataaccaagcagttttaagaaaatacttagaacttagtttattgagtgggaaagcaaaaatcctctggaa

SEQ ID NO: 128712 - DNA, 1100 bp, Homo sapiens
gcagtttaaaaccagaatttattttaaaggttagtctatgaaaaaaatgagtaaagcctcaaaatgtgaacaaacaaataaacacttggggaagggtagaatattttcaaatactgtatgatgtgagtgaaaccatttttagattgtataaatttatttccatgaccttgtaaagcaatctttattctaacatgatattactgtttcaaccatgaatcctaaattcttttggagaatcacaattgcacatattatcttgcatttgtctgtgttttcattagagtcctcagatcgtgtgtccaattattcagctgggaatgtatgttagcatagatattggtaaggaaactaaacttatatttttgtttgccctctgatcattgctttaattccaaagttttaatgccgatctgacttatccatatatatttaaatagggtaaagactatttaagatgggtatttggaacattgtaacttttttgttagcagttttaactgcacttaacattgcctctgctaaattaatattaaactttttaaataggaataagtgggaaaaactacattttaacaccgaaataattaagaaccgtgtcaaatctttccttcttctatttaagctcatgagaactttgtgtgtgtctgtgtgagtgtgtgtgtgtgtgtgtgtgtgtagtctattgattgcctttgaattaaatcctgtgttagtttgtaatgctgagtagactgttaaaaaaggaactaaaataatcttgactaagtatagtcaggggtacaatcattggtattcagttacactgcatttttattctcaagaataagaaaaaggacaaaatcttaaagagcattagataatatgaacattacctttcaactatcagtgactgtagggagtattgctagatagaatatagataaaaataccactgacttgcattcctgtgagcttttctgaggattaatgggaagtcatattgatgaggcattggaaaataaacatatcaaataaagacaatgaaagacagttggctttcttgctggactgcacaactggtagctaggattctttttcaatgagtaaatgagagaaaaaaa

SEQ ID NO: 128713 - DNA, 456 bp, Homo sapiens
gggatccttcctagcttgaaagtcactattttgaagttaacacttggagcactgaagtcttatgccttttagaagacatccttattttcaatctttgaaacattgaacatgacccaaatcttattgcaattagtgtatatagtacgaacgtgccacatcttactgggtaagctggaatttaacttgggtgactaattgtgccacaggacattgattagtcttgggaaagatctacctgggaatccaaatttcctgctttatatagctatgtcaataagacagccacctgaaatctgcatgaatataccagcagtaactttagtttgatttcctgcatttttcacaaggaaaataaattctagttgttacttgcctgaagggtggaatctattatagaattcaccaatatatgaacaagggacatgtgtttcttttcagtgtgattttttttttttt

SEQ ID NO: 128714 - DNA, 272 bp, Homo sapiens
tatccttggggcaagcccaaatgtccccttgggtgttgtccaagagctttctctgagcaaccatcattctcggcagggatttcggaaaccctgctagaggctagaggaaggccagctggagtggctgggcctggctgtgatgtctctgttggctttggaggaattacacgcgggcccctctccctgaggttaggtcagcatctcatttaagcacctcttggtgggcccagcacacagcatgcgtcaatacatgtttacagctcatatgaatg

SEQ ID NO: 128715 - DNA, 333 bp, Homo sapiens
ttgtgagttgttggcataaaagagactatgtacaggtataagaaaggaaggctcaagactgtgtcaatggaaaggcatggggctggagagtaaggaaaaaagctgcaggcagaaagttggaaagttagagttaggataagccagaaaatgttctttatctcttctaacttggcttactccatgttcctaggaagacatttcccaattactctcactcttttctgtagaagaaataattctaacagaatgaggctagatgaagaaataaaaaaaaatctaaatgactgcgactctactgacttctctgcatgagacctagtactggccccttac

SEQ ID NO: 128716 - DNA, 316 bp, Homo sapiens
aacacaacggaaaaacaaaactcctgatccctcctgatggcttggaggttagggtttttcaaggatagtggggtgaacaggggactagggaataggtgctgctgatgggttggggatgccatgctgggggtatcaaaaatggttctctagcactgagtccaactctgggtggggggccgcaggacgggttcagtggagtctggggtctgagtcttgaatctggggaccaatagagtcagacagtcatcagaaatgcaaaagtctgaaaagacatttcaaaaggccaacctcaggatccacagtagcgatgttatcg

SEQ ID NO: 128717 - DNA, 222 bp, Homo sapiens
tggctttccaaagagctatgctaaagacaggcccagagactatgacctggggcttccacatcagggatttccaggggtctctgcacagagaaagctttaccatctcttggcttcagtcttttacacctgtctcaaaaaggaagaaaaggccatgcgtggtggctcacacctgtaatctcagcactttgagaggccgaggttggtggatcacttgaggtcacg

SEQ ID NO: 128718 - DNA, 234 bp, Homo sapiens
tcaagaatgcatcccacatataaactgcaccattctctacaaaattcttggcccctcactggacagtatgattaagtatgtctggggtcaaatccaagcaattgtatttttaacagctccctgggattttttaagacaaatggccccatgcttcattgtttgaaaaacctctggtcctccataaaggagtaagtgcatgcattctgtaaaaaattatttgtaaacatgtattat

SEQ ID NO: 128719 - DNA, 719 bp, Homo sapiens
gaacatccctaatctgaaattcaaaatgcttcaaaattcaaacctttctgaacaccaacatgatgctcaaaggaaatgctcattgcagcatttcagattttgtattttcagattagggatgctccaggggtatttattctgcaaatattataacatctgaaaaagtttaaaatccaaatcacttctggttccaagtaatttaaataaaagattagcaaagatgcaattgtgagaaatatcattatattcaagggacagtgaaaagaaaagtatttggaggcaaaaaaattggattgggcccaattttggggagtatggtttagaaatgatagttttaggcaatggaggatttatcgatagcaataatttgcccactaagacaatgagagtattgtttttggaaaactgtcctgtagataataagtcagagagcatgaattgtgagactttgatggcgaagagacaagctggaggactttcccacaagcgtgaggtgatgacagcatgaattggctgggagtcagtagaaataaaaaagataaatctgagggacatttgaaaggaaaagcagacaggacctgctgaaaaaaacacaatagagacgtgtgttgagaagagctgtaagaatgaagcaaggaaaattggtgctaatgttaatgtccctgaatgaagcaagaaagttgggaaagggggaggctgattgaagaggcaggacgtag

SEQ ID NO: 128720 - DNA, 122 bp, Homo sapiens
cacgccatgtccttgtccttgggggctagaatgtgacaggcatgcttgttgtttcgctgaagccggccccccaaggactcttcctctgagccacggaaaaccattcattttctttcagtaac

SEQ ID NO: 128721 - DNA, 635 bp, Homo sapiens
aagtggaaaaaaagccacagaatacacagaaatctaaacagtaatttgggtgatgagactggcaattctttttggtctttctgcttttataggtcttcgttatttctacagtaagcacatgactattaggataaaaaaaatcttggcctggtgtggtgctgtaatcctagcaccttgggaagattgtttgagaccgggagttcaagagcccctgggcaacatatcgagaccctgtgtctacaaaaaaatgaaaattagccaggtgtattggtacatgcctgtagtcctagctacttgggaggctgaggtgaaaggaacacttgagctcagaaggttgatgctgcagtgagccgtgatcgcaccactgcactccagcctggatgaaagtgagaccctgtctcaaaaaaaaaaattgtggtgattcacacctgtaatcacagcactttgggaagccgaagcgggagggtcctttgaggccaagagttcaaggccagcctgggcagtataatgagaccctgtctctacaaaaaatttttaaaagtaaagaaattttaagataactaaatactacatagacatatattttaaatatttattacataaaggtaaaccaaatagaagaggaaataatgtta

SEQ ID NO: 128722 - DNA, 330 bp, Homo sapiens
tcttagtttagcttttttatgtgactttgtattactcactttatttattcatttaacaaatatggtgcagtgcttggggtggggtgtttcagaaattgcacttaattctgagcagaaagaataaggaagacaggcagccccaatcctcataaagattataacctaatggtgaaagcagacattaaacaagtcatgttataaataattgtttgactaacaattgcgatatgtgttctgaagagtaaagccacagtgtcatgagtgtgtagaacagaaggccctaacctagcctaggatgcctgaaatttcttgaggaaatggcatttaagt

SEQ ID NO: 128723 - DNA, 443 bp, Homo sapiens
cctaaatctgatctttgtaaataagctgactcccttgtctgcccaagaatactaaactggagactttcatagatgccctgagagagactcctgtctcctgcttttggtgtacagtagcattggcttttccagccctgtggggtcccaaattgttggaatctcagtggatttatattgccaaatttagaacacatgacccttagtaggctgtattttattccgtttttccttgcaaaccagccagttcttgtttgtttttatcttattcttacagtagctcactaaaagcatacaaggggcagtcaacacacaccagcattctactgccaactgcttcccataaagctacaaattcagatgacacagggtctcccaagttattgaagttttagcagatgttttgctacaagtgtaacaagggttgccagctttctagtctgcaa

SEQ ID NO: 128724 - DNA, 336 bp, Homo sapiens
tggggcctctatcagttagggatcaagcagagaaacatccaggaggagatatatattgagatatttatatgcaaggaatcagcttacagaattgtgtgggctggctaggcaactcaaatctggctgggcacagtgggggaggccagtaatcccagcactttgggaggcaaaggtaggtggatcacttgaggccaggagttcaagaccagcctgggcaacatagcaagactctgcctgtacaaaaaataattagccaagcatggtgacagacacttgtggtcccagccacttgggaggctgaggcgggaggatcacttgagcctgggagctcgacac

SEQ ID NO: 128725 - DNA, 676 bp, Homo sapiens
ggcaggtgggtgtgcatgtggctcagattgtggcagaggaacaagtagaagccttcctgggaggctgggaatactgggctgggatgtgcaggctgcattctcaaacagtgggggccgtcggaccacgacaccatcagagcagcttccggaagaggaggtgggtcatggagagcctggggttgggcagggagattggagaagaagctactgtaagttcaaaggcagcaacagtctccacccctaccgggatataacgtgcaaagaaggagactggatgtagaaatctagaaggacttggggaccaattgaatgtagaaatagaattaaagtcaaagacgacagccctgttttgagcctgaataatttggaaggctcacagggcctttaaccgctatgtgaaggagagccaattatttgcaagcaatctgaggagctgtggaacagccaggagagtctgaccacaggttggcaggatggatctgtagctctggaaagaagccagagtcagaaacagtttatccaggagatgcctacattaccatcagagtcaaagcatgggagtgatgcgcttggaccagggagagctcgcagagtgacctggggcctcctgcatgtaatgtgtgtcaagggcaggctcctataatgtctcaataatatgggggctggctcatgaata

SEQ ID NO: 128726 - DNA, 288 bp, Homo sapiens
acattcactctaaatattccatttataactaatacgtcctagagcaactgttgtcttcggaacagtgaccactataatgtatcagtctgtccatggtgtaggaaattttgaaaacacataagctattatgtctgacaaagtagatgtcaactttctttcgctggccactggcacagacttggcgaggcttcagaactgtgcgaggcttatggtttacccgcgatgcttctagggttatgtctcgctttgtgtttcggtcaaacattctgaagaaataatggtaagatc

SEQ ID NO: 128727 - DNA, 398 bp, Homo sapiens
gctactgtagaggaatacgcagtttattaagggctttgatctatctgggctaaaatcccagctagttctattgttagctgaatgcatggccttaggtaaattactttctttctttgggtcacatttttgacaactgaaaaagtgttaccaaaacaccaggaggtcggtctagggctccttgctcaccacacagaaaaccaattactgagacaatgagtattgccacagaagaaggcgttttacttgggtgaagtcactcaaagagataggagatcagtttgaaatccgtctttcccagctgactgaaattcggggtttatatagctagagaggtgatgtagctgcgtgcaggggaaacagaaattgaggaggggtgaggaagtcatcatgatggatga

SEQ ID NO: 128728 - DNA, 491 bp, Homo sapiens
tatactggccatttgaaactaaggcctgcccgagatcatataatagcctaggaggtgacaaaggacagacacaggagccaaacccatgcccatccctccctaagtccaaaatcatagaaaaaaaaaaaataagaatcaacatgggcggttatttttaagggccagcatgttcaaggtgggggcaaatccaagagacactaagcctcagagcatgaacaagcatgtgggtgctgagtggaggggaccagtgtttaccagggtgatgtcagactctgcaaggctcgctccccgtgtttctggtctcttcccatgagcaccaggcaccccttaccatccccaaactaggcacatctgtaacgctgaatggaagcctacttgtttacatgtgttctatgttagactgggggcatccctagaacacacacagattgactggtgggcagaattctgctaggtgcatgcacccgagtgagcctttctctttgaatgtg

SEQ ID NO: 128729 - DNA, 323 bp, Homo sapiens
agaaaaaatatgcagaaatgaagttttttcttagaagcatcaaataggctgaaactctagcaaggattatcagtcaatgctaagaatgcccaatggccacgttaggatttggttgcaaataaatatgcactgggagacacattggtctgatgggaatgtgtagcatcttttatatctctctgcccaaatcacacacagcctaatccacctttctttcagtttattccgcaacccccctaacttacattaacattttttgatttacacagattgccaaaaactctccctcctccccactctctcgctctctctctttttctctc

SEQ ID NO: 128730 - DNA, 421 bp, Homo sapiens
acttcccagctgggtagatttggggatgctctttaacttctctatgcctcaagttccctgactgctaaatgggcatggagtctactacctgagagagtgatcatgaggatcatgtgagtccaattatataaagcatttaaagcctaacacatactgagctctgtaatcgtcagatgaggttcttactcactttgctgtactgtctctaagagaagtttagaatcaacccaaccaacagtacattttggaactgacagcagccagaaaggggaggcaatgtgcccaagtcacaaaggttgccaatgtcagaaccatgtctcttgactgtaagctgttgtaccccagtgggatgaagggaaagaagagaagaggaaggaagagggagaagcagtagacttcttctccttagaagacatgaaaa

SEQ ID NO: 128731 - DNA, 378 bp, Homo sapiens
gtgcagaacacagcggggaaggctgaaggagctggaggtgccttctgagctagcttaagagggttgggtttgtacttccaggttaataggaagccattaaaaccccaccaggttttaaaccaggtgtggtgggtgtgatatgaacagatttgttagtttatgaaataaagtcttatttggctctgtttccagtgactatcattgtaagtataagtgcatggaggagcttaagtgctctttgccttgtgaatagtgagtgcttgataaatattaatcacctcacaaggtgtgtatgtgagtgtgtgttgaacaaggcagcattttaggcatccatgtgtaggtgtgtgccagtgacacaggaagtgaataccttaggct

SEQ ID NO: 128732 - DNA, 382 bp, Homo sapiens
gcagcaggtgtcacagaaggaccctgtcccagctggtcctgctccactgctatgatggtgtggcctctgatctctgaccgtgtcttgaggggagaccaggcccttgatcacaagcgtatccatggtgaggttccgtggatggaagctcatgaatgttccttcctgatgttcatctgccaccttgctattgaatgcatcttgtttataactgccttctaagtattgaatagaaataaagcatttgtacaggatgggtaaggtataaagaatattgacacattggacacagaggacctccaccaagtttagggagtagaatctcaagaaacataactgtggatgctccctggaggccctgcctgagtcccgggtcccttccctt

SEQ ID NO: 128733 - DNA, 556 bp, Homo sapiens
acaaggatattataacaacctcctaacaggtctctactttcactcatctttctccagtaatcaattctagcttggtagctagaatcattttttaaacatgtaaaatagatagtctgtcttttatttaaaactctgtatttaaaaccttcccaccaaaacagcacagtactggcataaaaacagacacacagatcaatggaacagaatagagaactcagaaacaaatccacacacctacagtgaactcatttttgacacaggtgccacgaacatgcactgagggaaagacagtctcttcaataaatggtgccgggaaaactggatatccatctacaggagaataaaacaagacccctatctttcaccattaacaaaaatcaaatcaaaatagattaaagacttaaatctacaacctcaaactatgaaactactaccagaaaacattggaaaaactctccaggacatcggtctggggaacaacttcttgagcaataccccacaagcacaggtaaccaaagcaaaaatggacagatgggatcacatcaagttaaaaagc

SEQ ID NO: 128734 - DNA, 307 bp, Homo sapiens
tattcaatatgttataacccattactatatcttttaattttgatattcaaattgtctatgctgaaacatgtttctagaacattactacttaaaaactgttcacaattatttcatttgggaagaaagactagtgattgggagtggataaaaaagaaattttaccttttaaatacctttctattatctttgatttttaaaaaattctatttcccaccgtattttgttttaagaaaatgtcagaagaggttctctgggccataacattagggctgtgatgctcaactctgacaaaatgttataatttgtt

SEQ ID NO: 128735 - DNA, 1073 bp, Homo sapiens
agggagggtgggcactgccccgcatttgccctccaggtgtcaggtgcccacctggtgatgtggagttagctgctgaatgtgcaactgtagggaaatacaccctactttttgaagcctcacttggagcctaagagttctctagagtcatatcttgattggatttataagttaaagttgggggaaaatccattttaatacaagttttgataaacccaatttattttataaggaaggagccgtttaccctgcagtcattaacttagaattgttagtttaattttccaccagcaggaagaaaatcttgcaatacctaagtagttcaaattagaaagtgtgtcaacagtttttccttttccactatttaaccctaaaaatgataaatgtcttcaatttgatctgactttcagttgtatggtatgcctctgtaggtgggaaagggtgtgtgtgccaaccccacccccaaccccccacatatgcagaaaacttggtttgatcccaggagccccagaaaggaaggggtgcttgtgagaaatgttgccggtaagtgctagtattaatacttgtagcagtcacttgctggtgttagtacttgtagcaaaagttgcatctcagaactgccaaaatagtgtgactttttaagacgccttttggagtcattaaaaatccccaaacatacacccaaccacccctgccatccagaagcttaactaaacattactcattctgctttcattacacgtctgcctggctttgccacaaacacactttgccttccagtcaggattaagcttctgtgttaggccatgactggtgtgaaagtaacccctctgtccttgttgactgggacagaaagactgctcgctcgcccgtgtgaaattgtgaatggaatcatggaatcctggagccaaagcaagttggttgccttcctgcaggactatcctaatgctcatcaccttgactggcaaaaggtgtcctaattctaacgtttcatgggtctcctgtaaacaaggacgtgatctcagatgtggctttctcaataaaaagaagaccattctgtggcacactaacaccta

SEQ ID NO: 128736 - DNA, 493 bp, Homo sapiens
tggttaccaagggctgagggggaggcaagcaggaatgactaggttggggtgctggtgatttttagggcagtgaaagtattctgtatgatactgcaatggtggctacatattatgcatctgtcaaaatccattgaactggacaacactaataaaaactacagactttagttaataataatgtctcagcattaaccaaatgtaacaaatgtaccatatgaatttaaggtgttaataataagggaaactaggggcgtgaaggaactctgcactacttgttcaattttctgtaaacccaaaactgccctaaaatacaaagactaggccgggtgcggtggctcatgcctgtaatccaagcacttgggaggccaaggtgggaggatcatgaggtcaaaagatcgagaccatcctggccaacatggtgaaactccgtctgtctccactaaaaatacaaaaattagctgagtgtagcggcatgcgcccgtggtcccagcta

SEQ ID NO: 128737 - DNA, 220 bp, Homo sapiens
cagatctctggtatagcataaacaaatttaatctttacttattggtagtagtagtaaagcataatgggccttttatatggtgagccaaaaatatttttttgttaatattttcttcttttggataacttggactattcagttgacatttagtcagctattcttgcagtaatataagccattctgtccactggattcattctcctctaaagtggtgtttcac

SEQ ID NO: 128738 - DNA, 445 bp, Homo sapiens
aggctgatggcttaatgttttttattattctggaaacttctctgccattgttttcttcaaatagtctctctccacattctatctattatttccttttgtaatcttagtcagttttatgtaaggctttctcctcttgttctttgtatcttaactcatattatccagatagtttattctgaataattgtttcaggtctatattccaggtcacccactctttttcacataagcccagtctcttatttaacccatccactgaatttttaatttcagtaattttttgtttttggagttctgtttgattctttcttgaattttcctggttatttttgattttctgttgttctttgctcatttatttccactctgttttatttacataattatattgtttctgataattccagtatcttaatttcttaagaattaaaaaagttttcctgctg

SEQ ID NO: 128739 - DNA, 631 bp, Homo sapiens
gtttttctcgacgttaattaagttttatcgtaggtactttatgttgttatccacattagcaaaagaaataactcctcccacccaaagaatggcagattggtgtgacgtggttatgcaataaactaacagtaaattattttgtgtaattctttgctgtattaccttctctatctttgtttttattcctttaagaggtaactagagagccagtagatactagacgcaatatttcctctactttgaattttaaagatcgtgtattatattgcagttcctgaaataatttcatattaactgaaaatagcattggacaatactttcctatggctgaatttttttttttatgttttcaaccttgtggtgtcttcccacaattaggaaagtattccgtatgaatacagctgaaagtgctgtggtttcctccctgttcttcagccttgccctcctctgtttcaggatctgtgttttctaacctagctgccctcaagactctctctttggttcattctcctaaaaagccccttcctacccttcttctacagagttctatatgttaaatcttcatttgtatgattgcataatttttgatccactcagtcgtcagcctgatggtttggttgatgggttggtt

SEQ ID NO: 128740 - DNA, 440 bp, Homo sapiens
cacagggtaggattacatgggtaaagattacattagtaaagtccagaaaagccagcttttattccagaaaaggtgaacatgtaacatggaagtcttgactcaattaagatggccgtgtggtcccaatacaataccaaagcaaattcgaagaaaatctccaaggatttaaaccaacctgtgcaatgcgagtgtgttcagatacctggagccagcctttggaacctgctggatcaaaaccaacgtgtgctctgtggggcccctgaaacacgaatcctctgtggggttgattgagaaaggattcacaggcttcaagtcccagcaagatttatttgctagaattcaagcaaatctttacgaaagggagttctcatggatgaggccactgttgggggctgggccaggactagatggagccatggattccagcctggcagcttcga

SEQ ID NO: 128741 - DNA, 222 bp, Homo sapiens
acaggtgtgagccaccatgcccgcctggaaattatttttactctgaactctgaaatcattgctctattgctttctagctttcaggatttcttgtttagatgtatagtgccattttcattctttctctttttttttttttagatttacataatagtaaaactcatcttttgtcataagcagtactattggttttgacaaaggcttagaattgtttatcgttca

SEQ ID NO: 128742 - DNA, 159 bp, Homo sapiens
tggctttggccacagcagtgtcactgagcttcttcacagcctgtttgatctggtgcttgttggctttgacatccacaatggacacaagttgtgttgttgtcttctatcttcttcatggctgactcagtggttgggggaacctgatgatgaattattggt

SEQ ID NO: 128743 - DNA, 204 bp, Homo sapiens
ttctgggattacagatgtgagccaccatgcccggccttcatcctcattcttgaaagacatatttgctgagtacaggattgtatgttggtagttatttttgtgttgaagatactattccatgtcttctgattaaattattgatgtcaaaattaactatcagtcttattgtccttcttttgaaggtagtttatctttctccttggg

SEQ ID NO: 128744 - DNA, 524 bp, Homo sapiens
cctgggctcaagtgttcctctcacttcagtctcccaagtacctaggaccacagttgcatatagtctaatgcacctgtaacttttttgtggtgttctattgcacagtatggtgactatggtggacaataatgtatcgtatatttcaaaatagctaaaagacgattttaaatgttctcatcacaaagaaatggtaaacatctgaggtgatggataggctaattaacccgatttgatcattccacagtatatgtatattgaaacatcatgtaccccataactatgtataataattattatttgtcagttaaaagtaaaacaacaagaaagacaaagacacagggtatccaagatgctgtttgctcttctctaagcatatgtctcttctagagatagagccaggggctgacaagtgatgtagctgcttccgctagacctaagtaccttgagaggtgtgttcaggggagtaaacatttgctccattactgttgccctaaagttaacaaaccctcatatcccctcaacac

SEQ ID NO: 128745 - DNA, 428 bp, Homo sapiens
cagttgtggccattattagagtaagatatgccactaatgtatgcacatattatctcattatttttgattgaataaaaagatggggtaattaattttgtgcttagctataaaattagtgtaaatatatcaaaatatcaaatttgaaataaacagtaggaaacaactataatgaagcttgcatcattctgagattttattaaagagtatacattgaggttacattcacataagagcccatttcctgtagaaagtcagtctaccagagcagttatttaagtaaatttgatattgattataccctataactccaagctaagacatgggttactataaatatgaggggagaaggagggtctacacatggaagcttactgacaaaagttgatcactggccaggcgcagtggctcacgcctgtaatcccagcact

SEQ ID NO: 128746 - DNA, 264 bp, Homo sapiens
gaacattctaaccctgataaccacagggctatgcagaaagactgctacacacagatcacagtagccacttgaggaccatggattttccagcccaagggtgatgtcagaaggaaagtagtggaaaggcaaagttctgagcctgagctcggcctccctctgaggaagcaaccacagcagggccggggcagggccacctccttggtggcctcacaggctgtgcaccaccgagggtgatggcaacaggggacaaggaaggaggtacca

SEQ ID NO: 128747 - DNA, 218 bp, Homo sapiens
gtcagttgttgtttttttaatcacatttctaaaattcccttttgataagcaagaaccagccatctaatttgactctttccttgttattgggttggaattgagacctggtgattccattcagatgtttgtaaatactttattgcactgaagtctggtatgtgtatctaggccctcttttcatttccctttgaagcacctcaaaaatacaccttaatttt

SEQ ID NO: 128748 - DNA, 292 bp, Homo sapiens
attagaggaggcagcaatgatgttcttgccaattccccaagcaatgcaataattccccatcctgagcagctgctgagtgggaatgtctctggaaaagcctcccaggccgcaggcagcgagaaggtggggcaggcagctggactctccatcactggatggtcaccaaacagggttcattcagacctgcacacctctccgtgtacctcatcatcattgctttgggcgggccccgtggcctactgagagttcctggccattgatggacatggccgtcctcatttttctgagggcc

SEQ ID NO: 128749 - DNA, 457 bp, Homo sapiens
cctggagaggggaatctcagtgagaagcaagccaacttttaccacagaatcctagagagacaagaaaattggagcccagagatacctctaaagacagatatgaagaatcagctcagtagtggttagatctcatattatggttatccactttttagtagcttttctatatttaggtttatctcaatttatgggtattgcttccttaatccaaactctaattctcagcttcccctatagctagactacagtcaagcaatctggttgtgccaaccacgcacacacataattttaattcaggtgtgagctgaggaaagaagatctgtgtgtgtttctatttttgaaggagagagctctcaggatttttgtggaagcaattggcaagtgcttctaaggttacatttctcatacagaattgtcattggtgatggtgctggtcagcaccgtgataatctacttt

SEQ ID NO: 128750 - DNA, 939 bp, Homo sapiens
atctaacacttactaagtgttaccctactctaggcattgttttaatccctttatattattcttatgcaatttaaacatcatagcaaaccttctcctacaaagaagccactattgttatttccattttatagacgtgcagactgaagacagagagggtaagtaacttggccaaaaatcactcagctaataaaggaaagccaaattcaaagccaggcagactgactctagaactgcaccctgaaccaatacactatattgcctctgtgctatggatcttgggtttcatggtatagacaaggaggagccactcaaaggttttacaccggcaaacaataggtttagtctgcattttaggatcacagcaatgtggagaacggattagaaaagtgtaaagagacctgcaaggtccaagctatagagatgttgaaggcagggtttaaggcagcagtataaagaaaggaagactttacagacacccaggaagattttataaacacccagaatgtagaaattattagggattttaagagtgtggtggctgaagacccaggaattcctgctctgccatttaccattctctccatatgcatttacatttacagaaaataagaaatcacaagctgaatgaaaatcaaagtatgatactatgaggtggctcagcatctaaataccacagagcaggaatacagtaaaactggactggaacatttggcttaggatcaagatgcaattaagggcctctatcttaagtccaattctgtatcttgggattttcctatcttcaggccaacaacacagtatagaaatcggaagcagtgtccagcatacttaggcttacatgcaaagagagaacaagaatgagacacagaatgaatgcctgggttgcacaaagtgttctggttgaacttactacactgactatatggaaagaggaagtat

SEQ ID NO: 128751 - DNA, 424 bp, Homo sapiens
tgatacttaataatagtgaggtcatttcatgttgcaacacttaatgaagcattaagtaagcacagttaagatttcacataaatacgtttaaagaactacaaagttcaagctttggaagatattaataagtaacgaatgcattacttctattaataaataataagaacaagtactataattgactgaatacttaatatgtgccaatatgataaccatcttacatacattatcttatttaattcataaaacagccttagaggtacgtgttcttactgcagttttacagaaaagggactgaatttaaaagtttaacttacaaatggacaaactgaaaggaagtgaaatggtttgaaccatagcctgttgatttaaaatcaagccattcatcaacaataaatccagataaaggccaacacacacacac

SEQ ID NO: 128752 - DNA, 647 bp, Homo sapiens
gctggtctcaaattcctgggctcaagcgatcacttcccgctcagccttccaaagtgccaggatttacaggcgtgagctaccacaccaggcctgctctctgaatttctagagaaaatgcatagttgcctcggacggttcaaggggaccacgcaatcaccaaactccatctttcagttttttgttgaattagctgggttgtcatatagtttcctatagctgtactgtattttgttagttatattcctccaatgtcatttaacatatatctttgttcatgtttcctataaattaataaattcaaggggcttgattagcgtcatatatctgtacgtggacagatacttcataggtggtgtcatatactaatattgggaggtatgtaatggttatgctgtcatcccttgatgattattgccttgattaattaattcatctcttttttctttttggtcctaagattggataaatatagactttattttttatagcagttttaggttcatgaaaaaactgtggaaggtatagatatgttccatataccagctgctcccagaaaggcatagcctctcccattatcaacttccttcaatggtacatttgttacaattcatgaacttatattgacacatattactactcacagtcca

SEQ ID NO: 128753 - DNA, 464 bp, Homo sapiens
cagccaagaaaatagggcaatggttccctaaattattacactattctgatgtttcatttctgcaacaaaatgagaaaacccaatgtagagaatttttcataaagctaaatatattttctatgagataaaagtgaggaggcattttcaatttactacagaagaataactattgttcacagtacattcaattttattttttgtaattttactaatctatataattcaaaactctgagacccattgattcagggaactctgtgcaattagaatgatttttttgagaaactgacttgaataaaggaagttcagcccaaaaagaaaccagatctgaaatatttctgaatttccctaaaagtgatcacaaaatatctcaaaagctgaaagtgtcaagaatacttttttttgttttgagacagagtctcactctgtggcccagagtagagtgccatggcacaatctcggct

SEQ ID NO: 128754 - DNA, 507 bp, Homo sapiens
tggtgcctgaaacatttgtcacttttagggaattgcaatcttgagtctgtggatcagaaataagctcctggtcttttattgagaatcctgcatttcgagtaagtaatttcccgaagcagctgggatttactcagtgttcttagttataattaaatgataaatcttcacatggaaggcatccaacattgaatatgtcagttccatcgaagcggaatagagcacaagatacatttacctagggaaatgattccactttggaaaactctattctcttgtcagaagtcagatgacaagcagttgcctatgaacagtcaataacaaaaggctctttagtggcttatgatacatcttttacaccctatgtctatgcagttttctggaaataatgagtggttccttccttgcctaacatttccttattggcatcagcatcccccaggtctgaataggcttggccctcagcattgatttagggatggctaccccataatgctcagctggagtgca

SEQ ID NO: 128755 - DNA, 336 bp, Homo sapiens
gagagtggagacagggttctcactgggcagagctggcatgtttctgtagagatgagtcattttcattaaataatgtgacaaaggccggggccaagaggaattatgaagcaagaaggatgtgcctcagcctctgtgcaccatggggcttcagaggggagaaggggctggggacacggagtgggcctgtggggggagctttccaggttggcgaaggggcagagggaggcagggagagcactgcatgggtggaggggcagtgtgtctatgggaaggtgtggaactaatgagctcctttggggacctgggcctcccctcctttaccaaacccagggccca

SEQ ID NO: 128756 - DNA, 277 bp, Homo sapiens
gcagtggcatcgcagggacaggctgcagggagtgtctggtgacaaatctggagggagccttccttcagtttgcacaaggaccttcggggagggagctcaagggccccccgggggttcctgtgggatccgtggaattcccctcaggccggggagggcggagccccctgtgcctgggccctcctgccccatctgcccagccgtggatatgtgtgtgtctgccagttggtgcctgggctccctggagggaggggcaagcatggacattcctggaaactga

SEQ ID NO: 128757 - DNA, 408 bp, Homo sapiens
ctggactcaagtgatcatcctgcctcagcctcccaagtagctaggactacaggcatgcaccaccatgtccagctaatttttttattttattttattttattttatttggtagagagagggtcttgctatgttgcccaggctggtcttgaactcctggtctcaagcaacctctctgcttcagcctcccaaaatgttgggattacaggcatgagccaccacacctggccttcatttttttagtttattttttaaatgtcattagcaaatatatcttagaattgtcttagtatttaaaggagaattacttattttttactcctctacaagtgaagattgactttaatgttgagaatgttatgcatcaactatatatagacacaaagacatgtttagttctttgatgaaata

SEQ ID NO: 128758 - DNA, 415 bp, Homo sapiens
gagtctcccggggtgggaggaaggagaagacagccctcagtgtaactttatctcccaggcaatgcgctgccacacctggactccctagcatttcctcacctctacaaaagccccagccacaccacaccagaaccacctgctcactcacacgcatggcgcttcagcatgttctaatggtgtagacaggcaagaaatgcgaataatgagagggtttcagatactggtgacagccacaagagaaaagaaaaagcagctgatgtgagagagtgagagtaggaagctattttagagcaagtggtccaagcagaccctctgaggaggtaacattcaagtagaaacctgtgaaacaagaaggtgccagccatgtaaacactcagggaaaagctgtcctggtgggggaatgtgcaaaggccct

SEQ ID NO: 128759 - DNA, 388 bp, Homo sapiens
gtggagttttccagaggctttttgatgtgtgatattgtgagattgaattcagaagcaaatacgagaatccagctgcttttataagggtaaaatttaaaggacattggcaaacgtgttttcctcttctcaccaatttttttgttttctttaaaaataaaaacatagcaggctgggtactgtgggaggctgagttaggaagatcacttgaggccaggagtttgagacctgtccctattttaaaaataaagaaaaagaaaaaaggcaggtacaggggtcaggggtacacacctgtagttcttagctacgtgggaggctgaggtgggaacatcccttgaacccctgagtttgaggctgcagtgagctatgattgtgccactgggtgacagaa

SEQ ID NO: 128760 - DNA, 411 bp, Homo sapiens
gaaggaactgtaataaaattaaacaaaagaaaaaaagtcacaattcaaggatcttactaaagattactcctagccaaggcttcaacagcaagcaatgtgatttggaggaaaggcattcaactgtacatcagaaccctgggtcatggtttaagcttgtcaataactagttatatcacttggcccaagtatcctttgacttctccaggtgggctcagttcctcatctatcttttcatgacactatgaatttgggattgatctaaaaacctattgatctaaaaacctgactattaaacatctagagatagaaccagtgatgcttagtaagtataacaagaattcatatctagctccccaagcataagcagaaattttctacagaaaaatgactaaaatggggggaaaaagaagg

SEQ ID NO: 128761 - DNA, 141 bp, Homo sapiens
ggctcaattgtagaacatgattttaataaccctggcaggaggggatcatttttcttttgtcacttaactccgattctgttggagaaagacgagacatgaaaagagagaaagacaggctgacagagtaaaagagggtactag

SEQ ID NO: 128762 - DNA, 258 bp, Homo sapiens
ccttaccctcacagagagaggaacatcatggggaacagccgtgcaaaggccctgaggcaagaaagaacttgatgcctgaaaatctgggtgtctggagcacagatggggacagatggacagggcagttcattcaggacctcagggctggctgtgctagggtattgattctaaatctcaagaacaatgtccagagagtagtgattgattttaggtggagagtgacatgatccaatttttattttaataagatcacttcca

SEQ ID NO: 128763 - DNA, 705 bp, Homo sapiens
catatgaatgaaatcatacaatatgcagtgttttgtgtctggcttctctcacttagcataatgttttcaaggtttttctatgttgtaacataaatcagtacttcatttttatggctttattcattttcaatttttatgatattccattgtatggatataccacattttcgtttatgaagacatttggatgtttgccatcttctgctactatgaacattcatgtgcaagtttttgtgtgggcttaggtttttaattctcttgggtatatacctaggaatggaattgctgagtcaaatgctaactctgtgtttaacattttaaggaactgacaagtggttttccaaagtagctgcaccatttcacgtgcccaccagcagtggatgagggtctcaatttctccacatccttgcaaaaaacttggttttgtctgtctttttttattataaccatcttaagagtgtaaactagtgtttcattatagttttgatttgcatttccctgatgactaatgatgttgagcatattttcatgtgcttattggccatctgtatatcctctttggagaagtgtctattcaagttattttcttactttttaaattgggttatttgtttttattcttgagtgttgaaagtttcttatgtattctggacataagtctcttctcagatatatgatttgcaaatatttcctcccagttctgcc

SEQ ID NO: 128764 - DNA, 83 bp, Homo sapiens
gtgttaacagtggaaggaaatcacaggtagccagttctcctgtggcagagagcccatactctgaagagaatctggtttctgag

SEQ ID NO: 128765 - DNA, 421 bp, Homo sapiens
ccaaagtccttgagtggatggagctctgcaaataatcaccatgcccaccaggggcaggccaccaggatatggtgttcctcgtctgctttttcccttccttccatttgctgtgctcggtgactccctccagatctgactgcatttttccccagagggccctctcagctttttctgatcgagactttctggccatgcctagacttgggagactgtgggacttgataacagaccctgattcttctttatgagtgaaaagcaggccatagacacagacaggaccacacaggtctaaggaatgactgtgagctcttcttaggtttccagagtaggaatgtcaacctggacattcctacgttaatgtaaccctgcattaaacagaacataaacaccaaagcaagtttgttctccacagaggaccaaa

SEQ ID NO: 128766 - DNA, 800 bp, Homo sapiens
ggaaagaaagagacactgaatgaaagggcttgataactaatggaaagtggggagaagggagaaacaaaggtgaaaagtggttgttaggtttcagatgtggatgattggagggcaggtagcaacattagtaaccacaagaggaaaagcaggtttggggacaagattgagtttggtcacatcaacaataaccatgcatttagtgagttacagtttacaaaatcccttctagatattattttaatctgtcctttggcaattgaagtgcctaggggatatccatgcagaaagatttattcaagaagcaagtggaaatgagtcaaaggacggactggttccttaattatggcactgggaatagtttagaaattacaattccatgagctagctaagctaggaattcctgaactagctaagagcaaacatgctttaaaagaaataatgatggcaacatcttggaaggcaaaatttagatgcccaggcaagaggtgtacagttacttaaagtcaggagagcagtataaaaggtcagtaggaaagagcttcaaaggctcttgctctcattcctacttctcctcagtgtttagatctgacctctccctttccttgagaccacccttaatctctctttcccctctggtatagtttacctggctcttttatgtgcatgtagagagcacacatgtgcctgtgcccaacaccccactctgttcattggtttctgttgtggattgagctcttccaaagcttaacctcagtccatccttgtgttacaagttgaaagcatgcaagctgccctaataa

SEQ ID NO: 128767 - DNA, 702 bp, Homo sapiens
ggaaataaaaggcaataagcttccattaaaccaaacaaaagaaaaattaataattaggcagtctctttgcaagtacataataataatactctatttttcaatgaatcaattaggtaaaaatgaaacaaaataaatgcaaagagagccctcaaaaatatatcacttttacatatgtaatataagttgaacatctcattagaataatgtgacttttttaaaatttatttttgcttcctagagttcataaatcttcaggtggtaagtaggggttctttagctattcataatgcaacttgcttaggttaattagtagagaccctttcccttcacagctgaatatgagtgcccctacttactattcaaaaatccccaaaaccagcactcttctatatattggtgcttggaagagattgtatttttcattgacctgcaatattaggtattttattataaataaagtctcaaacaggctttattttatttgtcagattctcttttggtttcgtctcataaaatattagctgaatagttattatataaaaaggaaatgatcagaatatcacatttcgggtggtggtgtttagtttgtgggttccttcatgtgacaggttgaactgggtggtagagaattctgagttctgtacaacagagtgattgatttctcggtttgcatttcttggcatctggcagtgacaccactgc

SEQ ID NO: 128768 - DNA, 645 bp, Homo sapiens
caaacactaaaccattgctcttaggagaaatccagggttaccttcttgtgagtctctggtcaaatcatttttgtcatttttgcacaaccttgttttatgtgtgtttctgtttaaagacatcgtatatgtatatgtgattcattaacattgaactcaaggcaaacagcacattacgcatgcctgaatgaagcttatctaacacacatagtctctccctgagtcatatcacagctttgttgtgcttagaaacactagacagccccacagtactatacttgggggtcattgtatacagtgaaattaccaataaaaaacatgacactaaatgggctgcggagagcacactcgattatggtgtgagagccgaagcaagaaggcagctgtttgacttcagctaggaacgtgtgcagcagcctctccaattttccacgatcctctccaattttccacgatccgtgcatgtccacaagtgactgtgaaagtgccagaaatattgacttggaggttacaaataaattttatgcctcctgcagtgactcatgcctgtaattccccgactttgggtggccgaggtgggaggactgctttgagcccaggagttctagaccagcctaggcaacagagcgagactctatctctgcaaaa

SEQ ID NO: 128769 - DNA, 523 bp, Homo sapiens
gaaggataggagaggcttgtactgctcctggcctggcatttagaggcccaggggacaagtcccaggcccttgagccagccacagtaggcttgcagctgatgccatgtcaccatggctgaagctagtggcaacctgagtggatggggcttctctggttcctgcagcccacagagaccaacaaattcactcagttgggttctgtctagacttaattcttgctgtctttgtgaattgatttttacattctggcctgctgtgcgtatcttggctatgggatctcttgctgagcctgggacagagtcttttcttcctgccccttctcctctgcaaggctgccggaccagctcccttggcaacctcattaggctccagtggtgtccgtggggaatctaaactgggcagcagtgatccatctttagggctctcatccatccaggtggctcctaacctctccaacgcaaagggactccagctgaaaaatcaaaaccagccttctttgggagccccactcattgtttgagac

SEQ ID NO: 128770 - DNA, 334 bp, Homo sapiens
tgctgggattacaggcgtgagccactgtgcctggcgcagtgactttattatttccccttcaatattgtgatggatattttgagtcttttggctctccatataaaattcacaatcagtttgctgatatccacaaatatgctgggagtttggaattgcatgaaatctgtagatgaagttgggaagaagtgacatcttgacagtattgtctttgtatccacaaacatagaatatctctccatttgtgtaatttttttttctttcattagacttttgtagtttttttttcatatagatcttgtatgtattttggtagatttatacctaaatatttcat

SEQ ID NO: 128771 - DNA, 268 bp, Homo sapiens
atgaagtgatgatgcaaatgagtattaggactatgagcaaatgaatgggagcagtaacaaaagtccaaaagtcaggaaaaatgaaaatccacgaacttggcgatgctccagagaggaaaccagcaagtgttgacgctaaactggcagaaacatcaatacttcctggctcccccactgggtgcatcaatttaccaccggcaggctgctcttctgcttcaagtgacaaacagtaagtgctttcaatgacagtatgaaaaggaatgaccca

SEQ ID NO: 128772 - DNA, 188 bp, Homo sapiens
acactaactgattccaagttggtttgcttttgctaagtacacatgtatcacacaaaaaacacacaccaacacattaagaaagctattcccagctggacacgatggcacatgcctgtaatctcagcactttgggaagctgaggcaggaggatcacttgagcccaggagttcgagatcagcctgggcaac

SEQ ID NO: 128773 - DNA, 552 bp, Homo sapiens
ggatgtctcaggacgactagcatatgtttctcaattaaaagcaaaacaatgtgatgccccaggtgattttaattatctggttaagtggctcttctccgaggcaaatcaaatctaaggaaacctccaagagtacttaggtatatcaagaaaccctgtgacaatgtgaaagttcgctgagctgggatggggaccatagctttggctcctgcttctgctggcttattatgtattttccttgggccaaataatcaaagattatggacttcagagttttgttgagatgctttacttctaggggcctacatatctgcatatctaaaataagagaatgagactagattaatatttcccatactaggttctacaaaatgctaattcattgagacctaaacattgactccctagaaataatgcaagatatttcaaacgctcatatggtcaaaaaattcaaattattctgtctctttctgtcttggagattcaaattactatgtctctttcttaattggagattcacaatgcatatttgcagtgctaaaatactaacaaact

SEQ ID NO: 128774 - DNA, 350 bp, Homo sapiens
accgcttccagctccatccatacccctgcaaaggacatcatcttgttcctttttatggaagccctgaaatttgtcccttgagtttcgtgtatattggggaatgtctcagattcccaaatcacaccaattgtaattgctgtattttgagggtggacccctattcaatttctacagggccttcatacagttgttttaatatttttttccatatttttagttgttactacagaatctgaccaagctttttggccattaccactcttatgagttttaaagttgtttctcagcttaggctttccataccctgtgattattgtgaatttggccttacatccaaacatggagctgtc

SEQ ID NO: 128775 - DNA, 556 bp, Homo sapiens
cagaaaactaaagacagagctgttattgtaccatctggtttgcatgaggaatctcttggcatctcttaactgcacattttataaatgctaaatcccagatggcatacattgtaacagtgaagagttttataaaggcttccaaaaacaaattctttcaaatttgaatactggatagtctaagcaggggctaggaatttaaattctacacttgattaaactggctttgttagctgaacaaatttcccttttttcttatgtctttccttcttcctaattattggttctgtgacttgaaaatttcaatccatgtaattcttctaccaacaggtcccctctataactcaagttctagaaaaactgcaggaacgacaatcattggaaaaacctatgttaggtgccattttgtttcaaagatggtagaatttaccacaagggaggtgtgttatagcatccattagcagatcatcaaataccatcaaaaccgttcaactcttacaaagctgatggttggattggaaagacaagcaaatgtaaactccaagcattgtgttgaaat

SEQ ID NO: 128776 - DNA, 240 bp, Homo sapiens
atgttcaaatcctttgatccagaaattctacttcttaggtatttatttttaaaatacataaataatcaacatttcacaggaagatttatatgcaaggatgttgttcatcataatagtatttaatttctaactggaaactaagtggccataatatgaaacagttaaagtcatagaaatatacaatgtaatactatgcagccattaacagaaatgcaagtcctcaaatcattttcaatgaca

SEQ ID NO: 128777 - DNA, 671 bp, Homo sapiens
cagaaggatgaatcaaagcaattttgcaatagttcacagcatgcctgcctggcagtttctcttaggacatcagaagcattctacttgtctccaaatgtcaaggaaatgacaacccttttctatgaaaagtacccaagttctctaatggtcacaggcagttttacaaatgaaaatactttcaggaatttggctcagagtggttaatagtactttcttctcaaagttttccaccttcatcactatggatttatgtcactctcataaatacaaactaggcttagctctatttccagaggtcactgggagaaagtggagagagatcatagcaatgctttctttccttcacttactttttaaaaattttcatttgaaattttaccactgttaaacatgcacgaaactagagccagatagtttttcaaagtattttatgaaaaataccatcccctgtcatagattgatcagttgacagtctcccatttcccacatcttactccccagaggctactactttcaaacttcaggtttttcttttggtatttacttctatgtcactaaacagtatactttcattgatatttgatttatttttagtgttaggaataatctgttgatttctacatggaaaattaatgtttagctctttcaccacctcttgtctcattacacat

SEQ ID NO: 128778 - DNA, 305 bp, Homo sapiens
tggtctccatgtctctgctctggtcttcaaagtattggagatcatagcatattactcccttgcttaagtcattcagtgggttaaatcctacttctcttagggcaaatatcagaatctttgacgagacctgcagggcatggtctggcccctgcctacttgtccaaaactcatcttgctcatatttcacttcttcctctgctccagctacactgaccggagccacatgccctccttttcagttcaatcctcacatattacagatgaagcaatagacaaagtgatatgaaatggtctgctgaaggtca

SEQ ID NO: 128779 - DNA, 385 bp, Homo sapiens
attaaactcatccctaaaacacagcctattccctactggcatcttttggaatctgcaaacatgactctctgaaagaaaaacgttaacctgacaatatttccgatggctaacatttattggatcattaaatttgtgtccacaaaaccctgaggaagatcccagtgtatctattttataaatgaggaaactgaatttagagaggttaaataactcctgtaacatcttaacagctactaactgactatgctccgacacttaaaaaaaatactttttgattgaatgcacgtcaatcacaaggggcggggggcacaaattcaacgtaaaatctaaatagaaaatatcttctagtggccaggggtggtggctcactcctggaattccaaca

SEQ ID NO: 128780 - DNA, 603 bp, Homo sapiens
aaacaataaaatgaacttttttgaactaggagttttgatacatatatatagagagagattcatgaaactgccaccacagtcaccattcaaacagttccatcactctaaaaacttattttgtcctatacccttgtacttacttacactgtctctccatccctcacccttggcaacaactatgctcttctccaccactatagttttaccttttccagaatgttacatatatggaatcataccgtatgctaccttttgaaactggcctcttttgctcagcacaaactctttgagattcatccttgtttttgcaggtataaatagttcattccttttttattgctgagcagtatttcattccatttgataccacagtgggaactaggatgagtgggtccttttgggaaacctcagttaacaatctgggaattctggaaactgtctcagtgaattttcatactttattacattaaatgcattggtctgtctgcattttgaatggatcttttaactatgtttgatactgtaatttcttgcattgatcatttgaagaatattggttttctgaaacacacagatcatctaaatgttgatacatttccttat

SEQ ID NO: 128781 - DNA, 365 bp, Homo sapiens
ctccaccaccatcctagtccaagctgccattgttctttctcctggacaaatacaaaacacttcttgctgttttcccagcctccacactttctcccttccaattcattatgcacaatgtgtccagagtaaaccctttgtttgtttgtttgttttggagacagggtctcactttgtcagtcaggctggagtacagtactacaatcatagctcactatagcctcaaactccagggctcaagcgatcttcccacctcagcctcccaagttgctgagataatgtacaggtgtgcactaccatgcccactcattttttattttttgtagagacaaggtcttgctatgttgcccaggctggcctggaactcc

SEQ ID NO: 128782 - DNA, 205 bp, Homo sapiens
ttagaaagattaaaccagtttatgctcttccagcccctgtggtatatgatagttcccattttcctgtaccttgccaacactgggtgatatccagttttaaaatctaaatcttgcattgctatgagaactacaattagagaaggcttatcttctactgcccattctctgtacagagcaaatccctctagacctgaagccccttgga

SEQ ID NO: 128783 - DNA, 173 bp, Homo sapiens
caattctggagtggtagaaacagttgtctaagtgggaaggggttgtggcagcggtctgagggccacagaatatgcctccttccataaggtataaggaagcccctacagttctttagttctgtttctttttcttttttaattttttgagacagggtcttgctctattgcccagg

SEQ ID NO: 128784 - DNA, 369 bp, Homo sapiens
tgttggccaggctggtctcgaactcctggtctcaagtgttctgcccgccttggcctctcaaagtgtggggatcataggcgtgagccactgcacctggcctaactacaaactttcgtgggctgaaaatatttttttctcattcactagatttttagttattataaagaaaggtgatatgaacatttatgtacaagttttgtttggacatatgttttaatttctcttggataaataaatatctagtcatggaatgactcctaaagaaaccttctgccaacacttgttcacatatcaccaacactatgaatgatcaattcttttaatttagtatatagtgacatgtcattataggctttttttttttttttt

SEQ ID NO: 128785 - DNA, 117 bp, Homo sapiens
catctaataagcatttcagaacaaaacacaaggagaaacaacctaagaaataattcaagtctgggtgcgatggctcacgcccgtaattccaacactttgggatgctgaggtgggaga

SEQ ID NO: 128786 - DNA, 456 bp, Homo sapiens
tgttttcccagggaccagagaaggaaaaggggttagtaatgttgagtaaaatgctcaaacaaaaacgtcaaagtctgcttaatataatgcttaaagacaaagggccagaattctcatcgctgtttaaaagttgcaaaagggctgctgccccctctttctctctggaaatgcaccctctcaaccactagtggtaatgctcttttgacaaacaagaaaacttctactcagatctacagcttctactaactgggtaacaaagactcaaacgggttccagtaggaagaaggaaggaaaaacacaaggctgaacatgacattcccctttacacacaccacttatgcacttccaaatactttcacacgtgtttcttttcttctctactttcaagtgtagagtagagaataacttcccctgtaaagtactgagagggaactctgtggccctggagacacccac

SEQ ID NO: 128787 - DNA, 582 bp, Homo sapiens
aagggggtgaagggtgtccccctgaacctgcagattgacacctatgactgtggcttgggcactgagcgcctggtacaccgtgctgtctgccagatcaagatcttctgtgacaagggagctgagaggaagatgcgcgatgacgagcggaagcagttccggaggaaggtcaagtgccctgactccagcaacagtggcgtcaagggctgcctgctgtcgggcttcaggggcaatgagacgacctaccttcggccagagactgacctggagacgccacccgtgctgttcatccccaatgtgcacttctccagcctgcagcgctctggaggggtgaggccagggctggggtctcgggaaggagccgagagagggtcctggctcctaggtggggcctgccttagcacagaccagtggggagcagccttcccctcagccagtttcaagacctttattgaatcataggggtttaaacatgtatatatggtcctatagcttcagtgacctattgtattgaagagaagaatgttatgaagaaacagatttcgtaaccattaaaacgttcatgcttagggcacacaaagagga

SEQ ID NO: 128788 - DNA, 1547 bp, Homo sapiens
aagggggtgaagggtgtccccctgaacctgcagattgacacctatgactgtggcttgggcactgagcgcctggtacaccgtgctgtctgccagatcaagatcttctgtgacaagggagctgagaggaagatgcgcgatgacgagcggaagcagttccggaggaaggtcaagtgccctgactccagcaacagtggcgtcaagggctgcctgctgtcgggcttcaggggcaatgagacgacctaccttcggccagagactgacctggagacgccacccgtgctgttcatccccaatgtgcacttctccagcctgcagcgctctggaggggcagccccctcggcaggacccagcagctccaacaggctgcctctgaagcgtacctgctcgcccttcactgaggagtttgagcctctgccctccaagcaggccaaggaaggcgaccttcagagagttctgctgtatgtgcggagggagactgaggaggtgtttgacgcgctcatgttgaagaccccagacctgaaggggctgaggaatgcgatctctgagaagtatgggttccctgaagagaacatttacaaagtctacaagaaatgcaagcgaggaatcttagtcaacatggacaacaacatcattcagcattacagcaaccacgtcgccttcctgctggacatgggggagctggacggcaaaattcagatcatccttaaggagctgtaaggcctctcgagcatccaaaccctcacgacctgcaaggggccagcagggacgtggccccacgccacacacaacctctccacatgcctcagcgctgttacttgaatgccttccctgagggaagaggcccttgagtcacagacccacagacgtcagggccagggagagacctagggggtcccctggcctggatccccatggtatgcttgaatctgctccctgaacttcctgccagtgcctccccgtaccccaaaacaatgtcaccatggttaccacctacccagaagactgttccctcctcccaagacccttgtctgcagtggtgctcctgcaggctgcccgttaagatggtggcggcacacgctccctcccgcagcaccacgccagctggtgcggcccccactctctgtcttccttcaacttcagacaaaggatttctcaacctttggtcagttaacttgaaaactcttgattttcagtgcaaatgacttttaaaagacactatattggagtctctttctcagacttcctcagcgcaggatgtaaatagcactaacgatcgactggaacaaagtgaccgctgtgtaaaactactgccttgccactcactgttgtatacatttcttatttacgattttcatttgttatatatatatataaatatactgtatatatatgcaacattttatatttttcatggatatgtttttatcatttcaaaaaatgtgtatttcacatttcttggactttttttagctgttattcagtgatgcattttgtatactcacgtggtatttagtaataaaaatctatctatgtattacgtcacatta

SEQ ID NO: 128789 - DNA, 517 bp, Homo sapiens
caggttcaagcattcccagggctggctctgatcccgataaagcccatcatcatgaatgaatgcctcctttgcaggttattctaagtattgtaaatagtgcacatggagcgtcctcatgatgcctgggatggtagtgaatatttataggtttcttttagtgcctttttttttttttttagcgttttccatagttccatgtttctacaaggcataggaacatcagaatcatgtgtgtgtgggtgcttattaaataaaccaattcctggagctcactcccagtgactcccagtctgatgattaggggctcagttaggacctatgtttgcaaaagctcccaggtgatctcatgcagccagcctggctctggctctggctctggctctgggagctgggttgggaactagtctttggtgctattctgctgaaacttcaagttgggctctttgactctgtcttgtattgtcaccatttgtattcaggtctgttttccccctggattgtaaactccctgatgtct

SEQ ID NO: 128790 - DNA, 439 bp, Homo sapiens
atcccagcactttggtgggccaaagtgggcagatcatttgagcccaggagtttgagaccagcctgggcaacataataaaacccgtctcgaccaaatatagaaaaattcgtcaggcatggtggtgcacacctgtagttccctgtagttccagctatactagaggctgaggtgggaggctcgcctgagcccagggaagctgagcctgcagtgagccatgaccacgccagtgcactccagtctggacaacaaagtgaaactctgtcctcaaaaaatcccccaaatcaaaaaaagccagtgatgtctattttaagctaaggccaatccttccattaatgctttgcatttcatatcctctagcccactcagaaagagttttaatcaaagtttcatcatctcacttgttttaatgagctctcactagctgtagtattgacaacag

SEQ ID NO: 128791 - DNA, 244 bp, Homo sapiens
cagctactcgagaggctgaggcaggaaaatcgcttgaatccggggggcagaggttttagtaagccaagatctcgccattgcactccagcctgggcgacatagcgagactttgtctcaaaaaaaaaaaaaaaatggataatttttattccatttgcctcaattcctcataagtgccagttagactcctggaggggaaaagaaatgagtggtagaattcagtcaacaattcagtcacctgaattca

SEQ ID NO: 128792 - DNA, 263 bp, Homo sapiens
actacacataagaatcacatgaagaacttaataagattctgtgtgctggggcctagtttactgaaaaatttctcagttgtgtctaatatgcaagacaggatggaaaacgactgatctaaagtaaagatcttgtgttgtaatctaaattcttctcataatgagatctattattaatcttcagtacttggcatataatgggcacccagcataagaaaatctggatagctgctacataaaaatgtcagtcaggcttgaaaagatcc

SEQ ID NO: 128793 - DNA, 142 bp, Homo sapiens
gtgggtgagtcagtagttatgtgcatgggagtgtaaaagtgtagggggtgtgagcgtgtgtgcttgtgagaatgtatgaacgtgcatgtgtgaaactgagttttgtaagtgtgtctgtgtgtgtttctatgtatgcctatgc

SEQ ID NO: 128794 - DNA, 396 bp, Homo sapiens
ctcgaactcctgtcctggcctcaaccgatcctcctgcctcagcctctattttttattttttagtcttaacctagcaaaagatggttgatttaagcacactttgatatctatgcctatattagctctgtaatgtcagtaaattaagagtttcttccgtgagctccagttaggatggtacatcccagtgaagagaaccttacgatgtgatttggtatgttgttgtttcaacttttctgcatgtcctttcctagcaaagaagtctaaagctgtattgttgccttagaggaagtacaaaaaatccaccatctgcctttagataggatgctcacctgtcacccactagccacaacagaaaatgtctgtgtttgagcacttctcatacttggaggacccgtg

SEQ ID NO: 128795 - DNA, 159 bp, Homo sapiens
aagttggtgggtaagaaaggaagaagagaaaatctctatcttcctcatttgtgaccaactctgatgtgtattctacatatacagcactccagagtttccctatgagatgggatccagtttccctcagaaggctggcttgacacacacttacttactttt

SEQ ID NO: 128796 - DNA, 670 bp, Homo sapiens
gcagcacacagctgatccaaagattttggatataggtgtgagtgcagcacatacttctaatagtgaaggcagtgaatatttgtaattagcgatacctagaagtgatttggctactgtaccacatcaattttggccacctccagtctctggcaatactattttgtgtcctgggagcaattcttgtggatatggagaataaaggttattgatagtgtaggggattttcaaagacattaaggaaggctaagaggttgcattggctgtaggattggaggcctaggaagccttctgcctgatgcccattgaacatccctggagaatgctggatttttagtttgcacccttagcagaactgtaactcatttctggaccaggagccagagttatttattagatgtataagttatattaagatgtttaagttacatatttgtccttgagcctgtaaaactcagattggactgggcatggtggcttacgcctgtaatcccagcactttgggaggctgaggcaggcagatcacctgaggtcaggagttcaagaccagcctggccaacatggtgaaaccccgtctgtactaaaaatacaaaaaatcagccaggcgtggtggcgtgtgcctgtaatcccagctactcgggaggctgaggcataagaatcgcttgaacctggg

SEQ ID NO: 128797 - DNA, 501 bp, Homo sapiens
taaaggaacttgcccaaggtcacacagccagtaaatggcagagccaggattcaaacccacgcagtctggctccagagcccacatatgtaagcactatactattaagaagacaacaattcctatacttactagcttcatgaaagtaaaaacatttgcaggttttgctttgaaagatccaagtgaatgctactagaaaaatacaaagaataatgtactttttttatcttaagcactagccaaggaaacaaagaaggagcagaattcactgtacccaagtactgtgtggttattttgatacaagtcaacaactacagcagatgctggtatccatcttcctgacaggtgacaggtagtaccaacactcttcagatcatgagacctcaaaatactcattttatcctgacagcaggggtgagaaataacatgtaaatcatcatggggagatggaggcctaagtaaatattccaggaaaagggctcctttagcataaagtagcctttt

SEQ ID NO: 128798 - DNA, 343 bp, Homo sapiens
gcctcccaaagtgctaggattactgcaccaggcccacatgtcattattttaaatgactacatcagattttatctgatggacatatatacattatttaatattcccattgttggacccttacatgagttccaattttttctagacaaatatccacataggtaagacttagaagaaattcatattatttcattaggataaatttctaaaaatgggagcagtgggccaaagggcatatacatcttttaggtttttcatataaattgccaatttatattcccatgagaagggtatgagagtacctgttttctcaagccctttgctgacagctacgttagtgcttagg

SEQ ID NO: 128799 - DNA, 358 bp, Homo sapiens
gtcttcagctggttgttaatttatcaatgtcagggccagtgtctgtcacttcactcagtccctagcccagaatcgtgaccagcagatgcctaatcggttctagcatgataaatatgccaggcctctcactaaaccctccttgtccttccttcattcattcattcactccacatgcatcaaatgcctgatttctatagtgagaatataaaatcaggcccaggcaatttaatccttttctgaagcgtggatgtgttgaaactactaactttaactcatttatacagcgagaatctaataacaaacaagacctggtttctgcctgcattgtgctcattttcagccctttcctagattaggc

SEQ ID NO: 128800 - DNA, 645 bp, Homo sapiens
ccattctcctgcctcagcctcctgaggagctgggactacaggcgcctgccaccatgcctggctaattttttgtatttttagtagagatggggtttcgccatgttagccaagatggtgtcgatctcctgatctcgtgatccacatgcctcggcctcccaaagtgctgggattgcaggtgtgagccaccatgcccggcgaggtggtgatttttttgtttttttgttttgttttgttttgtttttttgaggcatggtctccctctattgcccaggctggatggaatagagtggtgcaatcatagctcactgtagccttgaactcgtgggctcaagcgatcctgtcatctcagcctcccaagtagctagaacgacagatgcagcccccccacatctggctatttttttctctttctttctttttttgtagaggcagggttttgccatgttgcccagactggtctgaaactcctggcctcaagcaatcctcccacatgggtcgcccaaagtactgggattataggcgtgagccactgcacctggtctggttcagagagtttaacaggcattgccttaagcaaaatattggacaaactgaggagtttctaatatgcctgttgtgccctttctccacctctgtgaccttccc

SEQ ID NO: 128801 - DNA, 784 bp, Homo sapiens
cttctaaaaaaaaagaaaaacagaactaactagagattattggctgcacaaacccatcagcacctgccagtttttaaatttcattttggaaaatcagccatcacttaagggacttgtccataatagcttcattaaagctttgttttttatcaaaagggggccacatatgtaaacttgtggaagtaatttacctcctctactcttgtctttttatttgattgcaaaagttaatgttattaaagttgctatggaagcattaatgttcagcctgaacaagagcttgacgaacttctttatacaagcaataacactctgcaaccccattttatgagatatttttcatgatgtagacatttactttcttagcacaagtgatctcttaagattaatttcttttccattttccttcagttttaaatgatgtaatatagtaatctttataacatgatcagccaagtataatttgagaagtcagttctgttggcaaatatctgaaggacaaaaccaaagccaccctagctgaggtttttgtcccttccttctttcatttaccaaaaaccttaattgggttaacagtaggggaattttagaaatcatgttttcctaatgtaacctgtgaaacaaaagcaaaatagattaaggcaaggggaaaaatgaacttaccaagagtgttctttttcctaagtaaaaaccacaaattttatagttttttaaattttagactttctcaatcctttttttcacatttaattattctcataagtatacatagaagagagaatgt

SEQ ID NO: 128802 - DNA, 263 bp, Homo sapiens
gggcacccagctgcaccagcctgcaactgcctttgggaaaccgaggaggcgaggctcaactctccgatttgaaggcagcagaatcattgatcaaggcatagaggtgctcaggtttgcctctcggagtggcatgatggtcaggtgctcaggatccagagctagacctggatcccaattctgcctagctcttagtagctgcatgacttacctcactcagcctcgatgttctcatctgtaaaatgggacttacattataccactca

SEQ ID NO: 128803 - DNA, 407 bp, Homo sapiens
cgttgagcagctgagaagcggtactttggagctggtacgggaacagatgcaacaccagcctgctcagcatcgaactggactgggaggcagggttgggtgtctggagccctgggcaggcagcaggatgtgggtggtgagtggataaggggtctgcagaggagctggagaaggtgcagccagggaggggaacagaaagcaggctctgagtggacaagcaagactctgctgggcagtgcatggaaaggactctgtatgctgcagtgggaacagcctacacaaaggctcagaggcctcaataaaccagccatatttggagaggactaatggagagacaggagagaccacaccgccttcctgcccacacttggccacacaggggctaggggctgtgggcaagcgcatgcctg

SEQ ID NO: 128804 - DNA, 542 bp, Homo sapiens
gcctgtagcctccaccagcctgaggggtactggtgccatcataaggtgaagccagagaagaaagccaggtaaaaaaggacaggaggtcctgcctgcccaaggaaggaggaagaaatagcacgtgcaggagaaggagccaccagcacctgcagagcctgccctgaatgctgaggttgggatgggccacctggactgggtattgaatggagggccctgtggggagagagcacagaaacaggtgcatgctgccatcaccagacccccactgtgccctgcctcggcacaggacccgcagcaaccaggggaagctcctcatgcttcctctgggtcacccacaggcaaagtctttccaggtgtgctcacaaaccattcttccagcccccagaaccatgcaggaacccgtcactcagcttcggtgcatcaagaaggccttctctgcaaatccacctcctcacacaagcaactttccagaccccctggggggtggctgattcttctctggaagcacagctctacacacacatgcacacagctctgtgttc

SEQ ID NO: 128805 - DNA, 515 bp, Homo sapiens
aaaaataaaaataaaaaaataaaatagtctcttctcaaagtgatctgttcgaataaaaatgcgggggtgggggctgaagaggaggaaacgatttttggttttaaattgaaagatgaatttctaacttgttattgaaatggtcacgacacatgaagtgagtttaatatggaactataattagtaaaaaacaaagctggaaagaagaactaggataccagttaacacattttgtttctgctgataagaaagtcagtggaagttagtgtttctatgcatcaggaggttgagttttctttttttctttttcttttttttgagacggagtctcgctgagttgcccaggctaaagtgcagtggtgcgatctcggctcactgcaagctccgcctcccgggttcaccccattctcctgccaggaggttgagttttctaacacgcacttcatacagggatttagatttcagattctatgtttccaaatactttctccatctactgagttggaagaaactagaga

SEQ ID NO: 128806 - DNA, 351 bp, Homo sapiens
gtgagccgagattgcaccactgcactccagcctaggtgacagagtgagactgtctcaaaacgaaaacaaaaacatcttgctatacaaccaaaaggggaaagtcatacacttaggaattttaaatatgcaagtcaaagagcctttgaggtaccccacagatgactatcagataattcttcccttttatacaattcctatattacatcacttgatcacaaagttaaaattttactttaaaaggaatccctcattcattcacacttgagtcatcccacctggccactcccctgcttcccaccccttccccatccctttaaggtggtattctttagccattcccttcctgaataa

SEQ ID NO: 128807 - DNA, 895 bp, Homo sapiens
aaccaaaaagatattatttcaaagcctggttctgtcatttgccaacgatcttatttttgttatgaagttagtgaatgtccctaagactcagtttttccatcttaaaaatggggtaataatacacttgtcagagtgatttttgtttaaattattttgtgtctgggaagtgcctaacaacagcagctgttattatgaggaaattttgttattattactttaggtcaccttggaacctcacttttaatgctgctgtcatctgtacacccagccagtacagcctgattgcattgtggtccctttagtgcttatggaatagcttgcttataagaacttttacaggactgtattcatacaccaaatgtgagtgtctcaaaaaatggcacaagaagcccagtgggacatggtggcatttgtgcctctcagaaccctgaagttatttgtatgtgttgtttttacatcatccagcagcattttaatatgttgtaggacttaatgccataaacagtttctgtttttcaacaaatgtactggatttcttgatttggtttcttagttcattgtcagaagtaacttgttttaaaaatgcacagcaaagttctgtattgatgaatatcataagttttgtgtgctctagtttttgaggacaaggccttctaaatcaggctgagtgcttcaaaggagatcttattatctttatgacaaacatgtagcaattctgaggtctgccatcctcaatacatagtcacacacacatacacacacacactcctacatcatttgcattatttttgtttctttataatagcatttatcatatttgtaacaacctaatttaattcttgctaattgtgtatctttcccatcatactcttaataaaagaagatatattatttc

SEQ ID NO: 128808 - DNA, 318 bp, Homo sapiens
ctgctccgcccctctctgctagtagcaccctgatcttcctctgaggagccaccccctgtgcctggctgagcccttatgcttgaggggggctctgcccacatctccagaccaagtccacaaatgccagtccctcaggcccaagctaaagtcagggtcagacacaggactccgcagagccatctggggtgaacaagaggcttctgggggcgttttcttccactggagctggcctgtgtggggcttccccaaacatgaaggcccaggaaaagcctgtgtgcaaccccagaaatgagacagaactagaggcggagcaggggt

SEQ ID NO: 128809 - DNA, 835 bp, Homo sapiens
gtgtaatttctgagatgcttaaagatataataaaatttatattgttataccaatcttaagagtgcctaggaaaactttaaagaaccacccaagaaactgccatttaattctgtctaaatatattttgtccaagttaagaaaaggaaagatattttgttcgtataattattttgccttctgcaagctccctttcatcatatgctgaatctctagcaggttagatcattaaacttttcagatgaaaaaaaaagatggttggggaaagactagttagtacctgattgggcaaatgtgggtcgagttttgaaaacctttttatttttttagatgagtttccctgagtttttgtttactcaatttataaggtatgtaagaatacatcattagttcttaccttgacctttcctaaatcttttgtgtcattaaatagaacaaggctatgcagttaaaatatttatttgaaagtttttagaatcctaataattttgcttactttaattaattactgtcaaattgtgatagtaattgttagtcctaaattgttaagaactttattttaaatttgttttcccataattttccccaaaattgttttatttcttaagcaatccaaaacataaccagccacagccacataaaaatttttaataaaaactttattgagatataattcacacaccatataactcacccatttaaagtatgtaattcaatggttgtttagtacatatacagttttgtagctggcactataatccatttcagaatattttcatcattatcccaaaaagaaaccctgtacccactagtagtcacttcccatttcctcccaaca

SEQ ID NO: 128810 - DNA, 282 bp, Homo sapiens
acctgccgctgcggggagtgttggagggaaagtgagacagggagtgggccggttcgagaaggaaactgactggtggctgagaagagggaacctcctggagtttgagagtttatgccattcccttccccaagagagcagtctcaggggacttcggaggccttgagaagggaggatcgttaccccttgaactctgcctgacatccccacctaagatacccatctcccattcctcgggccagagggaagagcttagatggggaacttccccaccccacccatccc

SEQ ID NO: 128811 - DNA, 227 bp, Homo sapiens
ggtcctgagtagctgggattagaggcatgtgctaccatgcctggctatttttgtatttttttagtagagtccgggtttcactgtgttgcactggctggtctcctgacctcaactgatgtgtgcatcttggccttccacagtgttggaactataggcgtgagccaccgcacctggcctactcctgtgttcttagcttgagttcctggttgatgggtggtgccaccaat

SEQ ID NO: 128812 - DNA, 647 bp, Homo sapiens
ggaaatgaaattagttttttgttgttttgttttgtttcgagacggactctcactctgtcacccaggctggagtgcaatggtgtgatcttggctcactgcaacctccgcctcccaggttcaagcgattctcctgcctcagcctctgaaatagttgggattacaggcacctgccaccacacccagctaatttttgtatttttagtagagatggggtttcaccatgttggtcaagctggtctggagctcctgacctcaagcaatccaccctcctcagcctcccaaagtgttgggattatgtgcgtgagccactgcacctggcctaggttattttaaagtaagaactattaatccagaatgttagtgggaatttttttatacacagcatatcttttaattttttcttacctttcttgaaaatttccttgttaaatgatgcaaaatatgatatgacagattataggtattttaaagaagagtatgggttatagaaacatctgttgttctaaaggccacctgtagatggcattgcttgactttgtctttaaatgttttctagaaaggaagttgttaaaatagaatctactttgaaatgcaatcacattttaaaggtgaacgaaattagattaaaaaaaaaagcctaccttttg

SEQ ID NO: 128813 - DNA, 322 bp, Homo sapiens
ttcttgtcgctgttcattcacccaagttgcaaacgtgtgacctgtaaaggccttgaggctggttggtggcctggccagcgggcccagtctcggaccgtggcccagtgccagcagccgggagtatccagcctgtaactgggcactaagccagcctgggcaggaatcatcggaagatggggcagggcttgaggtcgaggccttggtagcctgactttgcatccagttcctgcactcccagctctataccttctttgtttcagtttctacttctctgagtttcagtttctttgtctgtaaaatgggaataaggatcagactgacc

SEQ ID NO: 128814 - DNA, 156 bp, Homo sapiens
tgcagtctctcaagggcaggaaaggaggagccttaggaattgtatagtccgcttccctcattttacagatacagagagaggttcagagaggtaaagtgactttttccaggttgcagagctgacagaattgcagaacaagaatccaaattggattct

SEQ ID NO: 128815 - DNA, 463 bp, Homo sapiens
gcctaatagacatggaggtcacagaatgagagatggggcataaaacatctattagtggaagaaaattgaacctatgcataaaatgcattttcatccaaaaagtattttttatttttttattttttatttttatttcttattttttgagacagagtttctctcttattgcccaggctggagtgcaataatacgatcttggttcactgcaatctctgcctcccgggttcaagtaattctcctgcctcagcctcctgagtagctgggttacaggcacccaccaccatgcccagctaatgtttttgtatttttagtagagacagggtttcaccatgttggccaggccggtcttgaactcttggcctcaagtgatctacccgcctcggcctcccaaagtgctaggattacaggtgttggccaccccaaccggcccaaaaagtgtttttgagatgcagtgacctgatgt

SEQ ID NO: 128816 - DNA, 547 bp, Homo sapiens
tccctatcacccagattccccaatttttaatttttcatttgctccatttttctttttttttaaaaaaatagatacactcccctaagcatatacgtatacccataattagtcttttctgaagtatccaagaacaagcagcagacatgattcctatcaaccctaaatactccagtacttcttaagacaaggacattcttctacagaatcaccatataagcctttgagtcagaaaatcaacatttatacaacactactatcaatctacagacatcattcaaactttgtcaactgccccagtatcgtcaggacattcattctcctcccatattctcagtctctccaggtctttcatgttcttgacatttttccaaagatacagaaccttcattctgtaggctaatcataaacttagatctatctactatttcctcatgatcatgctttttgggcagggaaaccactaacatgatactctgctcttttcaaggctacacatcaaggtgatgtgccatacatgaagttgacccacttgtgatgtcaaccttga

SEQ ID NO: 128817 - DNA, 302 bp, Homo sapiens
caagtcaccaatgttgcctaaagactaacccatggaaacttttcagttcttacttgacttgtccacagttatccactgttactactttccccacccatcccccagtttttaaagactctcttcccctgacagccttgtctccgctctctcctgtcttctttggcctccactccagctgcctctcttggctcttggttgtacctttttcccttacccattatctcaatgttggtattccttggagtcttctcattctatccattttcagtgggcagttgcttctacttccattgctccaaatg

SEQ ID NO: 128818 - DNA, 276 bp, Homo sapiens
ttgaccgcctgtgataccagggaggtcttgatcacattccattcatagagagggaaacaggatggagaacctagatatcttacccataatcacacagcccagggggcgggcagagctggggttaaactaaagccatctgacttggggcttgctgtcttctttccaattgatttacattcatatataggtaatatttatacctagaatccctatgcatagagtagttgtgtgtacatgcttcgtatatcatcattcactccatcaaatatttattga

SEQ ID NO: 128819 - DNA, 295 bp, Homo sapiens
atgtgaattctactactctcctcagggtatgagagagagaaggcgacagcaagaggaaccggagggagatcagaacagctggtgaagccggagttagtgttggagaggctgggcatgcaggcagggaccagatcaagcagacgcttggacattctgctgaagattttagagtttattcctagttaagagcactggagtcattgacgatgttacccagaggattaagatgagacctttggaaaatcacctggcgtcatatggcgaatgcatggcagggaacagagtggagagggga

SEQ ID NO: 128820 - DNA, 298 bp, Homo sapiens
gctgtgggcctctgcacatgcgttcaggcagccgagagagagaaggcgacagcaagaggaaccggagggagatcagaacagctggtgaagccggagttagtgttggagaggctgggcatgcaggcagggaccagatcaagcagacgcttggacattctgctgaagattttagagtttattcctagttaagagcactggagtcattgacgatgttacccagaggattaagatgagacctttggaaaatcacctggcgtcatatggcgaatgcatggcagggaacagagtggagagggga

SEQ ID NO: 128821 - DNA, 282 bp, Homo sapiens
gatcttccaatcataagtagtataatggcagctgtggacaaaacttcagacaagtgactaaggagacatctagcagctgttcagttttctccaaactctgtctgagaaaatacaatacccaatctatttccaattagcctttcttttttatttttcagcagaccccctgaagcccttgagaactgagattcctaaagttcaagttactgaggggctggagtgggaagggaaaatgtctaacaggggtagatagagggatgcaggaggtaggggcttggagag

SEQ ID NO: 128822 - DNA, 844 bp, Homo sapiens
gctagatgctttgaaagacaaaaatcaattaatataagacctaactcctaacaaaagatacggataatcacaagtcagatggctttgattcctaaattcatctcgggttgtaattaaaagacttttaaattagcactaaattattcaaatcaagtaattaatctggttttttagacttgaaattcaatcagcatttcctatgaaatttaaaattaaaaacttttttttttgaggtggagtcttgctctgtcacccagttggagtgcagtggcgtgatctcggctcactgcatgctcagcctcctgggttcacgccattctcctgcctcagcctcccaagtagctgggactacaaggcgcctgccaccacgcccagctaattttattttttgtatttttaatagagacagggtttcaccgtgttagccaagatggtctcgatctccttacttcgtgatccgcctgcctgggcctcccaaagtgctgggattacaggcatgagccactgcgcccagccaaaaacatttttaatagaaatttaaatataactaccagtaaaatgttgtatgactcagtttactactccatgtgataccactgagcagtgtttccagaaatgtgtcaccactggcaatacctgagataacattaggaagcatgagacatgatttcatgttcatggatatggcattaattagcattgaatcacataacgacaaagttatttcctcctaaacaacatttaatctttgtgattatctcaaggaggacctctcagtttggtgttgtctctaaatttctctaatttttcattttgccaaggtagagcagacccctgtaaaaag

SEQ ID NO: 128823 - DNA, 265 bp, Homo sapiens
cttggtcttactttttaagggaaataatttctagtgcttacatattatggaatactaggggcaatttaaagtcatgctgacagagtttatactgacatgcaacaatgcttaaaacatactaagcaaaaacaaaggcaagacaaaaacttggaaagatccactgtgttaagatgcttaacaaaaagggctctaaggaaacattctaaaatattagtagtaattttctctggatgctggaataataagtggtttttaaaactactta

SEQ ID NO: 128824 - DNA, 234 bp, Homo sapiens
ctgggctggggaagacgggctgggctggggaagagggagcatggccaaacaaaggtttggaaagctaaaggaaaagggaccagatcccctgggattatgagcagcaggagtaaagagcggcaagccatggctgctccacagaagagagggagggaggccagggcagagctcccagctgcctgttggatgcaccgagtggaggccccacccgcagtcattcactccttgaagcag

SEQ ID NO: 128825 - DNA, 340 bp, Homo sapiens
gtaagacatcaaaaatgaggacaagtgggtgagtagtatatgaaaattccctgtacaatttttacttttctatcaacctaaaattactccaaaattaaaagtttatttaaaaagacaacaataacaaaaaaaacacaatcatttagataatctctattatcttttccaaatcgccattttgtgacttaataagggtaacacataataacagtggctaatatttaatgggcacttatcacatgtcaggctctgttctaagggctttatatgtattaactcatttaatcctcacaacaagataagtaattttcttattattattttatggatgaggcaacag

SEQ ID NO: 128826 - DNA, 207 bp, Homo sapiens
attttaaactatatttttgacattatcaccgatgatagatttttgaaaactccttgacatctttagtatttcgtaaattatgggttttagcttctgcctctcattttgttagtggtattaattaatctttataatagccctttaccacatttcttgcagaaatttttttattaactttgatttcattcactcttaatacaaatttat

SEQ ID NO: 128827 - DNA, 205 bp, Homo sapiens
taacaacttgagcttatttgctaagtaaagtttttcatttatgctttatgctgcttgactcagaagactgaattgggaagttccttaaaattaaaagctctcataaatttcttcaagggtggttacaaaaaaattattgactggctaaactacaacagccaaaaggaaggtcaattgtcaatcttgcataaaagtttatttcttg

SEQ ID NO: 128828 - DNA, 391 bp, Homo sapiens
caccccccaacacccccccgcaaggaagacccctcattgcccaccaatgtcctctttctggcgtccctcacattcctggccgagaccctccgttcagtcacgccatgaggtcagggccacggatgccattgtctgctggaagccagtgcagcacttggagcttagaagatgcacacaactctttgttaaagaacaaagaaatgggagaaactttttaaaagaaaataaacagagagaaagagggtgagacgaagactgtggctgaggctttgttttcaggccgaaagcaggacactcagctcattctcaatgaaacttcaacatcgataattcaaatgtcttagaaattgtacattggaaggggaaataaaatgatttttcagctctttta

SEQ ID NO: 128829 - DNA, 619 bp, Homo sapiens
attcgtggctcatgcctgtaatctcagaactttgggagaccgaggcgggcagatcaccttaggtcggaagttcgagaccagcctgaccaacatggagaaaccccgtctctactgaaaatacaaaattagctgggtgtggtggcacatgcctgtaatcccagctactcaggaggctgaggcaggagaatcacttaaacacaggaggaggaggttgcagtgagccgagatcgcgccattgcactccagcctgggcaacaagagcaaaactctgtctcaaaaaacaaaacaaaataaaaaagaaagggtatttaacatctcaggcttgggcacaagtgatcgcaacactcaacctgcctgccataccataagcatgcattaaactttctattgcatttaacagtacttacattgtgcccttcccaaaagatagaaagaaatggattctcctaggaatggcttcaaatttgtcatatgtgaaaaaagaaaataaagtctgtaatttaaacattatatatacacacacacatgcatatctacttgctatatttaaaaatctagttagaaatgaaaatatgtcaatgaccctatcattttgaacaagtaaacataaaatggaata

SEQ ID NO: 128830 - DNA, 243 bp, Homo sapiens
ttcattgtgttttgctttttccaaagcttaaaagtttcaagccaagtgtttttctggagttattcaaatgcttgtgataattcttattgttttcttgggtgacaaaatctttcctgcccactactcttacaccaaggtttttctatctacaattaagaatataattatgaggccaggcacagtgcctcacacctataatcccagcattttgggaggccaaggcacaaggatcacttgagccca

SEQ ID NO: 128831 - DNA, 462 bp, Homo sapiens
gaaggaacacctttaggaaaggataactagaagccatcattttagcatatggtattttagaatatcccccacgtccataaccccagatgaacacggaggaactctcataccacggacagagaggacctactggctcaccggacaccagctgtcttggcctaagcccgactgtgagaaacacacgatctttcagaaaggatatgtacaggtgtgcatgtgtgcacagacaagtgtgtgccagagagggtggaagagagagggaatagtcagaaataggtcaaaggcaactgcaggttcataggttcaagcttatatttcctttctacattgtagaatcagactaacgagaaaggagggccataagttttggaacaagacagatttgtttttgatcacagctcaactgtttaattactttgttactttgaacaagttgactcccccattcccagcttaatcatc

SEQ ID NO: 128832 - DNA, 634 bp, Homo sapiens
gcagtgaagcccctgccccccaactcacacacagggagctgtggtcacagtcggaccacttggcagccatcataagacttgaaatggggggtttgaagccattgcttgtgaattagcatgtttttctctcttttgcctttgtgaaaaccaacttcctgtgcagccgcttgtgttttaaaaccctgaaaaaggggggccagctctcagcccttgtccaccgctggttcctaggaccgttatgaattaaagattacagccgttaaaaagagatcgtctttaaacaagcgcagttctctctcctcatgccccctgagtggagaagtttttgtgtatagcgagtccaaaacaaacagagatgttcttgagagatgtggggagcaggggccgagacagcaggagagcgagggcagcagagggacagtgggggagagccggggaactgtagttttgaattgttggcctcctgtctgcatgctcagagaagcagggccgcgtggagtgcccagcggaacctgctcatgctgatttgctgcgtcaccttgggaaaacgttggctttgctcctccgcagcacgcacacaggcacaggcacacacacgttcccatcccagctggtgcccgcgtgtgggtgttag

SEQ ID NO: 128833 - DNA, 175 bp, Homo sapiens
gtcctataatattccactgaggctgaaaatgctaagagactccacggttaaaaacaacctttctcaagttgcattaatgttcctaggctctaggttccttcaaatgagagaaacaaatatttcatttgttttcggattataatttccctcaactccgtgtgttatttgtttccta

SEQ ID NO: 128834 - DNA, 137 bp, Homo sapiens
attgcactccagcctgggtaagaagatctcaaaaaaagaaagtgtcatcatctactagattggaaatatcagatattcttgagtctttcttctccctcatatacagttagtcatccagttcttcaaaatctcgttga

SEQ ID NO: 128835 - DNA, 796 bp, Homo sapiens
atagctcttaaaaaatgaatataatgtcctaagtataacaggaaagagaaatataaggaaagtaatttgcaataaaatcatgctttttcttctcctatttctagtattggtggcacagattgtaccagactaacctactagcaggtaataaatattgtaagcctcttaggcaaaacagcatctcccagtattcagctcttgccatccctctgagctaagcctttctcccctgtggcacttagtactgagtgacattctggttttttaattgttggcttcctcctctgctaagaagctccatgagggaaaggaatgttttctgtttcattcagctctgtatcctcagcacccagaacagtgcctggactatagcagttgcccagttaagcagatgtaccttttacttcttgttctctgattcatcagcaggaagagcctatgaaaggtctcccttatcagcccatcactgagccagatattccctctggttagtctcttgcccttgttcctctctgctggatgagatgatgtagcagctgaagactctccacctataactgtatcgtgccacattcagatttttagaatgcccctcttgatctggccatatctacattaaatgctattttcttcaagcagtgagacaaagctgagagacgataggtttaaagattggttacaaattctgatgaagactggtccttgaagtctttgggctgttacatggccctttggaagcaataggtcatcactgtgaacaacttctgtaggtactggtttccatacgaagggaata

SEQ ID NO: 128836 - DNA, 116 bp, Homo sapiens
aaatattcacctgctcaacctctcaagttagttaatgattcctttaagtgaggtgcctagagctagggtcagtagagttggcttttgacaatcaccaagttaacatttgcagtttc

SEQ ID NO: 128837 - DNA, 347 bp, Homo sapiens
tcagtaggaacggtgacctggagaagatcaccataatccctacccctgaatggttggtgttggtagtggtgggttgttcagtgccttcattattctcagattcttaaagtatttgagaatattaaaaatgcggctgagctctgtggctcatgtctgtaatcccagcactttgggaggctgaagcggttggatcacgaggtcaggagttcaagagcagcctggccaacatggtgaaaccccatctctactaaaaatacaaaaattagctgggcgtggtggtggcgcgcctgtagtcccagctactcgggaggctaaggcaggagaattgcttgaaccaggaggcagag

SEQ ID NO: 128838 - DNA, 198 bp, Homo sapiens
cctttcattcatgtgttcaacaaaccttacagaggcccagtgataggccaggaagtgtgctgacactgcagacaggtcagtgagtggagcagatactgtaccctgacactgttcctctgtccccgcccttgctgagcacctgtcacactaaatgtcatcacacaccacttttatgttactcttcttcttaataacatt

SEQ ID NO: 128839 - DNA, 375 bp, Homo sapiens
ccaagtggtgtcacctatgtgtgtcctcagggttgtcacaatgcaattatccttgtaatgtgtttattagcatatgtgcctggccaccacttggtcctcaataaaatgcagttgtgaaggaagaacagacgtttatacatttggggctcaagaagtgggcctcagatagcttcaaaaccatcttcagctgggcacggtgtcttatgcctgtaatcccagaactatgggaggccgaggcaggtggatcacctgaggtcaggagttcaagaccaatctggccaacatagtgaaaccccatctctattaaaaatacaaaaattagctgggtatggtggcatgcacctgtaatcccagctacttgggaggctgaggcag

SEQ ID NO: 128840 - DNA, 523 bp, Homo sapiens
caggaagcaaagtctgtgaaatagtgacatgccgcttaggtaggcacagctacttaaaagtgccctgtaaggcttgaattgagcagttagaagacctgagtctgggtgagatttctgggggagtgattgtagagaagaaaggaatgaagaatgaagaaaacagaggtgggagaattagaaaactccttggaattcaaagaaagagaatccttcaaaaaggggatcatcagcttcagagaactgcagatagacaagatgaacatcactggacaatgtagattcactggaactcgaggttgaagatgattaaaccgaatggatgatataaaagtggaagcagtgggtggagaacagaagtttggcagagaaacgaaggagaggagcagggtagtgtacggatggaacaacttcaccaaggttttttgtttctagggcagaggaggctttttttttttttttctttagacagagtcttgccctgttgccacgctggagtgcagtggcagaatctcggctcactgca

SEQ ID NO: 128841 - DNA, 371 bp, Homo sapiens
gaaacgtcatttaaaaattggtctgtcttatgaagccacttaataaaatagtctttaaaataagaaaaattggctgggtgcggtggctcaaggctgtaatcccagcactttgggagggcgaggcaggcggatcgcctgaggtcaggagttcaagaccagcctggccaacatggtgaaaccccgtctctactaaaaataccaaaattagccaggcatggtggctcatgcctgtaatctcagctccttgggaggctgaggcaggagaattgcttgaacctgggaggcggaagttgcagtgagccgaaattgcgccactgcattccagcctgggcagcagagaaagactccatctaaaaaaaaagaaagaaaga

SEQ ID NO: 128842 - DNA, 426 bp, Homo sapiens
gtagctgggactacaggcacatgccaccacgcctggctaattttttgtatttttagtagagacagggtttcaccatgttagccaggatggtctcgatctcctatatcttataaactcattctagatcccatgtccagggaattccaagaactaagacattcagctcactctccttgctctgactgggattttttaaaaaatcaaatgctaaatatattgttagcatggctggcagcatctcgtatcgatccattagtgttatatcatgaatctttcattatactaacattttgtctttctgaaagactgtcaactatgatttcatcatcaaaatcaccatcagctgtagagctatgcaaatgagaattcatctgcatgcttttggcctaaatggaatttgatggagacctaattaaaatgagagaa

SEQ ID NO: 128843 - DNA, 700 bp, Homo sapiens
gtcctttatatgtaaagagagatggactttgctttagtaggactttctagaacatgcttatctgcatggtttggtggcgctctctcactttgtggacaagatgaaggtctggtgcctaagctggggtttctcaaggatggagttgttgaccatctgagaaaatgttttcctgtgcccacataccgtaggggagggctgccatttcaacagggctaacccacagccatcaacagtggcttctatcagctttttgtaactgttcctctgacggaaagctccagggcagctgcatcatttccttcctcttacatttgtgctcaaggctcaccctggtcaagaagcctggctgcatttcccagaggttcttttatcagccagtagaacctatgaccttgtaccctccgtgttgcccttgctgtcagtcggctcttgtttatccttccatcttttctttgtgaaatatcactcagagatttgtccataggagtgctgaaagagcttcctccatttatgtcttgactgcttcgtattccataaaaaaatagtttgtttaaccagtctcctagatagaggtttcctttatttgtaatcttttgctttcacaatgttgcattgaatgcttctgtattttcatcacgatgcgcacctgtcagtataggataaactcctagaggtggaactactgggtcaaaggggatgt

SEQ ID NO: 128844 - DNA, 228 bp, Homo sapiens
gtagatgcatgatgatctaagggctcaaagactgtgaggccacctgctcagtcttagggaagcatagactttctcaagtgtcaattgagcagcagtgctgggtcatggacagacatgtcagtgggagtcacagcgcctggtacccctcccagtccctcactaatgagttgactggctggctcaccctgggttcattacctggaatgtgcaactgctgggccctttcca

SEQ ID NO: 128845 - DNA, 757 bp, Homo sapiens
atgttaatgaaatcatacatttttttgtgtctggattccttggcacagcaaatttttctttttatgttcattcacgtatttgcagtagttcactcctttttattgctaattagtattggttgccaaaatttatcattatttattcattccccatttaatggacatttagttgcttctcattttttcacaaatataaatatatgaacattcttggatagattgccaaatgattttccaaagggttggtgccattttacattcgaacaagcaatgtatatggattcacttgctgtaaatctttgccaacatttggtatgctggcctctgtagccattctagtgctagttttctctcctagtcttaacttaggatttctgattacttatgttgagtatctttgcatgtgctcttggccaaccacatcttttgcaaagtatttaaatcttttgttcatctattcttattgagttacaggggttctttattttggagacaattcttttatcagatattgcttttaagactattttctcttcagtctgtggcttccctttctaatttctttgcctttgtgtgtgtgtgtctgtgtgtggtatttttttgtacagacaaaaaaaggtgttgtccaggctggtcttgaactcccaggctcaagtgaccctcctgcttcagcttcccaaagtgctgggattacagtcgtgagccactgcacctggtcccttgccagtttcttaacagtacctcttgagaagcagat

SEQ ID NO: 128846 - DNA, 436 bp, Homo sapiens
ttaacaatggagcaaagaggggtcacagggacaagataaaaataaacagaaagcaccggattgatgcaacaggtacatgtagtttgtcttgttgatgagtcactggtctgagaaatctgtttaggtttggcaggaagcccgtgaacaggctgcagcttaattgtccttccactgtggttgctcccattgtgagcttcaggctctttatttttaaaaagtctgggtgatcacaatcctcctggatgagatcatatggggactgtattgctgacccatccaaccagaatgcccttttacagttcctggctatcaaactcccactcatcctccagtgcagttcaagtgtctctctttatgggaagccattcccgttagcctggtcagaaataatgactctttattttgtgtcctgctctattaacatttgcaagtccct

SEQ ID NO: 128847 - DNA, 336 bp, Homo sapiens
aaggaaataagaactgaaagacacgtttttgggaaatgtcatctgagtagggattgatatcatcaagacaggtcaggagtcgtgacagagagaaagggaggtcctgagccatgagctaaaagcttcaagaaatggcagggagtgatgggaggattgaggctgatttttgcaccttctgttacttggctgagaccaaggcgcctcttcctggggaggtggctgagctctttctagcaggccctgaaatctccagaactttggtcccagctgcctaagcaccccagtccctgcccccgtggcagccattgtcagatgttcctgccagccctgagagct

SEQ ID NO: 128848 - DNA, 116 bp, Homo sapiens
ccggcatgacagactcggtctcagaaaagaaaacactacaaagacacaaagaaaatatacagactggatatggtagctcacccctataaccccagtgttatgggaggctgaggcaa

SEQ ID NO: 128849 - DNA, 600 bp, Homo sapiens
gctggtcttgaactcccaacctcaagtgatctgcctgccttggcctcccaaagtgctgggattacaggtgtgagccactgtgcatggccagattaccagatatttattgagtgcctgtattatatggcaatataaagtttttggtttttgccttcatggagcatagagtcaagggagtaatgcagacagagagctgaaaccatgtgatttctcctcaggtaggtatagattctctgaggatagagaccatttctctttttttcatggttctttatttgccccagaggaatgggcactttgggattccttcttgactggcaagatgattaacccgatgtttactgacaagccctccttgtggtagggcttagtactatgttctttatctaagtgttttctttacttttctttctttcttttttttttttttgggacaaagtctcgctctgtaggccaggctggagtgcagtggcatgatctcggctcaccgcaacctccgcctcctgggttcaagtgattctcctgcctcagcctcccgagtagctgggattacaggcactcaccacttcacccggctaattttttgtatttttagtagag

SEQ ID NO: 128850 - DNA, 417 bp, Homo sapiens
ttgggctctcaacacattttaattttcataaaaccctctttaagtaggtcatgtaacttctttttaacagtacctgaagccacccccactgaatggtagagatctcctggggttccagagcatctgagttcatcaagggtgatggtctctcccagctggctgttaaccagcactctttttctctcctctccatcaactgggacatattcctagagcagagaaatctatttttaagtgcgatgagatatttattgactggcttcattgtctcaaaatacttgccttagcctttccttatgcctgggcaaattctgacaccaaatggttgttttctgcagctaggccttagcatacatcctgcaatgactttcttacaaaaagtggtaaaaacaacttaaagcacagctgtactaagag

SEQ ID NO: 128851 - DNA, 398 bp, Homo sapiens
aaatcaacttatgcctcatgtctctacccttctcagagcccttctgaagctccccagtatcctcaggagaaaagccaagggcgttggtgtggttcaccaggccctgtgaagctcctgcctccctccccttctcacttaccctccaaatctcagggcctttgcacaggcagttcctccttcccagaatgctctcttctcttccctcctctcctttctcctgagtcatgcccgctcatccttccagtctcagctcagacatcacttctggagaccctctttcctgagcccctacatgagctcaggtgtcccccatgcccattttctctcctggtgtcctgtacttttgcaccagagcacttaaaaccatttgtaattatcctattaacttgtgtgttcag

SEQ ID NO: 128852 - DNA, 453 bp, Homo sapiens
gatggatcctccacggacgacgacgtctgtcgagagtacaatgaagcctagttgagccgcgtggatttatgctcagaccgcaccgtcctcaaagtcgttctagacttgtaaaacccctagtgatctttccttttcatcttatctgaagagttgctaatgtttctttaagatgactgtgtcctctttttcttcatacaatgacttgtcacttcagtcctgaacaaatattgtctgatatattagcatatcagtggcttagaaaaatataaaggtaaaatgtactagagctgaacaatatagatcccctagtcactcacttttaattacatttggatggattattcattgccatggaaactctctacccttaccaaaatttttaggcaaggatctcctccaagtttcacagttctgtgtcttaaagacatttcttgttctatttatgagtttaga

SEQ ID NO: 128853 - DNA, 582 bp, Homo sapiens
ggatgaataaactgttatctgacattgctggacagggtgctagaaataaatgcagtttttctccttgagattcactgacttgggttttcatttgttggggtggggggtgtggattaaagagcagaaagctgaaggcagagagggtatgatggtgtaacctgcaggttaagaggatacagatattttaaaagatggtactttgggacaaagtgcttttccattgtttcaggggtcagactgatcctcagcaaagctgacagagcccatccttagtggatgccactgtaatattaacactcatttggagcagatgtgactaaaagcatgaaacattgaacaaacagctgccacagatccagtgccattgcataagcgcttatgttctattaatgcagtggattgctgaggccagtagggcagacgttattccccacagttctttagcagatgggccaaacacaatggctcttcagagaagtgctgccctgttgaagcaattcctccatcttatgtaagattctaatgcaaaatcatctacccattaaaaaagatgtattaaggtcagattatgctttgtcaaga

SEQ ID NO: 128854 - DNA, 523 bp, Homo sapiens
ttttagagactgctgagctgaagttttgctgaattctcaaaacactaaactgcctgtgttccctctcggctttcattttctaattggaaccaggcacagtattgtaacagagaactgcaattaattttctaaaatagtggcaacttgcacagtataataactttggttgtaaccaagtgaaagcataataacaaaaatacaaaattactgatgaaaccagaaagagtcatataccacattcttcctttagtttgtatctcagtaagtgctgtgttacttaggaataggggcagaagcctgcaactgggcagggaggttcagggacatgaggacgaagctagggcattttgagctagaaagcaagaataaggattagtgctttcaacactggaattaacatggaccacccccccacctcccaataagtggggattgtaggcacataagtggtttagtaagaagtggaaaaggtttttctgtggagttcgagttccatcggctcccatccgggctatcctgccac

SEQ ID NO: 128855 - DNA, 490 bp, Homo sapiens
gtggggaaggttcagaggggactgagcctgagcagtaggagggactaaagcagttctgtgtggcccgtgtcccaaggagaaggggagagggaagatggggccagagggtcggcaggggcatgtgctgggacctggtgggcaatggtgaggagcctgtgttttcttctaggggtgagcaaagggttgggcgggggcatgaggacctgattctgctttttaatctgccttcagctgctgcattgagaatagatcaggggcgggcagagtagcagcagggagacctgtgaggaggctgccacagatgccagtgcaagggctgaggggcctgtagctcgtggttgccatggcgatagagagctgtgggtggatgccaggaatgtacaggcgggtcttgctggaatgggcttcttcaggggcagggctgctggctgtgtgttcttcaaggcaggtggacctgtgactgcagcccccacaggtggagaggtgggtg

SEQ ID NO: 128856 - DNA, 256 bp, Homo sapiens
ccaccacaaacaatggaggccagaagacatcaggatagcattttcaaaatgctgaagaaaaaaaaactgtcaaataagaattctatagccagcaaaactatccttcaaaaatcaaggtggagaagggcacagtaactcatgcctgtaatcccagcactttgagaagcccaggtacgaagataacttgaggccaggagtttgagaccagcctgggcaacacagcgagatccccatcactaaagaaaaattttaaatt

SEQ ID NO: 128857 - DNA, 279 bp, Homo sapiens
tgaagaggattccgcagaggagactgggttgaggagcttgggatggggaggttaccctggattatccaggggggccagtgtcatcacaggggtccctaccagggacagagggaggtgggagagtctgagtctgaggaggagatgtgcggaggcagagagccgccttgcaattcccggctttaagatggaggaaggagccaccagccaaggaatgcaggcagccttggagaacgggcaaggatactccttctcctctggaggctccagaaggagccagcc

SEQ ID NO: 128858 - DNA, 462 bp, Homo sapiens
ttggttattttatcaaaagaacttccgggccgggtgcagtggctcacgcctgtaatctcagcacattgggaggctgaggcgggtggatcatgagctcaggagtttgcggccagcctggccaataatgaaaccctgtctctactaaaaatacaaaaattagctgtgcgtggtggcgcgcacctgtagtctcagttactcgggaagctgaggcagaagaatcacttgaacccaggagacggaggttgtggtgagctgagatcacaccactacactccagcctgggtgacggagcaagactctgtctcaaaaaaaagaagttctctgtcctgtctgagatgatcggcagcattgtttatccctgtagccctggtactctttattgatagtagagattttactccaattaggtactttttaaaggtaatttctatgaaaatctctataaaaatgcttattaaaaaa

SEQ ID NO: 128859 - DNA, 519 bp, Homo sapiens
tgagggcgagtctagagaataccccgcggcccacagacagtgggcggacagagcatcaaaaactgactctttcacagctctgcaggccagaagtcagaaatcaaggcatgagcatgactggctatttctggaggctctgaggggccctggttccatgcctgtctcctagaaccttgtggttcccagcaatccttaccgttcctgagcttggaaggctacattgctataatctctgcctgtgtctacacgtgatgacattctcccaggatgtctccatgtcaacagtctctctcagctaggtcttataaagatgcctctctttgaatttagggcccaacctaaatccaggatgggcccatctccagatccctaatggattatatctgccaaggacctttttctacataaggtcccattcacaagttccagggagtaggttgtgaacagatctttctggaggacacaattcaacccaccacagcgagtgtttgcatttccatattctgcactgggaggctg

SEQ ID NO: 128860 - DNA, 610 bp, Homo sapiens
ttgaaaaaaattcctattactttcttgcttttttaaacagaagatagggcatagtacttaacttttttggcaacttgtttcattgttatgtataccagttgttactctggactgtaaatagaaatacctctatagactactgaaaattgtagtagttttgtacccaaataactagcccctgagttttaataatttcctctcccttttcttactgttcagctgtcagctttcacattaagctactgtcattatgcttgtccctcataacgtctcattattgccatctccaccactccctcttctcatttgctctcctaaactgcttccaacatggaaagcagatcatcaaactcattagagctgtataaagtgaatagattacaagtgagggcgggaggcattaaatgtgcagttccgtagtgttaagtacattcacactgttgtgcaaccaaccaatctccagaacgcttttcattttgcaaaactgatgacatgctctcttttgattcttaacaatttccttttttttctcagccgttctctcagttattgcaatgactagacaaggacctttgaatgtgtcgccataatgcagtaaaagtagtcaagt

SEQ ID NO: 128861 - DNA, 372 bp, Homo sapiens
cttttgtagaactgactttcagtgaactggttttcttggaatttgacagagagccattttcaagtgaacactggtctttaaaagtgtttcttttagtgttggcaagttcaaaaaaatttccacctacacacacagaggaaaaggccatgtgaagacagagtagagaatgattcgaagatgctagccttgaagactagagcgacgcagccgcaacacaagcgatgccagcacccaccagaggttgggagaggcaaggaatggattctcccctacagcctctggagggagcacagccctgccaacatggcccagtgatactgatttcagatttctggcctccagcactgtcagataataaatttccattgtttt

SEQ ID NO: 128862 - DNA, 247 bp, Homo sapiens
tttatcagagccccagtttttaaaatgtttaatagccagatgtgctgtttgccaggcttagaagttggtacttctgtgaatgaaaaggtgtgactgagtcacataaactggtattcagctagccagtcatcagtttattccatattcaagggaaaaccaaggactgtttttcctctttatactttgaagatgatggcatttaaaattcaagtaattggggctgggtgtggtggcccacatgtgaaat

SEQ ID NO: 128863 - DNA, 757 bp, Homo sapiens
aatggcccaggttccattcacagtcctcttctctccgttaccaacactggtgactcccaaatttctaattcaagcctggacttctgccctaaactcgacaactgtattcaacatctccacttggatgcgtaatagacatctcaaacttcactacccaaaacttcattcttcacctttaccacgcctcccaaaggcttcatccctacgtttcccatattgcagttgctggcacctccaaatcttccagttgcttaggccaaaaaccttataatcatccatgatctcacacgcttaccctctacatccaatcagcaggttgtactggctctaccttaaataaatacccagaatccaaccacctcttgccatctccattccttccacatgattcaggttaccatcggctctcacctcgattattctaagagcctcctaactggtctccctctctcacccagtccctctctatacctaacagagaagctagtaatactttttctttgtaacttttaagttcaagggtacaagtgcaggttacataggtaaacttctatcttgggggtttgttgtacagattatttcatcacctaggtattaaactggtaagaacagatactacacttgatcttagccaaaagacagagacgcaatcactcaggtattaagcaatcacccaggtaatcactaggtattaaacctagtacccattagttactgttcctgagctctccctcctcctacttcttccaccttctga

SEQ ID NO: 128864 - DNA, 333 bp, Homo sapiens
actgctggctggctgtgggctgggcagctgacttcctcttgctggaatgagtctggccatccctaaacagggggactttggtctgattcagtcattcagtcaacaaatatttcccaaaagcctagtaagtgcctggtgtgtgtactggagatacagcagtgaatgacacaaagtcactctcctggtggatagcaaaaataagcaaacatagcaaaatagaggcctaggctggggaaaacagtgggggtgtgccaacaatcacttttataaccattccatgattttgcttgggtaatcccttttaatggtgaacttcaggtcacaacagtaact

SEQ ID NO: 128865 - DNA, 708 bp, Homo sapiens
ccacacggccctcctgcattccacacacctgctcagcaggacagcttttagctcttcaagaagctcccaagtcttccagagtgagttatcattcagatcagaccatcccaaaggtaccaccgaattcagtgggaacaacttcatcatgtaaaacacagtcacaagcaaatagaaatttggacttttttcaaataggtatgaaggaggcagtaattattagatatcgatagtgatgtgactttgaaataaaaattttctgcttctcacagtctgttcctgctgctacaacaaaataccttaccctggatgatttataaacaacagaaatttattgctcacagttctggaggctgagaggtccaggattaaggcaccagcagattctgtgtctggcaagcgtgtgttgctcatagatggagccttctgtgtcctcacatgagggaaggggcaaggcacctctcttcagcctcccgttctcatgacttaatcacccctaaaggccctatctcttaatactatcacattggggtttagtttccaacatatgaatttgggccagggtgagggaaacaccattaatactttttctagctgctagattcattttaaaactctcctgagtccgggcacggtggctcatgcctgtaatcccagcattttgggaggccgaggcaggcggatcacgaggtcaggcgttcgagaccagcc

SEQ ID NO: 128866 - DNA, 800 bp, Homo sapiens
gcattgataggtttttttttaaataacaactagaccaagagaaagggagagtagtgataaatgtccatgttttcgagttgaaaagtaacaatcagtgtattacaacagatggatttgatgtcaaattacaaatgctgagaacgttatatgtaactgacttgccagagtaattatacaaggcaaagaaaggaaaggcatctaaataggaagggaaggggtgagattgtctgtgttttagactccacaaaaaacccattacagctgataaacactatattcaataaagttgagagttacaaaattaacattggcttctatacaccaatgacaaactgttatctgaaaaataaggtaattccatttataatagcaacaaaacaaatatataagtaaatcaaagagcaaggagtaattttaatgaaggatgtgaacgatttgtatactgaaaattatagcacattgatgaaagaaattgaaagtgacaaatagaaaaagtcctatatcaattgaaaaaattaatattgtcaaaatttcaatgctactcaaagcattctacagattaaatgcaaccgctgtcaaattccaatgtcattcttcacagaaatagaaaaattagtcctaaaatctgaatggaaccacaaaagatgctgaaaaacgaaagcaatctttagcaaaaagaacaaacctggaggcatcagactacctaatctttgacaaagcaaacaagaaaatgggaaaggacaccctattcaacatatgctgctggtataattggcaagccacatgcagaaaaatgaagc

SEQ ID NO: 128867 - DNA, 507 bp, Homo sapiens
cttcgacggtgttctgtataatgtggggcatcctttttcattcagaaactagagactgcaattataaaactagcaactaacactcattcacaatgactttatcacgtgactggtgaacaacaattaaacctaggctgctttatcttccataaagttattctaccctaatttagagaaaataattaatagggctatgctttgttttcctcaatcattttcctaaattaatataaagagggtgacagttatgctatatataggcagattgataaatgcagagcaatagattggtaggtagatgatataaatatggccatcgttaaaacatactatttaatagaatgtttggttttgccaaatgaagcaatgcatatgaaagtattcattcatatcttattttgttgtcatttctattctgttcttgtgttttgtttaattaatacagtaaaatacagtgttccaattgaacaatacttcagatgctaaacaattatttgtatttgtgta

SEQ ID NO: 128868 - DNA, 372 bp, Homo sapiens
cacaaattaccaaaagtaactccaaaggaaacagaaaatgtgaatagacctataacaagtaaagagaatgaatctgtaattggtaaactttctacaaagaaaagcccagagccagatggcttccctggtgaattctaccaaacatttaaagaataattagcaccaaccctttcaaaatcttccaaaaagtggaacaggagacaacacttctaaatgcattccataaggccaataatatcattataccaaacttagaaagatagatcacaacaaaaaaataccttcagataaaaatcccttatgaatgtggatgtaaataagaactacaatgagatacaactttatacccactaagatggctataattttttt

SEQ ID NO: 128869 - DNA, 452 bp, Homo sapiens
gatctatagagctacctgctgttgtgattgtgcgtgacgggtgtgatctgctgtggacggcattagatttgccgtgacaggctgtggataggatgtggatttgccatggacaggcatgtggataggcatgtggatgttgccgtggacaggcatgtggataggcctgttgatgttgccgtggacagggatgtggattctgccatggacaggagtgtggatcatgctgtcgtggacagggatgtggatgatgctgccgtgagtaggggtgtagatactgccatggactggggtgtggatactgccatggacacgggtgttggataatgctgcacaggctacgggttgtggatgatgttcccatggaccggggtgtggatactgctgtggacaggggtgtggctgatgctgccgcggacagggggtggatgctgctgtagataggggtatggctc

SEQ ID NO: 128870 - DNA, 215 bp, Homo sapiens
aagaaaggcagcatgggacagtaggaacaggcgtttttttccttgtggtcacttttcttccaagtttaagggctctcggctcctcactggaggaaaaattctcaagtcagaactgcaaaccaggaacaaaggttgttctcatattcaagaactcagcaagggtaattatggttgacactaaagcaggcaagattctagttgggcacaatgaagat

SEQ ID NO: 128871 - DNA, 157 bp, Homo sapiens
aagtcctttaagaatttaaatgtgaagatagaggtcatacatgatatacattaagatgaaagtaattaagagctagcattctctggggacctgctaagtactaggggttgggccaagtgttttacaaacattatcactcgaatccccacaacccttg

SEQ ID NO: 128872 - DNA, 715 bp, Homo sapiens
tgataaattttgtatcctatattcataaagaatagtgatctttagttttcttttcttgcaaaggtcttttttaggttttggtatcagggcaatgctggccattttagttcaggagtgtttccttattttctcttttctgatagagtttatgtagaattagacacacaaatgctattattccttctttaagcagtggtaaaatttattagtgaagctatttgtacctggaaattttaataagaccattaaataaaggtaggcaaacaaccaagaatataacaggtaggcaaacaaccaagaatataatgagataaagacaggagtaaaaagcgtcagatagaaagtgaatgaattggaagagaggcaaagcaaatctaacatttgtaaaactgaagaagaggaagagggagggaaggagaagaagaagacaatgaagatgaagaagatgatactgaggaagaaggaggaggaggaagcaaaggaggagaaagagaagaagatttactaccacccatggaccggaactaatattaaaactatatttcaagaaagaagaataaatgaaagcatatttgaagaagaagaaaaataaaacaatgaaacaggtctaatacttaaaactatatttcaagaaaactttctggaaataagagaaaaccttaatctaaatattgaaatggcccatgatatgcctggaacaatggaatggaataat

SEQ ID NO: 128873 - DNA, 198 bp, Homo sapiens
tatatgccaaacaatgtgttggcctttagagaaattatagtattacatggagattcctgagatgtgctgtcttttgcagtccataaggaccataaggaaagagccgggagtagagggcggtgaaatgggccctagggaaagaagagcagttagtgtaaaaactgggagaatctctggggaggtataagcagttcagat

SEQ ID NO: 128874 - DNA, 155 bp, Homo sapiens
cgcatgggccagcgtgtactaattcctcatggtcaactgtgttgtccccactgtccccaccggctgtactcaagggctctgtctcacctgaaggcaccgcagcgactccttgggccggtggtgtcaaacctttacccctgccccccagagagccg

SEQ ID NO: 128875 - DNA, 794 bp, Homo sapiens
gaaaccagcctgggcaacatggcgagactctgtctcttaaaaaaaaaaaaagctctacatttctgttaccaggaaggaggcacctaaaggtctgttttttgttttttgggttttttttagggctgtattttaaaagtatctcttgagtgtcagtgaaaatatgtgaactcagtactacctgaactctgatttggggtttgaggaattggtacttcaggagttaaattaagccatggcatctgagacaggctcacgttgaaactgtgctttgtcggtaatctgtccatacaattctagtgtgattggcatcaaaggtaaaccctgatagaaggagtaagacagtatgtgccaacatacgatgtcaggaacttgttggggctcagaaaatgatactccaaaatatggttctttgacaaactaaggaagcagcctcaagttctatgccaaagcacaggatgaggctgttccttgaagttcctttatctgcctagaaaccagacccaccaaaaggaatacaattgcctttgatcccctcctcaaaatttcattaaccagagaagcctgaaacttgtatgacagaggaaaagactaaaaattaaatatcacacctagagagctcagaggaactttgcccagactattgtctgttctcagatcccattcagtttccaaagagaattatttactaaccattgtctgtgtactgggcccattcattcttcctaaaaatcatttactgcccttcaaaatggcgtcatttccctcatgtccccttcccctgtgaagaagggtat

SEQ ID NO: 128876 - DNA, 348 bp, Homo sapiens
tacagcgagtcagtttccattcagggctctgagttgagttgaaatttttctcaactaaattgcatagatttattatttcttatgagcatcatgacattttacaaatgtagctggaaagtccattttaaatgacatggagtcaacccctcagttgcagaggtatctcaactcgggtaagagagtgccccggagggagatgagtagcaagcctcagtaatgggatgaggcaggaaacgcaaccatccccgagtgctccccacgatgagagaagggtcctcttggcacctagaacagccttcggccaggtcagctgggtgagggagacacacactgagatggctggggttc

SEQ ID NO: 128877 - DNA, 325 bp, Homo sapiens
acaatccttactttactgcagagaaagatataatactagacgtcttcaagttcagaggtacaatacaatgattcaggaaatatttccttaacattgggtagccttaaatattgtaatggaacaacaagagcacatataagtttgtaattgaatgagaagttattgccatgtaattgactaacaggtgtatgttatggtaatgagtttgaatcatattcagttgaattataaaagtcagcactagtctcagaaaccagtctagtgatgttacagtgcagaagacacctcctttcctaccatacttacattgatacatatggcctca

SEQ ID NO: 128878 - DNA, 720 bp, Homo sapiens
agttaattaagaccacattatttacttgtgtacacgtgaagcctatgggaccaataattaatttcatctcagaaaggcaaaacagatttaaataagagaaagagaaaagaggaaagagaaagaaaaagcctggattgttttaaatagcaaacagcttccattttttattgtttgagatagtaaactactggttagcaggcccctctcagaaaggccagcccatgctctgccctggagagaatggatgtgtcacatacagattctctaggagagctgggcatctaactgtggtggatacatgacaggctttctctctactgttgtcatcaggtttctgtgttagtgtttatatttcattgtaccaggaatacatcatcaaccttatcaatatccctcaggatagaattataaatccttactgaaagattatgggatctaataaatggagagatataaaatgttcatgaatgggaagtcttaatgtcatgaggatgccaatttccccacaaattaatccacatatctagcataaccagaatgattttgaagaagaaaaggatgagtgttgctctatttgttacaaagctataagaattaaaacagtgtgatattagaacgtagatagacaaatagaacaacatagataactaaagaacctataaatagacacatataaaaaagaacttggtatatcacagatgtgctgttagagataattgg

SEQ ID NO: 128879 - DNA, 444 bp, Homo sapiens
ggttagattggtggggggaggcttgcttgggagataggggaacattgctccaaggaatcattcctaacccttgttagaactctgtgtcttcctggagctccaccatggttcctgagagaaggagctaaggagcatcccctagctgagggctttctactctctgacagacaactttcttctttagtcttatgacttgggcttgtagaaggcacttgaggtcattaaagtgaacccaaaacaaccatattctgcttcctctgcttgaagtcttgatctaggcaccttggcacctacagcagggagtgtccccccaaatgatgcccttggcacaaaaggcacgactttagctatgaacaatttcgcttctccagatttctcagatgtaaacacttttcagtccctccccctaagtcctattgtcattgtgccccatgagagtagaaa

SEQ ID NO: 128880 - DNA, 222 bp, Homo sapiens
ccagattccttagtgtggttcttcatggtttgatcttgtgtgtgtctctctgagggatgacagacgataaacaaaataagctacataaggataaaaccctttctgtttttggtactctctccagtgcctggcatttaatagatataaataggtggctgctctgtgctacccatctttttttttttttttttttttttttttttttttttttttttgacgcgg

SEQ ID NO: 128881 - DNA, 761 bp, Homo sapiens
tggtcccaatctcctgacctcgtgatccgcctgcctcgggctcccagtgtgttgggattacaggcgtgagccaccgcgcctggcctatgtacaacatttaacctctaagccccacccccgaattccttgagcaatgactcatcttgtttctctgggcaccttggcttcatgagtcagtctcagatttgggtagagacgtagtcatttaaatcctctcctaggacagtctttgatagccaaaacttccctgtcaattcctgacacccagaaattaacttctagttaaaaatggctcttaaaacaccctgaccatgtgttcttctctggcagccagtgcagccctgcacacttaactgtgccaagagagtgtcagcatcagtgaaaacctcccaggcctgcgggagctcagggcagggctgctttgcacatagccagtttatatgcttagtgactccccgtgaacttggctgaatgccagagattccaaatttatttgattattcaggagaacagccatggtatgagtctgtattttctttcaatacagtgaggagtgttaaaatacttttcctgagacccttctattgaggctgtaaccccagattgtttatatcaccgcctgttatgaaattcctgtatctatgcttcagccagactctcctcctgccacaaaatgcctcttatctgggccttgcccctgccctgtgtttagacagtgctgcccacctatctaaatccactcagactctttcatactatcc

SEQ ID NO: 128882 - DNA, 389 bp, Homo sapiens
  misc_feature (347)..(347): n is a, c, g, or t
cgtgagccaccatgcccggccccactctgtatttttttgagatacaatttaaaagttacaagcttataatgctgccacctatttcaactcataattttgatgttctacaggataaaaaggataagactatgaataaagaaatgaaatctttttggcatcatctccttgtggtaaacaacacctcattttttttttaactatcatatctgcccctcttgcaaaaagatctaaagcaacttactaagatacctacaagataaaattataaaaaataagtatttgagaagtcttggcaaaaaagaatctaagaggaaaacaattttaagattcacagtgtcacaaatacnatgtaccaaatcaattaaggaactagaaaaagagataagaat

SEQ ID NO: 128883 - DNA, 527 bp, Homo sapiens
gacactagggctccctgcctgcctgcccacacctgcaaatgtctggtgaaaaacaatgttagtatgccccagactgcttcctgggaaacaggaaggagtggaacaaaagttaacctcctagagtacctttcagcaggctcaggcagtacttcagtgtgaggttccctgtgcaattcactcactcagaatttcaaagttctttctgtatcaactcaacagatacaccattttttttctattttagtcgctgccataataactattttagttacccagtgagagaatatatattagtgaaacaaataaaagtattgacttttctgtatcagttgaatgatctctctctgtgtgtgtgtgtgtgcatgcacgcgtgtgtgtgtaagagagagaaagggagagagaaattgatgccacactttgactcatattggtagctatggcttttctctgtgatactctaaatatttgtcttcaatgtgttgtaattcctgtggactttcatacaatatttttgatgcccagtatgt

SEQ ID NO: 128884 - DNA, 569 bp, Homo sapiens
catggtcttccagcactttgggaggccgggatgggtggatcaccagaggacagcagtttgagaccagcctggccaacatgtcgaaaccccatctctactaaaaatacaaaaattagccagtaatcccagctactcgggaggctgaggcatgaggattgcttgaacctgggaggcggaggttgcgatgagccaagatcgtgtcactgcactccagcctgggcaacagaaaaagactctgtctcaataaataaataaataaataaataaataaataaataaataaaataaaataaaaaagataatgactacatcttggaactgtaatacagagtgtaaatatgtcatgactatttatctgcaaaaaattctattttcatataattttctgctctctgctattattatgcccaggatttgctagttaggtgtttcctaatatttacactcaagttcctatttttagcctgatatgacatcataaatgcagatggttaaacatttttaaaaacagtatgatgaaattttaatcaaagcatcagaaatttagtaatctgatgtgaaaaccatca

SEQ ID NO: 128885 - DNA, 276 bp, Homo sapiens
gaatgccatctatactgcaagtgatacagagattgtactgatcactttctacactcaaaagtatataatcaggtagagttaataaaataaaaacaaatctgaaatgtaaaacaaaaaaataccctgggaagttacatagcaaaggaggaaggaattacagccctggtaatgtgggacaacacagtgtgcaaattatttaacacaaagcctaaacaagacacattattattatagcatgttttagggaaataattcttgttgttgaactgcaagtac

SEQ ID NO: 128886 - DNA, 410 bp, Homo sapiens
gttgggtatgacatataatcacttttacagtgtgaactggaataatctaggagagcagtaaaaggaagtgaaatgccagtggagggctgagtttgcatacagttgtccctctttatctgtggcaaatgcattccatgttgtgttaattcaatagctattaataagatagaacaaatataacaatatactataataaaagttatatgaattggtctctctttctcagaatatctcattgtaggtaatatttccagactgtagttgactgtggggtaactgaaaccttgaaaagcaaaactgcagacaagagagatctactgtttgtgaagggaattcatggggtggagatgggggagacagaatttgtgatgaggcatggaaaggtgggaatggcatgccatacattatag

SEQ ID NO: 128887 - DNA, 622 bp, Homo sapiens
ctatagctgccatagatagtgattcctctgatggatctggatgaagtaaataaaaaacctgatggaaatgattccccattctagatatcattaagaatgttcatgcttcatgggatgaggtcaaaatatcaacatgaacgcaagtttagaagaactggattccaaccctcatgcatgacttcaaggggttcaacacatcagtggaggaagtagctgcagacgggatggcaacaacaagagaaccagaattagaagtggagcctgcagatgtgactgaattgctgcaatctcatgatcaaaattgaacaaatgaagagctgcttcttatggatgagcttgagatagaatctacttctggtaaacacattgggaacattgttgaaatgacaaggatttcgaatattaatattacaaaaacttagttgataaagaccagtaggaagtctaaaatgtagcctgggccttttagactcgtgatggcatgcaaaatacgctcaacccacgaagccctctagcttagaacagagcaattcatcaaacagccaaacaatcctggggtgctacacccgaggtgcaatttggccactgctctcttcgcatgtccagcccatctcttccaatt

SEQ ID NO: 128888 - DNA, 357 bp, Homo sapiens
cattgtttgaaataaaataagccaagcacagaaagacacatatcgtatgttctcactcacatgtgggagctaaaaaaggtggatctcgtgaaaatagaggtagattagtggttaccaaaggccaggaaggaaagggggaaggagtggaggatgaaagtggaaaaaaaagaatatacgtgtttttattaccactgaaatgtatgctttgaaactgtaaagatggcaaattatacatgaatattttaccttcataaaaaataaatgtaaaaagtaaaatacaaaactataaaacatgtaaaagatagcataagagaaaatccagatgactttgggctgagcaatgactttttaaatgca

SEQ ID NO: 128889 - DNA, 383 bp, Homo sapiens
attgacaagaatgcagggcctgtctcagttaagtgatgtcatcagttctcattagcctcttcatagtctcttgaaaagcataaagaaaattacctctggcacagaaaaggcttttaaaccaaccttttcacagtatgtctcaaactgaacatccacttaagtgtataattacaaaaaagaaagggtatgctagatatgttgacacaggatctctaaatgtagctgaaggagttactattatcttcaaaggcaaaacatctttcttaggcttacaagacaaactatgtagtggagtagacaggaaagcaaatcactaagagattatctccctctaagtcttctttctctttttcttttcttttttctttctcttctttttcttt

SEQ ID NO: 128890 - DNA, 242 bp, Homo sapiens
gcctgctgctcagggattgaagccactggtcacctgtcagggcaagcagaatacactccaacaacaagttcacacaaaaccagggtggccttgagatcagaatatggcagcctgcattgagggccactggacgccactaccacacatagtcggcagcaaggaagccacatgtccaggggacggagacagacacggccactcaatctttttttttttttgagacagggtcttgctctgttacc

SEQ ID NO: 128891 - DNA, 529 bp, Homo sapiens
aggctatgaccctttcaaaaggaaacacagatgtgaatctgggattcaaacctaggtctgactataaagctcatgcatgtacttttaaccaagccttccaggaggcagcagagggagtgaaatcaataatgccaaataaatgtaagttatcatcatcattccttagggcgaagtacaggaaggagatgcatctagagggactctgtacgatctgctggacctgggactcatggggaaaagggtgagaagattggcagtggtgaagagaagacatgaaatggagaaatgcaatcagatatttctcagaggacctgtgcccagatatagcaggttccaatggatgaaagaatttcctgatggggcaaactgcattatcccccaagcagttttgaggactagacctacagcagcctaagttctgaaactcattctcactaaattggacaataactgcatcgatctgtgattttatgagaaaaacaaggtgctagaagcttaaaacataggtagactgataaaagcaatactc

SEQ ID NO: 128892 - DNA, 493 bp, Homo sapiens
ttgtctagtgtctagaggtcccagactcggcaccgttcatgtgttgtatgcttccatgtatatgaaatgtcccaaagagccaaatctatagacagaaagattagcgttgcttaggctgggagggctggaatgggggaaggtgatagctaaaaggtatacggttctttttgggttgggattacaggcgtgagccaccatgctgggctattttgactttttaatagccattctgacttgaatgagatggtatctcactatggttttgatttgcacttctctaatgatcggcgatattaagctttttttcatatgcttgttggctgcatatatgtcttcttttgaaaactgtctgttcttgctctttgactactttttgttttttcctatacatttgttttagttccttataggtgctggatattagatctttgtcagatgcatagtttacaaatattttctcccattctgtaggctgtctgcttactctgttgat

SEQ ID NO: 128893 - DNA, 346 bp, Homo sapiens
agttcttgggcaatatccactatcttctaatttggggtataagaaatcaaatagaatggtaaattttattatgtctgcagaattggattaacaaaagcatagtttagaccatgtagttcttatgctcctgaaattctaacttattctttatcttaaaaaacttaagaaataaagcaaacagttttctcattggagcctttcaccaatgtcaaattaagcatcagagaatttgatagggttgaacactcctgctcccattttcactctgttagctgagtattttctccccacatttccacttctaagatcatatctttctgattgccttcttgagccatcaagagca

SEQ ID NO: 128894 - DNA, 640 bp, Homo sapiens
ggaccgggaaagctgagacactgctgggctggggccgccatagccctgggaacggagtatattctagtgaaaggagaccaggtgactggcatagtgacagctaaatctggagatatattcagagttgatgttggagggagtgagccagtttctttgtcttacttggcatttgaaggtgcaactaaaagaaacagaccaaatgtgcaggttggagatctcatctatggccaatttgtggttgctaataaagacatggaaccagagatggtctgtattgacagctatggatgagccaatggaaggaatgtcattggacaggatggtctgctttttaaagtgactgggcttcattagaaagctgttagctccagatcatgaaatcaaacaggaagtgggaaaactctatccactgaagatagtatttggaatgaatggaagagtatgggttaagggaaaaaccgtccagcagactttaattttggcaaatgttttagaagcttgtgaacacatgacattagatcaaagaaaacaaatctccagattggcagaaagttgatataggtggacttttttaatgggtccgttgagccaagaaaccatgggtttcctggggaaaacttttttcaggtgaacttctccc

SEQ ID NO: 128895 - DNA, 339 bp, Homo sapiens
agccccctccatcttcttagaagggcgctaatcccatcatgggagcctcaccttcatgacctcgtctatacctaattacttcccaaaggccccacttcccaatgcattgaaggttagggattcaatatacaaattttaggcaggtttcggggatgcagaaattcagcccatagcatccaacagctagacaaagaagagatattggttctttggttttccctagaagaaagaaatgtcttctaccatcccccagctgattttatttcttgtcccactgcccagtcctcaggcacatgccagcggcaatcacaggcaaaggctctgagattcattcaacct

SEQ ID NO: 128896 - DNA, 766 bp, Homo sapiens
acaaacaaagatatgctgtaaaaggaatgcatgaagtgcttgaaaaacactttttggccaggtactacaatggctcacacttatacctagcactttgggaggctaagacgggatgactgtttgaggccaggagtttgagaccagcctcagcaacatagcaagacccggtctctacaaaacagaaaacaaaaacactttttaaatgtaggggtaatgggcctcccctcttttattatattgaatgagatttacaaaacataaaaaccattttgtgcagccgccatctctgtttagttccaaaacattttcatcactccaaaagaaaaaaaaaaaaaaaaaaaaaaaaatgtgtgttgggcgcgcgcccgctgggccccgcgcgagagagagagttttttagagaaccatcgcgtgtgggggcgcgcgcgggccccccagtgagaggtaaggcgtgaaccagtgtggctcaaatgagcgtgtgttcccccaagaggagaaaccggcgggcaagagaacaaaagtgcgcgcgtggggaggctttctctctaccccaaatatatatagaaaagagcgccgcgcgggggggcaaacagcgcgagagcgttttctgtttgaaacaacaatttctcgcaagagatggggaggcttcgctgagagggggcctacaatctcaagcgcgggggagatctctattatatacaaccggggggggtgcttctccaagggcgaaggacggcgccgaaattcttccaaattttttaggccc

SEQ ID NO: 128897 - DNA, 791 bp, Homo sapiens
ggattacaggcgtgagccaccacacccggcctcatttattttttataacaaataatttaatgcctattgattatcctgaagtaaggttaataggtgagtctttaactacattagaatctgacgttacagtgaaataactgagtacctatacctacttacaataaataagttggacttaaaagaaataagatcagaagaactttcattttcctatactatttatagatatgggtagataccagaatgaaaactgttagaatgagtaaaagcagaattatttgcatataagagaaagggggaaataattttgtttgatgtagggataacataagacaaattacatactttccacatggaaaaataaaaatagtatcacatagtcactagtgagtttgacctaattatagtgtcaaaataattcccagttagaggccctgacaggagacaaggaagtgaggaaatctcacagaaaacctggtggcatttacattcagcccctagtacttaaatgtcccctggagaaaatactccttaataggcaatgagtaataaaggatagattagaaaaagaaacaggaatagatgtgtggtagacttcaggggacattaaaaaaaaaagaaaaaaaaattttggggggcgggcagaaaaattttaaaacatttgttgggggggcccatagttagtaaatggccaggtttccaagaaatctggtcaaaggttggtttcccaaaaaagcgggggacaggtttgaaaccacgggtggggtctcggtttaaagaggccgggaccg

SEQ ID NO: 128898 - DNA, 226 bp, Homo sapiens
tctcacaagtgcttctcaaactatagtgttgtataagaagcacctgttaaagcacaaattgctgagcaaagccccagagagcctgattcattacacctgaggtgaggtccaagtatttccattttaataggatcccaggtgatgtcgacagtaccactgtgcagaccatcctttgagtggcactggggctatcacgcccagatgactagggatttaaagggtggca

SEQ ID NO: 128899 - DNA, 173 bp, Homo sapiens
tttgatctgtgttctagtatagaatggaaatagtcatgtgccagtgaaaaaaataactcaatctcatcagctgaatattttcaggaaattttttttgcaggtgggtggtagctggtaaaataaattatttgattttagagtagaagatagttttttttttttttgagatggag

SEQ ID NO: 128900 - DNA, 278 bp, Homo sapiens
cctcggtgagaaaaagttttagtcttaatgactgttacattatttaaataccaagtgtttgaggttaggcatattgcctcacttttttcctttgaatctgaccctgattttaggttgtaattaaagtttattgaacttttagtcaacatccgcacacgtaaatgctgataccaatacataagctgacaaccacttcactagctacaagcgcagtgctttagatgtgctgttaggttatcaagcagtggttagcatcaggttttgcacagcacaactct

SEQ ID NO: 128901 - DNA, 101 bp, Homo sapiens
atgaggcaccatttgtccccattggaatggctgatttcatagcaattgttgcatatgggttatacaagctgaaaagcagggggaatactaaaatatacctt

SEQ ID NO: 128902 - DNA, 695 bp, Homo sapiens
gatgagcaggagaaggggctggaggaaactcttggaatgatgatgtaactgttaattatctcaatcatgatgatggtttcatggacgtttacatatgacaaactgaccgaattatttactttaagcatatccagttttttgtatattagttatacctcaatatataaaggtgtggtttttaaagtttcatgaaaaattaaacatttaaagttcactttttctctaccaaggtctattagataacttaggatagttgttaatttaggcataactccagacattttgtgtgctgattaatatattttaaaattctaggccacgcgtggtggctcacacctgtaatcccagcactttgggaggccaaggcgggcagatcacgagttcaggagatcgtagccatgcttgctaacatgatgaaaccccgtctctactaaaaaaaaaacacaacaaagaacaacaaaacaaattgttgtgggcgcacacactgggacgcttggaagaaaagttttctacgaaccatctgcgtttggggcggccggcgccccaagagtggtcgccgtccacatttgccaatagcgtgttccccagagaaacacctggcccaagcacacaagcgcggggtttcctccccaataaaaacgccggggaaaccggcggttggaacaaccccaaggggtcggagcatacggggctca

SEQ ID NO: 128903 - DNA, 704 bp, Homo sapiens
tgcggtggttcatgcctgtaatcccagcactttgggaggccaaggcgggtggatcacgaggtcaggagatcgagaccatcctggctaacaaggtgaaaccctgcctctactaaaaatacaaaaaattagccaggcgtggtggcgggcgcctgtagtcccagctactcaggaggctgaggcaggacaatggtgtgaacccgggaggtggagctggcagtgagccgaccatgccactgcacttcagcctgggcgacagagcgagactccatctccaaaaagaaaaaaataataataataagaaatcagtaacaaaattattcataaaagaagaaatcacaatggaaattttaaaatatttttaattggtaatgaaaatgtaatatcaaaatttgtgagatgcagtttaagctatgcttacaggaccatttatagctttaaaatgcatatttacaagaaggaaagttgaaaaataacactatcatcctttattttcagtagctaaagatggcaaatcaaacccaaagtagtacaaaggaggaaataatgtaaacaagaacaaaactcaatgaaataaaaagcattaagagaaaattaagccaaaagctggctgtttgagaatattaataattaataacccttagcagaaataatcaagaaaagacagaaattccaattttagaaaaattaaaagggggggcatcagt

SEQ ID NO: 128904 - DNA, 555 bp, Homo sapiens
  misc_feature (555)..(555): n is a, c, g, or t
ccatcctaaaggccattcatttgtttaatgaatatttcttgagcatttactgcatgccaaaatctatttgaggtagtgggaatacagctgtgaacaaaaataaagacaaatccttgccttcctggcacttatattttgggaaatagaaaacttaaatttttgaaaataggtcaggcgtggtggctcacgtctgtaattccagcactttgggaggcagaggtgggtggatcacttgaggtcagaagttcgagaccagcctgaccaacatggtgaaactccatctctactgaaaatacaaaaaaaaaaaaaaaaaaaaaaaaacttttgttgggccgcgctttcgaggcccttcagaaaagcgtttttataaaacaatttcgtttggggcgccggggccccattgtggttaatgtagaacattgggccattagcgggtccctaagagagactcctgcgccaacagacactctggggctgggtttctctaccataataaaaaaaccgcccgggggagcaccagaggcgttttttgggaacaacttccacgacggaatn

SEQ ID NO: 128905 - DNA, 657 bp, Homo sapiens
ggagatgaccagagagcaagacacacacagaattatcaggacaggccaggtcaaaaaatatcctacttgtccagattctgcttcagtagactggttttatttcttgcatttatttgaagcacactctatttgcactgcaggcccttttggcaagattttgaaatcctttccctcaaggaggaattttgctggatgcaattccacagtaaacagatcttgtggaattttaaaacatacaaccttgtcaataggagctgaaggcaggaggactaaagtggctttacacatagtccttcactttgggttaccacattgggtgcagcaactcgaaggcagggtcacctgggaggggcagagcactgcctagacctccactgtcccagagcaaagactctgtgtgactggtctacagcaagggagggaagggtacgtgaaggagctagaaaatgctctcaaaataaattttgggttcaggagatacttttaaaccgttcatacacagagaaccccaagagacttgagaacataatcattaactattttgataattaaataaaacctttaaaggacagcatgaagagtttctccatggcaaatgtgagggatttcccccaggactattccagccgcagaggttgcaggggcggggctggtcca

SEQ ID NO: 128906 - DNA, 587 bp, Homo sapiens
acataagtaggagtttaaggagagtctcctggccaccccacctcctttcccaaccagaccatggccctgaaatctctccttcacaggcactctaaagcccacactgggagtccagaagcaaaaactcactagaagcagctaagttgatatctacatgactacagaaaagtcactttgcctctctgaatctcagtttgctcatctatgaaatggaaccagcaggaactagggcagtaaatcattattcacacaaactccatttctctgtttgtaaaatgagtaggctgtgcaagacttgtttcagttgatttcccagcactgaattaagcacggaggaccgagaggtaaataaaaaaccatctcttctgcctcggctctcgtgttaccaaggtttcttccaccctcattttctctggcttaggacgtgttttcccatcattggaaaaaaagagtccacagtacatttatgaacctcaaataatgcatgactcaagaaaggggacattattggctccatcatagaacataactgtgcattccccaggatgtgtgggagggacggcatgaggtagggaggtagagtcatg

SEQ ID NO: 128907 - DNA, 149 bp, Homo sapiens
ggtagatcgagccggtacctacttttcacagggagtaaatgtaagtcaacatgctcaacacagagacctttccctcttctcacaacctgctcctgaaagcgagttggagaataaaaggttgttaaataattgtacaagttctgaggaaa

SEQ ID NO: 128908 - DNA, 290 bp, Homo sapiens
acttcgtgtggcggaggcagcatttatgaccttctacagtgaggtgaaacaaatagagaagagagacttggttctaacgtgaaaaaatcagattgaaagactgacctgtcctggttcctcttacttcagtttcaccccatttgaggttcttcagatcctgaagttacagatgaagaaataaaaaagcggcagttatccatcttggtgcatcctgacaaaaatcaagatgatgctgacagagcacaaaaggcttttgaggctgtggacaaagcttacaagttgctactaga

SEQ ID NO: 128909 - DNA, 714 bp, Homo sapiens
gaagaaacaggtcgaattatagaattgactaattaggtacgtctgggacacagctaccaaggtaacagactccctaaaaagataaaatccagcctgtagcttgcctgatcaaaatctttcaatggatgctttagctaaatggtcagatgcccaaggttagtaaatatcatcattttccatttgctcttccctcggctagaaacctctttccaagtcttcaggtgcccagtcgctatccacagctcggttcaggcatcatcactccctggaaaacttggctcttaattcgggtgccgaccaagtcctccggggtccgcaaaggctggcatcccaccaccaacgcgcgtgactagggtcttctgttttgcgcgtcttccagttccactgagggccgagactttgtctttgcggccccagtacttgcttagttccgagagtgcggtttgcactcagtaagtagccacttactgagtccaatcgattattggaaacctaatttttcatcactgcttctcccacaagaagctctaggactgactcctcaaagaccaaaactggaattagcaatcccgctgtttacccggaggcccggtcaaatgtcttaaatctgggaggattcctcctgggaaattccagtaagggcgcggagcaggtcaggaaggaggttactttttgggtctttatcgtctatgatgggagaaaaggagaaatgaa

SEQ ID NO: 128910 - DNA, 574 bp, Homo sapiens
gtggctgaaattatgtatttttaacaagggtcctaggtgattctcatgcagcccttggtcccacaaggtttgagaaccagtgacttagagaacaaaggcagctgggagattaaagtttgaggaagcatccagaaaccaggaggttttggggaggaatataggacacttctcattttgtcccctccacccatcttccacagcccagaagcagcccccctgtcatttcctgcatcctgtctacaccatggcttagagcctcaaaccctctgctcttcatatgcaaaggggagctgcttttggaattaggaaaactctttcctctcctaataaagcttgctaacgtacagttcaaaatcaagcaactacttccttgttctggatggcacctactgtcttcctcagaggcaccttcaggagcacccactggtgccattgattccgcgggtgcgggaaaattacagggaacacgatctatggagcatgaaacagacatacattggtttcacgtttcagaaatattatctttgctgtgcactttttcgtcctcgtgtttctttccatgtgagcagcattt

SEQ ID NO: 128911 - DNA, 727 bp, Homo sapiens
gtccagagcaagaacatgaaagaaacccaactagtaactgtcgaagttgtcagtctgattagaaaagcaagaggtcatctgattgagttcacagattaaggactggctttgctttgaatcctgaaatcttgcctcttttagtctttactgtgtgatcttgggtagattgctcaaatttgctcaattttaattcctttgtgtgtgggactagagtaatattagaaccgaatgcaaagactttgaatggaaattgtgtgaactaagtttataaagcacctagaacacttgctgctactggtaagcccacaagtggctgctatttggggctattatttttgagcaaatatggttttaataacatgccctctggtctctattgtctttgttcacattaggaattagtagctgtagtttcagtccgctgaagtttcactgctctttatttttttttctaaacagacaggtgaaattcactttctaatccagtttcaaaacaataagcctcagggagaggatgggtcacttgagcccactctgcttaaaattcttctgagataagacattcaaaagaggaaattatcctgtcagtagcaatatctctgaagtaaaagatatcctacagatttactttgaaatctgtagatgtgcattctgcctgagatctgaggtttatgatgagaagaatgttttgatggactagccaaacagaataacagaatgttaggta

SEQ ID NO: 128912 - DNA, 136 bp, Homo sapiens
aattttttattggacatgcatgtccattaagctggatggaaatgcttacatgagtcaaaatgtgagtgaatgtctcaacagaagcatgtcataaatactagatgcctgaactttaccccagaacaaattatttaga

SEQ ID NO: 128913 - DNA, 366 bp, Homo sapiens
ggtaaccgcaccaggccttcctcagaagcagtgttgctgctgccggttcacctggtgcatgagccgctgacccaccagaggcgccaccaaaccctggagtgttacagttgcctttcctctcgagtagcacaccacaaacagcacagacacaccgcacactgatatttttacagttcagttagactttgacacttacacgttcagatagcaacacagatgctgctgctgaggagacaggtgtcagcaccttttcctgccctctccagaggcgagggcccatgagccccagcacacagaagcccaggctttcttcatagcaacccctggccaagatttcttgggtctctcgccatggaggcggtgttc

SEQ ID NO: 128914 - DNA, 181 bp, Homo sapiens
tgagactgtgccgttgtactctagcctgggcaacaagagccatctcaaaaaaagaagcaagccagatctttggggtgctgtgatggcaaatcccccagcgctggcctctcaggttctcttgcgggattagtgtttgttgaataataagcaatacaccctgacccagcgagccaaagcaaac

SEQ ID NO: 128915 - DNA, 521 bp, Homo sapiens
agggcctaggacatcacaaccccaccctgctccatcttgacctcagtttccccatcactggaaccaaacatgagctcaggctcatgtccccgcaagtccccagtcacccaccgtaactgagtgggatggagacggaggggttcgttttggggggcaccttgagaggccagacatgaccaggcccttcacgtacagcggggctgttccccaacctcccacctgggacagaggctggtggtgatgccccagtttggccttcttcacaccaggagtcacacagatctggtgtccagcccctgccccatcacttacagctgtgcggctttgtgtaagcaccttgacctctctgagcccgaggccactgatgcgtggaatgggaataagtcatcactaagtggacttcagagtctgcagcggcgccctagatcacagcggctctgagaaggactcagaaactgtgaaggacgtgcacctgggaggaatcccagctaccagggccgggctcgccttccctgagcacg

SEQ ID NO: 128916 - DNA, 324 bp, Homo sapiens
taaaataaactttataatctttctttgacagaataagacatttaatctccaaggtaggttaaattgtccagtgctacagaaaataaagacagtcagagccagcatttgaatacagatcactctaaattcatatttcccctttccacctagcactgcctctccagcaaatctgttttctagctcaaaacggtagttcgacattcagattaaccacctgaatatttagaatggcagtccttaataaacaatgaaaatccaactcagttgaatcaccagtctcttcataaagcgacacaagataatattaataaaatattcaccaag

SEQ ID NO: 128917 - DNA, 813 bp, Homo sapiens
gcctgttgtggggtgggggaggggggagggatagcattaggagatatacctaatgttaaatgacgagttaatgggtgcagcacaccaacatggcacatgtatacatatttaactaacctgcacgttgtgcacatgtaccctaaaacttaaagtataatttaaaacaaggaagaaaaaaaattagtgtgttttgtgatttttaactatgaggtacttattttcctttaaatttcaattgtaggatttctttatgtcctaaggtgaaggtaggtaattccagggatttgcttgtttcactaatgtacctaggctcactacttgtttgcgacctcaaaattatctatgtagtattcatttgaccagtcaattaatgtgaaatagaatttcatctctgtgtgttggtaggcttaggtttaaaatttctcaagtgagtgagatcattgaaaatggtagaggaagaaactccaaaactgcattcatccattaaagaaaaaatggtcagaataaaatattttggaagacaaattataatttaggaattacaacaagaaagggaacacttaatttttaaaaggcaccaaatttcagtgagagagcattatggcattttaacttattgtctaccatcctacactacctagctggtaggctgccataggggcagctgcttgttttcctgttgtggcttgctaggagccagagaggcaatttggacgctgttctcacataaatgtggttttgtgttttgatctgtctgaaagctcccagaggggttagctcagaattgtggttttttgtttgtttgttttgttt

SEQ ID NO: 128918 - DNA, 298 bp, Homo sapiens
ccatccacccacccacccaatcaaccatccatccatccatctttccatccatctatgtatatttatgtattttaaggaatttcctcatacaattgtggagtctgaaatctgcaaggcaggtggcagcctggagacctaaggagagctgcagttggagtcccagggcctctgctagcagaattccttcttgcttggggaggtccatcttggttttcttaagaccttcaactgattgaatgaggcccacctgcattttggagagccacctgcttccccaaagtccactgattgaaatgtt

SEQ ID NO: 128919 - DNA, 411 bp, Homo sapiens
tgacaatgaaattccatttataaacaaagccttggcctacccaaggctgcctcagacagcagtaatgctggtgctgaaaactggcaactgggctggtgagttccgtgtatctgaattagtcaccgccattgaaaagtcggaatggttaacataaagatcccggtttccagtcaggcatggctcgtctgaggtccagcagtacctgccctttagaggtgcatagcttgtgcttctccagctgcagtctcctggctgactttccttgtttagggacctactcagtcaggcaggcacttgtggcctgaggcaagaactgtagtagtgggggcagggatggggggcatggccagaagggatgagagggaacatggaattgttgaaaaatcctagctctaaacctgacagatatgg

SEQ ID NO: 128920 - DNA, 491 bp, Homo sapiens
ttccccctacgctgggttcagtggggtccttccccctacgctggcttcagtggggtccttccccctacgctggcttcagtggggtccttccccctacgctgggttcagtggggtccttccccctacgctggcttcagtggggtccttccccctacaccgagttgagaggggtccttccccctacgctgggttcagtggggtccttccccctacaccgagttgagaagggtccccctacaattcctgtgccgtaggagtctgaccttattaccttatattgggaacagggtccttgcagatgtaacctagtcaagatgaggcctacctggatcaggggtctctgtaaggagaaggaactttagactcagatgcacagaggagcgggccgttaggagacaggcagaggtgggggcctcaagcccgggcccaccaaagcctgtgggagcccccagagagagcgtcaggcagggtcaggttgccagagagagcgt

SEQ ID NO: 128921 - DNA, 397 bp, Homo sapiens
ctgaatttttctgctctggccacccacatatgcatgcatggattcagcccgggtcagacaagtctctctttatccccaagtactgctgaacccttccccttcaactccaaaggaaagacttaacagaggtgaagtctaaaaccatgtgagatggtgctccttagaagcagctgattggatcagggatggattcatgattcttgaatcagaccaatcagattcttgagaatttggcacaagaaattcaaagaagttaggctgtgatccatgaattggaaggttccttagactcagattgggatagccttttggggatcatgtgtacccaagggcagagtatttacaaagaagtgtgtgtgtgtgtgtgtgtgtgtgtgtgtgtgtgtgtgtgaaagag

SEQ ID NO: 128922 - DNA, 1035 bp, Homo sapiens
tgattatgggcaagaaatatattgcttggctacatggtggctcatgcctgtaatcccagcagatttgggaggctgggactacaggcacatgccaccacacctggctaatcatttgtattcttagtagagacagggtttcaccgtgttagccaggatggtctctatcccccgacctcagctgatccacccgcctcgcctcccaaagtgttgggattacaggcttgagctaccgcccccggcccaggttccctttatttaagagacagccctaggtaactggcctaccctagagggcagaatctcccaccagcacccaggccctcaggacctccctcaccaggtaggggagacagcagcttctaattaccttgttctgtctcttggagattggggaaaagctcttgttcctgtcctggcctgagggagtttggaaggaggcggagaacaacatttcacaccctgagcccatgacgctgtgacaccgatgacccctccccaccaaggacagtttcccatgatctatttctgtgctcttgtgtgactagtgaggccaatttaggctcaacaggttctaccacaattcagatactatttccacataggcaagctgggtctgactctcacctagcaattttcacaattccttaagtaacacaagtgaacacacatcacgtagtggttgagagcaagggctctggagtgagaggacgctggggttcaattcaggcactccccttcctagggcaagacacagggcaccaccctgcgctccatgcaggcatctgtaaactggcaggcagaacagcacccaacacccagggtagttaggctcgggagaatgtacgcggaggagcttggcacagggccaagcacacctgaagaggataccaaaaattaccaaggccattaagtccactgggaaaagccagttaggctccccaaaacagctgctttcaagacccagaactctgaaggaggctgtgagcagctttccctgagctgatctgtcctcctaccatctgggacactgctacg

SEQ ID NO: 128923 - DNA, 288 bp, Homo sapiens
atcaggaggggagggttgcagatgttgtgttttctggggacaggggctggactcgggagttcctcccctatcagcacaggctgttcctaccatctgctccccacaaaggagaaggcaaagcaaggttgtcatccccagcggggacttcctgcagccagtccggtcagcgaccccaggccatttcgagttctctttcatgactttattcagattgctgctgacttcctgtccaccaggcctgtagcctcttctgcggcacacgcagggacccctgaatcacccattgca

SEQ ID NO: 128924 - DNA, 243 bp, Homo sapiens
ggaggcggagtttgcagtgagccaagatcacgccactggactccagcctgggcgacagagcaagactccatctcaaaaaacaaaacaaaacaaaaaccttgcttggtatgtttcagcctgttgtacttattctccttgtcaaagctcaaattgtccctcttttagccattgcactccggccacactgtctcttttaaaactgtttcttacatcatgatgtgtgagaacttcgcagccattgca

SEQ ID NO: 128925 - DNA, 648 bp, Homo sapiens
caagtagctaggactacatgtgtgcgtctacatacctggctaatttttaaatgtttttatagagatagggtctcactatattgcccaggctggtcttgaactccttggcttcaagtgaccctcttaccttggcctcccaaaatgctgagattacaggtataagccactccactcagcctgcttcaaattttaaaactgaatttctagttttattttattgtcataaagggataaaattcacatagtttcccttttaggaagattttttaaagttctttatggtctttggtttgtgattccatgcttctagtgggggaatccagtaactattttctagaaacaaattcatagtttaaagaataaatttggggctcggtgtggtggctcatgactgtaatcccaacactttgggaggccgaggcaggcagatcatttgaggtcaggagttcaagacaagcttgaccaacacggtgaaaccccatctctgccaaaaagacaaaaaattagctgggcatagtggcacgtgcctgtaattccagctactcgggaggctgaggtaggagaatcacttgaacccaggaggcagagattgcagtgagccgagatcatgccactgcactccagcctgggcaacagagcgagactgtc

SEQ ID NO: 128926 - DNA, 435 bp, Homo sapiens
tgctcacaaacagggaagtgcacctttgggtccttctgcagtatcattaactccttcttggttaattggaccaaggaggagtggatccaggaggaatgcctctggtctacctgctccaggatataactagcaggacagggacagcccccaaaaggagagatgaagactcttcccctttgaatttctcaagctgcagtgtagaatcactaccacactagggaaaccaggagagcagtacccagatcaaaatttggagctccattcctggtcactttagtttaaggtccaaactcagtacagatttccagaaaccgaatggctaggttcatacaatcacagaagcttaaaactggacacaagcttatctaatttaatcccatactgtaaaagaaacactgaggccagagggaaataatctgtcctaagtcacataac

SEQ ID NO: 128927 - DNA, 759 bp, Homo sapiens
ttgtgggtccctggggctcttcctcactcaccctttccctgtggtagtgagcttccactgcctctgcgccagttccaggtgggtggctgctctgcttcattcctctctgttctccatgggtcccgttgcttctgttacgagtcccaatgcgttctcgtggatgatccatttgaagaactagtgtttactagccattctgtttcttcttcatgagagcagagcgcactacctgcttctagtcagccatctttattctctactattatatcccacttttattatttttgatatgaatacatatatttttttattgtggtaaaaagcatataacataaaatttaccattttattcatttttaagtgtagagttcagtactgttaagtatattcactttttcgtgaaataaatataaaggtataaattttaaatttaatgtttttttctacttattcactgagttgaattattatctgaattagttttatcattgattctttgaaattttccagatatactattattattaaccacatttatatctgtatttcttctgtcttccctgattgcatttgaataatacctctaatataatgttaaattagagcagaaatagtgggcatttttgtcttgatcttattgaaaatgcttttagtatttctccattcaattagacactggatttaggactaaggtatgagtattttattatgttaaaaatatcgcttatttcttactatcttggatgtctttttacattt

SEQ ID NO: 128928 - DNA, 191 bp, Homo sapiens
tgtgcattttactgtgttaactatacacctgtcacatatgtgtacatttgtagtggtagacacagcagtccaagaaaccgtacccagccgaggaactgagaggaaccatacccagctgagaggaaagctgcgctgcccaaaattaagccaatgaacaacccctgttttatttaatcggcacacactccaaa

SEQ ID NO: 128929 - DNA, 364 bp, Homo sapiens
agctgggactagaggtgcacaccaccacgcctgactgatttttgtgtttttgtagagatggggttttgctgtgttgcccagtctggtctcagcctcccaaagtcttgggattacaggtgtgagtcaccacgcccagccaactttttctcttaaggctccagttttcttcttagagttgggcccctcccacgaagaaagcacactgccaccccttcatcggatttgaaccctacattttgaaaggaaagcagtgccctcctgctgagttaacaaggcttatttaaatgtttttcttccaaatatcagagcagaacagattctttgtcttccagtggaactatccacatggggcagaagtagttgg

SEQ ID NO: 128930 - DNA, 705 bp, Homo sapiens
cagtatccattatgaagatagatgtaaaaattctcaacaaactactaacaaaccaaatccagcaacttacctaaaagattgtaccccatgaccaaatgggatgtatcccattttcaaagtatgaaaatcaatcaatataatacaccatattaatagaaaaaatgaacaaaaacaatgtgattatctggatgctgaaaaagcatctgacaaaattcaacattctttcatgataaaaatattcaacaaactaggaatagaagggaactttcttaacctgaaaagggcatctatgaaaaagttatagttaatatcatattcaatggagaaagactgaaaaccttccccctaagatcaggaataaaataaagacttccactcctgccatttctattctagctggggcaattatataagataatgaaataaaactcatgtagattgaaaaggaagttgtaaaactatttctgtttgcggatgacatgattttgtgtgtagaaaattctaaggaacacacacacactcatacacaactattagggctaataaacgagttcagcagagcttcagggtaaaagataaatgtacaaaaattgtttctatacaccaacaatgtacaatcaaagaatgaaattaaggaaacaagtttatgtacaaaagcatcaaaaagaataggatacttaggaatacatttaacaaaagaagtgt

SEQ ID NO: 128931 - DNA, 295 bp, Homo sapiens
tgtttagcctctttgctagtggatctcaaccctggctgtacatgaaaataatctggggagaattttaaactcccagtgaataagatgcatgcagatcatttaaaccagactctctggggaagagccccaggcataattgattctaaagctcccctgtgactcaaatgtgcaaagttaaaaacctctgctctcaataaaaagtttccctttaagagtggggaccctcagccaggcgtagcggctcacacctgtaatcccagcattttgggaggctgaggtgggcggatcacctgag

SEQ ID NO: 128932 - DNA, 400 bp, Homo sapiens
tgacagtgtcttaataagccagccttaaaagtgacgtaacatcatttctgccttatttcattggtcacgacggacaacccgatgtggaaggagacatcacaaggacaggaatactgggaagcaggtattgttggtggctgtctcggacgctggttctcatagaagtagatgtattattttagtacaataagtgcagacgatcagctagcaggatgtggtttttgcttgtcctgcctctgatttccgatctaaattgccactctcctcccaatatccctttcactgcaatttcccttccaatttgtgcctttatagggccctctcctcctacacacaattttttaaagtgcatttactcagccagctaacaaacattttagcacctaccctgcacagctag

SEQ ID NO: 128933 - DNA, 309 bp, Homo sapiens
aatgaagaaaagagcaatcaagacccaaaaaatctgcctctcctcagctcaagaggaagaaggccagcctgctgttgccctctgtccctgcattccacagcaccaggctcttccctcacatccctctcctcacattcttaccttatatgattgaggccaaatatgcaaagccccgtcccccagccatgtacacagtagctgctggctgaggacactgctgccaacgccacaggccccagcgaacagccctgactcttatgtgatgatctgcttttgggtcctgtcactatctgcgcacacattatggag

SEQ ID NO: 128934 - DNA, 793 bp, Homo sapiens
acaaaacaaaaacaagcaaacaaaaaataccagagcaagtactgtgtgaacatgtggaagtccatgccctaatagagttgcaattttttattcttcttctatagtggtggcttggtttgtgtacctatttttctgcatttgtattggaaaaggtttcttttaagacattttccaaaagtggagaggaatatgtgtgttcaggaagggctttcaaaaaactgtatatctaaataaagctcaaacggtgaaatcctgtcacattttcacaatgatgcttaaaagataattgagtaaaccaggttgttaatctccttaatacctgaaagaggacacactgaaactgaaactgtgacatcctgctaggtgagttcaggttctgaacctaggaaatcctcataggagaaaccacatttaaacaaagatgggactttctctgagagccaaaaccagataaatgtagaatactgaaatccttgttggacattaagtaaacaaagataatgatacctaaattaatcctctcttgtgcttatgaaacatatgcactgtaaaataggcataccaggaggaaatagatacattaatcatcatttacttatgatacaaattatttattttgacaatttataacgtttaaaaaagttttttaaagatctagagaaaggtgatatagtaaacattcaactctgtaagaacatgggaggtcagtgaaggctacatcccaatcaatatttggctctaagtacctcttcccatttttcctatgtatcacctatttctgtttcggaatatg

SEQ ID NO: 128935 - DNA, 682 bp, Homo sapiens
ggaacatgatctacagtttgggagtgtaaggtgaagctgtgtaattaagaattcttaaagattgaatatttttgttctgagtcactttctacttgtcagattctcacattcaggttgatacattctcttctgtgtactcttgagttattgtaccctttttgtagcaatatattctgcaagacggggtttcagcaggttggtcagactggtctcgaactcctgacctcgtgatccacacgcctcggcctccccaaagtgttgggattacaggcatgagcactgcgcccggccaacctaggcgatgtctcaaacaagcagaagcctactatatgttttgcactgtaattttctttttttccctgtctcttgcagatattgagggatgcataataattttcttacagatctgttacagggtctttgaggaagtactatatttattcctctttttatcttcctcagtattttacacaattactagattgaatttgaatgtgataatattttgaacttgaaattgttgttctatcaacttatctaagatttcacaaaaaggtaatgtaaagaaagctgtatgagcaaaggatcagtatttgaaagggaaaaacctgtcagtttcagaagatgagacagaagatgaagctttctaaaagttatatattttgccttttttgagaaggta

SEQ ID NO: 128936 - DNA, 323 bp, Homo sapiens
attaaaaataatagcctaggcgtgatggtgcatgcttgtaatcccagctaccgggaggcagaggttgcagtgagccgagccaagatcacaccactgcactccagcctggtgacagagtaagactccgtctcgaaaaagaaaaaaagaacggttgtcctgatcattcccctggtgattctgcccgtttagagtcaagttcattgataatcaaaggggcaggctaccagggaagtttcaagccttctgggtactgagatggccccttcccatctttagtgtcattgcctagattccttaagttctgataggaactgtttggtgaa

SEQ ID NO: 128937 - DNA, 549 bp, Homo sapiens
ggcacagtttagggaatgtgagagcctcctgataatcatggaagagttgttttacccgggttctgattggtcattaccacatccagtcactgtggtgagcgagaatgacctgagtcaaatgcctatcactaagttcatctgggggctggagggagggttgcagagagtcagccccacccagtccacgtggttgctatacatgggaagaagtagaatgactgactacagtattcatgaaaacaggatggtttcatacttattttatatctcaactagtacccaaaagtattatatacatagagcatatatcacaatgtgcatttttcctcatttcattaagggagatggaaggttctgttagggaaagtttaggaataagatgattaaagtgagataaatcagaaatatttaataaggacctcagtgaagctgaagaaacagactcagtagaagtagagccataaggaagaagtacgtggtgaaaacggggcattagaaatgagtgctgaataagctgcagttaagaagctgctctgatacctagttcac

SEQ ID NO: 128938 - DNA, 991 bp, Homo sapiens
gaggacatgtggatgccgaggaatgggagccgcaacaagcctggagggactgttgtgaccttgctgcccgtgtgtgctgcgggtgccaccctgcccatgtgtgctggtggctggtgctgggttaggtgctttgtggacctcgccagggagtgtgggaagtctgggggcagctccacatgatggctgctgtgctggctgaagcagtggtgcctctttgagctctcgggcatgccggaagttttggaaacgctacccggccgtcttccgagctccgctgctggtggtggagttggcatctcatttcgcaggcgggagctggggatcgttcacgtgttactctgagatgaggccttcgccctgcacaaatgctgtcactcacatgtttccccccagcaggagtttgtttaccatgtcctctgtgcagggacgctgttgggctcccaggtcaggtgtgcaaagctgttggacccaatgccttttttttaggatagttttttggggtaatgtcctcttaccctaaaatgcagttcttagaaaatataatttatgtttccaaaagaaaagaaaatgtaatttataacttatagttattagactgccctagctgtagagaatgaatgtgatagtattgtgtaataagacaacacatttcaacatggtgatggttagccgtgaaaaagccggacgtcccacctggtgtgttgcgtcctggtgaccggggggcggtccctgcagatggacccaggtgtgacactgggagttcagcccccagctggtgatggaatattacagaatggtgagcagttcctaatgaactttcacataaagcaaagtataattttttctagacttatgtaatagttgaattcatggaaaattcaagtcatagtaagaccgtgcaaaaatgttttgtgtgtaaacgttgaatagagtaagattctgagttcagagagttagaagcatgttttccactcatgaagttctggttcat

SEQ ID NO: 128939 - DNA, 1297 bp, Homo sapiens
ggaagctggtgggaaggcatctggcttgtggcctctgatggctgagcctttgtcctgtccacagggtggaggcagcctcacccagccatccaagccggtggtcagtgctgaggctgggtgggggagcctccgatggacccaggagtgggaggctgctcctaatggcagttgagccccctgcagccttttgcagtgtccagatgaagcccacagagaccctcctccatgtacacacagctgtgagggtagcaggagttggtgttgaagggagagcccagccacgctcaggtccccaccacacatggcctggggggctccgcccttggctgagctggagggcttggggtcaggaccaagggtgggtccaccctgcttggaaagaagctgtcctggcttttggagtcagcgggggaggggcactgcccgggagctggtgtcttgttggaaggggcagctgggagtagggagcagccgagccacaggctgcccacggcatcgtcccctgcctcgggtcagggggccccttgactggaggacctcacaaccctgggggtgtccatggcctgttcctgggagctgcaccctcatcagattctctgtagggggagaagtcatatcttttcctcacccatcacaagcttcatggctgagacctgttagaaacaaaatgcttcctcggtgccacaaagaaatagcactcaaacattaattttctcagcaaggcaatttttacttctatagaagggtgcgactcgcggatggagcaatggtgagagcgcacctggacaagggaggggaaggggttcttattcctgacacaggtagcctctacggctgtgtcattcccctgttgggtggggttggactgcacactctaaggtaattctgattgactattttaaagagagcaggggtgtgacccagagtggtggggtgagtagtttggcaggaaggacaggaacaggtagctaaagatgacttaggtcagagcaggtgaccaggggccgggtgcgatggctcacgcctgtaatcccagcactttgggaggccgaggcgggtggatcatgaggtcaggagatcgagaccatcttggcaaacgtggtgaaaccccgtctctactaaaaatacaaaaaaaattagccaggcgtggtggcgggcacctgtagtcccagctactcgggaggctgaggcaggagaatggcaggaacccggggggcggagcttgcagtgagcggacatcgcaccactgcactccagcctgggcaacagagcgagactccatctcaaaaaaaaaaaa

SEQ ID NO: 128940 - DNA, 276 bp, Homo sapiens
ctggggaaattctgatagggagagtaggtctgggtcattctaatttatttgtggctctggtagcaaagagaactcaaaggcagtatatctctatagctgatgagatttcactggggccgacaccacctgttctgtgcacactcacttctcggttagacctggctaggttttctgctgtgcttgtttttagctttgtaaccagcagtaatcacattggtctttgggattttcatgtttcaggttttacagatgatgcaaaagcattagttttcaaag

SEQ ID NO: 128941 - DNA, 486 bp, Homo sapiens
ggaaccatttctaggtagtctgattccagaagctgagcttaaccatcacatataatgctttccagaaggatggttaggtacatttctgctatacttaatcctgttaacagtgtggttttttttttttttaccaagtttgaacgttttgctcccttgtactgttatatgcttttgaagctgttttattaatttgtcagctgaatgatcccatttcgtatagtcggatggtcatgaaaagaatgtgaaatagacaattgcatttttattattgaaatattgcctacgcctcccttccctaacataaatgtatttcttcagtgcgggattacagcaacattaattctcttagtttgactgtcttgggagatctggtgaacattcagaatattagaggaaaaccagatgaaacttttttataaactaaaacctccagatttatctaagaaaggccaatccattgtatgtgctatcattgtaagttgcaca

SEQ ID NO: 128942 - DNA, 386 bp, Homo sapiens
tcaacactaagaaaagttatgagaaatttgttttaagactgctaagtagggtgaccaattgtcagggtttgctggggattcagggatttctgaggatttaagacttcagtgctaaaactgggaacatcccaggcaaaccaggaccaactggttactctactgctaagccaaataaatttttctgtgaaaagctgtggtatattgaagtttaaagcatgtgagaactgatgctgcagcttctttcgtttgactggtttatcctaatttgggggaaaaaacagaggaatgccatattcttaattgtatgaggaaaaaaaattgttagtacaatgggaggggctgcagagatgtgtatgccaaatatattatacatatatatacacaca

SEQ ID NO: 128943 - DNA, 289 bp, Homo sapiens
cctcgaaaacagacaagtaagtaccaacgatgatagatattgtcacagacacctgctccccaggggccttgtgaatttggagggttctctgctaagctcacatggctctaggaggtgctggtgggagtcttcattaccatatgccagcccttcaggccaactgcctttaaggaccgggacccaggtgacctgggttaagtccccatcctgcccccagctggctgtgactttgggccattgtcttggctgtctcagcttcacttccctttctgcactttgaaggagggaa

SEQ ID NO: 128944 - DNA, 267 bp, Homo sapiens
ttctactctcttctttccttcttttacggctctcatttccatcctatcatgttttcatgattatcctgtcttctcttttcactccctttagaccttcatggtgagtggcaagaaccagggattagaataaagtctttatcacttattagcaatgtgacttggataaattcacctctctgagtctcagtttcttgacctgcaaatgggaatagtgctttctctctaacagggattatgtgagtaacaaataagataatacatgtaaaa

SEQ ID NO: 128945 - DNA, 259 bp, Homo sapiens
cagaaagttggctacaaatccaaagcttaagaaatgaaaacatgtaatttaaagtaaatatatttaacggaatttattttcttatatttctaaagagggaactggggctcttgtaaggtgattttcttttcttcttttttttttttttttcgggcgtgggcatgcgggcttgggaatatgagaaaaccataaaacataggaattgggcgccaggaagggtgtgtgcaggaaatcgtcagcatttggcgatgccagacgt

SEQ ID NO: 128946 - DNA, 478 bp, Homo sapiens
cagtggggagatctcagctctctgcagcctcaacctcccggactcaagcgatcctcccacctcagcctcctgagtagctgggactacaggtgtgtaccatcacacctggctactttttgtattttcggtagagatggggtttcgccttgttgcccaggctgaccaactgatttttgacaaaggtgcaaaacaaattgattggaggaaggacagtcttcaacaaatggtgctggagcaaagggaaattcataggcaaaaaagcaaacaaaaaaacccaagcctgaacctcagatcttatacaaaattaactcaaactgtactgtggacttaaatgtaaaatgtaaaactatgcaattttagaagtaaacgagaaaaccttcaggacctacagctcagtcaagagttcttggacctgagatcaaaagcacaatccataaagaaaaaaattgataaatttgacttaaaagtttttgctcca

SEQ ID NO: 128947 - DNA, 417 bp, Homo sapiens
attttttttctggatataaagattattctaaaatgtatatggaaaggcaaaggaactggaatagctgaacaatttttaactagaagaaaaaagcgtaaggaatactactcatttcactacctattgtgggcttactttacagtaatagacagtcttcaacaaatggtgctggagcaaagggaaattcataggcaaaaaagcaaacaaaaaaacccaagcctgaacctcagatcttatacaaaattaactcaaactgtactgtggacttaaatgtaaaatgtaaaactatgcaattttagaagtaaacgagaaaaccttcaggacctacagctcagtcaagagttcttggacctgagatcaaaagcacaatccataaagaaaaaaattgataaatttgacttaaaagtttttgctcca

SEQ ID NO: 128948 - DNA, 447 bp, Homo sapiens
gcagctgggattacaggtgtgcgccaccatggcaagctaagttttgtacttttttctgagacggagtctcactgtgttgcccaggctggagtgcagtggtgcggtcttggctcactgcaacctccgctgcccgggttcaagcgattctcctgcctcagcctcctgagtagctgggattacaggcacctgccaccatgcctggctaatttttgtatttttagtagagacagggttttgccatgttggccaggctggtctcgaactcctgaccacaggtgatcccccacctcggcctcccaaagtgctaggattacaggcatgagccaccacgcctggccaaggctatctttttttaacaacaggtgtgtcccccacattggtgtgaggaacgccttcctaggggcagtcttgaagtggatttagatggttactctggtctcagtaaag

SEQ ID NO: 128949 - DNA, 661 bp, Homo sapiens
caaatatggctcaccagactacaccttgaggacagtcatgctggctcctttgcacaatgggccagctgacttgtgattgagtggggcttaagggcagtctcctccctccaagcgtatttgttttcttacagatttagcctcccagcggaacatggcaaacacaagacatcaacctctacagttcttcgcaggtctcaaactctggggtggagacctgttgggcaaaggttggtttgcagatgcttccacaaaccatgagctcatgggcagggtctgtgccctttcggctttatatgcaaaccacccagcgcaatgtttggcaaactgcttgaactaataaactaaaccacaaagccaaatgtttgggttacttggccgggcgcagtggctcatgcctgtaatcccagcactttgggaggccgaggcgggcggatcacaaggtcaggagtttgagaccagcctggccaatatggtgaaaccctgtcgctataaaaatacaaaaattagccgagtatggtggctagtgtctgtaatcccagctactcgggaggctgaggcgggtggatcacttgaggtcagaagttcaagaccagcctgaccaacatcgtgaaatgccgtctttacaaaaaaaatacaaaaattaactggattgtaggatgct

SEQ ID NO: 128950 - DNA, 170 bp, Homo sapiens
gcctcctgcctacagggccttctagaagcttcccaggaagctgcttgtgctcattcctctcccacatactccggattggacataggtgctgtggtgctcctatcgcccgtgaaggcccggcttactccctaaatgcagtggatgcaggaaggcatggtgagctaggccag

SEQ ID NO: 128951 - DNA, 184 bp, Homo sapiens
gaccttctgggctcaagtgatactcctgccttaacctcccttgtagctgagaccacaggcatgcaccaccacacttggctaattttttaatttaattttattattctttctagacagggtctggctctatcacccagactgaagtgcagtagtgtgatcttagctcacaacaacctcctcctcc

SEQ ID NO: 128952 - DNA, 713 bp, Homo sapiens
aatgggcaaccagcagtcctcggggctgctctgcctatggagtagacattcttttattcttttactttcttaataaacttgctttcactttactttatggactcaccttgaatcctttcttgtgagagatccaagaaccctctcttggggtctcttggattgggagcccttttctggtgacatagctatttattttttattttttaagtttttgtagatgagttctcactacgttgctcaggctggtcttgaactcctgggctcaagccatccttatgcctcggcctcccagcgtgctggtattgcaggtataaaccaccatacccagccctcctgggtatgactaaagatctgtatgatctgttagtgccccttgttcagataccccatatagacttctctctatttacataaacttttccctttcctggggatgtgctttctctcctccatttgcctagcaagctcagattttgatcaccagataactttgagtgaagattctttaaccatctttctcttctctcttattctactgccctgtttgtatatctctcttgtaacaattttctaatcttactgtcttctctcacacagtatgaacccaaataattgttgaataaaaaaataaatgaatgaacaaataataaagtcttacaaaagtcaatagctattctctaaagtgatgttaaatttgtaagaatattatgtga

SEQ ID NO: 128953 - DNA, 215 bp, Homo sapiens
actgcactccagcctgggcgacagagcgagactccgtctcaaaaaagaaaagaaaaaagaagagaaggaaagggagggaaggaaagatatggagcgtggagctctgggggccactgtgctgctctgaacacaattatcctgcgtttcggtgcccttgtcctgtcggcagcccccagggccacagtcatatttgtgagtctgtcagtctgccctgc

SEQ ID NO: 128954 - DNA, 666 bp, Homo sapiens
ctctgcctcccaggttcacgccattctcctgtctcagcctcccgagtagctgggactacaggcctccaccaccatgcctggctaattattattttttttgtatttttagtagagacagggtttcaccatgttagccaggatggtcttgatctcctgacctcgtgatcggcctgccttggcctcccaaagtgctgggattacaggcgtgagccactgcgcccggcaagagaaaaatcacttctaacttgctaaataaatattatttttgttttcctgccccaaacctaatcctaactgagaaaacaatgatctgctttatgcaagcccctgtgcaagatgctgcaggggatgcaaaggtatatgggctttagatacacagagatttgggcaagaacattcacccccacacagaatgcaagaacattctgtctaggggtgaaagaaaggcccagaagagtttgatatggcagaaccatgtgggcatgaagaggactcatgggagctgtggtgagggaatatgatggaaggttcttgaatgccaggctaatgaggctggagttcatcctgtgacagagcagataatcttgttccaatgtacaaatgaagaagcccagacctcaataggttgaaggacttgtccaaggtcacccagccagggagtggcag

SEQ ID NO: 128955 - DNA, 182 bp, Homo sapiens
gccggctcctactttccacagggtaaacattccaggataagaggaactcagccaaataggaagccaggagcagttaaggaagtgggaaacaacttgtgttcgacttcagtaaatcataaatctatgtataatagagaaaaatagtcattatggttacagaaggagcaggattgaaataaagt

SEQ ID NO: 128956 - DNA, 381 bp, Homo sapiens
acctggtttaaggaatttaatattcgttttgttacctccttcaagctgttatcttctagaagaagatgaatctgcaaaacttattatatttactataaaccataataaaaagtcctgttaatgccttttggtgatttgatggaaagttaccctgggctcagttcccacttgatctaggtcacagggaggaaaagtgaggttgggaattgatattcttttcctatacttctgggtttgaatgcatctttttatctggtaaaactttgataaaggtcaaatgagatccagtcatttcaatggtttcctttttctttatttgtaaaattccctatttgactcacacagataatttttgaagtaaattacctttggggaaaattt

SEQ ID NO: 128957 - DNA, 502 bp, Homo sapiens
ttatctagaggatccctcataggtcgcaggaccgtaaaacccaggcctcgacccgtcagcctccagccgctctccgaggcaccttgcagggggtgggatggcagtggggagcctctcacaacaggaactggggtcccagatgctgcccggagcctggaactgcgagtggccgtggcggtggctgtgctgctcttatacgggacaccccggcacccgaaggtcgagcagggacccagcccctgccacagcacctgccaagcatctgggtgacactgtggtcgggtggggcggggggcttaagtcaggtgaatttgtcagctcgggcagctgtgacaaagttgcacagaccctggtggcttcaactgcaggaactgattctcctggaagcccgagatccaagggctggctcttccgaggccccgcttcccgctcttgcacaccgtcttcctgaggcgccctcacatggccatccctcggggcgtgtctgtcccaatctcctctt

SEQ ID NO: 128958 - DNA, 167 bp, Homo sapiens
agcctcagacgaccgcatcggtgtgactggaagctagagcctcaaatagctgtgtcagtgtgactggatgtgtcagtgtgactgtgtcagtgtgactagagccttagatggctgcgtctgtgtgactagaccctggagccttagatggccacgtcggtgtgactgga

SEQ ID NO: 128959 - DNA, 378 bp, Homo sapiens
atcgttgaagcctgtgtgccagaaatgtggggaacggagggacacagctgcatctggattgggtgaggggcagagagaaggtcatttgtaaacctctaggcagacaaagggcccttaggaagtgccagggctgggcagtcccctgggagctctggggcgctgcagaggcgccaggacagtgagccaagatgcgtctgtggagcagtttggggcagcccttcctgcccattctggcctacccctgggattgggaggtggccggggctggtgagatgcccaagacctgcagggctggagcgcagtgggctgggagctggctggattccagggctgctgtgagtaggagcagggttttatctgggtgacaggtagtcttgg

SEQ ID NO: 128960 - DNA, 366 bp, Homo sapiens
gcaagataccgaggaaagtgtgggtgacacctggtccggtgggtgcaggtgaggagacagaggcactactgcaaggggcacccctgaagtagtgtttccccatgagtggtctgaaagccacctgaacccaagtcacctgggagcctttaactgcagattcctggtttcacctcaagagtctgaatttgtagatgggtgatgcccagaaatctacattgtgaagagctccccagaggattctgctgcacagtaaagtgtctctcaagtctacactgcttatgactgtgcgcaatgccctttggatttatttcccttgcatctaacatggtacttggcaattactcagctgccagtaaataatcaata

SEQ ID NO: 128961 - DNA, 433 bp, Homo sapiens
agtgaggatggtgggggggcctgaaaagggaaaagggcaccgtactgtaaatgtatgaatggggttttctgtgggggccacaccggagcatcacagttctttgaaggacaggagagaaggtcagtgcctggatccccaggctaagtaccaggcgctgctttaggatagcctagaagggtggcccctgggcctcattctccacactgtcccaccccttttgaccacctcatctagccatcttgatgatcagttaagataagaatctctagtgaggctacatttttttgtttcctgaataatgcatgatgtccactgaacacatgttactagatgacagtgttgggctcagataaaacttacaacaaaattaatctgatgcagcctccatggctcacatgatccccaccatgtatgaaatgggctgggcacccag

SEQ ID NO: 128962 - DNA, 462 bp, Homo sapiens
gaggctgaggtgggcaaatcatgaggtcaggagatcgagaccatcctggctaacacggtgaaaccccgtctctactgaaaatacaaaaaattagctgggcgtggtggtgggcacctgtagtcccagctactcaggaggctgagacaggagaatggtgtgaacctgggaggtggagcttgcagtgagccaagatggggccactgcactccagcctgggtgacagagcaagactctgtctcagaaaaaaaaaaaaaaaaaaaaaaaaaagcaaagaacctttccaagccgaggtcaaagccagagagagatgggatgacagaaggtgggtcagagagatgtaatgtgcaaaggactcaacccactgttgatggctttgaagttggaagaaagggccacaagccaaggaatgtggctggcctctagagctggaaaagacaaagaaagagagtctctcctagagcc

SEQ ID NO: 128963 - DNA, 786 bp, Homo sapiens
aagtctcttgcccacttagcaattacagagaagggatatatgggtttatagtaaatgtgacaagtaagtccagggggccctgggaacacacaggagaggcacagaacttgaacccagggtgtcagggaaggagtcctggggaaagtgaggtctcagctaacatctgaaggctgaacaggagtttgacatatgaatggggtgaggggatgtgggagctgggggccggatatctgaggaaacagttcagctttatttcagctggccgtgtggctttgagcaaacaagtcacaaaaattctctcagattcccattactaaaatggggataaaaggaggactaccagatgggcaatatagcgagacaccacctttacaaaaaattttttagaaattagctgggcatggtggcacacacctgtagtcacggctacttgggaagctgaggtgagaggatcacctgagcccaggagtctgagactacagtaggctatcacaaactgacgccagctgggtgacagagcaagacctgtctaaaaaaaataaaattaataacaaagaggggactagcagagcatgtgggaagtagtaagtccacttgtagtaatagcacttgtgattatcacttcacagatcaagtagtcatatttagcctatcatcaggactgatttaaggtgtagggcgaagtttcatttccattaattagtgtgttgttcggcagggaggtcaactgtattcccgactggggagccagtcatgggtgggttgagcactgggtgggaccttttt

SEQ ID NO: 128964 - DNA, 498 bp, Homo sapiens
catatttttggctaggaattcttccattttatctaagttgtctaattagttggcttataattatgcatagtatccccttataatcctttttatttttgtaagagtaacagtaatgtttcccttttcatttctgattttaaccctttgagtcttctttttttcttgatcagcctagctaagtttgccaattttgttatcttttcaaagaaccaactttgtttagttgatttttttgttacttttctgtcctgtatttcatttatttccacttgttgccttttgattttaatatttagttcatttatatttaatgtaattactcatgaagtaggagttaaacctgccattttgctatttgttttccatgtgtctttttgtctcttgtttttctattccttcattactactttttttgtgtgttaaatagatatttctagtatgccattttaattccattattgtttctttatctttttttagtggcttccctggggatta

SEQ ID NO: 128965 - DNA, 503 bp, Homo sapiens
ggtggtttactattctgttactaatgggaagttcttgaggcttatacttgcctcctcctacaataataactctcatttcatggatcagagagcaaatgtgaagattctgccactgtctgaatgtgtctactccaattatatattcaagagcttgggggaataaccatagggtgggtaatctgatttacttgtcacaaacataggtcaaaactccactatcatcttacctccataagcccacatttaagctcgtgaaccagtgtaataatgtgggttctcagaaattaacatcaattcagagctagtgtctaatatcccccaaaagatctggctatttccttttccctatgctgtcaccacggtaaatggctataggtccctttggagaaggtttgggataaggtttacagtatatatttatggcagtgctccggggtgtttcatcaaggggacctatcctctcctttgatcacagagctctaggtctatgaactttttttttt

SEQ ID NO: 128966 - DNA, 376 bp, Homo sapiens
ctgcaggggagccatgatcacaccactgcactccaacttgggtgacagagcaagaccctgtctcaaaacaaaaagaaaggctgagagagcaaatgaaggacagtttctcttcatgtggccgaacccataaaatatgaaaagagttgccagagataatattttctattatatggaatattgaacagagggggctggtctgaaaggagaaaagaataaatgcatagaaagaagaaaagagagtacaaatgaaaagagagacagactcctgatggcctccagttctagctgcagtccttctaaagtcagactacatttctgctattgaaatccataggacactcacatcttaaaatattccgtcctgcttaatctttgg

SEQ ID NO: 128967 - DNA, 249 bp, Homo sapiens
tttgataataagtgatctctggcaaatatgaagaaataatttaaaagaagtttaaaagaaactaaatgtattctaataaagtagagacaatgaggataaggtattctttcaaacagcctctaggaacaaaggaagactacatgcaagtctgcatggggaaataagaaattttcttgatctcaccaatcttcctcctcttggagtcactctctttaatcaccaaccaaacagcttcccaaactagaaact

SEQ ID NO: 128968 - DNA, 295 bp, Homo sapiens
cgaatgttctggcacttgggagagggattcagaggctggaatagagtacaaagaagagacctcccagagcttttaggggagcagcactctaaaaattctgggtttgggggtcttgcagataagtcctttcagtgagcctgacaggactggaaaagactaaggcaggagtgagaaaatgggatgtgggggtgcagagtgggacagcatttcagggtatctgtttcccttggtatctagtcagcagcagctgactagatccctgaaaaaataattggatctcttcaaacgactattt
